United States Patent Application Publication US 2013/0332133 A1 - sequence listing, part 7

SEQ ID NO: 102725 - protein, 175 aa, Unknown
  Bacterial polypetide isolated from the Sargasso Sea
MSQNPTKHTKVLIIGSGPAGYTAAVYAARAMLNPILVYGSEPGGQLTTTTDVENYPGFADVIQGPWLMDQMKDQAKAVGTEMIEDHIASVNLKSQPFEAIGDSGQKYSADSIIISTGAQARWLNIKSEQEFRGFGVSACATCDGFFFKDKEVAVVGGGNAAVEEAMFLTKFASKS

SEQ ID NO: 102726 - protein, 190 aa, Unknown
  Bacterial polypetide isolated from the Sargasso Sea
MNNKSSKHTKVLILGSGPAGYTAAIYASRAMLKPILVYGSQPGGQLSTTTDVENYPGYSKVIQGPWLMEEMKGQAEAVGTEMIQDHINKVDLSVKPFKAVGDSGNVYTADSLIISTGAQARWLNIKSEQDFRGFGVSACATCDGFFFKDKEVAVVGGGNAAVEEAMFLTKFASKVKLIHRRNELRAEKML

SEQ ID NO: 102727 - protein, 276 aa, Unknown
  Bacterial polypetide isolated from the Sargasso Sea
MENKEKTSNIENVVIIGSGPAGYTAAIYAARANLQPLLVTGFNSGGIPGGQLMTTTFVENYPGFPDGVLGPELMDLMKAQAERWGTNLYESDVVSINTHLRPFELKTLDGTITANSIIIATGASANRLGVINEDKFWSKGISACAICDGATPQFRDEELAVIGGGDSACEEAAYLTKYGSKVHLIVRSEKLRASAAMVDRVKANPKIEIHWNTIVEKANGSEWLERIEIIHSNEGKGEINIKGLFYAIGHTPNTKFLSNKIELDNKGYIACKSGRP

SEQ ID NO: 102728 - protein, 255 aa, Unknown
  Bacterial polypetide isolated from the Sargasso Sea
GPELMDRMLKHVESLEVEVIFDHIESTDLSSKPFTLTGNVNSYISDSLIIATGASAQYLGLDSEQAYMGKGVSACATCDGFFYKDKDVAVIGGGNTAVEEALYLSNLCSTVTLIHRRDSLRAEKILQERLFKKEKEGNVKIIWDHELVEVLGDDAVVNGIKIKSTKDSSETELSLSGLFIAIGHKPNTDLFVDQIDMENGYLKIISGTDGNSTGTSIPGVFAAGDVSDHIYRQAITSAGSGCMAALDAEKYLAEL

SEQ ID NO: 102729 - protein, 94 aa, Unknown
  Bacterial polypetide isolated from the Sargasso Sea
IKLKNKDSSSSIIDLHGVFIAIGHNPNTEIFDGQLEMKDGYIVIKSGLDGSVTQTSVPGVFAAGDVADKVYRQAITSAGFGCMAALDAEKFLSE

SEQ ID NO: 102730 - protein, 182 aa, Unknown
  Bacterial polypetide isolated from the Sargasso Sea
MSEKPTKHTKVLIIGSGPAGYTAAVYAARAMLKPMLVAGMQPGGQLTITTDVENYPGFADVIQGPWLMEQMREQAKAVGTDLVEDHIQSVNLKSKPFEAIGDGGQKYTADSIIISTGAQARWLNIESEEKFKGFGVSACATCDGFFFKDKTVAVVGGGNAAVEEAMFLTKFASKVQLIHRRN

SEQ ID NO: 102731 - protein, 205 aa, Unknown
  Bacterial polypetide isolated from the Sargasso Sea
MSEKPTKHTKVLIIGSGPAGYTAAVYAARAMLKPMLVAGMQPGGQLTITTDVENYPGFADVIQGPWLMEQMREQAKAVGTDLVEDHIQSVNLKSKPFEAIGDGGQKYTADSIIISTGAQARWLNIESEEKFKGFGVSACATCDGFFFKDKTVAVVGGGNAAVEEAIFLTKFASKVQLIHRRNELRAEKLLQKKLMENKKIEIIWD

SEQ ID NO: 102732 - protein, 185 aa, Unknown
  Bacterial polypetide isolated from the Sargasso Sea
MGKGVSACATCDGFFYKNKKVLVVGGGNTAVEEALYLSNIASSVTLIHRRDSLRAEKILQDKLFKKENIEIMWDSELAEVKGDNMGVTSAVIKSKKDSSEQDIAFDGVFIAIGHKPNTDIFADQLDMDEGYIIVKNDSDYATQSNVPGVFAAGDVTDKIYRQAITSAGSGCMAALDAEKFIDSLE

SEQ ID NO: 102733 - protein, 229 aa, Unknown
  Bacterial polypetide isolated from the Sargasso Sea
MSEKPTKHTKVLIIGSGPAGYTAAVYAARAMLKPMLVAGMQPGGQLTITTDVENYPGFADVIQGPWLMEQMREQAKAVGTDLVEDHIQSVNLKSKPFEAIGDGGQKYTADSIIISTGAQARWLNIESEEKFKGFGVSACATCDGFFFKDKTVAVVGGGNAAVEEAMFLTKFASKVQLIHRRNELRAEKLLQKKLMENKKIEIIWDSVVEEVIGDEDPKNVKGLKIKNIK

SEQ ID NO: 102734 - protein, 314 aa, Unknown
  Bacterial polypetide isolated from the Sargasso Sea
MKEIEKNLVIIGSGSAGLTAAIYAARANLSPLVIEGLQPGGQLTITTDVENYPGFSDIVQGPWLMDQMKAQAKNVGAEIINDLVVQVDFKSKIKKIICDSKLLINAKSVIICTGAQARWLGLESELKYNGKGVSACATCDGFFYKNKTVAVIGGGNTAVEEALYLSNLCSNVILIHRRDKLRAEKILQDRLFKKQNIEVTWDHTLEEILGDEKGVNKIKLLSKKTNKFKMLAIDGVFVAIGHIPATDCFKNSIQLDKEGYIVLKEKGTTRTDIEGVFVAGDCVDKIYRQAVTAAGMGCMAALDAEKWLQENYSN

SEQ ID NO: 102735 - protein, 312 aa, Unknown
  Bacterial polypetide isolated from the Sargasso Sea
MPEKTKLLIIGSGPAGYTAAVYGSRALLEPILLQGIQPGGQLTITTEVENWPGVKEIQGPDLMTNLESHAKSAGTRIMNETIIKLNLKKYPFIAISEGGNKYEAESIILATGAQAKWLGLKSEEKYKGFGVSACATCDGFFFRNEIITVIGGGNTAVEEALFLTNFARKVILIHRRDTLRAEKILQERLFKNPKVEVIWNSQLKEIIGTDNPLSVEGIRIENLLDKKELEISCKGVFIAIGHAPSNELIINQLETHNGGYVVTKPNSTETSIPGVFAAGDITDFKYRQAVTAAGMGCMAALEVEKFLAEKIN

SEQ ID NO: 102736 - protein, 315 aa, Unknown
  Bacterial polypetide isolated from the Sargasso Sea
MNNKSPKHTKVLILGSGPAGYTAAIYAARALLKPILVFGSEPGGQLTTTTDVENFPGFAKVIQGPWLMEEMKGQAQSVGTEMIQDHIKKVDLSKKPFSAHGDSGQVYTADSIIISTGAQARWLNLESEQKFRGFGVSACATCDGFFFKEKEVAVVGGGNAAVEEAMFLTKFASKVYLIHRRNELRAEKLLQEKLKANKKIQIIWDSVVEEVTGTDEPKGVSGVKIKNVKTNKTSDLKVDGLFIAIGHDPATSLFKDQLKMDKEGYLITKPDSTVTNIPGVFAAGDVRDKIFRQAVTAAGMGCMAALEAEKHLSSK

SEQ ID NO: 102737 - protein, 212 aa, Unknown
  Bacterial polypetide isolated from the Sargasso Sea
MEKKHTKLLILGSGPAGYTAALYASRANLKPLLVTGLEIGGQLTTTTDVENWPGDSDGLQGPDLMERMKKHIEKFDTEIVVDHIKETDLSQKPYKLIGDNTAYTCDSLIIATGASAKYLGLESEKTYLGKGVSACATCDGFFYKNLEVIVIGGGNTAVEEALYLSNIASKVTLIHRRDKLRAEAMLVDKLNQKITDNKIEVIWNANLVEVLG

SEQ ID NO: 102738 - protein, 320 aa, Unknown
  Bacterial polypetide isolated from the Sargasso Sea
MTDKVSATSKEIPHEKVVIIGAGAAGLTAGIYTARANLSPVIIAGLQPGGQMTITTDVENYPGFAEVIQGPWLMTKMQEQAENVGARVIYDLVVGLDTSTRPFLLTFDSGKAIKASSVILATGAQARWLGLESETLFNGRGVSACATCDGFFFKDRDVAVVGGGNTAVEEALYLSKICRSVTLVHRRDSLRAEQIMQDRLLKKDNVAIEWNRKVSEVIGDDIGVTGLNLASTIDDGYKTISVHGMFVAIGHVPATAAFLGEVNLDEEGYIIAEAGGTRTSVDGVFAAGDCVDKIYRQAVTAAGMGCMAALDAERWLGERE

SEQ ID NO: 102739 - protein, 382 aa, Unknown
  Bacterial polypetide isolated from the Sargasso Sea
MENKEKISNVENVVIIGSGPAGYTAAIYAARANLQPLLVTGFNSGGIPGGQLMTTTFVENYPGFPDGVLGPELMDLMKAQAERWGTNLYESDVVSINTDSHPFELKTLEGIIKSNSIIIATGASANRLGVINEDKFWSKGISACAICDGATPQFRDEELAVIGGGDSACEEAAYLTKYGSKVHLIVRSEKLRASAAMVDRVKANPKIKIHWNTKVDKADGSEWLERIETIHSQEGKGEINIKGLFYAIGHTPNTKFLGNKIDLDNKGYIACKSGRPETSIEGIFAAGDVVDSEWRQGVTAAGTGCMAALATERWLAEKNLAKTIVRETPEPEKKLNSSDFNEEEVNEDTFDSNSEWQKGSYALRKLYHESKKPILVIFSSPS

SEQ ID NO: 102740 - protein, 192 aa, Unknown
  Bacterial polypetide isolated from the Sargasso Sea
MEQQLIILGSGPAGYTAAVYAARANLKPLLITGLEVGGQLTTTTEVENWPGDFEDLQGPDLMVRMQKHAEKYDVDIRTDYVKSVDLSNQPLVLHGEKDTYETKSLIIATGASAKYLGLDSEKAFLGKGVSACATCDGFFYKDQEVAVIGGGNTALEEALYLSNICSKVHLIHRRDEFRGEKILQDRVFKKVE

SEQ ID NO: 102741 - protein, 228 aa, Unknown
  Bacterial polypetide isolated from the Sargasso Sea
AVDFKKNPLSLTGEKDEYVSDSLIIATGASAKYLGLASEKAFLGRGVSACATCDGFFYKDQEVAVIGGGNTAVEEALYLSNICSKVSVIHRRDEFRAEKILQDRLFKKVEEGKIELVLNSNLDEVIGDEVVNAIKVKDNNGNLKELKVQGVFVAIGHKPNTDIFEGHLDMEGGYIKTNTGFNIGSTSTSVPGVFAAGDVADYTYRQAITSAGFGCMAALDAENYLSSS

SEQ ID NO: 102742 - protein, 200 aa, Unknown
  Bacterial polypetide isolated from the Sargasso Sea
ASAKYLGLESEKKYLGKGVSACATCDGFFYKDQQVAVIGGGNTAFEEALYLSNICSKVFLIHRRSSFRAEKILQERVFKKVEEDKIELILDSNLKDIQGENVVSKIIVENNDGEETEINLEGVFIAIGHTPNTTIFNNQLDMKDGYIVTKSGFHIGSTATSVPGVFAAGDVADFNYRQAITSAGFGCMAALDAESYLSGI

SEQ ID NO: 102743 - protein, 208 aa, Unknown
  Bacterial polypetide isolated from the Sargasso Sea
MSQNPTKHTKVLIIGSGPAGYTAAVYAARAMLNPILVYGSEPGGQLTTTTDVENYPGFSEVIQGPWLMDQMKEQAKAVGTEMIEDHIGSVNLKSSPFEATGDSGQKYTADSIIISTGAQARWLNIKSEQEFRGFGVSACATCDGFFFKDKEVAVVGGGNAAVEEAMFLTKFASKVKLIHRRDSLRAEKMLQKKLMENKKIEIIWDSSS

SEQ ID NO: 102744 - protein, 155 aa, Unknown
  Bacterial polypetide isolated from the Sargasso Sea
MSQNPTKHTKVLIIGSGPAGYTAAVYAARAMLNPILVYGSEPGGQLTTTTDVENFPGFAEVIQGPWLMDQMKEQAKAVGTEMIEDHISNVNLKTSPFEATGDSGQKYTADSIIISTGAQARWLNLDSEQEFRGFGVSACATCDGFFFKNKEVAVV

SEQ ID NO: 102745 - protein, 311 aa, Unknown
  Bacterial polypetide isolated from the Sargasso Sea
MAKHSKILILGSGPAGYTAAIYAARAMLKPILVFGSEPGGQLTTTTDVENFPGYSKVIQGPWLMEEMKGQAKAVGTEMIQDHIKKVDLSKKPFEAIGDSGQVYSADSFIISTGAQARWLNLKSEQEFRGFGVSACATCDGFFFKEKEVAVVGGGNAAVEEAMFLTKFASKVKLIHRRNELRAEKMLQAKLKANKKIEIIWDSVVEDVIGDTNPKSVKAIKIKNVKTNKTTELKVDGLFIAIGHDPATSLFKGQLNMDKEGYIITNPDSTITNVPGVFAAGDVKDKIFRQAVTAAGMGCMAALEAEKHLSSK

SEQ ID NO: 102746 - protein, 254 aa, Unknown
  Bacterial polypetide isolated from the Sargasso Sea
MSQNPTKHTKVLIIGSGPAGYTAAVYAARAMLNPILVYGSEPGGQLTTTTDVENYPGFADVIQGPWLMDQMKDQAKAVGTEMIQDHIQSVNLKSTPFEAVGDTGQKFTADSIIISTGAQARWLNIKSEQEFRGFGVSACATCDGFFFKEKEVAVVGGGNAAVEEAMFLTKFASKVKLIHRRDSLRAEKMLQKKLMENKKIEIIWDTVIEDVIGDKEPKNVKGIKVKNVKTNKIEEIKVDGLFVAIGHDPDNFSI

SEQ ID NO: 102747 - protein, 249 aa, Unknown
  Bacterial polypetide isolated from the Sargasso Sea
MGPEMMQVFKNQAERFGTKILTETVDSIEKIENGFKLTTSKNTYEFKTVIISSGASANWLDVKGEKELQGHGVSACATCDGFFFKDKNVIVVGGGDSAMEEALFLTKFAKNVTVVHRRDSFRASKIMQDRVLGHDQIDVLWNKEVVEIKGEGQVSSVLLKDSQTNEIEEKEIDGVFIAIGHTPNVSFLNGFLELDEKGYIKTGSTTATSTSVPGVFAAGDVADSIYRQAVTAAGTGCQAAIDAERWLEN

SEQ ID NO: 102748 - protein, 309 aa, Unknown
  Bacterial polypetide isolated from the Sargasso Sea
MSQNPTKHTKVLIIGSGPAGYTAAVYAARAMLNPILVYGAEPGGQLTTTTDVENYPGFADVIQGPWLMDQMKDQAKAVGTEMIEDHIASVNLKSEPFEAVGDSGQKYTADSIIISTGAQARWLNIKSEQEFRGFGVSACATCDGFFFKDKEVAVVGGGNAAVEEAMFLTKFASKVKLIHRRDSLRAEKMLQKKLMENKKIEIIWDSVVEDVIGDKEPKNVKGIKIKNVKTNKVEELKLDGVFIAIGHDPATSLFKEQLDMDNDGYLITKPDSTETNIPGVYAAGDVKDKTFRQAVTAAGMGCMAALEAE

SEQ ID NO: 102749 - protein, 208 aa, Unknown
  Bacterial polypetide isolated from the Sargasso Sea
MNQNPTKHTKVLIIGSGPAGYTAAVYAARAMLNPILVHGMEPGGQLTTTTDVENYPGFAKVIQGPWLMDQMKDQAKAVGTEMIEDHISSVNFKSKPFEAVGESGKKYTADSIIISTGAQARWLNLESEKKFRGFGVSACATCDGFFFKEKTVAVVGGGNAAVEEAMFLTKFASKVKLIHRRDKLRAEKMLQKKLMDNKKIEIILGLSR

SEQ ID NO: 102750 - protein, 311 aa, Unknown
  Bacterial polypetide isolated from the Sargasso Sea
MTKHSKVLILGSGPAGYTAAIYAARAMLKPILVFGSEPGGQLTTTTDVENFPGYSKVIQGPWLMEEMKGQAKAVGTEMILDHIKKVDLSKKPFTATGDSGQIYTADSFIISTGAQARWLNLKSEQEFRGFGVSACATCDGFFFKEKEVAVVGGGNAAVEEAMFLTKFASKVKLIHRRNELRAEKMLQAKLKANKKIEIIWDSVVEDVIGEKNPKSVKAIKIKNVKTNKTSEIKVDGLFIAIGHDPATSLFKGQLNMDKEGYIVTKPDSTVTNVPGVFAAGDVKDKVFRQAVTAAGMGCMAALEVEKFLSSK

SEQ ID NO: 102751 - protein, 290 aa, Unknown
  Bacterial polypetide isolated from the Sargasso Sea
MSQNPTKHTKVLIIGSGPAGYTAAVYAARAMLNPILVYGAEPGGQLTTTTDVENFPGFADVIQGPWLMDQMKEQAKAVGTEMIEDHISSVNLKTTPFEAVGDTGQKYTADSIIISTGAQARWLNIKSEQEFRGFGVSACATCDGFFFKDKEVAVVGGGNAAVEEAMFLTKFASKVKLIHRRDSLRAEKMLQKKLMENKKIEIIWDTVVEDVIGDKDPKNVKGIKVKNVKTNKIDEIKLDGVFIAIGHDPATQLFKDQLSMDNEGYLITKPDSTETNVPGVYAAGDVKDKT

SEQ ID NO: 102752 - protein, 312 aa, Unknown
  Bacterial polypetide isolated from the Sargasso Sea
MTEKIHHKLIVLGSGPAGYTAALYAARSNLQPALITGVEVGGQLTTTTEVENWPGGHAELQGPELMMQMAEHVERFEASIVNDHIHTAKLSKDALILMGDQAEYSCDALIIATGASAKYLGLESEEHFKGKGVSACATCDGFFYRGQEVAVIGGGSTAVEEALYLSNITKKVYLVHRRDQLRAEKILQDRLLAKDNIEPIWNSQLEEVLGDDSGVTGMVIKSNDGDKNTIDLSGVFIAIGHTPNTDIFSDQLDMENGYIKILSGTDGNATATNMPGVFAAGDVADHIYRQAITSAGFGCMAALDAERYLDAL

SEQ ID NO: 102753 - protein, 312 aa, Unknown
  Bacterial polypetide isolated from the Sargasso Sea
MSDNHNKLIILGSGPAGYAASIYAARAGLDPIIIAGMQEGGQLTTTTDVENWPGDSDGLQGPELMERMKKHAQEFDVEIINDHINEVSLTQKPFTLKGVNEYSCDSLIIATGASAMYLGLPSEKKYLGKGVSACATCDGFFYKDQDVAVIGGGNTAAEEALYLANICSKVYLVHRRDELRAEKILQDRIFKQEEAGKIEILWDTQLKEVCGDNMGVTSIKLNNKGSEISKEVMGVFIAIGHKPNTEIFDGQLDMDNGYIIIKSGLNGSVTSSSVEGVFAAGDVSDQIYRQAVTSAGFGCMAALDAEKYLSES

SEQ ID NO: 102754 - protein, 174 aa, Unknown
  Bacterial polypetide isolated from the Sargasso Sea
MGFFYKDEEVAVVGGGNTAAEEALYLTNLCKKVHLIHRRDSLRAEKILQDRIFEKANEGKINLIWNNELKEIKGDGNIVTHLNLSNYNDIQVKGVFIAIGHNPNTEIFKNQIDMKDGYILINTGLNGNVTGTSVPGVFAAGDVADSVYRQAITSAGFGCMAALDAQKFIEENNI

SEQ ID NO: 102755 - protein, 312 aa, Unknown
  Bacterial polypetide isolated from the Sargasso Sea
MSENQNKLIILGSGPAGYAAGIYAARAGLNPIIIAGMQEGGQLTTTTDVENWPGDSDGLQGPELMERMKKHALQFDVQVINDHINSVDLSNQPFKLYGNSEYECESLIISTGASAMYLGLPSEKEYLGKGVSACATCDGFFYRDQEVAVIGGGNTAAEEALYLANICSKVYLVHRRDELRAEKILQDRVFKQEKEGKIEILWDTQLKEVIGDDKGVTSIKLDTKGEESTKDVMGVFIAIGHKPNTEMFSDQLEMDNGYIIIKSGLNGSVTSTSIEGVFAAGDVSDQVYRQAITSAGFGCMAALDAEKYLSEK

SEQ ID NO: 102756 - protein, 263 aa, Unknown
  Bacterial polypetide isolated from the Sargasso Sea
MSNDHHKLIILGSGPAGYAAGVYAARAGLNPIIIAGMQEGGQLTTTTDVENWPGDSDGLQGPELMDRMKKHVEQFDVKVINDHINEVDLKTKPFKLIGTSEYTSDALIIATGASAMYLGLPSEQNYLGKGVSACATCDGFFYKDQEVAVIGGGNTAAEEALYLSRICSKVYLVHRRDELRAEKILQDRIFKEEKAGKIEILWDSQLKEVLGDDMGVNGMMIDTKGSEVKKDVMGIFIAIGHKPNTDIFNNKLDMENGYILIKS

SEQ ID NO: 102757 - protein, 304 aa, Unknown
  Bacterial polypetide isolated from the Sargasso Sea
MDDLAIIGSGPAGYTAGIYAGRANLKPVLFEGLESGGQLMLTTDVENYPGFDEGIMGPEMMQVFKKQAERFGTKILTETVSKIEKIEEGFKLTTSKDTYEFKSVIISSGASANWLGVKGEKELQGYGVSACATCDGFFFKDKNVIVVGGGDSAMEESLFLTKFAKKVTVVHRRDEFRASKIMQERVLNHEQIEVAWNKEVIEIKGDKQVSSVILKDSNSNEEEEKEIDGVFVAIGHTPNVEFLDGFVELDEKGYIKTGFTSSTSTSMSGVFASGDVADSIYRQAVTAAGTGCQAAIDAERWLEN

SEQ ID NO: 102758 - protein, 319 aa, Unknown
  Bacterial polypetide isolated from the Sargasso Sea
MTESIHHKLIILGSGPAGYSAAVYAARANLKPVIITGSEPGGQLMTTTDVENWPGDPEGLLGPALMDRMLEHAKRFDTEVIYDHIESAELGSRPFTLNGGNAKYTADALIIATGSTARYLGLESEEKYKGKGVSACATCDGFFYKDQDVIVVGGGNVAVEEAIYLSNIAKNVTLIHRRDELRAEKMLQEKLFEKTGENGNIKILWDHVLDEVLGDESGVNGIVCSNVNEPSDQTQLDVQGVFIAIGHDPNTSFFGDGLKLDDSNYIILDESNARFSTQTSIEGVFAAGDVADPVYRQAVTSAGSGCMAALDAEKFLEQS

SEQ ID NO: 102759 - protein, 310 aa, Unknown
  Bacterial polypetide isolated from the Sargasso Sea
MHSKVLIIGSGPAGYTAAIYAARAMLEPTLVQGLQPGGQLTITTDVENYPGYGDVIQGPWLMEQMQEQAKNVGTNIINDIIKSVDFKCKPFKAISESGTEYTADSVIISTGAQARWLGLDSEKKFQGYGVSACATCDGFFFKEKKVAVIGGGNSAVEEALYLTNFASKVYLVHRRDELRAEKILQDRLFKNEKVECVWDSELKEIVGDEDPLNVKSINIKNTKTNETSSIELDGVFVAIGHDPATQIFRDQVEMDEDGYIITKPDSTLTNVEGVYAAGDVKDKIYRQAVTAAGMGCMAALEAEKYLAELS

SEQ ID NO: 102760 - protein, 314 aa, Unknown
  Bacterial polypetide isolated from the Sargasso Sea
MSQNPTKHTKVLIIGSGPAGYTAAVYAARAMLNPILVYGSEPGGQLTTTTDVENFPGFADVIQGPWLMDQMKEQAKAVGTEMIEDHISSVDLKKTPFEAIGDTGQKYTADSIIISTGAQARWLNLKSEQEFRGFGVSACATCDGFFFKDKEVAVVGGGNAAVEEAMFLTKFASKVKLIHRRDNLRAEKMLQKKLMENKKIEIIWDSVVEDVIGDKDPKNVKGIKIKNVKTNKIDEIKLDGVFIAIGHDPATQLFKNQLSMDKEGYLITKPDSTETNVPGVYAAGDVKDKTFRQAVTAAGMGCMAALEAEKFLSH

SEQ ID NO: 102761 - protein, 312 aa, Unknown
  Bacterial polypetide isolated from the Sargasso Sea
MSDNHHKLIILGSGPAGYAASIYAARAGLEPIIIAGMQEGGQLTTTTDVENWPGDSDGLQGPELMDRMKKHAQQFDVDVINDHINSVELKERPFKLQGTSEYTCDALIIATGASAMYLGLPSEKEYLGKGVSACATCDGFFYKDQEVAVIGGGNTAAEEALYLSRICSKVYLIHRRDELRAEKILQDRIFDEEKNGKIEVLWDSQLSEVLGNDMGVTGIKIDTKGNISEKSVMGVFIAIGHKPNTDIFDGQLDMDNGYIIINSGLNGSVTRSSIDGVFAAGDVSDQIYRQAVTSAGFGCMAALDAEKYLSEK

SEQ ID NO: 102762 - protein, 315 aa, Unknown
  Bacterial polypetide isolated from the Sargasso Sea
MSQNPTKHTKVLIIGSGPAGYTAAVYAARAMLNPILVHGSEPGGQLTTTTDVENYPGFADVIQGPWLMDQMKDQAKAVGTEMIQDHIQSVNLKSTPFEAVGDTGQKFTADSIIISTGAQARWLNIKSEQEFRGFGVSACATCDGFFFKEKEVAVVGGGNAAVEEAMFLTKFASKVKLIHRRDSLRAEKLLQKKLMENKKIEIIWDTVIEDVIGDKEPKNVKGIKVKNVKTNKIEEIKVDGLFVAIGHDPATSLFKDQLKMDNEGYLITKPDSTETNVPGVYAAGDVKDKTFRQAVTAAGMGCMAALEAEKHLSHK

SEQ ID NO: 102763 - protein, 315 aa, Unknown
  Bacterial polypetide isolated from the Sargasso Sea
MVDKSQKKIIILGSGPAGYTAAIYAARANLNPILITGIEKGGQLMTTTDVENWPGDHDGLLGPDLMNRMEKHALKYNVEIIFDHIKEVNFQNAPYILVGDSDTYNADALIISTGASAKYLGLESEKRFMGKGVSACATCDGFFYKEKNVCVVGGGNTAVEEALYLSNIAKHVTLIHRRDSLRAEKILQNRLFDKKNVSIEWSYTLQEVKGNDMGVTSIAIESTDQKQVKEIPTDGLFIAIGHNPNTEIFKGHLSMDNEGYLEVNPNKTEYATQCDKAGIFAAGDVIDKVYRQAITSAGTGCMAALDAEKYLESLS

SEQ ID NO: 102764 - protein, 304 aa, Unknown
  Bacterial polypetide isolated from the Sargasso Sea
MLDLAIIGSGPAGYTAGIYASRASLKPVLFEGLESGGQLMLTTDVENYPGFDSGIMGPDLMQIFKKQAERFGTEIKTETINSIKKIDGGFSLKSAKDSYEFKSVIISSGASAKWLDIKGEKELQGHGVSACATCDGFFFKEKEVIVVGGGDSAMEEALFLTKFATKVYIVHRRDSFRASKIMQDRVLDNDKIEVLWNKEVTEIHGSESVESVSLADTKDGSSSEVNIDGVFMAIGHTPNVDFLDGLVELDEKGYVKTGFTTETSTSVPGVFAAGDVADSIYRQAVTAAGTGCQAAIDAERWLDH

SEQ ID NO: 102765 - protein, 173 aa, Unknown
  Bacterial polypetide isolated from the Sargasso Sea
CDGFFYKDQIVTVVGGGNTAAEEALYLSNICSQVNLVHRRDELRAEKILQDRVFDKQNIKIYWNSTLNEVLGDELVVNAVELITENKKNKIESAGVFIAIGHQPNTSIFENQLDMNNGYIIINSGLNGSVTATSVPGVFAAGDVSDQIYRQAITSAGFGCMAALDADKYLSNQ

SEQ ID NO: 102766 - protein, 324 aa, Unknown
  Bacterial polypetide isolated from the Sargasso Sea
MNDNGRSQHEKVVIIGSGPAGWTAAIYAARAEMNPFVIEGNISRTMIPGGQLMFTTEVENYPGFKDGVDGQALMLEMKAQALRFDTRVLTEDVVDIDKDVHPFRLTTTNGTVVTADALILATGANANWLGLPNEERLAQSGGGVSACAVCDGALPHFRDKVLAVIGGGDTAMEDALYLTKFAKEVVIIHRRDELRASKIMAERAMESEKITFAWNTVVTEVLGDDVITGLQLKDVHSGEPRELEVGGLFVAIGHSPNTGFLKGVVELKDNGYVDTPIPWRTQTSVPGIFAAGDVMDDYYRQAVTAAGTGCMAALEAERWLAHGG

SEQ ID NO: 102767 - protein, 217 aa, Unknown
  Bacterial polypetide isolated from the Sargasso Sea
MTEKIENDVLIIGSGPAGYTAAIYAARANLKPHLVSGLEPGGQLTITTDVENYPGFENVIQGPWLMEQMKEQAVKVGTIFHNDIVTSVDFEKNPFTSKTESGKEFVSKSIIIATGAQARWLNLESEKKFKGFGISACATCDGFFFKDQQVAVIGGGNSAVEEAMFLTKFASKVLLIHRRDSLRAEKILQERLFNNKKIEVIWNSKVSEFVGEKIQIH

SEQ ID NO: 102768 - protein, 314 aa, Unknown
  Bacterial polypetide isolated from the Sargasso Sea
MNNKSTKHTKVLIIGSGPAGYTAAIYAARALLKPILVFGAEPGGQLTTTTDVENFPGFSKVIQGPWLMEEMKGQAAAVGTEMIQDHIGKVDLSKKPFVATSDNGQVYTADSIIISTGAQARWLNLDSETKFRGFGVSACATCDGFFFKDKEVAVVGGGNAAVEEAMFLTKFASKVHLIHRRNELRAEKLLQEKLKANKKIEIIWDSVVEEVLGTDEPKVVNGIKLKNVKNNYSSELKVDGLFIAIGHDPATSLFKNQIEMDKEGYLKTKPDSTITNVPGVFAAGDVKDKIFRQAVTAAGMGCMAALEAEKYLSH

SEQ ID NO: 102769 - protein, 316 aa, Unknown
  Bacterial polypetide isolated from the Sargasso Sea
MKNNSKKHSKVLIIGSGPAGYTAAVYAARAMLKPMLVHGMEPGGQLSTTTDVENYPGFSKVIQGPWLMDQMRDQAKAVGTEMIEDHISSVNLKSKPFEAVGDGGQKYTADSIIISTGAQARWLNIESEQKFRGFGVSACATCDGFFFKDKTVAVVGGGNAAVEEAMFLTKFASKVKLIHRRNALRAEKMLQKKLMSNKKIEIIWDTVVEEVIGDNEPKNVKGLKIKNVKTNKVEEIKIDGLFIAIGHDPATSLFKGQLNMDKEGYIVTKPDSTVTNVPGVFAAGDVKDKIFRQAVTAAGMGCMAALEAEKHLSSKA

SEQ ID NO: 102770 - protein, 311 aa, Unknown
  Bacterial polypetide isolated from the Sargasso Sea
MSTNIENILIVGSGSAGLTAAIYAARAGFSPLVLTGIQPGGQLTITTDVENYPGFQDVVQGPWLMEQMQKQAENVGARIEYDLIVDLDKDVWPFKVKTDSGKEIQAETIIIATGAQARWLGIESEEKYNGKGVSACATCDGFFFKNKNVAVIGGGNTAVEEALYLSNLCQNVTLIHRRDELRAEKILQNRLFDKKNINILWNNKVDEILGDDFGVNALKLISTKDGSETVTKIDGIFIAIGHDPSTLVFKNKIDLDQDNYIITKSGETTTSVPGIFAAGDCVDKIYRQAVTAAGMGCMAALDAEKWLANHK

SEQ ID NO: 102771 - protein, 312 aa, Unknown
  Bacterial polypetide isolated from the Sargasso Sea
MTDNTHSKLLILGSGPAGYTAAIYASRAMLEPTLLTGIEPGGQMTITTDVENYPGFADIIQGPWLMDQMKEQAISVGTNIVFDTIVDVDLSNKPFKLKSDSEKEYTCDALIIATGAQANWLGLESENKFKGYGVSACATCDGFFYKDKTVVVVGGGNTAAEEAIFLTNFASEVKLIHRRDSLRAEKILQKRLMENKKIEIIWDTEITEIVGDEDPLSVNQVVLKNKKTNSIENLKADGVFVAIGHSPSSLIFQNQLDMNDAGYIFTAADSTKTNINGVFAAGDVTDDKYRQAVTAAGMGCMAALEVEEYLSE

SEQ ID NO: 102772 - protein, 314 aa, Unknown
  Bacterial polypetide isolated from the Sargasso Sea
MKQNPTKHTKVLIIGSGPAGYTAAVYAARAMLNPVLVYGSEPGGQLTTTTDVENFPGFADVIQGPWLMDQMKEQAKAVGTEMIEDHIGSVNLKSKPFEAVGDSGQKYTADSIIISTGAQARWLNLKSEQEFRGFGVSACATCDGFFFKDKEVAVVGGGNAAVEEAMFLTKFASKVKLIHRRDSLRAEKLLQKKLMENKKIEIIWDSVVEDVVGEKDPKNVKAVKIKNVKTDKTDEIKLDGLFIAIGHDPATQLFKNQLDMDKEGYLITKPDSTETNVPGVYAAGDVKDKTFRQAVTAAGMGCMAALEAEKFLSH

SEQ ID NO: 102773 - protein, 319 aa, Unknown
  Bacterial polypetide isolated from the Sargasso Sea
MTESIHHKLIILGSGPAGYSAAVYAARANLKPVIITGSEPGGQLMTTTDVENWPGDPEGLLGPALMDRMLEHAKRFDTEIIYDHIESAELGSRPFVLNGGNAKYTTDALIIATGSTARYLGLESEEEFKGKGVSACATCDGFFYKDQDVIVVGGGNVAVEEAIYLSNIAKNVTLIHRRDELRAEKMLQDKLFEKTDNKGNIKILWNHVLDEVLGDEAGVNGIICSDVNDPSNKTELNVQGVFIAIGHDPNTSFFGDNLKLDESNYIILDDSNGRFATQTSIEGVFAAGDVADPVYRQAVTSAGSGCMAALDAEKFLEQS

SEQ ID NO: 102774 - protein, 313 aa, Unknown
  Bacterial polypetide isolated from the Sargasso Sea
MSQYHHTKVLIIGSGPAGYTAGVYASRAMLSPILIQGIEPGGQLTTTTEVENWPGDTEVQGPDLMVRMEAHAKEMGCEIIGDIVTKLEVHSRPFVATCDSGKKYTADAIILATGARAKWLGLPSEEKYKGFGVSACATCDGFFYRGQEIAVIGGGNTAVEEALFLTNFASKVTLVHRRDELRAEKILQDRLFKNPKIEPIWFHELNEVIGTESPLGVEAIRIKNTMNGKLSDVPCKGVFVAIGHAPATELVKNILDTHNGGYVKVEPGSTRTSVPGIFAAGDLTDHIYRQAVTSAGMGCMAALDAEKFIAESN

SEQ ID NO: 102775 - protein, 190 aa, Unknown
  Bacterial polypetide isolated from the Sargasso Sea
NGRGVSACATCDGFFYRNQKVAVVGGGNTAVEEALYLANIASEVHLVHRRDTFKAEKILVDRLMAKVASGNIILHTHRELEEILGDDMGVNGMRLKSTNGQPTEDVAVAGVFIAIGHKPNTDIFAGQLEMNGGYLKVQSGTEGNATQTSIEGVFAAGDVSDHIYRQAITSAGTGCMAALDAERYLDALAK

SEQ ID NO: 102776 - protein, 316 aa, Unknown
  Bacterial polypetide isolated from the Sargasso Sea
MNNKSTKHTKVLILGSGPAGYTAAIYAARAMLKPILVHGSQPGGQLTTTTDVENYPGYSKVIQGPWLMEEMKGQAKAVGTEMIQDHINKVDLSTKPFKVVGDSGQIYTGDSIIISTGAQARWLNLDSEKKFRGFGVSACATCDGFFFKDKEVAVVGGGNAAVEEAMFLTKFASKVKLIHRRNELRAEKMLQEKLKSNKKIEIIWNSIVDEVLGTNDPKSVKGIKIKSTKDNTFKELKVDGLFIAIGHDPATSLFKNQLKMDKEGYLITKPDSTETNIPGVFAAGDVKDKIFRQAVTAAGMGCMSALEAEKYLSNSK

SEQ ID NO: 102777 - protein, 275 aa, Unknown
  Bacterial polypetide isolated from the Sargasso Sea
MGKYGLSPISEQPMETAQHCRLLILGSGPAGYTAAVYAARANLSPVLVTGIAQGGQLMTTTDVDNWPGDPHGLTGPDLMARMLTHSERFGTQIIFDHIHTAKLDKRPFTLEGDAGTYTCDALIIATGASAQYLGLESEEAYKGKGVSACATCDGFFYRDKPVAVIGGGNTAVEEALYLSDICSDVTLVHRRDSLRAEAILQDQLFSRTGDEGNISLAWNHTLSEVLGDDSGVTGIQIQDTHSHQDRQIDVHGVFIAIGHTPNTELFTDQLDIQGG

SEQ ID NO: 102778 - protein, 247 aa, Unknown
  Bacterial polypetide isolated from the Sargasso Sea
MSQNPTKHTKVLIIGSGPAGYTAAVYAARAMLKPILVHGMEPGGQLTTTTDVENFPGFAEVIQGPWLMDQMKEQAQAVGTEMIEDHIASVNLKSKPFEAVGDGGQKYTADSIIISTGAQARWLNIDSEQKFRGFGVSACATCDGFFFKEKTVAVVGGGNAAVEEAMFLTKFASKVQLIHRRDKLRAEKLLQKKLMENKKIEIIWDSVVEEVVGDEDPKNVKGLKIKNVKTDEIKGIKNRWSFYCYRT

SEQ ID NO: 102779 - protein, 192 aa, Unknown
  Bacterial polypetide isolated from the Sargasso Sea
MNQNPTKHTKVLIIGSGPAGYTAAVYAARAMLKPIMVTGMEPGGQLTTTTDVENYPGFAEAIQGPWLMEQMKEQAQAVGTEMIQDHISSVNFKAKPFEAIGDGGQKYTADTIIISTGAQARWLNIESEQKFRGFGVSACATCDGFFFKDKTVAVVGGGNAAVEEAMFLTKFASKVKLIHRRNELRAEKMLQK

SEQ ID NO: 102780 - protein, 225 aa, Unknown
  Bacterial polypetide isolated from the Sargasso Sea
MNNKSTKHTKVLILGSGPAGYTAAIYAARAMLKPILVHGSEPGGQLTTTTDVENYPGYSKVIQGPWLMEEMKGQAKAVGTEMIQDHISKVDLSKKPFTAIGDSGQIYTADSFIISTGAQARWLNLKSEKDFRGFGVSACATCDGFFFKEKEVAVVGGGNAAVEEAMFLTKFASKVKLIHRRDELRAEKMLQTKLKANKKIEIIWDTVVEDIVGTKDPKSCNWCKN

SEQ ID NO: 102781 - protein, 178 aa, Unknown
  Bacterial polypetide isolated from the Sargasso Sea
SACATCDGFFYKGRDVAVVGGGNTAVEEALYLSNICRSVTLVHRRDSLRAEQIMQDRLLKKDNIAVEWNRLVVEVLGDDTGVTGLRLASTTGDEDKEISVHGMFVAIGHDPATGAFADAVKLDDEGYILADAGGTRTSVDGIFAAGDCVDKIYRQAVTAAGMGCMAALDAERWLGEQE

SEQ ID NO: 102782 - protein, 313 aa, Unknown
  Bacterial polypetide isolated from the Sargasso Sea
MTEKIENDVLIIGSGPAGYTAAIYAARANLKPHLVSGLEPGGQLTITTDVENYPGFENVIQGPWLMEQMKEQAVKVGTIFHNDIVTSVNFEKNPFTSKTESGKEFLSKSIIIATGAQARWLNLESEKKFKGFGISACATCDGFFFKDQQVAVIGGGNSAVEEAMFLTKFASKVLLIHRRDSLRAEKILQERLFNNKKIEVIWNNKVSEFVGEENPNVLKKLILENTLDGTKTTIDVNGAFIAIGHDPATSLFIDKLKMDDENYIITKPDSTETSIKGVFAAGDVRDKIYRQAVTAAGMGCMAALEAERYITES

SEQ ID NO: 102783 - protein, 240 aa, Unknown
  Bacterial polypetide isolated from the Sargasso Sea
MDNNQKLIILGSGPAGYSASIYAARAGLNPTLITGFEVGGQLTTTTDVENWPGDYEDLQGPDLMIRMQNHAEKYGVNIVNDQIEKVDLSGEVKILEGMNKYSCKSLIISTGASAKYLGLPSEDKYLGKGVSACATCDGFFYKDEEVAVVGGGNTAAEEALYLTNLCKKVHLIHRRDTLRAEKILQDRIFEKADEGKINLVWNNELIEIKGDDNVVTHLNLSNHDDINVKGVFIAIGHNPN

SEQ ID NO: 102784 - protein, 276 aa, Unknown
  Bacterial polypetide isolated from the Sargasso Sea
MTNNKLIILGSGPAGYAASIYAARAGLNPVIIAGAEPGGQLTTTTEVENWPGDSDDLQGPDLMERMKKHAEKFGVEIINDHISMVNLKQSPFLLNGTDSYEADTLIIATGASAKYLGLPSEQEFLGRGVSACATCDGFFYKGQEVAVIGGGNTAAEEALYLANICSKVHLVHRRDELRAEKILQDRIFKKADEGKITIHWNSELEEVLGDASGVTGIKLKNKDSSMSSIDLHGVFIAIGHNPNTEIFDGQLDMKDGYIVIKSGLDGSVTQTSVPGV

SEQ ID NO: 102785 - protein, 316 aa, Unknown
  Bacterial polypetide isolated from the Sargasso Sea
MNKKSTKHTKVLILGSGPAGYTAAIYAARAMLKPILVHGSQPGGQLTTTTDVENYPGYSKVIQGPWLMDEMKGQAEAVGTEMIQDHISKVDLTKKPFIATGDSGQIYTADSFIISTGAQARWLNLKSEQEFRGFGVSACATCDGFFFKEKEVAVVGGGNAAVEEAMFLTKFASKVYLIHRRNELRAEKMLQAKLKSNKKIEIIWDTVVEDVIGTKDPKTVNALKIKNVKDNKVKDLKVDGLFIAIGHDPATSLFKDQLKMDKEGYLITKPDSTETNIPGVFAAGDVKDKIFRQAVTAAGMGCMSALEAEKYLSESN

SEQ ID NO: 102786 - protein, 315 aa, Unknown
  Bacterial polypetide isolated from the Sargasso Sea
MSQNPTKHTKVLIIGSGPAGYTAAVYAARAMLNPILVYGSEPGGQLTTTTDVENYPGFADVIQGPWLMDQMKEQAKAVGTEMIEDHIGSVNLKSTPFEAVGDSGQKFTADSIIISTGAQARWLNIKSEQEYRGFGVSACATCDGFFFKEKEVAVVGGGNAAVEEAMFLTKFASKVKLIHRRDSLRAEKMLQKKLMENKKIEIIWDTVIEDVIGDKEPKNVKGIKVKNVKTNKIEEIKVDGLFVAIGHDPATSLFKDQLKMDNEGYLITKPDSTETNVPGVYAAGDVKDKTFRQAVTAAGMGCMAALEAEKHLSNK

SEQ ID NO: 102787 - protein, 458 aa, Unknown
  Bacterial polypetide isolated from the Sargasso Sea
MENKEITSNVENVVIIGSGPAGYTAAIYAARANLQPLLVTGFNSGGIPGGQLMTTTFVENYPGFPDGVLGPELMDLMKAQAERWGTNLYESDVVSINTDSHPFELKTLEGTIKSNSIIIATGASANRLGVINEDKFWSKGISACAICDGATPQFRGEELAVIGGGDSACEEAAYLTKYGSKVHLIVRSEKLRASAAMVDRVKANPKIEIHWNTKVNKADGSEWLEKIETIHSLEGKGEINIKGLFYAIGHTPNTKFLGNKIDLDNKGYIACKSGRPETSIEGIFAAGDVVDSEWRQGVTAAGTGCMAALATERWLAEKNLAKTIVRETPEPEKKLNSSDFNEEEVNEDTFDSNSEWQKGSYALRKLYHESKKPILVIFSSPSCGPCHVLKPQLKRVIKELDGAVLGVEIDIDKDQDIAKQAGINGTPTVQLFKEKLLKKQWQGVKQRSEFKEAIKNII

SEQ ID NO: 102788 - protein, 81 aa, Unknown
  Bacterial polypetide isolated from the Sargasso Sea
CSGVFIAIGHQPNTGIFKEYLDMHDNGYIKVNGGSDGNSTATSISGVFAAGDVSDSIYRQAITSAGSGCMAALDAEKFLDE

SEQ ID NO: 102789 - protein, 306 aa, Unknown
  Bacterial polypetide isolated from the Sargasso Sea
MADIKDVIIIGSGPAGYTAAIYAARANLKPILVSGFQPGGQLTITTDVENYPGYEDPIQGPWLMEQMQKQAAHVGTEIINSQVTEVFLNEKIKKLNLDNGTTLNTKTVIISTGAQARWLGLDNEAKFQGHGLSACATCDGFFFKDKEVAVIGGGNSAAEEALFLTKFATKVYLVHRRDKLRAEKILQDRLKQNSKIEFIWNSEVTKFNGSDDLESIDLLNKQDNKISNLKIDGVFIAIGHDPATQLFKGQLKMDDGGYIITDPDSTKTSIEGVFAAGDVKDKIYRQAVTAAGMGCMAALEVEKYLD

SEQ ID NO: 102790 - protein, 220 aa, Unknown
  Bacterial polypetide isolated from the Sargasso Sea
MSAVRHARVIILGSGPAGYSAAVYAARANLKPLLITGIQAGGQLTTTTEVDNWPGDPHGLTGPALMQRMQEHAERFETEIVFDHINAVDLAGKPFTLVGDSGTYSCDALIIATGASARYLGLPSEEAFMGRGVSACATCDGFFYRGREVAVVGGGNTAVEEALYLANIASKVTLIHRRETFRAEKILQDKLRARIAEGKIELQLNAEVDEVLGDASGVTG

SEQ ID NO: 102791 - protein, 312 aa, Unknown
  Bacterial polypetide isolated from the Sargasso Sea
MSDNHNKLIILGSGPAGYAASIYAARAGLDPIIIAGMQEGGQLTTTTDVENWPGDSDGLQGPELMERMKKHAQEFDVEIINDHINEVLLTQKPFTLKGVNEYSCDSLIIATGASAMYLGLPSEKKYLGKGVSACATCDGFFYKDQDVAVIGGGNTAAEEALYLANICSKVYLVHRRDELRAEKILQDRIFKQEEAGKIEILWDTQLKEVCGDDMGVTSIKLDNKGSEISKEVMGVFIAIGHKPNTEIFDGQLDMDNGYIIIKSGLNGSVTSSSVEGVFAAGDVSDQIYRQAVTSAGFGCMAALDAEKYLSES

SEQ ID NO: 102792 - protein, 268 aa, Unknown
  Bacterial polypetide isolated from the Sargasso Sea
GQLMLTTDVENYPGFVDGIMGPELMQVFKGQAERFGTEIKTEIIDSIENIDGGFKLTSSKGEYEFKSVIIASGASARWLGVEGEKELQGYGVSACATCDGFFFKEKEVAVVGGGDSAMEEALFLTKFATKVYVIHRRDQFRASQIMQDRVLNHEKIEVIWNSTVEKIIGDGAVSSVVLKNTEDGSESELNLDGVFVAIGHDPNIEFLNNFVELDEKGYIKTGFTTDTSTSVPGVFAAGDVADSIYRQAITAAGTGCQAAIDSERWLDH

SEQ ID NO: 102793 - protein, 314 aa, Unknown
  Bacterial polypetide isolated from the Sargasso Sea
METIKRKLVILGSGPAGYTAAVYAARAGLKPCLVTGMEQGGQLTTTTDVENWPGDSDGLQGPELMDRMLKHVESLEVEVIFDHIESANLSEPFALVGNVNKYDAESLIIATGASAQYLGLESEQSYMGKGVSACATCDGFFYKDKDVAVVGGGNTAVEEALYLSNLCSSVTLIHRRDSLRAEKILQERLFKKEKEENVKIIWDHELIEVLGDDSVVNGIKIKNTKDEKETKINLSGLFIAIGHKPNTDLFKDQLDMENGYIKITSGSNGNSTETSVPGVFAAGDVSDHIYRQAITSAGSGCMAALDAEKYLAEK

SEQ ID NO: 102794 - protein, 293 aa, Unknown
  Bacterial polypetide isolated from the Sargasso Sea
MTNNKLIILGSGPAGYAASIYAARAGLNPVIIAGAEPGGQLTTTTEVENWPGDSDDLQGPDLMERMKKHAEKFGVEIINDHISKVDLEQSPFLLSGTDSYQADTLIIATGASAKYLGLPSEQEFLGRGVSACATCDGFFYKGQEVAVIGGGNTAAEEALYLANICSKVHLVHRRDELRAEKILQDRIFKKADEGVIEIHWDSELEEVLGDASGVTGIKLKNKDNSMSSINLHGVFIAIGHNPNTEIFDGQLDMKDGYIVIKSGLDGSVTQTSVPGVFAAGDVADKVYRQAITS

SEQ ID NO: 102795 - protein, 220 aa, Unknown
  Bacterial polypetide isolated from the Sargasso Sea
PFILKGVNEYSCDSLIIATGASAMYLVFPSEKKYLGKGVSACATCDGFFYKDQDVAVIGGGNTAAEEALYLANICSKVYLVHRRDELRAEKILQDRIFKQEEAGKIEILWDTQLKEVCGDDMGVTSIKLDNKGTEISKEVMGVFIAIGHKPNTGIFDGQLDMDNGYIIIKSGLNGSVTSSSVEGVFAAGDVSDQIYRQAVTSAGFGCMAALDAEKYLSES

SEQ ID NO: 102796 - protein, 315 aa, Unknown
  Bacterial polypetide isolated from the Sargasso Sea
MNNKSSKHTKVLILGSGPAGYTAAIYAARAMLKPILVFGSEPGGQLTTTTDVENFPGYSKVIQGPWLMEEMKGQAKAVGTEMIQDHICKVDLSKKPFEAVGDSGQRYTADSFIISTGAQARWLNIKSETEFRGFGVSACATCDGFFFKQKEVAVVGGGNAAVEEAIFLTKFASKVKLIHRRNELRAEKMLQAKLKANKKIEIIWDSVVEDVFGEKNPKSVKGIKIKNVKTSKVSEIKVDGLFIAIGHDPATSLFKGQLNMDKEGYIVTKPDSTITNVPGVFAAGDVKDKIFRQAVTAAGMGCMAALEAEKHLSSK

SEQ ID NO: 102797 - protein, 311 aa, Unknown
  Bacterial polypetide isolated from the Sargasso Sea
MTQQLIILGSGPAGYTAAVYAARANLKPLLITGLEVGGQLTTTTEVENWPGDFEDLQGPDLMVRMQKHAEKYQVDIRNDYIKKVDLSNQPLLLHGEKESYETKSLIIATGASAKYLGLDSEKAFLGKGVSACATCDGFFYKDQEVAVVGGGNTALEEALYLSNICSKVHLIHRRDEFRGEKILQDRVHKKVSEGKISLILNSTLKEVLGDGAVSAINILNNDGTESNLSVEGVFIAIGHTPNTDIFKDKLDMKDGYIITKTGFNLGSTSTSVKGVFAAGDVADYNYRQAITSAGFGCMAALDAEHYLSNLD

SEQ ID NO: 102798 - protein, 316 aa, Unknown
  Bacterial polypetide isolated from the Sargasso Sea
MSQVTHSKLLILGSGPAGYTAAVYAARANLNPLLITGMQQGGQLTTTTEVENWPGDPEGLTGPALMERMKEHAEKFDTRILFDHINEVQLTQRPFRLKGDNGEYTCDALIIATGASAKYLGLPSEEAFKGRGVSACATCDGFFYRNQEVAVVGGGNTAVEEALYLANIAKKVHLIHRRDEFSAEKILIKRLHDKVASGNIVLHTHQTLDEVLGDDMGVTGVRLRNTQNDTTTDLPLMGVFIAIGHQPNTQIFADQLDMQNGYLKVRGGLDGFATQTSIEGVFAAGDVADHTYRQAITSAGTGCMAALDAERYLDAQ

SEQ ID NO: 102799 - protein, 311 aa, Unknown
  Bacterial polypetide isolated from the Sargasso Sea
MEQQLIILGSGPAGYTAAVYAARANLKPLLITGLEVGGQLTTTTEVENWPGDFEDLQGPDLMVRMQKHAEKYDVDIRTDYVKSVDLSNQPLVLHGEKDTYETKSLIIATGASAKYLGLESEKAFLGKGVSACATCDGFFYKDQEVAVIGGGNTALEEALYLSNICSKVHLIHRRDEFRGEKILQDRVFKKVEEGKISLILDSTLKEVIGGDAVSGIVILNNDGSESNLPVEGVFIAIGHTPNTDIFKDKLDMKDGYIVTKTGFDIGSTATSVSGVFAAGDVADYNYRQAVTSAGFGCMAALDAEHYLSNLD

SEQ ID NO: 102800 - protein, 315 aa, Unknown
  Bacterial polypetide isolated from the Sargasso Sea
MSEKPTKHTKVLIIGSGPAGYTAAVYAARAMLKPMLVAGMQPGGQLTITTDVENYPGFADVIQGPWLMEQMREQAKAVGTDLVEDHIQSVNLKSKPFEAIGDGGQKYTADSIIISTGAQARWLNIESEQKFKGFGVSACATCDGFFFKDKTVAVVGGGNAAVEEAMFLTKFASKVQLIHRRDELRAEKLLQKKLMENKKIEIIWDSVVEEVIGDDEPKNVKGLKIKNVKTNETSDLKIDGLFIAIGHDPATSLFKDQLEMDSTGYLITKSDSTETNIPGVYAAGDVKDKIYRQAVTAAGMGCMAALEAEKYLAAN

SEQ ID NO: 102801 - protein, 317 aa, Unknown
  Bacterial polypetide isolated from the Sargasso Sea
MSESIEKVKCLIVGSGPAGFTAAIYASRANMAPVLYQGMQPGGQLTTTTDVDNYPGYPEGVNGTQMMVDLENQAKRFGTDVRMGMITKVDFTGPVHKVWVDDTKEIHSDTIIISTGASARYLGLESEQHYLANGGGVSACAVCDGFFYKGQDTIIVGAGDSACEEASYLANICTKVTMLVRRDEFRASKIMAERVRGINNIEILHNTELDEVLGDGNVVTGVRVVNNQTQAKHEIPCTGAFIAIGHTPNTQVFSPWLEMDETGYIVNVPGSSKTNVEGVFVSGDAADHVYRQAVTAAGTGCMAALDAERYLAAKGLH

SEQ ID NO: 102802 - protein, 236 aa, Unknown
  Bacterial polypetide isolated from the Sargasso Sea
MHRKVIIIGSGPAGLTAAVYAARANLEPLVFEGSQPGGQLTITTDVENFPGFPDGIMGPELMDHMRKQAQRFGATCEYKTVDKVELLKNPFIVWVKDEKYTADSVIISTGASARLLGLESEAELMGYGVSACATCDGFFFKEKEVLVVGGGDSAAEEAIFLTKFASKVTIVHRRDELRASKIMQERVFENNNIEIMWNSAVEDITGNKDTGVTGAVIKDTISGKTKNITCDGVFMA

SEQ ID NO: 102803 - protein, 315 aa, Unknown
  Bacterial polypetide isolated from the Sargasso Sea
MSEKPTKHTKVLIIGSGPAGYTAAVYAARAMLKPILVYGSEPGGQLTTTTDVENYPGFAKAIQGPWLMEQMKEQAHAVGTEMIEDHISSVNLKSKPFEAIGDGGQKYTADSIIISTGAQARWLNLKSEQEFRGFGVSACATCDGFFFKDKEVAVVGGGNAAVEEAMFLTKFASKVKLIHRRDKLRAEKLLQTKLMENKKIEIIWDSVVEEVIGDDNPKNVKGIKIKNVKTNEVTEVNLDGVFIAIGHDPATELFKDQLKMDNEGYLVTKSDSTETNVPGVFAAGDVKDKVFRQAVTAAGMGCMAALEAEKHLSHN

SEQ ID NO: 102804 - protein, 319 aa, Unknown
  Bacterial polypetide isolated from the Sargasso Sea
MTESIHHKLIILGSGPAGYSAAVYAARANLKPVIITGSEPGGQLMTTTDVENWPGDPEGLLGPALMDRMLEHAKRFDTEVIYDHIESAELGSRPFTLNGGNAKYTADALIIATGSTARYLGLESEEKFKGKGVSACATCDGFFYKDQDVIVVGGGNVAVEEAIYLSNIAKNVTLIHRRDELRAEKMLQDKLFEKTDNKGNIKILWNHVLDEVLGDEAGVNGIICSDVNDPSNKTELDVQGVFIAIGHDPNTSFFGGNLKLDESNYIILDDSNGRFATQTSIEGVFAAGDVADPVYRQAVTSAGSGCMAALDAEKFLEQS

SEQ ID NO: 102805 - protein, 268 aa, Unknown
  Bacterial polypetide isolated from the Sargasso Sea
DNYTDVENYPGFADIIQGPWLMDQMKDQALSVGTNIVFDTIIDVDLSSKPFSLQSDSGKNYTCDALIISTGAQAKWLGLESENKFKGYGVSACATCDGFFYKDKTVVVVGGGNTAAEEAIFLTNFASEVKLIHRRDSLRAEKILQKRLMDNKKIEIIWNSEITEIIGDENPLSVKQVVLRNNKDDSTKLIDTDGIFVAIGHSPASMIFKNQLNMDDKGYIFTEADSTKTNVEGVFAAGDVTDDKYRQAVTAAGMGCMAALEVEEFLSE

SEQ ID NO: 102806 - protein, 317 aa, Unknown
  Bacterial polypetide isolated from the Sargasso Sea
MSQVRHSNLLILGSGPAGYTAAVYAARANLKPVMITGMQQGGQLTTTTEVENWPGDAEDLTGPALMERMQKHAEKFDTEILFDHINEVTLTERPFRLKGDNGEYTCDALIIATGASARYLGLESEEAFKGRGVSACATCDGFFYRNQKVAVIGGGNTAVEEALYLSNIAAEVHLIHRRDTFRSEKILIDRLMDKVANGNIILHLDQTMEEVVGDAMGVTGLKMKSTKDGAITDLAVAGVFVAIGHSPNTGIFEGQLEMNNGYLKVQSGLQGNATQTSIEGVFAAGDVMDQHYRQAITSAGTGCMAALDAERYLDAKK

SEQ ID NO: 102807 - protein, 316 aa, Unknown
  Bacterial polypetide isolated from the Sargasso Sea
MENNSKKHSKVLIIGSGPAGYTAAIYTARAMLKPILVYGSEPGGQMTTTTDVQNYPGYSNVIQGPWLMDQMKEQAKAVGTDMIPDHISKVDLSKRPFKATGDSGQEYTADSIIISTGAQARWLNLPSEQKYRGFGVSGCATCDGFFFKDKEVAVIGGGNAAVEEAIFLTKFATKVKLIHRRNELRAEKMLQKKLMENKKIEIIWDSVLEEVLGNEKPKGVTGIKIKNVKTNKTTQHNVHGLFIAIGHDPATSLFKGQLDMDKEGYLITKPDSTQTNKPGVFAAGDVKDKVFRQAVTAAGMGCMSALEAEKFLSTKN

SEQ ID NO: 102808 - protein, 165 aa, Unknown
  Bacterial polypetide isolated from the Sargasso Sea
MSDNPTKHTKVLIIGSGPAGYTAAVYAARAMLNPILVYGSAPGGQLSTTTDVENYPGFADVIQGPWLMDQMKDQAKAVGTEMIEDHISSVNLKSVPFEALGDSGQKYTADSIIISTGAQARWLNLESEQKFRGFGVSACATCDGFFFKDKEVAVVGGGNAAVEEA

SEQ ID NO: 102809 - protein, 312 aa, Unknown
  Bacterial polypetide isolated from the Sargasso Sea
MSENHNKLIILGSGPAGYAAGIYAARAGLNPIIIAGIQEGGQLTTTTDVENWPGDSEGLQGPELMERMKKHALQFDVQVVNDHINSVDLSNQPFKLYGNSEYECESLIISTGASAMYLGLPSEKEYLGKGVSACATCDGFFYRDQKVAVIGGGNTAAEEALYLSNICSKVYLVHRRDELRAEKILQDRIFKQEQEGKIEILWDTQLTEVVGDDKGVTSIKLDTKGEESTKDVMGVFIAIGHKPNTEMFTNQLEMDNGYIIIKSGLNGSVTSTSIEGVFAAGDVSDQVYRQAITSAGFGCMAALDAEKYLSEK

SEQ ID NO: 102810 - protein, 194 aa, Unknown
  Bacterial polypetide isolated from the Sargasso Sea
MTNKKLIILGSGPAGYSASIYAARAGLNPVIIAGAEPGGQLTTTTEVENWPGDSDDLQGPDLMERMKKHAEKFGVEIINDHISKVNLNHSPFLLNGTDSYQAETLIIATGASAKYLGLPSEQEFLGRGVSACATCDGFFYKGQEVAVIGGGNTAAEEALYLANICSKVHLVHRRDELRAEKILQDRIFKKADEG

SEQ ID NO: 102811 - protein, 191 aa, Unknown
  Bacterial polypetide isolated from the Sargasso Sea
MNQNPTKHTKVLIIGSGPAGYTAAVYAARAMLKPIMVSGMEPGGQLTTTTDVENYPGFAEVIQGPWLMEQMQDQAKAVGTEMIEDHISSVNLKSKPFEAIGDGGQKYTADSIIISTGAQARWLNIESEQKFRGFGVSACATCDGFFFKDKTVAVVGGGNAAVEEAMFLTKFASKVQLIHRRDSLRAEKMLQ

SEQ ID NO: 102812 - protein, 313 aa, Unknown
  Bacterial polypetide isolated from the Sargasso Sea
MGNIHSSTLILGSGAAGLTAAIYTARANLKPTLIHGIQPGGQMTITTDVENYPGFADVIQGPWLMEQMSAQAENVGTNMINDIITEASLSSKPFELTGDSGNQYTCDALIISTGAQAKWLGLESEDKFQGFGVSACATCDGFFFRDKNVVVIGGGNTAVEEALYLTNHANKVTLIHRRDTLRAEKLLQDRLMKNKKIEIVWNTVVKEILGKEEGTLKELTGVKVEDLKENKTSEIPTDGVFVAIGHVPNTGIFNGQLNMDKEGYIITKPDSTATNIEGVYAAGDVQDPIYRQAVTAAGTGCMAALEAEKYLSV

SEQ ID NO: 102813 - protein, 187 aa, Unknown
  Bacterial polypetide isolated from the Sargasso Sea
MNQNPTKHTKVLIIGSGPAGYTAAVYAARAMLKPIMVSGMEPGGQLTTTTDVENYPGFAEVIQGPWLMDQMREQAKAVGTEMIEDHISSVNLKSKPFEAIGDGGQKYTADSIIISTGAQARWLNIESEQKFRGFGVSACATCDGFFFKDKTVAVVGGGNAAVEEAMFLTKFASKVQLIHRRDALEQK

SEQ ID NO: 102814 - protein, 317 aa, Unknown
  Bacterial polypetide isolated from the Sargasso Sea
MSQVRHSNLLILGSGPAGYTAAVYAARANLKPVMITGMQQGGQLTTTTEVENWPGDAEDLTGPALMERMQKHAEKFDTEILFDHINEVTLTERPFRLKGDNGEYTCDALIIATGASARYLGLESEEAFKGRGVSACATCDGFFYRNQKVAVIGGGNTAVEEALYLSNIAAEVHLIHRRDTFRSEKILIDRLMDKVANGNIILHLDQTMEEVVGDAMGVTGLKMKSTKDGSITDLAVAGVFVAIGHSPNTGIFEGQLEMNNGYLKVQSGLQGNATQTSIEGVFAAGDVMDQHYRQAITSAGTGCMAALDAERYLDAKK

SEQ ID NO: 102815 - protein, 332 aa, Unknown
  Bacterial polypetide isolated from the Sargasso Sea
MPATSTKHAKVLILGSGPAGYTAAVYAARANLSPVLVTGLAQGGQLMTTTDVENWPADAHGVQGPELMGRFLEHAERFNTEIIFDHIHTAKLDEKPIRLIGDAGEYTCDSLIISTGASAQYLGLPSEEAFMGKGVSACATCDGFFYKQQHVAVIGGGNTAVEEALYLAGIAKKVTVIHRRDKFRAEPILIDRLLAKEKEGVVEIKWNSTLDEVTGDQSGVTGLRIKNTKTGDTTDIAVQGIFVAIGHKPNTDIFEGQLEMKNGYIITKGGLNGFATATSVPGVFAAGDVQDHVYRQAITSAGTGCMAALDAQRYLESVEEIGEHVMSAEAER

SEQ ID NO: 102816 - protein, 314 aa, Unknown
  Bacterial polypetide isolated from the Sargasso Sea
MSQNPTKHTKVLIIGSGPAGYTAAVYAARAMLNPILVYGSEPGGQLTTTTDVENFPGFADVIQGPWLMDQMKEQAKAVGTEMIEDHISSVNLKTKPFEAVGDTGQKYTADSIIISTGAQARWLNIKSEQEFRGFGVSACATCDGFFFKDKEVAVVGGGNAAVEEAMFLTKFASKVKLIHRRDSLRAEKMLQKKLMENKKIEIIWDTVVEDVIGDKDPKNVKGIKVKNVKTNKIDEIKLDGVFIAIGHDPATQLFKDQLNMDNEGYLITKPDSTETNVPGVYAAGDVKDKTFRQAVTAAGMGCMAALEAEKFLSH

SEQ ID NO: 102817 - protein, 256 aa, Unknown
  Bacterial polypetide isolated from the Sargasso Sea
MNNKSSKHTKVLILGSGPAGYTAAIYAARAMLKPILVHGSQPGGQLTTTTDVENYPGYSKAIQGPWLMEEMKGQAEAVGTEMIQDHINKVDLSSKPFKVVGDSGQIYTADAIIISTGAQARWLNLKSEQNFRGFGVSACATCDGFFFKDKEVAVVGGGNAAVEEAMFLTKFASKVKLIHRRDKLRAEKMLQEKLKANKKIEIIWDSIVEDVLGKTEPKSVNAIKIKNVKDNKTKELKVDGLFIAIGHDPATSLFKN

SEQ ID NO: 102818 - protein, 307 aa, Unknown
  Bacterial polypetide isolated from the Sargasso Sea
MNTIIIGSGPAGYTAAIYAARADLKPIIYTGLEPGGQLTTTTEVDNFPGYPQGIDGPTMMNELREQAERFGTKVEVDFISKVEFSKEKGGVHKIYTQNGDEIQTKTIIICTGASAKYLGLPSEQKLIGGGVSACAVCDGFFYKGQDVAVVGGGDSAIEEATYLAKICNNVTMLVRKDHFRASKAMQHRLSNFKNIHVLFNSEIDEVLGDNVVEGIKIKNNITNEYSEINITGLFLAIGHTPNTEIFKGIVDMDDGGYILTDKTSTKTNIPGVFAAGDVQDKDYRQAITAAGTGCMAALDAERYLQEI

SEQ ID NO: 102819 - protein, 310 aa, Unknown
  Bacterial polypetide isolated from the Sargasso Sea
MTNNKIIILGSGPAGYAASIYAARAGLNPVIIAGAEPGGQLTTTTEVENWPGDSDDLQGPDLMERMKKHAEKFGVKIINDHISKVNLEQSPFLLNGTNSYEADTLIIATGASAKYLGLPSEQEFLGKGVSACATCDGFFYKDQEVAVIGGGNTAAEEALYLANICSKVHLVHRRDELRAEKILQDRVFKKADEGIIEMHWNSELEEVLGDASGVTGIKLKSKEGSMLSINLHGVFIAIGHNPNTEIFDGQLDMKDGYIVIKSGLDGSVTQTSVPGVFAAGDVADKVYRQAITSAGFGCMAALDAEKFLSD

SEQ ID NO: 102820 - protein, 304 aa, Unknown
  Bacterial polypetide isolated from the Sargasso Sea
MDDLAIIGSGPAGYTAGIYAARANLEPVLFEGLESGGQLMLTTDVENYPGFDQGIMGPEMMQVFKNQAERFGTKILTETVDSIEKIENGFKLTTSKNTYEFKTVIISSGASANWLDIKGEKELQGHGVSACATCDGFFFKDKNVIVVGGGDSAMEEALFLTKFAKNVTVVHRRDSFRASKIMQDRVLSHDQIDVSWNKEVVEIKGESQVSSVLLKDSQTNEMEEKEIDGVFIAIGHTPNVSFLNGFLELDEKGYIKTGSTTATSTSVPGVFAAGDVADSIYRQAVTAAGTGCQAAIDAERWLEN

SEQ ID NO: 102821 - protein, 147 aa, Unknown
  Bacterial polypetide isolated from the Sargasso Sea
ICSKVHLVHRRDELRAEKILQDRIFKKADDGIIAIHWNSELEEVLGDASGVTGIKLKNKDASMSSIDLQGVFIAIGHNPNTEIFEGQLDMIDGYIVIKSGLDGSVTQTSVPGVFAAGDVADKVYRQAITSAGFGCMAALDAEKFLSE

SEQ ID NO: 102822 - protein, 226 aa, Unknown
  Bacterial polypetide isolated from the Sargasso Sea
NLQEEPFKLKGTSEYSCDSLIIATGASAMYLGLPSEKEYLGKGVSACATCDGFFYKDQEVAVIGGGNTAAEEALYLANICSKVYLVHRRDELRAEKILQDRIFNQEKAGKIEILWDSQLSEVIGDEMGVTGIRLDNKGTEIIKNVMGVFIAIGHKPNTDIFKDQLEMDNGYIIIKSGLDGSVTSSSVEGVFAAGDVSDQIYRQAVTSAGFGCMAALDAEKFLSEKK

SEQ ID NO: 102823 - protein, 343 aa, Unknown
  Bacterial polypetide isolated from the Sargasso Sea
MTNHAVHTFALKEVLLILTLVTIYPYIMNNKSTKHTKVLILGSGPAGYTAAIYAARAMLKPILVHGSQPGGQLTTTTDVENYPGYSKVIQGPWLMDEMKGQAEAVGTEMIQDHISKVDLTKKPFTATGDSGQVYTADSFIISTGARARWLNLKSEQEFRGFGVSACATCDGFFFKEKEVAVVGGGNAAVEEAMFLTKFASKVYLIHRRNELRAEKILQAKLKSNKKIEIIWDTVVEDVIGTKEPKTVNALKIKNVKDNKAKELKVDGLFIAIGHDPATSLFKDQLKMDKEGYLITKPDSTETNIPGVFAAGDVKDKIFRQAVTAAGMGCMSALEAEKYLSETS

SEQ ID NO: 102824 - protein, 87 aa, Unknown
  Bacterial polypetide isolated from the Sargasso Sea
MLEIDEMHGNIVKVNPLVNWTFDKTWDYVKSNNCPYNKLLDHGYPSIGCEPCTRPIKIGEDIRAGRWWWENDTNKECGLHMNHAQLN

SEQ ID NO: 102825 - protein, 253 aa, Unknown
  Bacterial polypetide isolated from the Sargasso Sea
MKNKIIEWNRQFRDASIDQFLSYFLNKYDDRYVVASSLSYEDQINTHVSLKIRPNARIFILDTGRLHKETYDVIDQTSLLYDFKYEILKPNERDVSNMVNKFGLNLFYDSIDNRKKCCSVRKVEPLSRVLSTADVWVTGLRSQQSVTRTSLELVQWDDTFNLLKLNPLANWTEDEVKEFVRINKIPFNKLHEKGYPSIGCEPCTRAIKDDEDIRSGRWWWEDPEHKECGLHVVNGKLQSKKITNNNAKGNLND

SEQ ID NO: 102826 - protein, 240 aa, Unknown
  Bacterial polypetide isolated from the Sargasso Sea
PELAAKVERLDALLDSIAARHANVKLASSLAAEDMLLTHAILSRGVKIGIFSLNTGRLHAETLGMIDRVKERYGYDIEQFHPQAAAVEEYVGSHGLNAFYESVDLRKRCCEIRKVEPLNRALSDVSAWVTGQRREQSVTRAELHEEEFDAARNIAKFNPLTDWTEAEVWDYLKALDVPVNPLHARGYPSIGCEPCTRAIRPGEDSRAGRWWWESRDTKECGLHITTITQIPVHSSENASA

SEQ ID NO: 102827 - protein, 217 aa, Unknown
  Bacterial polypetide isolated from the Sargasso Sea
FEWAFDNLHPKLAKASSFGAEDAAIIDMMFKINSDSRLFTLETGRLPKETFDAIEQVEQRYNTKIEKLYPDPNEVEKMIEEKGLNCFYDSIENRKLCCGIRKVHPMNKMLATLDGWITGLRNDQNQNRSGASMLEIDEMHGNIVKVNPLVNWTFDETWDYVKSNNCPYNKLLDQGYPSIGCEPCTRPIKIGEDIRAGRWWWENDTNKECGLHMNHDN

SEQ ID NO: 102828 - protein, 136 aa, Unknown
  Bacterial polypetide isolated from the Sargasso Sea
KGLDCFYESIENRKLCCGIEKVHPMNKMLATLDGWITGLRNDQNQNRSGASMLEIDEMHGNIVKVNPLVNWTFDETWDYVKSNNCPYNKLLDQGYPSIGCEPCTRPIKIGEDIRAGRWWWENDTNKECGLHMNHDN

SEQ ID NO: 102829 - protein, 250 aa, Unknown
  Bacterial polypetide isolated from the Sargasso Sea
MSSATTTALTPELAAKVERLDALLAQIGARHEKVKFASSLAAEDMLLTHAILSKGVRIGIFSLNTGRLHAETLGMIDRVRERYGYEIEQFHPQQDAVDQYVAEHGLNAFYESVELRKSCCHIRKVEPLNRALADVGAWVTGQRREQSVTRAELHEEEQDEARGIAKYNPLADWTESDVWAYLKAFDVPVNPLHARGYPSIGCEPCTRAIRPGEDSRAGRWWWESRDTKECGLHITTITPIPAEAVAGATH

SEQ ID NO: 102830 - protein, 239 aa, Unknown
  Bacterial polypetide isolated from the Sargasso Sea
MGKFTQQELDEVNKTLSTPEDCLKWAFDNLHPKLAKASSFGAEDAAIIDMMFKINSDSRLFTLETGRLPKETFDAIEQVEKRYNTKIEKLFPDQNEVEKMVEEKGLNCFYDSIENRKLCCAIRKVHPMNKMLATLDGWITGLRNDQNQNRSGASMLEIDEMHGNIVKVNPLVNWTFDQTWDYVKSNNCPYNKLLDQGYPSIGCEPCTRPIKIGEDIRAGRWWWETDTNKECGLHMNHDN

SEQ ID NO: 102831 - protein, 239 aa, Unknown
  Bacterial polypetide isolated from the Sargasso Sea
MGKFTQQELDEANKTLSTPEDCLKWAFDNLHPKLAKASSFGAEDAAIIDMMFKINSDSRLFTLETGRLPKETFDAIEQVEQRYNTKIEKLYPDPNEVEKMIEEKGLNCFYDSIENRKLCCGIRKVHPMNKMLATLDGWITGLRNDQNQNRSGASMLEIDEMHGNIVKVNPLVNWTFDETWDYVKSNNCPYNKLLDQGYPSIGCEPCTRPIKIGEDIRAGRWWWENDTNKECGLHMNHDN

SEQ ID NO: 102832 - protein, 147 aa, Unknown
  Bacterial polypetide isolated from the Sargasso Sea
MEIAILALGCFWGPEIKFSKLEGIYKTEVGYCGGNNKKTNYKEVCTGNTNHAEVVKLDFDPKIISYEKILEFFFEFHDPTTLNSQGYDFGTQYRSEIFYLNENQKHTANKVKEKYNKKFSGKIVTKLSLAKNYCPAEEYHQKYLEKI

SEQ ID NO: 102833 - protein, 137 aa, Unknown
  Bacterial polypetide isolated from the Sargasso Sea
MKVISLVLFLILPVNYAFSENLNKAYFAGGCFWCMEESFEKLEGVKEVISGYSGGTTSNPTYKEVTFGDTGHFEVVEIIYNNNIISYDELLKNFWINIDPFDAFGQFCDKGYSYRSVAFFQNAYEKSQMKKVFRNRK

SEQ ID NO: 102834 - protein, 192 aa, Unknown
  Bacterial polypetide isolated from the Sargasso Sea
MKKFLSIIFFLISANSFANSPNFERAYFAGGCFWCMEESFENILGVSKVISGYSGGTTENPTYKEVTYGNTGHFEVIEVIYIPEVVSYEKLLEEFWVNIDPFDAVGQFCDKGYSYRSVAFYQNDKQKNLIENSIKEIEKKFKKKVVTYVRKFDKFYMAEAVHQDYYQINFLNYLRYKKGCRREAILNSIWGS

SEQ ID NO: 102835 - protein, 200 aa, Unknown
  Bacterial polypetide isolated from the Sargasso Sea
MKYLLSLIVALSIFVNPVNAFAEELILAGGCFWCLEHDLESLKGINFVESGYSGGDLQNPTYENHEGHQEVVLVNYESKLVTLPEILRLYFRNIDPLDGKGQFCDRGDSYRPVIFFKDKTEESDAINAIVSASNELRVPLEKISVELKSKGQFWLAEEYHQDFAERNELKYKFYRFSCGRDQRLDKLWGDNARSTNLWNE

SEQ ID NO: 102836 - protein, 129 aa, Unknown
  Bacterial polypetide isolated from the Sargasso Sea
MNKRNENLTELQYYVTRESGTERPFTGPHLNEKSDGTFTCICCSTPLFASTHKYDSGSGWPSFYDTEYKMNISEHRDNSHFMIRTEVKCANCDAHLGHLFNDGPKPTGLRYCINGNAMSFEKKEKLNGK

SEQ ID NO: 102837 - protein, 152 aa, Unknown
  Bacterial polypetide isolated from the Sargasso Sea
MIQKALFGAGCFWGVEEHFRKLKGIEKTAVGYSGGKTENPTYESVCYENTDHAEVLQVEFDDEIITYETIVEEFWKCHDPTTVDRQGPDVGRQYRSVIYYLDDLQKNIAQKSMEKHQPSFNNMIVTEITKADTFYRAEEYHQKYIQKRAISE

SEQ ID NO: 102838 - protein, 54 aa, Unknown
  Bacterial polypetide isolated from the Sargasso Sea
MEIAILAGGCFWGMEDLMRKIPGVQKTRVGYTGGHLKNPTYKDVCTETTGHAEA

SEQ ID NO: 102839 - protein, 93 aa, Unknown
  Bacterial polypetide isolated from the Sargasso Sea
VKLDFDPKIISYEEILNYFFEIHDPTTLNSQGPDFGTQYRSEIFYLNDLQKNIAEKVIEKENIKLSGKVVTKISLVKNYCTAEEYHQRYLEKR

SEQ ID NO: 102840 - protein, 158 aa, Unknown
  Bacterial polypetide isolated from the Sargasso Sea
MHKILKPVFILFLTLTTQISPYLGNLNLHAQSKDSIILAGGCFWCVEADFEKVNGVSEVISGYTGGFVENPTYKQVVKGGTGHYEAVIIHFDPEIITTKDILYKFFRSIDPTDAGGQFCDRGHSYKSAIFAKPNQILIAKNALLEAEAILGEKIVTPI

SEQ ID NO: 102841 - protein, 180 aa, Unknown
  Bacterial polypetide isolated from the Sargasso Sea
MKKTLSFLLIIFFIQLNSQNNKEAYFASGCFWCVESIYESLIGVSKVESGYSGGYTQNPTYYSVLTGKTGHAESIKVYYDAEKISFKELVKVFFGSHDPTTLNRQGPDRGTHYRSIAFYSNDNEKKIINEEINRLLKNKTYPKIVTEVKKFEKFYIAEDYHQDYKQKNPNNAYIWNVSVP

SEQ ID NO: 102842 - protein, 147 aa, Unknown
  Bacterial polypetide isolated from the Sargasso Sea
MEIAVLALGCFWGPEKKYGQLDGIYRTEVGYCGGNSPNTNYREVCTGTTNHAEAVKLEFDPKVITYEQIIKRFFEFHDPTTLNSQGPDFGTQYRSEIFYLNEEQKNIAQKVIDEENLKLSGKVVTKLSELKNYCTAEEYHQKYLEKR

SEQ ID NO: 102843 - protein, 114 aa, Unknown
  Bacterial polypetide isolated from the Sargasso Sea
MKKFLTVYSLFLSVLLFSSENESTSHVEKIVLGSGCFWGAEKGYEALDGVIDAVSGYADGEGVRPTYRDITKFSNKFNPNNHAEVVEVTYNKNLITLEELIIHYLESHDPTQLN

SEQ ID NO: 102844 - protein, 99 aa, Unknown
  Bacterial polypetide isolated from the Sargasso Sea
IEVVKVTFDPKIISYEDITRLFFEIHDPTTLNRQGPNVGYQYRSEIFYTTEEERVSAQKVLDEVNKKLNGKVVTVIRKEKNYCKAEEYHQKYFQKQSKK

SEQ ID NO: 102845 - protein, 191 aa, Unknown
  Bacterial polypetide isolated from the Sargasso Sea
MKFLTIIIFIISFITAAEANQKSKAYFAGGCFWCMEESFEKLSGVEKVISGYSGGTTENPTYKEVVYGKTGHFEVVEIIYDKEIISFKELLNIFWKNIDPFDPYGQFCDKGYSYRSVAFYQNDEERKLIENSIRELKNKFNKEIVTYVRSFNKFYQAEVYHQDFYVKKFQRYLEYKKACRREEILNNIWNL

SEQ ID NO: 102846 - protein, 50 aa, Unknown
  Bacterial polypetide isolated from the Sargasso Sea
IVNVQDTSHGMIMTEVKCSKCDSHLGHVFPDGPEPSGLRYWINSIVLNFV

SEQ ID NO: 102847 - protein, 76 aa, Unknown
  Bacterial polypetide isolated from the Sargasso Sea
YFFEIHDPTTLNSQGPDFGTQYRSEIFYLNDQQKITAEKIIEKENVKLSGKVVTKTSLVKNYCPAEEYHQRYLEKR

SEQ ID NO: 102848 - protein, 178 aa, Unknown
  Bacterial polypetide isolated from the Sargasso Sea
FSLIVVFSILVNPINTFAEEVVLAGGCFWCLEHDLESLRGINSVISGYSGGDLQKPTYENHNGHQEVVLVNYDSEVVTLSEIYRLYFRNIDPLDGGGQFCDRGDSYRPVIFFENSDDKNEASKSLLSASKELGVNLEKINVELKPKSQFWEAEAYHQDFANRNELKYKFYRFSCGRDQ

SEQ ID NO: 102849 - protein, 113 aa, Unknown
  Bacterial polypetide isolated from the Sargasso Sea
MEIAVLALGCFWGPEIKFSKLYGVYRTEVGYCGGETQNTNYREVCTGSTNHAEAVKLEFDPKIISYEEILQNFFDFHDPTTLNSQGPDFGTQYRSEIFYLNEKQKNIAQKLID

SEQ ID NO: 102850 - protein, 139 aa, Unknown
  Bacterial polypetide isolated from the Sargasso Sea
MKYFLPLIVALSILINPLNAFADELILAGGCFWCLEHDLESLKGINFVQSGYSGGDLQNPTYENHKGHQEVVLVDYDSQLITLPEILRLYFRNIDPLDANGQFCDRGDSYRPVIFFKDTTEEIDAKNAIFSASNELRVH

SEQ ID NO: 102851 - protein, 108 aa, Unknown
  Bacterial polypetide isolated from the Sargasso Sea
MEIAILGLGCFWGPEIKFSKLDGVIKTEVGYCGGNNAETNYKEVCTGITNHAEVVKLDFDPKVISYEKILEYFFEIHDSTTLNSQGPDFGTQYRSEIFYLNDHLKNYC

SEQ ID NO: 102852 - protein, 102 aa, Unknown
  Bacterial polypetide isolated from the Sargasso Sea
NNKTHAGSVKIRFRSKNLYLIKKFLEYFFEIHDPTTLNSQGPDFGTQYRSEIFYLNENQKTIAGNVINKENERLSGKVVTKLSQVKNYCPAEEYHQRYLEKR

SEQ ID NO: 102853 - protein, 36 aa, Unknown
  Bacterial polypetide isolated from the Sargasso Sea
MARAIFAGGCFWGMEELIRMRPGVLTPALEHRGTCQ

SEQ ID NO: 102854 - protein, 63 aa, Unknown
  Bacterial polypetide isolated from the Sargasso Sea
FPDVGTQYRSEIFYEDEKQKQDALEVLKEFNEKLNGKIQTNISKIKNYNKAEEYHQKYIEKNR

SEQ ID NO: 102855 - protein, 157 aa, Unknown
  Bacterial polypetide isolated from the Sargasso Sea
MSKVNIIETPFWCSATPEERATAIENLTDEQRLVALEDGTERPFANAYWDNKEKGIYVDIISGEPLFSSTDKFDSGTGWPSFDRSIEGINIKEISDTSLGMIRTEVRSEYGDTHLGHLFNDGPTETGLRYCINSASLSFIPVSDLEEKGYGDYLKLF

SEQ ID NO: 102856 - protein, 147 aa, Unknown
  Bacterial polypetide isolated from the Sargasso Sea
MEIAVLALGCFWGPEIKFSKIEGIIKTEVGYCGGNSPTTSYKEVCTGNTNHAEVVKLDFDEKIITYEKILKTFFKMHDPTTLNSQGPDFGTQYRSEIFYLNNTQKDIADKVLRDVNERLSGKIVTKISLLKNYCPAEEYHQKYLEKR

SEQ ID NO: 102857 - protein, 301 aa, Unknown
  Bacterial polypetide isolated from the Sargasso Sea
KNQRGETALMLAASEGHLEIAQLLLRSGASRLIKDRFGRTAWMHAIDGGNVELVKLLAKGGYPASEKLIFAASRGHTEAVEIMLNLNADPDSRDERQWNALMWAAKNGHTATVQLLLKTGLDINSMGSKNWTPLMLAAGGGHADTARVLLESGADYSIRDQDQWTALTWAAMKGHLPLVKLILYFGASIDEKGSDGATPLIWAASQGHTDVVKILLNKGANPLIEDDHGKTALVHALLKNHLQSAQLLYKGGADLNINLLYAAKRGFPEMVTYLLKQGADHSWITEKQETPLILASWRRII

SEQ ID NO: 102858 - protein, 192 aa, Unknown
  Bacterial polypetide isolated from the Sargasso Sea
MKVTFFIILIFFNLSTILNAQNLSKAYFAGGCFWCMEESFERLEGVKEVISGYSGGITENPTYREVTYGDTGHFEVVEIIYDEEKISYENLLKNFWINIDPFDAYGQFCDKGYSYRSVAFYENELQKELIERDVKKFEKKFEKKVVTYIKKFEIFYKAEDKHQDYYEVYFENYLRYKKACRREKILDNIWGS

SEQ ID NO: 102859 - protein, 139 aa, Unknown
  Bacterial polypetide isolated from the Sargasso Sea
MQKFIGGIGCFWDETKFEKIPGIISTECGYCGGKNPTVSYEQVCGGNTEHVEVVKVEFDPKILSYEEVTKLFFKFHDPTTLNRQGPNLGYQYRSEIFYSTDEEKEIAHKVLNEVNNKLDGAVVTKISKEKNYCRAEEYH

SEQ ID NO: 102860 - protein, 57 aa, Unknown
  Bacterial polypetide isolated from the Sargasso Sea
MKFNTKLILYLCLCPSVLFFTAFNSSNAEGIKKALFAGGCFWCMEADFEKIPGIIEV

SEQ ID NO: 102861 - protein, 92 aa, Unknown
  Bacterial polypetide isolated from the Sargasso Sea
MKKFLSIIFFLISSTSFANSPNFEKAYFAGGCFWCMEESFENILGVSKVISGYSGGTTENPTYKEVTYGNTGHFEVIEVIYIPEVVSYEKLL

SEQ ID NO: 102862 - protein, 118 aa, Unknown
  Bacterial polypetide isolated from the Sargasso Sea
MSKAYFAGGCFWCMEESFEKLKGVKEVISGYSGGITANPTYREVTYGDTGHFEVVEIIYDKKKISYEELLKNFWINIDPFDAYGQFCDKGYSYRSVAFYENEMQKELIERDVKKLKKN

SEQ ID NO: 102863 - protein, 60 aa, Unknown
  Bacterial polypetide isolated from the Sargasso Sea
MKYFFIIFFFLININFSYSAQKDKAYFAGGCFWCVEESFEKLKGVEEVISGYSGGITENP

SEQ ID NO: 102864 - protein, 150 aa, Unknown
  Bacterial polypetide isolated from the Sargasso Sea
MKTAYFSLGCFWSPQLEFEKIKGVKKAEVGYCGGDDPNTTYEKVCSGSTNHAETIKVEFDENEISYEELVRFFFKIHDPTQLNRQGPDIGTQYRSEIFYKDENQKKIAEKIKKEFNERLSGKVVTNISKEKLYQPAEEYHQYYLKRKGVL

SEQ ID NO: 102865 - protein, 63 aa, Unknown
  Bacterial polypetide isolated from the Sargasso Sea
MDESTKATFGGGCFWCLEAVFQQVMGVIKVVSGYAGGVSPKPSYEAVCSGLTGHAEVVQIEYD

SEQ ID NO: 102866 - protein, 90 aa, Unknown
  Bacterial polypetide isolated from the Sargasso Sea
FDPKIITYEKILNFFFKIHDPTTLNSQGPDFGTQYRSEIFYLNTKQKEIAEKVIKLKNNDFSGKIVTKLSLLKNYCIAEEYHQKYLDKKF

SEQ ID NO: 102867 - protein, 126 aa, Unknown
  Bacterial polypetide isolated from the Sargasso Sea
LNGVLKTEVGFCGGKSPKTSYREVCTGETNHAEVVKIEYDESKISYEQILNYFFEIHDPTTLNQQGYDIGTQYRSEIFYNNQSQKKIAEETLNKINKKLNGKIVTNVSETKNYCKAEEYHQKYLEK

SEQ ID NO: 102868 - protein, 149 aa, Unknown
  Bacterial polypetide isolated from the Sargasso Sea
METGIFAAGCFWKPDLEFEELKGVKKTEVGYCGGNSANTTYENVCTGETNHAEVVKVYYDENIISYEELVKFFLKIHNPTTLNRQGPDIGTQYRSEIFYITEKQKEIAQKILSESNKEFNGKIVTRISKELNYCKGEDYHQKYLKKRGA

SEQ ID NO: 102869 - protein, 74 aa, Unknown
  Bacterial polypetide isolated from the Sargasso Sea
MKYFLPLLIAISIFIYPVNVFAEELILAGGCFWCLEHDLESLKGINFVQSGYSGGDLQNPTYENHEGHQGSSFW

SEQ ID NO: 102870 - protein, 178 aa, Unknown
  Bacterial polypetide isolated from the Sargasso Sea
MQTSAFGQDLGKVYFAGGCFWCMEESFEKKEGVIEVISGYSGGNTKNPTYEEVTYGNTGHFEVIEIIYDKNKTNFKDLLDHFWINIDPFDKYGQFCDKGYSYRSVAFYQNDKQKDLIENSIVKLEKKFNKKIVTYVRKFDEFFKAEAIHQDYYQVKFLNYLRYKKACGREKILDKIWN

SEQ ID NO: 102871 - protein, 82 aa, Unknown
  Bacterial polypetide isolated from the Sargasso Sea
MLPLLLLMLLVQPGSALAAPQQEAVFAGGCFWCLEHDLETLPGVISAESGYSGGRIDNPTYKQVSRGSTGHAESVLVRFDPQ

SEQ ID NO: 102872 - protein, 60 aa, Unknown
  Bacterial polypetide isolated from the Sargasso Sea
MILGTQYRSEIFYTSENQKKIAQEVLNNKNKLFNGKIVTNISEKKNYCRAEDYHQKYLER

SEQ ID NO: 102873 - protein, 87 aa, Unknown
  Bacterial polypetide isolated from the Sargasso Sea
MKVLFLSFLILFKTSAILSAQSLSKAYFAGGCFWCMEESFEQLKGVNEVISGYSGGITANPTYREVTYGDTGHFEVVEVIYDKEIIL

SEQ ID NO: 102874 - protein, 173 aa, Unknown
  Bacterial polypetide isolated from the Sargasso Sea
MKKILFFVLFFCSTALSQENGKAYFAGGCFWCMEESFEKKEGVLEVISGYSGGTTEDPNYEEVTYGNTGHFEVVEILFDKSKTNFEELLNHFWKNIDPFDEYGQFCDKGYSYRSVAFYQSNKEKDLIENSIKKLEKKFKRKIVTYVRKFEKFYIAEEKHQNFYIEKFASFLRY

SEQ ID NO: 102875 - protein, 76 aa, Unknown
  Bacterial polypetide isolated from the Sargasso Sea
MKYFFIIFFFLININFSYSAQKDRAYFAGGCFWCVEESFEKLKGVEEVISGYSGGITENPTYKEVTYGNTGHFEVV

SEQ ID NO: 102876 - protein, 147 aa, Unknown
  Bacterial polypetide isolated from the Sargasso Sea
MEIAVLALGCFWGPEKKFSKLYGIIRTEVGYCGGNSPITTYKEVCTGTTNHAEVVKLEFDPKKISYKEILEYFFKMHDPTTLNSQGPDFGTQYRSEIFYFNTVQKNIAEKVIEEENQKLNGKLVTKISMIKNYCIAEEYHQKYLDKI

SEQ ID NO: 102877 - protein, 97 aa, Unknown
  Bacterial polypetide isolated from the Sargasso Sea
HAEVVKLDFDEKIITYEKILKTFFQIHDPTTLNSQGPDFGTQYRSEIFYLNDDQKKIAQKVLQDINQRLSGKVVTRISLLKNYCPAEEYHQKYLEKR

SEQ ID NO: 102878 - protein, 124 aa, Unknown
  Bacterial polypetide isolated from the Sargasso Sea
MSKKNLDHLSEEQRYVTQEKGTEAPYTGDLLHNKESGTYQCVCCSADLFSSDTKFDSGTGWPSFYDVMSSEVVKVEVDNSHGMIRQEVLCGVCGAHLGHVFSDGPQPTGLRYCINSLSLEFEKD

SEQ ID NO: 102879 - protein, 177 aa, Unknown
  Bacterial polypetide isolated from the Sargasso Sea
ELILAGGCFWCLEHDLESLKGINFVQSGYSGGDLQNPTYENHEGHQEVVLVNYDSKLVTLPEILRLYFRNIDPLDGNGQFCDRGNSYRPVIFFKDATEESDATNAIVSASNELRVPLEKIYVELKSKGQFWLAEEYHQDFAERNELKYKFYRFSCGRDQRLDKLWGDNARSRNLWNE

SEQ ID NO: 102880 - protein, 79 aa, Unknown
  Bacterial polypetide isolated from the Sargasso Sea
MIRTIYFGGGCFWCLESIYLKIKGVVDVKPGYMGGSTINPTYEEVCEGSTNHVEVAKVMFDTTIKLSDLLKVFFFIHDP

SEQ ID NO: 102881 - protein, 134 aa, Unknown
  Bacterial polypetide isolated from the Sargasso Sea
MVKALFGAGCFWGVEEYFRIINGVLKTEVGYSGGFTENPTYQTVCEGNTDHVEVISLEFNEKIITYKDLIDHFWNCHDPTTLNRQGPDIGRQYRSVIFYLSEDQKNIAEKSKLENQKQFNNQRVTEITKAYKFF

SEQ ID NO: 102882 - protein, 66 aa, Unknown
  Bacterial polypetide isolated from the Sargasso Sea
MQYPDVGTQYRSEIFYEDEEQKKEAEEVLNETNKHFNGKIQTNISKFKNYCKAEEYHQKYIEKKNQ

SEQ ID NO: 102883 - protein, 121 aa, Unknown
  Bacterial polypetide isolated from the Sargasso Sea
MFKFLKNIMNNKEVNLTNDAYSLHRILKTDIKKDPNLEEDEIIFGCGCFWGAEKCFWKLPGVITTSVGYAGGEKNNPTYYEVCSGLTGHSEVVRVIWDKREIDVSDLLKMFWECHDPTQKN

SEQ ID NO: 102884 - protein, 131 aa, Unknown
  Bacterial polypetide isolated from the Sargasso Sea
MAEEFDFSHLSPEAFHVLREAGTERAWSGEYNKLYSKGNYNCRGCGNQLFESDTKFDSGSGWPSFDQAIDGSVIELEDRSYGMLRVEVQCSRCKSHLGHVFPDGPRETTGKRYCMNSLSLTFEGKPENPSE

SEQ ID NO: 102885 - protein, 107 aa, Unknown
  Bacterial polypetide isolated from the Sargasso Sea
MKKAIFGMGCFWGPEEKFSKVKGVTNTEVGYCGGTTDKTTYEEVCTGKTNHAEVVNVEFDEKTISYSDMVKIFFEMHDATTLNKQGLDIGTQYRSEIFYIDEEQKKI

SEQ ID NO: 102886 - protein, 150 aa, Unknown
  Bacterial polypetide isolated from the Sargasso Sea
MTKALFGAGCFWGVEEYFKKIPGVLNTKVGYSGGNTENPTYESVCYENTNHAEVIEIEFDTNQLSYEYLLSHFWKCHDPTTKDRQGPDIGAQYRSIIFYYNDEQKNSAEKSRNKYQKEYKDTIVTEIIKVQKFYQAEDYHQNYIEKIKNL

SEQ ID NO: 102887 - protein, 62 aa, Unknown
  Bacterial polypetide isolated from the Sargasso Sea
MYKFLVMRFLLFIFLNLIITNSVLASEKSKAYFAGGCFWCMEESFEKLIGVEKVISGYSGGK

SEQ ID NO: 102888 - protein, 147 aa, Unknown
  Bacterial polypetide isolated from the Sargasso Sea
MEIAVLGLGCFWGPEIKFSKLDGVIKTEVGYCGGNSVQTSYKEVCTGETNHAEVVKLDFDPEIISYEKIVKYFFEFHDPTTLNSQGPDFGTQYRSEIFYLNDKQKIMAEKILNEENKKLSGKVVTKISEVKNYCPAEEYHQKYLEKR

SEQ ID NO: 102889 - protein, 172 aa, Unknown
  Bacterial polypetide isolated from the Sargasso Sea
AQDLEKAYFAGGCFWCMEESFEKKEGVIEVISGYSGGTTQNPTYEEVTYGNTGHFEVIEIVYDKNKTNFKDLLDHFWINIDPFDEYGQFCDKGYSYRSVAFYQDDKQKDLIKNSISKLEKKFNKKIVTYVRKFEEFYKAEAIHQDYYQVKFLNYLRYKKACGRERILDKIWN

SEQ ID NO: 102890 - protein, 142 aa, Unknown
  Bacterial polypetide isolated from the Sargasso Sea
MEIAVLALGCFWGPEIKFSKIYGITRTEVGYCGGNSSKTTYKEVCTGTTNHAEVVKLEFDTKLISYSKILEYFFEFHDPTTLNAQGPDIGTQYRSEIFYLNDTQKQIAKKIIDSENQKLSGKVVTKISLLKNYCPAEEYHQK

SEQ ID NO: 102891 - protein, 190 aa, Unknown
  Bacterial polypetide isolated from the Sargasso Sea
VLYFSFLILFFSTKVAISQNIEKAYFAGGCFWCMEESFEKLKGVEEVISGYSGGITANPTYREVTYGDTGHFEVVEIIYDSEKISYEELLKNFWVNIDPFDAYGQFCDKGYSYRSVAFYENETQKNLIEKDVKKLEKKFNKKVVTYIKKFEIFYKAEDKHQDYYQEYFENYLRYKKACKRERILSNIWGS

SEQ ID NO: 102892 - protein, 73 aa, Unknown
  Bacterial polypetide isolated from the Sargasso Sea
MKKLLSIIFLLLSSTSFANSPNFERAYFAGGCFWCMEESFENILGVSKVISGYSGGTTENPTYKEVTYGNTGH

SEQ ID NO: 102893 - protein, 200 aa, Unknown
  Bacterial polypetide isolated from the Sargasso Sea
MKYFLPLIIAFSILINPVNTFAEELILAGGCFWCLEHDLESLKGINFVQSGYSGGDLQSPTYENHEGHQEVVLVNYDSQLLNLPEILRLYFRNIDPLDGKGQFCDRGDSYRPVIFFKNETEESDAKNAIFSASNELRVPLEKISVELKSKGKFWLAEEYHQDFAERNELKYKFYRFSCGRDQRLDKLWGDNARSINLWTE

SEQ ID NO: 102894 - protein, 192 aa, Unknown
  Bacterial polypetide isolated from the Sargasso Sea
MKILFFIFLILFNSSTISKAKDLSKAYFAGGCFWCMEESFEKLKGVEEVISGYSGGITANPTYREVTHGDTGHFEVVEIIYDKEKISYEELLKNFWINIDPFDAYGQFCDKGYSYRSVAFYENNKQKDLIEKDVKKFEKKFKKKVVTYIKKFEIFYKAEDKHQNYYQEYFLNYLRYKKACRREKVLENIWGS

SEQ ID NO: 102895 - protein, 185 aa, Unknown
  Bacterial polypetide isolated from the Sargasso Sea
MISFIFFYATNVVKSEISKAYFAGGCFWCMEEVFEKTEGVIEVVSGYSGGISKNPTYKEVTYGDTGHFEVVEVVYNKSKINFENLANIFWKNIDPFDKAGQFCDKGYSYRSVAFYTNNDEKKLIEDDIQEIEKKFNQKVVTYIRKFEIFYKAEEHHQDYYKEKFLNYLLYKEGCGRQRKLDNIWQ

SEQ ID NO: 102896 - protein, 48 aa, Unknown
  Bacterial polypetide isolated from the Sargasso Sea
MNSVIYLGGGCFWCTESVFKRVNGIVSISPGYMGGDNPNPTYEEVCEG

SEQ ID NO: 102897 - protein, 75 aa, Unknown
  Bacterial polypetide isolated from the Sargasso Sea
MANNTENKKAVFAAGCFWGVESTFQQMDGVKSTTVGYIGGKVKNPSYELVCTGLTGHAEAVEIVYNPNEVTFEKL

SEQ ID NO: 102898 - protein, 72 aa, Unknown
  Bacterial polypetide isolated from the Sargasso Sea
SGIWVTDQKQLVEAEESLKAYEESLLASGFEEIKTTVEMQENFYYAEEYHQQYLHKNPNGYCGIAGTGVLCK

SEQ ID NO: 102899 - protein, 81 aa, Unknown
  Bacterial polypetide isolated from the Sargasso Sea
EKILEYFFEIHDPTTLNSQGPDFGTQYRSEIFYLNDNQKITAENIIDKENKRLSGKVVTKLSEVKNYCPAEEYHQRYLEKR

SEQ ID NO: 102900 - protein, 82 aa, Unknown
  Bacterial polypetide isolated from the Sargasso Sea
MQIFIGGIGCFWDETEYQGVPGIISTECGYCGGKNPKVTYEQVCGGDTEHIEVVKVAFDPKIISYEDVARLFFKIHDPTTLN

SEQ ID NO: 102901 - protein, 260 aa, Unknown
  Bacterial polypetide isolated from the Sargasso Sea
IIAEYQALLIEGGYGKIRTKLEPLDNFYLAEEYHQDYLKKNPNGYCPDLSTGIVFNDEEKIFEDNEYLLTGKQILVLDSKNYCPYCEKFKDDVTSSYKGSIPLSYRTSDQLHGLEIKSPTWATPSLIFLENGKEIFSYQGYINQKDFYQLLGKFKLGNSEAYNVAFNKGIDARFCKEYQIFKNTPDGIFIDKLSGEPLFDTRNRFVSRSGWLSFTKPVDGSVYELPDNSYGMKRTEIRSVSSDIHLGHVFDDGPNGMPTI

SEQ ID NO: 102902 - protein, 91 aa, Unknown
  Bacterial polypetide isolated from the Sargasso Sea
LDFDPNVISYEKILEYFFEIHDPTTLNSQGPDFGTQYRSEIFYLNNQQKITAEKMIEKENVKLSGKVVTKTSLVKNYCPAEEYHQRYLEKR

SEQ ID NO: 102903 - protein, 122 aa, Unknown
  Bacterial polypetide isolated from the Sargasso Sea
FKLGESEAYNVAFNEGTDARFCKQYEIFKDTPDGVFIDKLSGAPLFDTSDRFDSKSGWLSFTKSVDGAVYELEDNSHGMQRVEIRSVSSGIHLGHVFNDGPNGQPRYCINATVLEFKQRDNL

SEQ ID NO: 102904 - protein, 190 aa, Unknown
  Bacterial polypetide isolated from the Sargasso Sea
NFIVICIFIFFVNNQSYSQELKKTYFGGGCFWCMEESFDKVEGVTNVVSGYSGGVKPNPTYKEVTYGDTGHIEVVEITYDTSKIGFEELLNVFWKNIDPFDAAGQFCDKGYSYKSAAFYMNDDQKKLIEKSIKVIENDFNNKVVTFVKKFEKFYPAEDYHQNYYQTNFINYLLYKKGCGRESKLENIWQK

SEQ ID NO: 102905 - protein, 169 aa, Unknown
  Bacterial polypetide isolated from the Sargasso Sea
MKKILFFILFFCTTAFSQENGKAYFAGGCFWCMEESFEKKEGVLEVISGYSGGTTEDPNYEEATYGNTGHFEVVEILFDKSKTNFEELLNHFWKNIDPFDEYGQFCDKGYSYRSVAFYQSNKEKDLIENSIKKLEKKFKRKIVTYVRKFEKFYIAEEKHQNFYIEKFAS

SEQ ID NO: 102906 - protein, 157 aa, Unknown
  Bacterial polypetide isolated from the Sargasso Sea
SEWRKQLDGAQYNVLFEKGTERPGTGEYNKFYPTEGHFTCAACDQPLYSAQAKFDSGCGWPAFDKIVKDAVVTATDTTLGMRRVEILCSGCGGHLGHVFEGEGFTPTMERHCVNSLSMKFVDSPLPAEAVEEKVLPPFENPMDKAKGLLGELFGKKD

SEQ ID NO: 102907 - protein, 257 aa, Unknown
  Bacterial polypetide isolated from the Sargasso Sea
LKLRHWEEFYPAEEYHQDYLVKNPNGYCPIHATGIKFNQQERIVVDNSSLLTDKNIIVIEAESHCPYCEKFKEDVVNTYQGTIPLTFKLATELKGLDIKTPTWATPTILFFEDGREVFGHQGYMTSEVFYQALGAFKLGKSEAYNVAFNEGTDARFCKQYEIFKDTPDGIFIDKLSGASLFDTDDRFDSKSGWLSFTKSIDGAVYELEDNSYGMQRVEIRSSSSGIHLGHVFNDGPNGQPRYCINATVLEFKQRENL

SEQ ID NO: 102908 - protein, 191 aa, Unknown
  Bacterial polypetide isolated from the Sargasso Sea
MKYFFIIFFFLININFSYSAQKDKAYFAGGCFWCVEESFEKLKGVEEVISGYSGGITENPTYKEVTYGNTGHFEVVEIIYDKKVISFEQLLENFWVNIDPFDAYGQFCDKGYSYRSVAFYQNEEEKKLIERDIKDLQNKFNKKVVTYIRNFEKFYKAEEYHQDFYKIKLERYLRYKKACGREELLKRIWSP

SEQ ID NO: 102909 - protein, 95 aa, Unknown
  Bacterial polypetide isolated from the Sargasso Sea
MSLFGFVSKPAELPDRATALPDRSSPIRVDPNHYILRNTIVEPVPDQIEKAVFGMGCFWGAERLFWSLPGVYSTAVGYAGGITATPHMKMFVRDK

SEQ ID NO: 102910 - protein, 304 aa, Unknown
  Bacterial polypetide isolated from the Sargasso Sea
VNHQDHRGQNVLHDATVAGNLGLVKMILEKNADSSSKNQRGETPLMLAASEAHLEIAKLLLRSGASRLIKDRFGRTAWMHAIDGGNVELVKLLAKGGYPASEKLIFAASRGHTEAVEIMLNFNADPDSRDERQWNALMWAAKNGHTATVQLLLKTGLDINSMGSKNWTPLMLSAGGGHADTARVLLESGADYSIRDQDQWTALTWAAMKGHLPLVELILYYGASIDEKGSDGATPLIWAASQGHSDVVKILLNKGANPLIEDDHGKTALVHALLKNHLQSAQLLYKGGADLNINLLYAAKRGFP

SEQ ID NO: 102911 - protein, 148 aa, Unknown
  Bacterial polypetide isolated from the Sargasso Sea
MEIAILALGCFWGPEIKFNKLNGVIKTEVGYSGGNKESVSYEEVCTGKTNHAEVVKIEFDSSKISYEDILNYFFEIHDPTTIDRQGLDIGSQYRSEIFYSNNNQKLIAENILKKYNQKFNGKIVTKISELKSYCKAEEYHQKYLEKRF

SEQ ID NO: 102912 - protein, 147 aa, Unknown; identical to SEQ ID NO: 102842
  Bacterial polypetide isolated from the Sargasso Sea

SEQ ID NO: 102913 - protein, 86 aa, Unknown
  Bacterial polypetide isolated from the Sargasso Sea
MNELKKAYCAGGCFWGIEESFRTKPGIISTEVGYAGGKDENVNYEKVCKGNTGHAETVKIEFDEKIISYEKILDLFFKMHDSNTER

SEQ ID NO: 102914 - protein, 302 aa, Unknown
  Bacterial polypetide isolated from the Sargasso Sea
GNVELVKLLAKGGYPASEKLIFAASRGHTEAVEIMLNLNADPDSRDERQWNALMWAAKNGHTATVQLLLKTGLDINSMGSKNWTPLMLAAGGGHSDTARVLLESGADYSIRDQDQWTALTWAAMKGHLPLVELILYFGASIDEKGSDGATPLIWAASQGHTDVVKILLNKGANPLIEDDHGKTALVHALLKNHLQSAQLLYKGGADLNINLLYAAKRGFPEMVSYLLKQGADQSWITEKQETPLILASLAKNHKCAEILLKQGADPDWTDQNSLSALNHAVMNGDLEMVNLLLVHSADPNST

SEQ ID NO: 102915 - protein, 119 aa, Unknown
  Bacterial polypetide isolated from the Sargasso Sea
MSKKVIKSDAEWATCLTPEEYKILREKGTEMAFTGKYYNHKEDGTYTCAGCDYELFSSETKFDSGTGWPSFYQALDKDRIIEKEDNTLGMTRVEILCARCESHLGHVFNDGPNPTGLRY

SEQ ID NO: 102916 - protein, 82 aa, Unknown
  Bacterial polypetide isolated from the Sargasso Sea
MEITKALFGAGCFWGVEEYFKNVKGVKNTKVGYSGGKTENPTYEEVCSKDTEHAEVVFLEFDMDIISYEEILNHFWKCHDPT

SEQ ID NO: 102917 - protein, 154 aa, Unknown
  Bacterial polypetide isolated from the Sargasso Sea
MKYINFLFLSLLFLTACKSQTNEVNYEVIKTDNEWREQLDQMSYLVLRKAYTERPYTGKYDNFYEKGTYLCAGCNEPLYKSNNKYNSFCGWPSFDKEIKDKLVFDVDYKLGYPRTEIKCKKCGGHLGHVFNDGPKETTGIRHCVNSAALIFKKS

SEQ ID NO: 102918 - protein, 66 aa, Unknown
  Bacterial polypetide isolated from the Sargasso Sea
MINKDNKYWKSKLDDLSYKVLREAATEIPFSGKYNLHFKNGNYRCKGCDAVLFESDSKFDSGCGWP

SEQ ID NO: 102919 - protein, 125 aa, Unknown
  Bacterial polypetide isolated from the Sargasso Sea
MNKPDDLNSGAPAVQKDDAEWRKQLSDIEYQVTRHAATERPFTGRYHDHWDRGIYDCVCCGTPLFESDTKFDAGCGWPSYFKPINGEVIAEKTDRSHGMLRIEVQCKNCGAHLGHVFEDGPAPTG

SEQ ID NO: 102920 - protein, 158 aa, Unknown
  Bacterial polypetide isolated from the Sargasso Sea
NSPNFERAYFAGGCFWCMEESFENIIGVSKVISGYSGGTTESPTYKEVTYGNTGHFEVIEVIYIPEVVRYEKLLEEFWVNIDPFDAAGQFCDKGYSYRSVAFYQNEKQKDLIENSIKDIEQKFKKKVVTYVREFEKFYKAEAFHQDYYQINFVNYLRY

SEQ ID NO: 102921 - protein, 75 aa, Unknown
  Bacterial polypetide isolated from the Sargasso Sea
MKVFFLSFLILFNSSAILSAQNLSKAYFAGGCFWCMEESFEQLKGVNEVVSGYSGGITANPTYREVTYGDTGHFE

SEQ ID NO: 102922 - protein, 92 aa, Unknown
  Bacterial polypetide isolated from the Sargasso Sea
MSKEESQVAILGGGCFWCVEAVFERVDGVIDVVSGYAGGHTKNPTYKDVTSGNTGHAEVCKITFDTKLISYDQILDVFWKSHDPTTLNRQGK

SEQ ID NO: 102923 - protein, 123 aa, Unknown
  Bacterial polypetide isolated from the Sargasso Sea
CYWQTGHVEVVKIDYDTSEVTFDTLIDAFFIMHDPTTLNRQGPDIGEQYKSVIFYNNDEQKNIIKNKIKLIDAMDIHENPVVTEIREAAKFYPAEDYHQDYAMKTGKLCYQQMYVKYNYTPVP

SEQ ID NO: 102924 - protein, 62 aa, Unknown
  Bacterial polypetide isolated from the Sargasso Sea
EKQKAQYQSSLTNAGYGEIVTEIIQSQTFHYAEDYHQQYLAKNPDGYCGHGGCGVSFNLSSD

SEQ ID NO: 102925 - protein, 191 aa, Unknown
  Bacterial polypetide isolated from the Sargasso Sea
CSFIFFNPINTFAEELILAGGCFWCLEHDLESLKGINFVKSGYSGGDLQNPTYENHEGHQEVVVVDYDSKLVTLPEILRLYFRNIDPLDGKGQFCDRGDSYRPVIFFKDATEESDAKNAIVSASNELNVPLEKISVELKSKGQFWLAEEYHQDFAERNELKYKFYRFSCGRDQRLDKLWGDNARSTNLWNE

SEQ ID NO: 102926 - protein, 169 aa, Unknown
  Bacterial polypetide isolated from the Sargasso Sea
GKAYFAGGCFWCMEEVYEKLSGVEEVISGYSGGTTENPTYREVTYGKTGHFEVVEIVYDKEIISFKELLDIFWKNIDPFDPYGQFCDKGYSYRSVAFYQNDEEKKLIENSVKVLEKKFNKEIVTYVRSFDKFYEAEVYHQDFYVKKFQRYLEYKTACRREEILNNIWNL

SEQ ID NO: 102927 - protein, 126 aa, Unknown
  Bacterial polypetide isolated from the Sargasso Sea
MEIAVLALGCFWGPEIKFGKLEGITKTEVGYCGGNNGKTTYEEVCSGNTNHAEVVKLEFDPIKISYEEILNYFFEIHNPTTLNAQGPDIGTQYRSEIFYINEEQKKIAEKIKKKMIKNYLAKLVTK

SEQ ID NO: 102928 - protein, 133 aa, Unknown
  Bacterial polypetide isolated from the Sargasso Sea
MTSSDRIERNSEDWKQTLTPEQFQVTRCGGTERAFTGAYWDNKATGMYHCVCCGAPLFSSQTKFESGTGWPSFWDGVSPEAITTKRDLTHGMVRVEINCARCDAHLGHVFPDGPAPTGQRYCVNSASLDFRAG

SEQ ID NO: 102929 - protein, 26 aa, Unknown
  Bacterial polypetide isolated from the Sargasso Sea
HQQYLAKNPGGYCGLGGTGVCLPPES

SEQ ID NO: 102930 - protein, 150 aa, Unknown
  Bacterial polypetide isolated from the Sargasso Sea
MKTAYFSLGCFWSPQLEFEKIKGVVKAEVGYCGGNDPNTTYEKVCSGSTNHAETVKVDFDENVVSYEELVKVFFKIHDPTQLNRQGPDIGTQYRSEIFYKDKFQKEVAEKIKREFNEKLNGKIVTNISEEKLYQTAEEYHQYYLKRKFTI

SEQ ID NO: 102931 - protein, 132 aa, Unknown
  Bacterial polypetide isolated from the Sargasso Sea
MAIAEPNHRTAYFAGGCFWCTETDFEKIDGVSEVISGFMGGEKANPSYNDVASGRTQHRETVKVVFDPASVSYQQLLSTFWRMHDPSDATGSFVDRGRQYSSAIYYVDAEQQRLAEGGAKALDASGKFDAPI

SEQ ID NO: 102932 - protein, 192 aa, Unknown
  Bacterial polypetide isolated from the Sargasso Sea
MKFLFLSFVILFFSTKVAISQNTEKAYFAGGCFWCMEESFEKLNGVEEVISGYSGGITANPTYREVTYGDTGHFEVVEIIYDKNKVSYEDLLKNFWINIDPFDAYGQFCDKGYSYRSVAFYENEKQKNLIERDVKKFEKKFKKKVVTYIKKFEVFYKAEDKHQDYYQEYFENYLRYKKACKREKILSNIWGS

SEQ ID NO: 102933 - protein, 120 aa, Unknown
  Bacterial polypetide isolated from the Sargasso Sea
MEIAVLALGCFWGPEIKFSKLNGVVKTEVGYCGGNSSETNYEEVCSGKTNHAEVVKIEFDNSKISYEKILNYFFEIHNPTTLNKQGPDIGTQYRSEIFYLSEDQKKIATNVLKHYNKKFD

SEQ ID NO: 102934 - protein, 183 aa, Unknown
  Bacterial polypetide isolated from the Sargasso Sea
LLLFLVSTSFSHSKDKAYFAGGCFWCMEESFEMLEGVEEVISGYSGGITANPTYREVTYGDTGHFEVVEIIYDKEKISYKELLKNFWLNIDPFDAYGQFCDKGYSYRSVAFYENDYQKDLIDKDIKRLEKKFKKKVVTYVKEFEIFYKAEDKHQDYYQVYLENYLKYKKACKRERILDIIWGS

SEQ ID NO: 102935 - protein, 142 aa, Unknown
  Bacterial polypetide isolated from the Sargasso Sea
WLKNPSYNQVLTGKTGHAESVRISYNPNQISFSNLVEVFFASHDPTTLNRQGPDVGTHYRSIAFYEFDEEKKIIEQEIKRLLENQIYPVIVTEIKKFEKFYLAENYHQDYKIKNPNNPYIWNVSVPRIEKFKSNYTDLLKKE

SEQ ID NO: 102936 - protein, 39 aa, Unknown
  Bacterial polypetide isolated from the Sargasso Sea
DGPGPLGLRYCINSAALKFIPKNDLDKEGYQIYQSLFNN

SEQ ID NO: 102937 - protein, 138 aa, Unknown
  Bacterial polypetide isolated from the Sargasso Sea
MKSLATFGTGCFWCTEACFKELNGVIEVRPGYAGGKTHNPSYEQICTGQTGHAEVIRIVYDEKIISFEELLRVFWYVHDPTQLNRQGNDIGTQYRSVIFYHSDEQKELSLVYKSKLDEKKVWNAKIVTEISAINNFLC

SEQ ID NO: 102938 - protein, 97 aa, Unknown
  Bacterial polypetide isolated from the Sargasso Sea
MKVIIFIILILFNSSTILKAQNLSKAYFAGGCFWCMEESFEKLEGVKEVISGYSGGITANPTYREVTYGDTGHFEVVEIIYDKEKISYEKLLKNFGL

SEQ ID NO: 102939 - protein, 84 aa, Unknown
  Bacterial polypetide isolated from the Sargasso Sea
ISYEKILKIFFQIHDPTTLNSQGPDFGTQYRSEIFYLNNNQKLVAEKILNEVNERLSGKVVTKISLLKNYCPAEEYHQKYLEKR

SEQ ID NO: 102940 - protein, 190 aa, Unknown
  Bacterial polypetide isolated from the Sargasso Sea
MRLFYYFFLLFLISTSFSHSKDKAYFAGGCFWCMEESFEMLEGVEEVISGYSGGITANPTYREVTYGDTGHFEVVEIIYDKEKISYKELLKNFWLNIDPFDAYGQFCDKGYSYRSVAFYENDYQKDLIDKDIKRLEKKFKKKVVTYVKEFEIFYKAEDKHQDYYQVYLENYLKYKKACKRERILDIIWGS

SEQ ID NO: 102941 - protein, 191 aa, Unknown
  Bacterial polypetide isolated from the Sargasso Sea
MKKFIIVLILLINTKAISQELDKAYFAGGCFWCMEESFEKTEGVIEVISGYSGGKTSNPTYEEVTYGNTGHFETVEVIFDKSKTNYKTLLEVFWINIDPFDAQGQFCDKGYSYRSVAFYQNENQKKLIDNSILSIEKKFNQEVVTYVKEFKQFYKAEDNHQNYYNENFINYLLYKNACGRDNRLNKIWKNE

SEQ ID NO: 102942 - protein, 120 aa, Unknown
  Bacterial polypetide isolated from the Sargasso Sea
MLFFTFTLSCFIWSTNESSTSHIETIVLGSGCFWGAEKGYEALDGVIDAVSGYADGEGVKPSYREITKFSNKFNPDNHAEVVEVTFNKNLISLEELIVHYLESHDPTQLNRQGNDIGTQY

SEQ ID NO: 102943 - protein, 150 aa, Unknown
  Bacterial polypetide isolated from the Sargasso Sea
MKTAYFSLGCFWSPQLEFEKIKGVKKAEVGYCGGDDPNTTYEKVCSGSTNHAETVKVEFDENVVTYEELVRVFFKIHDPTQFNRQGPDIGTQYRSEIFYKDEEQKKVAEKVKKEFNKKLGGKIVTNVSKEKLYQPAEQYHQYYLKRGSIM

SEQ ID NO: 102944 - protein, 191 aa, Unknown
  Bacterial polypetide isolated from the Sargasso Sea
MKYFIIIFTLLINTNFSYSAQKDKAYFAGGCFWCVEESFEKLKGVEEVISGYSGGVTENPTYKEVTYGKTGHFEVVEIIYDKTIISYKELLENFWINIDPFDAYGQFCDKGYSYRSVAFYSNDEQKNLIEKGIKELEGKFNKKVVTYIRNFEKFYKAEEYHQDFYKIKFERYLRYKKACGREELLKRIWSQ

SEQ ID NO: 102945 - protein, 80 aa, Unknown
  Bacterial polypetide isolated from the Sargasso Sea
YGAITTEILADQSFYFAEDYHQQYLAKPGSRPYCSAMPTQTLLGDFEGSNYKLPKQVWDKYDWSISHCVLRSDNSPIALG

SEQ ID NO: 102946 - protein, 114 aa, Unknown
  Bacterial polypetide isolated from the Sargasso Sea
MVAWFTVSAVASISPVLAKEDLPNATKHIETIVLGSGCFWGAEKRYEALNGVLDAVSGYADGQGFKATYKNITRSSRRFDENNYAEVVKVTYNSNKLSTEDLLKHYFESHDPTQ

SEQ ID NO: 102947 - protein, 87 aa, Unknown
  Bacterial polypetide isolated from the Sargasso Sea
MANDTENKKAVFAAGCFWGVESTFQQMDGVKSTTVGYIGGKVKNPSYELVCTGITGHAEAVEVEYNPNVVSFEKLLDTFFQLHDPTT

SEQ ID NO: 102948 - protein, 49 aa, Unknown
  Bacterial polypetide isolated from the Sargasso Sea
EELVRFFFKIHDPTQLNRQGPDIGTQYRSGNILQRRKSKKNSRKYKKRI

SEQ ID NO: 102949 - protein, 35 aa, Unknown
  Bacterial polypetide isolated from the Sargasso Sea
EYKDYFLAEEYHQQYLAKNPNGYCGLQGTGIECQK

SEQ ID NO: 102950 - protein, 65 aa, Unknown
  Bacterial polypetide isolated from the Sargasso Sea
DLNEAIKSKEIYQSELIKNNFNEITTDIEIAKEYYLAEEYHQQYLAKNPNGYCGIGGTGCSFPNE

SEQ ID NO: 102951 - protein, 114 aa, Unknown
  Bacterial polypetide isolated from the Sargasso Sea
GHNAETTYKEVCTGTTNHAEVVKLDFDPKVISYEEILKYFFEIHDPTTLNSQGPDFGTQYRSEIFYLNDKQKNIAEKMIEKENIKLSGKVVTKISLIKNYCTAEEYHQRYLEKR

SEQ ID NO: 102952 - protein, 176 aa, Unknown
  Bacterial polypetide isolated from the Sargasso Sea
MAFSKSIETAYFAGGCFWCMEESFEKTEGVIEVISGYSGGNTKNPTYKEVTYGNTGHFETVEVQYYNNEISYKSLLDVYWRNIDPFDIEGQFCDKGYSYRSVVFYKNLKQKNQIEKDIKYIEKKFNKKVVTYVLKFDKFYKAEDNHQNYYQENFINYLLYKKGCGRENKLNSLWNK

SEQ ID NO: 102953 - protein, 69 aa, Unknown
  Bacterial polypetide isolated from the Sargasso Sea
MKYFLPLIIALSMFINPVNAFAEELILAGGCFWCLEHDLESLRGINFVQSGYSGGDLLNPNYENHEGHQ

SEQ ID NO: 102954 - protein, 101 aa, Unknown
  Bacterial polypetide isolated from the Sargasso Sea
MKYLLPLIIAFSIFMNPVNAFAEELILAGGCFWCLEHDLESLKGVNFVKSGYSGGDLQNPTYENHIGHQEVVLVNYDSQLVTLPEILRLYFRNIDPLDGKG

SEQ ID NO: 102955 - protein, 217 aa, Unknown
  Bacterial polypetide isolated from the Sargasso Sea
MKENNWLDPFFIQSHLSEEESNIQINVRNFCDNELKPTVVVRNRKNEFDQDLYPKFGSLGVLGQTVKTHGGSGTSNLAYGLVAYEFEKIDSSYRSAISVQSSLVIHPINEFGSQEQKDKYLPQLIKGEKIGCFGLTESEAGSDPTSMKTSFKKTKDGYILNGSKNWITNSPIADIFIIWAIEENKDHKSIEGFILEKNYNGLETSTIENKTSLKISP

SEQ ID NO: 102956 - protein, 86 aa, Unknown
  Bacterial polypetide isolated from the Sargasso Sea
VGGHTENPTYEEVCTGLTGHAEGVEIQYNSRVIDYRSLVLLFFSTHDPTTLNTQGNDIGSQYRSAIFFKSNYEKKIIRSVIAELQI

SEQ ID NO: 102957 - protein, 147 aa, Unknown
  Bacterial polypetide isolated from the Sargasso Sea
MEIAVLGLGCFWGPEIKFSKIDGIIRTEVGYCGGNTTQTTYKDVCTGNTNHAEVVKLEFDPKIISYNKILEFFFEFHDPTTLNSQGPDFGTQYRSEIFYLNEKQKKIAEEIIGLENEKLSGKVVTKLSLLKNYCAAEEYHQRYLEKR

SEQ ID NO: 102958 - protein, 190 aa, Unknown
  Bacterial polypetide isolated from the Sargasso Sea
MRLFYYFLLLFLVSTSFSHSKDKAYFAGGCFWCMEESFEMLEGVEEVISGYSGGITANPTYREVTYGDTGHFEVVEIIYDKEKISYKELLKNFWLNIDPFDAYGQFCDKGYSYRSVAFYENDYQKDLIEKDIKRLEKKFKKKVVTYVKEFEIFYKAEDKHQDYYQVYLENYLKYKKACKRERILDIIWGS

SEQ ID NO: 102959 - protein, 64 aa, Unknown
  Bacterial polypetide isolated from the Sargasso Sea
WPSFYDVVSSDAVKVKVDNSHGMIREEALCGYCEAHLGHVFSDGPQPTGLRYCINSLSLDFKED

SEQ ID NO: 102960 - protein, 174 aa, Unknown
  Bacterial polypetide isolated from the Sargasso Sea
FAQDLEKAYFAGGCFWCMEESFEKFEGVSKVISGYSGGSTENPTYEEVTYSNTGHFETIEIIYDKKITNYNKILDHFWINIDPFDAVGQFCDKGYSYRSVAFFKDDEQRKLINKSKRKIEKKFNKKVVTYVIKFDKFYEAENYHQDYYRKKFLNYLRYKKACGREKKLNSIWNK

SEQ ID NO: 102961 - protein, 124 aa, Unknown
  Bacterial polypetide isolated from the Sargasso Sea
MNKKNLDHLSQEQHYVTQEKGTEAPFSGELLHNKEKGTYQCVCCGADLFSSNTKFDSGTGWPSFYDVLSSDAVKVKVDNSHGMIREEALCGYCEAHLGHVFSDGPQPTGLRYCINSLSLDFKKD

SEQ ID NO: 102962 - protein, 64 aa, Unknown
  Bacterial polypetide isolated from the Sargasso Sea
PSFFEQISPEAIKTETDRSHGMVRIEIMCAKCDAHLGHVFDDGPEPTGKRYCVNSLSINYEEFE

SEQ ID NO: 102963 - protein, 88 aa, Unknown
  Bacterial polypetide isolated from the Sargasso Sea
MLSSLIVGAGCFWGVEVLYEQMPGVINATSGYSGGHLDNPRYEDVLTGKTGHVEVVKIDYDSSEVTFNELIDTFFIIHDPDNVKSSRT

SEQ ID NO: 102964 - protein, 132 aa, Unknown
  Bacterial polypetide isolated from the Sargasso Sea
MSDKIQKSDAEWQEQLTPKQYQVTRKHATERAFTGEYNGHKADGIYTCVGCSAPLFDSEAKYDSGSGWPSFFKSIDEKSVEEEEDNSHGMRRIEVHCARCDAHLGHLFPDGPQPTGLRYCINSLSLDHKDRQ

SEQ ID NO: 102965 - protein, 104 aa, Unknown
  Bacterial polypetide isolated from the Sargasso Sea
WSGEYNKHYPKGNYNCRGCGNQLFESDTKFDSGSGWPSFDQAIDGSVIELEDRSYGMLRVEVQCSRCKSHLGHVFPDGPRETTGQRYCMNSLSLTFEGKSENPS

SEQ ID NO: 102966 - protein, 83 aa, Unknown
  Bacterial polypetide isolated from the Sargasso Sea
MGSGCFWGAEKGYEALDGVVDAESGYANGYGIKPNYRSIIQFKNKYKENNFAEVVKVTFNSNAITLHEILEHFFETHDPTQLN

SEQ ID NO: 102967 - protein, 72 aa, Unknown
  Bacterial polypetide isolated from the Sargasso Sea
TKFESGTGWPSFYDALDDTITTKEDLSYGMKRVEISCRNCNAHLGHVFPDGPRPTGLRYCVNSLSLSFNENE

SEQ ID NO: 102968 - protein, 121 aa, Unknown
  Bacterial polypetide isolated from the Sargasso Sea
MWFFPTDGHFVCRGCGNPLYSAAAKFKSGCGWPAFDKCYVDSVEVWADRTLEPMRIEITCAGCGGHLGHVFAGERMTPTNERHCVNSVSILHVREQRQLPTLGEEVVTSMQKLAKIRTAVS

SEQ ID NO: 102969 - protein, 84 aa, Unknown
  Bacterial polypetide isolated from the Sargasso Sea
MKKLLSIIFLLLSSTSFANSPNFERAYFAGGCFWCMEESFENILGVSKVISGYSGGTTENPTYKEVTYGNTGHFEVIEVIYVPE

SEQ ID NO: 102970 - protein, 281 aa, Unknown
  Bacterial polypetide isolated from the Sargasso Sea
LAQDILNEYQSLLFEAGYGRVVTLIEPLDNFYLAENYHQDYLKKNPNGYCPDLSTGVVFNEKEKDILDNQDLLIGKQILILDSQNYCPYCEKLKLDVTNEYKGSIPMSYRTSDQLHDLEINAPTWATPSVIFLEDGKEVFSHQGYIDQKDFYLMLGKFKLGDTEAYDVAFNNGTDARFCKEYEIFKNTPDGIFIDKLSGEPLFDTRDRFVSRSGWLSFTRPVEGSVYEKPDNSYGMRRTEIRSVSSDIHLGHVFDDGPNGLPRYCINATVLEFVPRKGSIL

SEQ ID NO: 102971 - protein, 187 aa, Unknown
  Bacterial polypetide isolated from the Sargasso Sea
LINPINTLAEELILAGGCFWCLEHDLESLKGINFVQSGYSGGNLQNPTYENHDGHQEVVLVNYDSKLVSLSEILRLYLRNIDPLDGKGQFCDRGDSYRPVIFFKGKIEESDAKNALFSASNELRVPLEKISVELKSKGQFWLAEEYHQDFADRNELKYKFYRFSCGRDQRLDKLWGDNARSINLWTE

SEQ ID NO: 102972 - protein, 170 aa, Unknown
  Bacterial polypetide isolated from the Sargasso Sea
MSKAYFAGGCFWCMEESFEKIKGVKEVISGYSGGITENPTYREVTYGDTGHFEVIEIIYDNKIITYEGLLKNFWINIDPFDAYGQFCDKGYSYRSVAFYENDKQKTLIERDQKKLEKKFQKKVVTYIKKFEKFYKAEDKHQDYYEIYFQNYLKYKKACRREKILNIIWGS

SEQ ID NO: 102973 - protein, 126 aa, Unknown
  Bacterial polypetide isolated from the Sargasso Sea
MDKIYKNKFKSNLSLLQYKVTQEGATEPPFSHKGFEKDAKVFVCVCCGSKLFRIENKFESGSGWPSFSSPYSSEVITEHSDESYGMIRTEVKCRNCNAHLGHVFEDGPEPTGLRYCINGVAIDGKK

SEQ ID NO: 102974 - protein, 41 aa, Unknown
  Bacterial polypetide isolated from the Sargasso Sea
LHDGPGPLGLRYCINSAALKFIAKKDLEQEGYQIYQSLFNN

SEQ ID NO: 102975 - protein, 95 aa, Unknown
  Bacterial polypetide isolated from the Sargasso Sea
EVVKLDFDPKVISYEKILEYFFEIHDPTTLNSQGPDFGTQYRSEIFYLNDQQKITAEKMIEKENVKLSGKVVTKTSLVKNYCPAEEYHQRYLEKR

SEQ ID NO: 102976 - protein, 191 aa, Unknown
  Bacterial polypetide isolated from the Sargasso Sea
MKKVIIIFVAFLFSEISHSSEFYKKAYFAGGCFWCVEEYFDKQSGVISTVSGYSGGELENPTYKQVTYEDTGHVEVVEVTYDSRKVNFKQLMELHLKNIDPFDGAGQFCDKGKSYRSVIFYKNQEQKNLISEKINKIENMFGKKTFILSWKFKRFYSAEDHHQDYYEKKFINYLLYKSGCGRENRLKEIWN

SEQ ID NO: 102977 - protein, 153 aa, Unknown
  Bacterial polypetide isolated from the Sargasso Sea
MKFFIFIFFIFFNLSTILNAQSLSKAYFAGGCFWCMEESFEKLQGVNEVISGYSGGITANPTYREVTYGDTGHFEVVEIIYDKEKISYEELLKNFWINIDPFDAYGQFCDKGYSYRSVAFYENKIQKELIERDVKKFEKKFEKKVVTYIKKFE

SEQ ID NO: 102978 - protein, 200 aa, Unknown
  Bacterial polypetide isolated from the Sargasso Sea
MKFLLSLIVALSIFVNPVNAFAEELILAGGCFWCLEHDLESLKGINFVESGYSGGDLQNPTYENHEGHQEVVLVNYDSKLVTLPEILRLYFRNIDPLDGKGQFCDRGDSYRPVIFFKDKTEESDAINAIVSASNELRVPLEKISVELKSKGQFWLAEEYHQDFAERNELKYKFYRFSCGRDQRLDKLWGDNARSTNLWNE

SEQ ID NO: 102979 - protein, 200 aa, Unknown
  Bacterial polypetide isolated from the Sargasso Sea
MKYFVPLIIALSIFIHPVNAFAEELILAGGCFWCLEHDLESLKGINFVQSGYSGGDLQNPTYENHEGHQEVVLVDYDSQLVTLPKILRLYFRNIDPLDGKGQFCDRGDSYRPVIFFKDETEESDAKNAIFAASNELLVPLEKISVELKSKGQFWLAEEYHQDFAERNELKYKFYRFSCGRDQRLDKLWGDNARSTNLWKE

SEQ ID NO: 102980 - protein, 176 aa, Unknown
  Bacterial polypetide isolated from the Sargasso Sea
MQSLATFGTGCFWCSEACFKTLKGVQDVFPGYAGGQTQNPSYEDICTGKTGHAEVIRIIYDETIISFEELLRVFWFVHDPTQLNRQGNDIGTQYRSVVFFHDDFQKEKTIFYKNKLIENAVWDSKIVTEISPINNFFPAESYHQDYFLNNPQNGYCQAIVRPKFEKFKKVFSDQLK

SEQ ID NO: 102981 - protein, 197 aa, Unknown
  Bacterial polypetide isolated from the Sargasso Sea
MKKKKTLSLLLIIFFVQLNSQNNKEAYFASGCFWCVESIYESLIGVSKVESGYSGGYTKNPTYYSVLTGKTGHAESIKVYYDAEKISFKQLVKVFFGSHDPTTLNRQGPDRGTHYRSIVFYSNDNEKKIIDEEINRLLKNKTYPKIVTEVKKFEKFYIAEDYHQDYKQKNPNNAYIWNVSVPRINKFKSKFTDLLKD

SEQ ID NO: 102982 - protein, 340 aa, Unknown
  Bacterial polypetide isolated from the Sargasso Sea
MIERGARINDSDSEGRTALFHASENGHSKIISLLVKNGANPNAVSVHNRTPLMQATVNQHLEGMEILLKNGANVDHQNHFGLTSLMLGAQNGDLDSVKKLLLHGAEINTASKNGFTALFMAVQNGHGKLVSLFARFGGEVNQKEKETLRTPLIVAAMEGHTTVVELLLSLKADPSEYDGSGMIPLQGALRSKQFETAELLIKGGSPINHQDHRGQNVLHDATVAGNLGLVKMILEKNADSSSKNQRGETPLMLAASEGHLEIAQLLLRSGASRLIKDRFGRTAWMHAIDGGNVELVKLLAKGGYPASEKLIFAASRGHTEAVEIMLNLNADPDSRDERQW

SEQ ID NO: 102983 - protein, 192 aa, Unknown
  Bacterial polypetide isolated from the Sargasso Sea
MKVTFFIILIFFNLSTILNAQNLSKAYFAGGCFWCMEESFERLEGVKEVISGYSGGITENPTYREVTYGDTGHFEVVEIIYDEEKISYENLLKNFWINIDPFDAYGQFCDKGYSYRSVAFYENELQKELIEGDVKKFEKKFEKKVVTYIKKFEIFYKAEDKHQDYYEVYFENYLRYKKACRREKILDNIWGS

SEQ ID NO: 102984 - protein, 190 aa, Unknown
  Bacterial polypetide isolated from the Sargasso Sea
MIKIFIILIIIFNTQVYSQEINKAYFAGGCFWCMEESFEKTEGVIEVISGYSGGKTSNPTYEDVTYGNTGHFETVEVLYDKSKTNYKTLLNVFWINIDPFDSAGQFCDKGYSYRSVVFYKNDNQKKLIEQSIKKIENDMNKKVVTYIRNFEKFYKAEDKHQDYYNEYFINYLIYKKACGREDRLNKIWNK

SEQ ID NO: 102985 - protein, 192 aa, Unknown; identical to SEQ ID NO: 102834
  Bacterial polypetide isolated from the Sargasso Sea

SEQ ID NO: 102986 - protein, 192 aa, Unknown
  Bacterial polypetide isolated from the Sargasso Sea
MKVIIFIILIFFNLSTILNAKNLSKAYFAGGCFWCMEESFEKLEGVKEVISGYSGGITANPTYREVTYGDTGHFEVVEIIYDEEKISYEKLLKNFWINIDPFDAYGQFCDKGYSYRSVAFYENEIQKELIERDVKKFEKKFEKKVVTYIKKFEIFYKAEDKHQDYYEVYFENYLRYKKACRREKILDNIWGS

SEQ ID NO: 102987 - protein, 218 aa, Unknown
  Bacterial polypetide isolated from the Sargasso Sea
MYKILKTVFILFLTLTTQISPFLGNLTLRAQSKDSIILAGGCFWCVEADFEKVNGVSEVISGYTGGFVENPTYKQVVKGGTGHYEAVIIHFDPEIITTKNILYKFFRSIDPTDAGGQFCDRGHSYKSAIFAKPNQILIAKNALLEAEAILGEKIVTPILEVGKFFTAEKYHQDYYKGENLVLTRFGPIKQKNAYKRYRSACGRDERLKEVWGKDAFLN

SEQ ID NO: 102988 - protein, 200 aa, Unknown
  Bacterial polypetide isolated from the Sargasso Sea
MKYLLSLIVAFSIFVNPVNAFAEELILAGGCFWCLEHDLESLKGVNFVQSGYSGGDLQNPTYENHEGHQEVVLVNYDSKLVTLPEILRLYFRNIDPLDGKGQFCDRGDSYRPVIFFKDATEESDAINAVVSASNELRVPLEKIYVELKSKGQFWLAEEYHQDFAERNELKYKFYRFSCGRDQRLDKLWGDNARSTNLWNE

SEQ ID NO: 102989 - protein, 131 aa, Unknown
  Bacterial polypetide isolated from the Sargasso Sea
MDKVEKTDKEWQACLTPQEYQILREKGTEMAFTGKYYKHKEAGTYTCAGCDNKLFSSETKYDSGSGWPAFFDALDKTKVNTKRDLSFGMIRTEITCAKCDSHLGHVFEDGPKPTGLRYCVNSVALDFVANK

SEQ ID NO: 102990 - protein, 191 aa, Unknown
  Bacterial polypetide isolated from the Sargasso Sea
MRFLLFIFLNLIINNSVLASEKSKAYFAGGCFWCMEESFEKLTGVEKVISGYSGGKTENPTYEEVTYGNTGHLEVVEVIYDASLISFEELLKNFWLNIDPFDPYGQFCDKGYSYRSAVFYTNQKEKNLIEKDFKRLEKKFNKKVVTYIREFEKFYIAEDRHQDYYQVYFLNYLKYKKACRREEILNRIWKM

SEQ ID NO: 102991 - protein, 166 aa, Unknown
  Bacterial polypetide isolated from the Sargasso Sea
MKFFTIIFFIISFITAAEANQKGKAYFAGGCFWCMEEVYEKLSGVEEVISGYSGGTTENPTYREVTYGKTGHFEVVEIVYDKEIISFKELLNIFWKNIDPFDPYGQFCDKGYSYRSVAFYQNDEEKKLIENSVKELEKKFNKEIVTYVRSFDKFYETEVYHPRFLC

SEQ ID NO: 102992 - protein, 174 aa, Unknown
  Bacterial polypetide isolated from the Sargasso Sea
FAESEEAIFAGGCFWCLEHDLEKLDGVVSAESGYSGGDLINPTYQDHNGHQEVVKVIFDSDIISYKDLLKQYWVNIDPFDNNGQFCDRGDSYKPVIFTSNQAQKRDAKESKETISVGLNIPLEQLKVDIVESKVFWLAENYHQDFAIKNPLKYNFYRTSCGRDNRLKKVWGEYK

SEQ ID NO: 102993 - protein, 200 aa, Unknown
  Bacterial polypetide isolated from the Sargasso Sea
MKYFLPLIIVLSIFINPLNAFAEELILAGGCFWCLEHDLESLKGINFVQSGYSGGDLQNPTYENHEGHQEVVLVDYDSTLVTLPKILRLYFRNIDPLDGKGQFCDRGDSYRPVIFFKDETEESDATNAIVSASNELRVPLEKIYVELKSKGQFWLAEEYHQDFAERNELKYKFYRFSCGRDQRLDKLWGDNARSTNLWTE

SEQ ID NO: 102994 - protein, 152 aa, Unknown
  Bacterial polypetide isolated from the Sargasso Sea
MEKATFAAGCFWHVEEVFSKTDGVKSTAVGYTGGHTDNPTYEDVCTDRTGHAEAIQVEYDPNEISYSDLVKVFFANHNPTTANRQGPDVGIQYRSAIFCHNEEQEKTAKEVKEELNPSAHKTFGNDIVTEIKPASKFYRAEEYHQKYFEKNF

SEQ ID NO: 102995 - protein, 150 aa, Unknown
  Bacterial polypetide isolated from the Sargasso Sea
MKTAYFSLGCFWSPQLEFEKIKGVKKAEVGYCGGNDPNTTYEKVCSGSTNHAETIKVEFDENVVSYEELVRVFFKIHDPTQLNRQGPDIGTQYRSEIFYNDEDQKKIAEKIKNEFNNKLKGKVVTNISKEKLYQPAEEYHQYYLKRKGIL

SEQ ID NO: 102996 - protein, 146 aa, Unknown
  Bacterial polypetide isolated from the Sargasso Sea
MPGKKIQPKQKKLSDMAEEFDFSHLSPEEFHVLREAGTERAWSGEYNKHYSKGNYNCRGCGNQLFESDTKFDSGSGWPSFDQAIDGSVIELEDRSYGMLRVEVQCSRCKSHLGHVFPDGPRETTSQRYCMNSLSLTFEGKPENSSE

SEQ ID NO: 102997 - protein, 148 aa, Unknown
  Bacterial polypetide isolated from the Sargasso Sea
MEIAILALGCFWKPEMEFDKFNGIVKTEVGYCGGNVNKTNYEEVCAGKTNHAEVVKIEFDTSKVSYEDILNYFFKIHDPTTLNKQGPDIGTQYRSEIFYCNNSQKEIAEKILNKINQKLNGKVVTKISKEKNYCKAEEYHQKYFEKNH

SEQ ID NO: 102998 - protein, 147 aa, Unknown
  Bacterial polypetide isolated from the Sargasso Sea
MEIAVLALGCFWGPEKKYGQLEGVYRTEVGYCGGNSPNTNYREVCTGSTNHAEAVKLEFDPKVISYEEIVKKFFEFHDPTTLNSQGPDFGTQYRSEIFYLNDEQKKIAQKVINEENVRLSGRVVTKLSELKNYCAAEEYHQKYLEKR

SEQ ID NO: 102999 - protein, 108 aa, Unknown
  Bacterial polypetide isolated from the Sargasso Sea
TYREVCTGNTNHAEVVNFEFDEKIITYEKILNTFFQIHDPTTLNSQGPDFGTQYRSEIFYLNDKQKLVAEKVLKEIDKKLSGKVVTKISLLKNYCPAEEYHQKYLEKK

SEQ ID NO: 103000 - protein, 147 aa, Unknown
  Bacterial polypetide isolated from the Sargasso Sea
MEIAVLGLGCFWGPEIKFSKIDGIIRTEVGYCGGNTTQTSYREVCTGNTNHAEVVKLEFDPKIISYNKVLEFFFEFHDPTTLNSQGPDFGTQYRSEIFYLNEKQKNIAEEIIEKENKKLSGKVVTKLSLLKNYCPAEEYHQRYLEKR

SEQ ID NO: 103001 - protein, 148 aa, Unknown
  Bacterial polypetide isolated from the Sargasso Sea
MEIAILALGCFWGPEQKFSKIDGIIRTEVGYCGGNTENTTYKDVCTGTTNHAEVVKLEYDEKTITYADILKYFFEFHDPTTLNSQGYDFGTQYRSEIFYLNEKQKMSAEKMIEAENKKLNGKVVTQLSLLKNYCTAEEYHQKYLDKKF

SEQ ID NO: 103002 - protein, 185 aa, Unknown
  Bacterial polypetide isolated from the Sargasso Sea
MISFIFFLATNVVKSEISKAYFAGGCFWCMEEVFEKTEGVIEVASGYSGGTSKNPTYKEVTYGDTGHFEVVEVVYNKSKINFENLANIFWKNIDPFDKAGQFCDKGYSYRSVAFYTNNDEKKLIEDDIQEIEKKFNQKVVTYVRKFEIFYKAEEHHQDYYKEKFLNYLLYKEGCGRQRKLDNIWQ

SEQ ID NO: 103003 - protein, 175 aa, Unknown
  Bacterial polypetide isolated from the Sargasso Sea
MFAQDLEKAYFAGGCFWCMEESFEKFEGVSKVISGYSGGSTENPTYEEVTYSNTGHFETIEIIYDKNITSYNKILDHFWINIDPFDAVGQFCDKGYSYRSVAFFKDDEQRKLINKSKRKIEKKFNKKVVTYVIKFDKFYEAENYHQDYYRKKFLNYLRYKKACGREKKLNSIWNK

SEQ ID NO: 103004 - protein, 55 aa, Unknown
  Bacterial polypetide isolated from the Sargasso Sea
MKKYLFIILIFLISTSAQSKNFKKVYFAGGCFWCMEESFDGVEGVLSTVSGYSGG

SEQ ID NO: 103005 - protein, 131 aa, Unknown
  Bacterial polypetide isolated from the Sargasso Sea
MSERIERSPEEWKQTLSPEQFQVARCGGTERAFTGAYWNKKDSGTYHCICCDAPLFSSTTKFESGTGWPSFWDGISSEAITTKQDLSHGVVRVEINCARCDAHLGHVFPDGPAPTGQRYCVNSASLDFKAG

SEQ ID NO: 103006 - protein, 113 aa, Unknown
  Bacterial polypetide isolated from the Sargasso Sea
NSSKTSYEEVCTGTTNHAEVVKLEFDPNKISYEKILEFFFQIHDPTTLNSQGPDFGTQYRSEIFYLNDNQKNIAEKITKKINEKLSGKVVTKISLLKNYCIAEEYHQKYLDKN

SEQ ID NO: 103007 - protein, 97 aa, Unknown
  Bacterial polypetide isolated from the Sargasso Sea
MKVIIFISLIFFNLSTILNAQNLSKAYFAGGCFWCMEESFEKLEGVKEVISGYSGGITKNPTYREVTYGDTGHFEVVEIIYDEEKNLLRKFIKKFLD

SEQ ID NO: 103008 - protein, 200 aa, Unknown
  Bacterial polypetide isolated from the Sargasso Sea
MKYFLPLIIALSILINPLNTLAEELILAGGCFWCLEHDLESLKGINFVQSGYSGGDLQNPTYENHEGHQEVVLINYDPQIVSLPEILRLYLRNIDPLDGKGQFCDRGDSYRPVIFFNDSTEKSDAKNALISASNELKEPLEKITVELKSKGKFWLAEEYHQDFAERNELKYKFYRYSCGRDQRLDKLWGNNARSTNLWIE

SEQ ID NO: 103009 - protein, 192 aa, Unknown
  Bacterial polypetide isolated from the Sargasso Sea
MKVLFISIIILINSSVVLKAQNFSKAYFAGGCFWCMEESFENILGVSKVISGYSGGTTENPTYKEVTYGNTGHFEVIEVIYIPEVISYEKLLKEFWLNIDPFDAAGQFCDKGYSYRSVAFYQNEKQKNLIKNSIKEIEKKFKKKVVTYVRKFDKFYKAEAFHQDYYQINFVNYLRYKKACRREATLSNIWGS

SEQ ID NO: 103010 - protein, 148 aa, Unknown
  Bacterial polypetide isolated from the Sargasso Sea
MKIAFFSLGCFWGPQLKFEKIKGVKNTEVGYCGGDDPNTTYEKVCSGSTNHAETVKVEFDDNIVSYEELVKFFFQIHDPTQLNMQGPDIGSQYRSEIFYKDENQKKVAERIKDEFNKKFNGNIVTNISKEKLYQPAEEYHQYYLKKKY

SEQ ID NO: 103011 - protein, 174 aa, Unknown
  Bacterial polypetide isolated from the Sargasso Sea
MATEKNKAYFAGGCFWCMEESFEKLSGVEEVISGYSGGKTKNPTYKEVTYGNTGHFEVIEVIYDKNLISFQKLLENFWKNIDPFDSFGQFCDKGYSYRSVAFFTNEKEKDLIEKDIKKLEKQFNKKIVTYVRKFEKFYIAEDRHQNYYKEYLLNYLKYKKACRREEILNRIWKM

SEQ ID NO: 103012 - protein, 192 aa, Unknown
  Bacterial polypetide isolated from the Sargasso Sea
MKKLLSIIFFLISSISFANSPNFEKAYFAGGCFWCMEESFENILGVSKVISGYSGGTTENPTYKEVTYGNTGHFEVIEVIYIPEVVSYEKLLEEFWVNIDPFDAVGQFCDKGYSYRSVAFYQNDEQKNLIENSIKEIEKKFKKKVVTYVRKFDKFYIAEAVHQDYYQINFLNYLRYKKGCRREAILNSIWGN

SEQ ID NO: 103013 - protein, 165 aa, Unknown
  Bacterial polypetide isolated from the Sargasso Sea
FAGGCFWCMEESFEKFDGVSKVISGYSGGSTENPTYEEVTYSNTGHFETIEIIYDKNITSFNKILDHFWINIDPFDAVGQFCDKGYSYRSVAFFKDDEQRKLINKSKRKIEQKFKKKVVTYVIKFDKFYEAENYHQDYYRKKFLNYLRYKKACGREKKLNSIWNK

SEQ ID NO: 103014 - protein, 150 aa, Unknown
  Bacterial polypetide isolated from the Sargasso Sea
MKTAYFSLGCFWSPQLEFEKVDGVKKAEVGYCGGDDPNTTYEKVCSGSTNHAETVKVDYDEKLVSYDDLVRFFFKIHDPTQLNKQGPDIGTQYRSEIFYTDENQKKIAEKIKNEFNDKFKGKVVTKVSKEKLYQPAEEYHQYYLKRKSFI

SEQ ID NO: 103015 - protein, 113 aa, Unknown
  Bacterial polypetide isolated from the Sargasso Sea
MIFRYLFILVLLPSFTFAKLNTIYLAGGCFWCVEEVYEEIKGVVSVQSGYSGGYVENPTYREVVEGNTGHIEAAEIVYDSDIVSLDTLVKSFFLNIDPFDNNGQFCDRGYSYK

SEQ ID NO: 103016 - protein, 173 aa, Unknown
  Bacterial polypetide isolated from the Sargasso Sea
MKYILSLIVALSIFVYPVNAFAEELILAGGCFWCLEHDLESLKGINLVESGYSGGDLQNPTYENHEGHQEVVLVNYDSKLVTLSEILRLYFRNIDPLDGKGQFCDRGDSYKPVIFFKDEIEESEAKNAILSASNELRVPLEKIFVELKSKGKFWLAEEYHQDFAERNELKYKF

SEQ ID NO: 103017 - protein, 194 aa, Unknown
  Bacterial polypetide isolated from the Sargasso Sea
MKKTLSLLLIIFFVQLNSQNNKEAYFASGCFWCVESIYESLIGVSKVESGYSGGYTKNPTYYSVLTGKTGHAESIKVYYDAKKISFKELVKVFFGSHDPTTLNRQGPDRGTHYRSIAFYSNDNEKKIINEEINRLLKNKTYPKIVTEVKKFEKFYIAEDYHQDYKQKNPNNAYIWNVSVPRINKFKSKYSELLK

SEQ ID NO: 103018 - protein, 56 aa, Unknown
  Bacterial polypetide isolated from the Sargasso Sea
MKKTYFGGGCFWCMEESFDKVEGVTNVVSGYSGGTTPNPTYKEVTYGDTGHIEVVE

SEQ ID NO: 103019 - protein, 109 aa, Unknown
  Bacterial polypetide isolated from the Sargasso Sea
TNYKEVCTGTTNHAEVVKLDFDPEVISYEKIIKYFFEIHDPTTLNSQGPDFGTQYRSEIFYFNDEQKSIAEKMIEKENVKLSGKVVTKISLVKNYCPAEEYHQRYLQKR

SEQ ID NO: 103020 - protein, 190 aa, Unknown
  Bacterial polypetide isolated from the Sargasso Sea
NFIVIFIFIFFVNNQSYSQELKKAYFGGGCFWCMEESFDKVEGVTNVVSGYSGGTKPNPTYKEVTYGDTGHIEVIEITYDTNKIGFEELLNVFWINIDPFDAAGQFCDKGYSYKSAAFYMNDNQKKLIEKSIKAIENDFNNKVVTFVKKFEKFYPAEDYHQNYYQTNFINYLLYKKGCGRESRLENIWQQ

SEQ ID NO: 103021 - protein, 192 aa, Unknown
  Bacterial polypetide isolated from the Sargasso Sea
MKKLLSIIFILISSISFANSPNFERAYFAGGCFWCMEESFENILGVSKVISGYSGGTTENPTYKEVTYGNTGHFEVIEVIYIPEVVSYEKLLEEFWINIDPFDAAGQFCDKGYSYRSVAFYQNDKQKNLIENSIKEIEKKFKKKVVTYVRKFDKFYIAEAVHQDYYQINFLNYLRYKKGCRREAILNSIWGY

SEQ ID NO: 103022 - protein, 218 aa, Unknown
  Bacterial polypetide isolated from the Sargasso Sea
MNKLTDFERYVIEEKGTERPFSGEYYKHDAKGVYLCKKCHAPLYRSEDKFNAHCGWPAFDDEIPGAVSRHVDADGRRTEIVCSQCGGHLGHVFEGEYLTPKNIRHCVNSVSMLFQAADEEATSTHKTAFATFGAGCFWCVEAIFKGLKGVLNVSSGYSGGEASDADYKSVCSGLTGHAEVVHIEFDPAQISFTTLLQVLFESHDPTTLNRQGNDKGPQ

SEQ ID NO: 103023 - protein, 54 aa, Unknown
  Bacterial polypetide isolated from the Sargasso Sea
MSEGYDKAYFAGGCFWCMEPPFEDLDGVIEATSGYMGGSVENPTYEEVTTGTTG

SEQ ID NO: 103024 - protein, 55 aa, Unknown
  Bacterial polypetide isolated from the Sargasso Sea
KDEKITLKSRILGNITTEIKLLEKFYYAEEYHQQYLAKNPNGYCSMKGTGVFCAV

SEQ ID NO: 103025 - protein, 147 aa, Unknown
  Bacterial polypetide isolated from the Sargasso Sea
MEIAVLALGCFWGPEIKFSKIDGIIRTEVGYCGGNSPQTTYKEVCTGTTNHAEVVKLEFDNKIISYSKILEHFFEFHDPTTLNMQGPDRGTQYRSEIFYLNDAQKQIAEKVIDDENKKLSGKVVTKLSLLKNYCPAEEYHQKYLEKR

SEQ ID NO: 103026 - protein, 426 aa, Unknown
  Bacterial polypetide isolated from the Sargasso Sea
LGYNALLSHTTCHCNIAIGRESLYSNTTACFNTAVGGCSLYANTTGTNNTAVGYQALKTNECSNDNTALGTYALCLTTGHSNTAVGKSAVQANSTGALNTGIGKFALSSNTTACFNTAVGGCALYDNTTGAENTATGYLALGDNTTGAENTAIGYLALRLNTTGGCNVGIGPHSLYTNTTGAKNIAIGRVAMYKNTSGCHNTASGYGASYENTTGCLNTASGFYALRNNTTASYNTAMGSYSLYDNTTGAGNLALGYAALTNNTTASYNTAVGYAALYDNTTGGLNTAVGRQALENNTTGGNNTASGYFALGSNTTGSCNDAFGWNALVTNTTGGYNTAMGLWSLKLNTTGCKNASVGSHSLQSNTEGCVNTAIGYQSLQANTTASYNTAVGSCALFDNTTGHSNTASGFYSLANNTTGVKTLLRV

SEQ ID NO: 103027 - protein, 188 aa, Unknown
  Bacterial polypetide isolated from the Sargasso Sea
MLLIIYLILPINFALSENLNKTYFAGGCFWCMEESFEKLNGVKEVISGYSGGTTTNPTYKEVTFGNTGHFEVVEVIYNKDIISFKELLKNFWINIDPFDAFGQFCDKGYSYRSVAFYQNEYEKKTIEESIINIEDKFNKRVVTYVREFKVFYKAEDKHQDYYQEYLLNYLMYKKGCGREEVLKRIWKL

SEQ ID NO: 103028 - protein, 121 aa, Unknown
  Bacterial polypetide isolated from the Sargasso Sea
MKKTNKFLICFLIASVINISANQTNHIQTIYLGSGCFWGAEKGYESIKGVINAESGYANGYGIKPNYRSIIQFKNKHNENNYAEVVKVTFNNNEITLEEILKHFFETHDPTQLNRQGNDIG

SEQ ID NO: 103029 - protein, 60 aa, Unknown
  Bacterial polypetide isolated from the Sargasso Sea
MKLRLATFFLLILFANSFVYANKTNHIQVIHLGSGCFWGAEKGYESLDGVIDAVSGYANG

SEQ ID NO: 103030 - protein, 96 aa, Unknown
  Bacterial polypetide isolated from the Sargasso Sea
MEIAILGLGCFWGPEIKFSKLDGIAKTEVGYCGGNSDKTNYKEVCSGITNHAEVVKLEFDPNIISYENILEHFFKFHDPTTLNSQGPDFGTQYRSE

SEQ ID NO: 103031 - protein, 190 aa, Unknown
  Bacterial polypetide isolated from the Sargasso Sea
MRLFYYFLLLFLISTSFSHSKDKAYFAGGCFWCMEESFEMLEGVEEVISGYSGGITANPTYREVTYGDTGHFEVVEIIYDKEKISYKELLKNFWLNIDPFDAYGQFCDKGYSYRSVAFYENDYQKDLIEKDIKRLEKKFKKKVVTYVKEFEIFYIAEDKHQDYYQVYLENYLKYKKACKRERILDIIWGS

SEQ ID NO: 103032 - protein, 120 aa, Unknown
  Bacterial polypetide isolated from the Sargasso Sea
VGYCGGKTENTTYKEVCSGETNHAEVVKINFDPKIITYEEILNFFFKIHDPTTLNSQGPDFGTQYRSEIFYLNTKQKEIAEKVLKLKNDDFSGKIVTKLSLLKNYCIAEEYHQKYLDKKF

SEQ ID NO: 103033 - protein, 54 aa, Unknown
  Bacterial polypetide isolated from the Sargasso Sea
AIKTEVDKSHGMVRIEIMCAKCDAHLGHVFDDGPEPTGKRYCVNSLSINYEEVE

SEQ ID NO: 103034 - protein, 150 aa, Unknown
  Bacterial polypetide isolated from the Sargasso Sea
MKTAYFSLGCFWSPQLEFEKVEGVKKAEVGYCGGDDPNTTYEKVCSGSTNHAETVKVDYDEKLVSYDDLVRFFFKIHDPTQLNKQGPDIGTQYRSEIFYTDENQKKIAEKIKNEFNDKLKGKVVTKVSKEKLYQPAEEYHQYYLKRKSFI

SEQ ID NO: 103035 - protein, 147 aa, Unknown
  Bacterial polypetide isolated from the Sargasso Sea
MEIAVLALGCFWGPEKKYGQLHGIYRTEVGYCGGNTQNTNYREVCSGTTNHAEAVKLEFDPKVITYEQIIKKFFEFHDPTTLNSQGPDFGTQYRSEIFYLNDEQKNIAQKIINEENLRLSGKVVTKLSELKNYCTAEEYHQKYLEKR

SEQ ID NO: 103036 - protein, 177 aa, Unknown
  Bacterial polypetide isolated from the Sargasso Sea
MSEGTEKAYFGGGCFWCMEPPFEVLDGVVEATSGYMGGETENPTYEEVSMGNTGHVEVVEIEFDPNIITYSELLEVFWRNIDPTALNYQFADVGSQYRTEIFTVGSQQMEEALQSKTDLENSGKFDKPIVTAITEAPTFYIAEEYHQDFYKKQSARYQIYAEASGRKGFLKETWGDE

SEQ ID NO: 103037 - protein, 113 aa, Unknown
  Bacterial polypetide isolated from the Sargasso Sea
RVTQQQGTEPAFSGSYWDKKDIGNYSCICCDTNLFSSEAKYESGSGWPAFFEPISSEIIGTSVDNSFFMERTEVHCSNCNAHLGHVFSDGPKPTGLRYCINSASLNFKNKEKK

SEQ ID NO: 103038 - protein, 190 aa, Unknown; identical to SEQ ID NO: 102940
  Bacterial polypetide isolated from the Sargasso Sea

SEQ ID NO: 103039 - protein, 191 aa, Unknown
  Bacterial polypetide isolated from the Sargasso Sea
MKFFTIIFLITSFITAAEANQKGKAYFAGGCFWCMEEVYEKLSGVEEVISGYSGGTTENPTYREVTYGKTGHFEVVEIVYDKEIISFKELLNIFWKNIDPFDPYGQFCDKGYSYRSVAFYQNDEEKKLIENSVKELENEFNKEIVTYVRSFDKFYEAEVYHQDFYVKKFQRYLEYKTACRREEILNNIWNL

SEQ ID NO: 103040 - protein, 41 aa, Unknown
  Bacterial polypetide isolated from the Sargasso Sea
KVHCSQCSAHLGHVFDDGPQPTGLRYCINSVALDFVPEEKE

SEQ ID NO: 103041 - protein, 150 aa, Unknown
  Bacterial polypetide isolated from the Sargasso Sea
MKTAYFSLGCFWSPQLEFEKIKGVKKAEVGYCGGNDPNTTYEKVCSGSTNHAETIKVEFDENEISYEELVRFFFKIHDPTQLNRQGPDIGTQYRSEIFYKDENQKRIAEKIKEEFNKKFNGKVVTNISEEKLYQPAEEYHQYYLKRKGIL

SEQ ID NO: 103042 - protein, 103 aa, Unknown
  Bacterial polypetide isolated from the Sargasso Sea
MKYFFIIFFFLININFSYSAQKGKAYFAGGCFWCVEESFEKLKGVEEVISGYSGGITENPTYKEVTYGNTGHFEVVEIIYDKKVISFEQLLENFWVNIDPFDA

SEQ ID NO: 103043 - protein, 134 aa, Unknown
  Bacterial polypetide isolated from the Sargasso Sea
FSQNKYEVTKTDKEWRSQLNELSYLVLRKAYTERPYTGKYDDFYEKGTYHCAGCDEPLYKSDHKYNSYCGWPSFDREISDKLEYDVDYKLGYPRTEIKCKKCGGHLGHVFNDGPKETTGIRHCVNSVALVFKKT

SEQ ID NO: 103044 - protein, 306 aa, Unknown
  Bacterial polypetide isolated from the Sargasso Sea
MLKGLSITPPVVGRISIGRIVEKNGKRLPEKDDAFTLTTQVQQRGEWLLHPLNETLRKATPGKLRAIPVRMLFNDPDLNLRAEYTLFDRETGRPVCVGNGDTCRRVTDAGIETLPCSSPDGCTYAQTGGCKPYGRLNVIVGDDDELGSFILRTTSYNSIRTLAARLHYFRAVSGNLLACLPLELKLRGKSTTQSYRSAIYYVDLGVRSGSKLEQALIEAKELDTRRRAAGFDQAALDAAARLGFANGAFEDSPDEQAAVVEEFYPDPAPSPHDAGDGDAAETIETQPSTLRDKLERKAVLLGGKAA

SEQ ID NO: 103045 - protein, 42 aa, Unknown
  Bacterial polypetide isolated from the Sargasso Sea
MKKTLLIIFFLLFSVNSNAGNISKVYFAGGCFWCMEESFDKV

SEQ ID NO: 103046 - protein, 159 aa, Unknown
  Bacterial polypetide isolated from the Sargasso Sea
MALATFGAGCFWGVEYFFRQVNGVTNATCGYMGGNNEATTYEEVKKGKTGHAEVVQVEFDPAIVSYDELLDVFWKNHNPTTLNMQGGDIGTQYRSTIFFHDREQKATAEASKLAFARSGRWGLRHIVTEIVPLQQFHVAEEYHQNYIDKNNLPSCHLEY

SEQ ID NO: 103047 - protein, 148 aa, Unknown
  Bacterial polypetide isolated from the Sargasso Sea
MEIAILALGCFWGPEEKFSKVQGIINTEVGYCGGNTNPTTYEEVCTGSTNHAEVVKIEFDEKIIKYENLLEKFFEMHDPTTLNRQGPDIGTQYRSEIFFTNNYQKEIAEKIKSRFNLKYNGKIITKISGEKNYCKAEEYHQKYIQKRN

SEQ ID NO: 103048 - protein, 164 aa, Unknown
  Bacterial polypetide isolated from the Sargasso Sea
MISKLILGAGCFWGVEVLFEEMSGVKKVISGYAGGHTENPTYEEVCTGKSGHIEVVEIEYDNSEVKFEELLDKFFFIHDPTQMNRQGPDIGEQYKSVIFCNSDEERRISESKIDEINNSGEHQNEVVTELRENAKFWPAEEYHQDFIEKNGKVCYHQLYVQHKS

SEQ ID NO: 103049 - protein, 147 aa, Unknown
  Bacterial polypetide isolated from the Sargasso Sea
MEIAVLALGCFWGPEIKFSKINGVIKTEVGYCGGNSSQTTYKEVCSGNTNHAEVVKIDFDEKVITYEEILKIFFEIHDPTTLNAQGPDFGTQYRSEIFYLNDNQKKIAEVVLKEVNKKLSGKVVTKISILKNYCTAEEYHQKYLEKR

SEQ ID NO: 103050 - protein, 133 aa, Unknown
  Bacterial polypetide isolated from the Sargasso Sea
MTENDNEKLQEELSPEEYYVTQKKGTEPAFSGKYDGEKTPGVYNCVVCGAPLFSSKAKYDSGSGWPSFWEPIKKENIGSEVDHSAGMTRTEVHCYNCKAHLGHVFPDGPQPTGLRYCINSVSLNLKPDDEVED

SEQ ID NO: 103051 - protein, 123 aa, Unknown
  Bacterial polypetide isolated from the Sargasso Sea
MSEQNEKAYFAGGCFWCMEPPFEALDGVVGATSGYMGGTTENPTYEEVTTGKTGHAEVVEILFDPSIVSYEELLEVFWRNIDPTALNYQFADVGSQYRTEIFTVGDKQKKLAEESKIKWKNQE

SEQ ID NO: 103052 - protein, 156 aa, Unknown
  Bacterial polypetide isolated from the Sargasso Sea
MTKIAVFAAGCFWGIEEKFSSISGVINTEVGYIGGSVKNPTYEMVCTGNTNHAEAVRLFYDEESISYNELLNIFFDIHNPTTMNRQGPDFGSQYRSAIFYQDNFQKLSAQNKIKELNKTKFNNKIVTALEQGGNFWIAEEYHQKYIKKRRFKLFGE

SEQ ID NO: 103053 - protein, 134 aa, Unknown
  Bacterial polypetide isolated from the Sargasso Sea
MQKCTLALGCFWKPEENFKNKPGILETEVGYAGGSSEKTTYEDVCTGSTGHAEVVRLTFDENVISFKKILDLFFKMHDPTQKDMQYPDIGNQYRSEIFYENEKQKKEASEILNEFNKKLGGKIQTNISAIKNYC

SEQ ID NO: 103054 - protein, 141 aa, Unknown
  Bacterial polypetide isolated from the Sargasso Sea
MNKHKYFIALFFFFTGFTFSNQTNHIQTIYLGSGCFWGAEKGYEALDGVINAKSGYANGYGVSPNYRSIIQLKNKFNKNNFAEVVEVTFNNNFITLEEILMHFFESHDPTQYNRQGNDIGTQYRSTILYSDDDQKEIAEML

SEQ ID NO: 103055 - protein, 38 aa, Unknown
  Bacterial polypetide isolated from the Sargasso Sea
IAQGNDFFYAEDYHQQYLSKNPNGYCGLGGTGVSYPLD

SEQ ID NO: 103056 - protein, 193 aa, Unknown
  Bacterial polypetide isolated from the Sargasso Sea
WGAEKCFWKLPGVITTSVGYAGGEKKNPTYYEVCSGITGHAEVVRVVWNVNEIDISDLLKMFWECHNPTQKNRQGNDMGTQYRSTIYYKNERNKDKIYSSKEAYQKELYKNNLGHIETEIKKIDTYYYAEDYHQQYLAVEGSRQYCSASPTKVKLGSFNNCDYKLPKKVWDNFNWDIDKCVLRSNNKPIDINN

SEQ ID NO: 103057 - protein, 281 aa, Unknown
  Bacterial polypetide isolated from the Sargasso Sea
VINAKSGYANGYGVSPNYRSIIQLKNKFNKNNFAEVVEVTFNNNFITVEEILMHFFESHDPTQYNRQGNDIGTQYRSTILYSDDDQKEIAEMLKEKYQNLLSDYGYGSIKTIIEPLDNFYLAEEYHQDYLKKNPNGYCPDLSTGIVFNKEEIKPLDNTELTKGKHILVIDSRNYCPYCEKLKSDVTNDYKGSIPMTYRTSDQLHGLRLESPSWATPSILFLEDGKEVFGYQGYIEPKDFYKLLGKFKLGNTEAYDVAFNDGTDARFCKEYQIFKNTPEGVL

SEQ ID NO: 103058 - protein, 164 aa, Unknown
  Bacterial polypetide isolated from the Sargasso Sea
MISKLILGAGCFWGVEVLFEEMSGVKKVISGYAGGHIENPTYEEVCTGKSGHIEVVEIEYENNEVKFEELLDKFFFIHDPTQMNRQGPDIGEQYKSVIFYNSDEEKRISESKIDEINNSGEHRNKVVTELRENAKFWPAEEYHQDFIEKNGKVCYHQLYVQHKS

SEQ ID NO: 103059 - protein, 202 aa, Unknown
  Bacterial polypetide isolated from the Sargasso Sea
MLITPYLDASKTSHVETIYLGSGCFWGAEKGYELMDGVINAESGYANGYGIKPNYRSIIQFKNKYNEKNFAEVVKVTFNSNAISLENILKHFFETHDPTQHNRQGNDIGTQYRSTILFQNESQKELAERIIAEYQALLIEGGYGKIRTKLEPLDNFYLAEEYHQDYLKKNPYGYCPDLSTGIVFNDEEKIFEDNEYLLTGKQ

SEQ ID NO: 103060 - protein, 122 aa, Unknown
  Bacterial polypetide isolated from the Sargasso Sea
MQKFIGGIGCFWDETEYQGVPGIISTECGYCGGKNQKVTYEQVCGGDTEHIEVVKVTFDSKIISYEDVTRLFFKIHDPTTLNRQGPNVGYQYRSEIFYTTEEERISAQKVKDEVNKKLNGKV

SEQ ID NO: 103061 - protein, 185 aa, Unknown
  Bacterial polypetide isolated from the Sargasso Sea
MIIFITFFFSNLYSAPILKVYFAGGCFWCMEESFDKVDGVIKTISGYSGGHVKNPKYKDVVKNTTGHYETLEITYDSSVVNFDKLLDIYWINIDPFDVNGQFCDKGESYKSVIFFENNHQKKTIDNSIKKIERKFNKKIVTYVKQFKEFYMAETYHQDYYEKNFLRYLMYKKGCQREEILSKIWG

SEQ ID NO: 103062 - protein, 123 aa, Unknown
  Bacterial polypetide isolated from the Sargasso Sea
MNTAILAAGCFWGIEEVFRTTKGVIDTKVGYTGGTKIDPTYEEVCTDLTGHAEVVKVDFDEAIISYEDILNIFFANHNPTQLNRQGPDIGTQYRSSVFYLNSNQKEIAISKIKSFAPQYDNSI

SEQ ID NO: 103063 - protein, 148 aa, Unknown
  Bacterial polypetide isolated from the Sargasso Sea
MQKCTLALGCFWKPEENFKGKPGILETEVGYAGGSNQNVTYEEVCTGNTGHAEVVRLTFDEAKISYKKILDLFFKMHDPTQKDMQYPDVGTQYRSEIFYETDQQKIEASEILNQFNEKLSGKIQTNISKIKNYCKAEEYHQKYIEKNR

SEQ ID NO: 103064 - protein, 109 aa, Unknown
  Bacterial polypetide isolated from the Sargasso Sea
MLSSLIVGAGCFWGVEVLYEQMPGVINVTSGYSGGHLDNPRYEDVLTGETGHVEVVKIDYDSSEVTFNELIDTFFIIHDPTTLNRQGPDIGEQYKSILFYNSKDEKRSY

SEQ ID NO: 103065 - protein, 56 aa, Unknown
  Bacterial polypetide isolated from the Sargasso Sea
MELSLVLGAGCFWGVEVLFEEMNGVNKVISGYSGGHTNNPTYEQVCTGETGHIEVV

SEQ ID NO: 103066 - protein, 99 aa, Unknown
  Bacterial polypetide isolated from the Sargasso Sea
MSRQDKDEAAWREQLTAEEFYVLREKGTERAFTGEYWNVWEEGAYHCRGCGELLFQSNTKFDAGCGWPSFDRPATEGVVEEERDTSHGMIRTEVLCQGC

SEQ ID NO: 103067 - protein, 107 aa, Unknown
  Bacterial polypetide isolated from the Sargasso Sea
GTEPPFSGEYLHNKEKGIYKCVCCDSNLFSSDTKYESHSGWPSFFDTFDLNAVSSSKDDTYGMVRTEVHCSKCKAHLGHVFPDGPKPTGLRYCINSLALNFSKEKLK

SEQ ID NO: 103068 - protein, 145 aa, Unknown
  Bacterial polypetide isolated from the Sargasso Sea
MEKALFGAGCFWGVEETFRKLHGVSKTEVGYSGGITSNPSYESICKGDTNHAEVVLIEYDKNHISYETLLDHFWQSHDPTTLNRQGPDIGTQYRSVIFYYNDLQKKIAENSKNSYANKFNLKIVTEIKQAQEYFKAEEYHQKYAL

SEQ ID NO: 103069 - protein, 172 aa, Unknown
  Bacterial polypetide isolated from the Sargasso Sea
MLSSLIVGAGCFWGVEVLYEQMPGVVNATSGYSGGHLDNPRYEDVLTGETGHVEVVKIDYDSSEVTFNELIDTFFIIHDPTTLNRQGPDIGEQYKSILFYNSEDEKEIIDSKIKKIDLSGKFENPIVTEIRETAEFYPAEEYHQDYAAKTGKLCYQQLYVMYNYSPIPAATP

SEQ ID NO: 103070 - protein, 80 aa, Unknown
  Bacterial polypetide isolated from the Sargasso Sea
MIFRLFLFLLLLPITAYAKINTIYLAGGCFWCVEEVYEKLKGVIDVRSGYSGGHVENPTYQEVVKGDTGHIEVAEIFLTQ

SEQ ID NO: 103071 - protein, 107 aa, Unknown
  Bacterial polypetide isolated from the Sargasso Sea
MSVSDEKVVIDANHLYAGEDLTLTVTLLEPPNGRPLQEATFAGGCFWGVELAYQREPGVVRTEVGYAQGADPSPSYEAVCSGVTGHTEAVRVRYDPARVSYERLCDL

SEQ ID NO: 103072 - protein, 154 aa, Unknown
  Bacterial polypetide isolated from the Sargasso Sea
MYEQVCTNKFVRTSLYEQVCTNKFVRTSLYEKVCTNKFVRTSLYEQVCTNKFVRTSFYEPVFTNQFVRTSLYEPVCTNQFVRTSLYEPVCTNQFVRTSLYEPVCTNQFVRTSLYEPVCTNQFVPTSLYKLVCTNQLAGPRTWLDGPEGGMDGRT

SEQ ID NO: 103073 - protein, 143 aa, Unknown
  Bacterial polypetide isolated from the Sargasso Sea
LALGCFWKPEEIFKNKPGIIETEVGYAGGLSDKVTYEEVCRGDTGHAEVVRLTFDEKLISFKKILDLFFKMHDPTQKDMQYPDVGTQYRSEIFYEDDTQKAEAKEILEIFNKELNGKIQTNISRLKNYCKAEEYHQKYIEKNR

SEQ ID NO: 103074 - protein, 147 aa, Unknown
  Bacterial polypetide isolated from the Sargasso Sea
MEIAVLALGCFWGPEIKFSKIDGVIKTEVGYCGGHSAKTTYKEVCTGDTNHAEVVKLDFDEKIISYEKILKIFFQIHDPTTLNSQGPDFGTQYRSEIFYLNDNQKKIAEEVLQDINERLSGKAVTKISLLKNYCPAEEYHQKYLEKR

SEQ ID NO: 103075 - protein, 124 aa, Unknown
  Bacterial polypetide isolated from the Sargasso Sea
MNKKNLDHLSEEQRYVTQEKGTEAPFTGELLHNKESGTYQCVCCGADLFSSDTKFDSGTGWPSFYDVMSSTAVKVEVDHSHGMVRQEVLCGSCNAHLGHVFNDGPDPTGLRYCINSLSLEFEKD

SEQ ID NO: 103076 - protein, 148 aa, Unknown
  Bacterial polypetide isolated from the Sargasso Sea
MTKALIGAGCFWGIEEYFRKLNGVMDTKVGYSGGHTKNPSYEEVCAGNTNHAEVVQIIFDEELITYENILDHFWKCHDPTQLNRQGFDIGSQYRSVIYYFTDDQQKLAEKSKNKKQTLLNNKIVTEIDKAKNFFLAEEYHQLYIKKRA

SEQ ID NO: 103077 - protein, 134 aa, Unknown
  Bacterial polypetide isolated from the Sargasso Sea
EKFKIQKGILDTEVGYAGGYKSKVSYEEVCQGNTGHAETVKLSFDENVISFEKILELFFKFHDPTQKDMQFPDVGTQYRSEIFYENEQQREIANKVKEKFNKVFNNKIETKISPIKNYCRAEEYHQKYIEKTRK

SEQ ID NO: 103078 - protein, 176 aa, Unknown
  Bacterial polypetide isolated from the Sargasso Sea
MASTETITLGGGCFWCVEAVFQRVEGVLDVKPGYAGGHVKNPTYKEICTGKTGHAEVAQIRFDNTKISLEQIFNIFWQAHDPTTINRQGNDIGTQYRSVIFYHNNEQKSKAIESKISAEKSGYWRDTIVTEITKLNNYSDAEDYHHDYYNQNSNQPYCIFVIKPKLDKLEKNGLIN

SEQ ID NO: 103079 - protein, 90 aa, Unknown
  Bacterial polypetide isolated from the Sargasso Sea
GEGKFLCVCCSSELFSSSEKFESGSGWPSFSSPLSQDTVASKIDLSHGMRRIEVNCSSCKAHLGHVFEDGPAPTGLRYCINGVALKFKPA

SEQ ID NO: 103080 - protein, 134 aa, Unknown
  Bacterial polypetide isolated from the Sargasso Sea
MSGKQHPLSDEDYKSILTPIQYEVTRNKATERAFTGEYWNVTDSGVYKCICCGIELFSSDTKFDSMCGWPSFFDALDLKNIVEETDTSYGMIRTEVTCKNCGAHLGHVFPDGPPPTGLRYCINSASLNLKRENL

SEQ ID NO: 103081 - protein, 184 aa, Unknown
  Bacterial polypetide isolated from the Sargasso Sea
MILIFLISTSAQSKNFKKVYFAGGCFWCMEESFDAVDGVLSTVSGYSGGHLKNPTYHDVIYKDTGHVEALEITYDPNKVNYEKLLNIFWRNIDPFDSEGQFCDKGKSYRSVIFFQNQLEKEFIDKSFENLEKKFGKKIVTLVWKFEEFYQAEDYHQDYYEKNFIRYLMYKKACKREDTLREIWN

SEQ ID NO: 103082 - protein, 90 aa, Unknown
  Bacterial polypetide isolated from the Sargasso Sea
MEKLDSAILGGGCFWCLEAVYIKLEGVKSVISGYSGGNVENPTYEQVCTGETYHAEVVKINYDLNKTSFETLLEWFWRCHDPTTLNRQGG

SEQ ID NO: 103083 - protein, 132 aa, Unknown
  Bacterial polypetide isolated from the Sargasso Sea
MRMITLMGLLIISAPSLAAEAYFAGGCFWCTESDFEQLNGVSDVISGYAGGDVANPSYQQVAAGSTGHTEAVKVIYDPKVVSYDNLLTWLWRHIDPTDANGQFVDRGTQYRSEIFYQTDEEKEAAKASRMEL

SEQ ID NO: 103084 - protein, 182 aa, Unknown
  Bacterial polypetide isolated from the Sargasso Sea
MIFKISSFANAQDFKKAYFAGGCFWCMEESFDQIEGVLSSISGYSGGHLKNPTYQDVIYKDTGHVEAIEITYDSKIVSYESLLNIFWRNIDPFDSEGQFCDKGKSYRSVIFFQNQLEKEFIDKSFKNLENKFNREIVTLVWKFEKFYPAEDYHQDYYEKNFIRYLMYKNGCKREDTLRRIWN

SEQ ID NO: 103085 - protein, 135 aa, Unknown
  Bacterial polypetide isolated from the Sargasso Sea
MAKVTRSDAEWRAQLSSEAYKVCRQKGTERAFTGEYDKCYKPGTYVCVCCGNPLFSSDAKFDSGTGWPSFHSTIDEDAVREEEDISLFMRRTETLCAICDAHLGHVFPDGPAPTGLRYCMNSVALKLVPPDDKTD

SEQ ID NO: 103086 - protein, 147 aa, Unknown
  Bacterial polypetide isolated from the Sargasso Sea
MEIAILACGCFWGPEIKFSKLKGVIKTEVGYCGGNTEKTTYEEVCTGNTNHAEVVKIDFDSKIISYEEILNFFFEIHDPTTLNSQGPDIGTQYRSEIFYLNENQKSIAEEVIKKNNQKYYGKIVTKVSLVKNYCVAEEYHQRYLEKR

SEQ ID NO: 103087 - protein, 164 aa, Unknown
  Bacterial polypetide isolated from the Sargasso Sea
MISKLILGAGCFWGVEVLFEEMSGVKKVISGYAGGHTENPTYEEVCKGKSGHIEVVEIEYENNEVKFGELLDKFFFIHDPTQMNRQGPDIGEQYKSVIFYSSDEERRISESKIDEINNSGEHQNKVVTELREKAKFWPAEEYHQDFIEKNGKVCYHQLYVQHKS

SEQ ID NO: 103088 - protein, 178 aa, Unknown
  Bacterial polypetide isolated from the Sargasso Sea
MPANLNAENISKVYFAGGCFWCMEESFDKVDGVIKTISGYSGGHVKNPKYKDVVKNTTGHYETLEITYDSSITNFKKLLEIYWINIDPFDAKGQFCDKGESYKSVVFFNDSDQKKIIEASIKNIENKFNKKVVTYIKKFKEFYIAETYHQDYYEKNFIRYLMYKKGCQREETLNKIWG

SEQ ID NO: 103089 - protein, 298 aa, Unknown
  Bacterial polypetide isolated from the Sargasso Sea
YLLLVLFSIPYLDASKTSHVETIYLGSGCFWGAEKGYELMDGVINAESGYANGYGIKPDYRSIIQFKNKYNEMNFAEVVKITFNSNAISLENILKHFFETHDPTQHNRQGNDIGTQYRSTILFQNESQKEIAERIMTEYQALIIEGGYGKIRTKLEPLDNFYLAEEYHQDYLRKNPNGYCPDLSTGIVFNDEEKFFEDNEYLLTGKQILVLDSQNYCPYCEKLKDDVTSSYKGSIPLSYRTSDQLHGLEIKSPTWATPSLIFLENGKEIFSYQGYINHKDFYQLLGKFKLGNSEAYNV

SEQ ID NO: 103090 - protein, 124 aa, Unknown
  Bacterial polypetide isolated from the Sargasso Sea
MNKKNLDHLSEEQRYVTQEKGTEAPFTGELLHNKESGTYQCVCCGADLFSSDTKFDSGTGWPSFYDVMSSTAVKAEVDHSHGMVRQEVLCGSCNAHLGHVFNDGPDPTGLRYCINSLSLEFEKD

SEQ ID NO: 103091 - protein, 123 aa, Unknown
  Bacterial polypetide isolated from the Sargasso Sea
MSKITKTDAEWKSLLTEDEYYVTRQKGTEPPFSGKNFEIINGGIFKCKCCGNELFNSSTKYDSYCGWPSFFEQISPEAIKTETDKSHGMVRIEIMCAKCDAHLGHVFDDGPEPTGKRYCVNSL

SEQ ID NO: 103092 - protein, 124 aa, Unknown
  Bacterial polypetide isolated from the Sargasso Sea
MNKKNLDHLSEEQRYVTQEKGTEAPFTGELLHNKESGTYQCVCCGADLFSSDKKFDSGTGWPSFYDVMSSTAVKVEVDHSHGMVRQEVLCGSCNAHLGHVFNDGPDPTGLRYCINSLSLEFEKD

SEQ ID NO: 103093 - protein, 156 aa, Unknown
  Bacterial polypetide isolated from the Sargasso Sea
YLRVKGINKVISGYAGGQTVNPTYEEVCSGNTGHAEVVQIEYDPNEISYSTILNIFFDIHDPTTLNKQGPDTGTQYRSEIFYHNDIQKNIASDKIKMLSENKTFDDPIVTQISELDVFYLGEDYHQDYFANNPMNPYCTYIINPKLQKFLLQNQPK

SEQ ID NO: 103094 - protein, 149 aa, Unknown
  Bacterial polypetide isolated from the Sargasso Sea
MQKFIGGIGCFWDETEYQGIPGIISTECGYCGGKNPKVTYEQVCGGDTEHIEVVKVIFDPKIISYEDVTKLFFKIHDPTTLNRQGPNVGYQYRSEIFYTTEEEKIIAQKVLDEVNKNLNGKVVTVIRKEKNYCKAEEYHQKYFEKRNKR

SEQ ID NO: 103095 - protein, 129 aa, Unknown
  Bacterial polypetide isolated from the Sargasso Sea
MKKIILILFIYFINLSVFATETKKAYFAGGCFWCMEESYDQVDGVLSSISGYSGGHLKNPKYEDVIYKDTGHVEVIEVTYNPSVVSYKDLLNVYWKNIDPFDASGQFCDKGKSYRSVIFFENNSQKELI

SEQ ID NO: 103096 - protein, 146 aa, Unknown
  Bacterial polypetide isolated from the Sargasso Sea
MEIAVLALGCFWGPEIKFDKLEGVIKTEVGYCGGNNDKTTYEEVCLGNTNHAEVVKLEFDPIKISYEEILHYFFEIHNPTTLNAQGPDIGTQYRSEIFYINEEQKKIAEKIIEENDKELSGKVVTKLSKIKNYCKAEDYHQKYLEK

SEQ ID NO: 103097 - protein, 110 aa, Unknown
  Bacterial polypetide isolated from the Sargasso Sea
MISKLILGAGCFWGVEVLFEEMSGVKKVISGYAGGHTENPTYEEVCTGKSGHIEVVEIEYDNSEVKFEELLDKFFFIHDPTQMNRQGPDIGEKYKSVIFCNSDEERKISE

SEQ ID NO: 103098 - protein, 147 aa, Unknown
  Bacterial polypetide isolated from the Sargasso Sea
MEIAVLALGCFWGPEIKFSKINGVIKTEVGYCGGYSPQTTYKEVCTGSTNHAEVVKIDFDERVITYEEILKIYFEIHDPTTLNSQGPDFGTQYRSEIFYLNDDQKKIAEDVLDQVNKKLSGKVVTKISLLKNYCIAEEYHQKYLEKR

SEQ ID NO: 103099 - protein, 147 aa, Unknown
  Bacterial polypetide isolated from the Sargasso Sea
MEIAVLALGCFWGPEIKFSKIEGIIKTEVGYCGGDSSTTTYKEVCTGKTNHAEVVKLDFDEKIITYEKILKTFFQIHDPTTLNSQGPDFGTQYRSEIFYLNDKQKKIAEKVLNDINERLSGKVVTKISLLKNYCPAEEYHQKYLEKR

SEQ ID NO: 103100 - protein, 91 aa, Unknown
  Bacterial polypetide isolated from the Sargasso Sea
KNPNYQDVCTGNTEHAEAVRVKFDSPAISYESLLKLFFEIHDPTTLIRQGPDIGTQYRSEIFCLDEDQYLFADTFKRNLNNDKFNGNIVTS

SEQ ID NO: 103101 - protein, 147 aa, Unknown
  Bacterial polypetide isolated from the Sargasso Sea
MEIAVLALGCFWGPEIKFSKIDGIIKTEVGYCGGNSSTTTYKEVCTGKTNHAEVVKLDYDEKIITYEKILKTFFQIHDPTTLNSQGPDFGTQYRSEIFYLNDSQKNIAEKVLKEVDQRLSGKVVTKISLLKNYCPAEEYHQKYLEKR

SEQ ID NO: 103102 - protein, 148 aa, Unknown
  Bacterial polypetide isolated from the Sargasso Sea
MEIAIIACGCFWGPEIKFSKLEGVLKTEVGYCGGNNEKTSYEEVCSGTTNHAEVVRIEFDPKMITYENILNFFFDIHDPTTLNAQGPDIGTQYRSEIFYINEKQKIIADKVLSEKNVKFSGKIVTKISPVKNYCTAENYHQKYLEKRF

SEQ ID NO: 103103 - protein, 123 aa, Unknown
  Bacterial polypetide isolated from the Sargasso Sea
MVKNKDHLTEEQIQVTQFCGTEPPFSGELLKEKRSGTYLCVVCNESLFNSDTKYESGSGWPSFFDSIENKINRKEDLSHGMKRVEITCKACDAHLGHVFPDGPEPTGERYCVNSLSMDFQSNE

SEQ ID NO: 103104 - protein, 147 aa, Unknown
  Bacterial polypetide isolated from the Sargasso Sea
MEIAILGLGCFWGPEIKFSKLDGIIKTEVGYCGGNNAETNYKEVCTGTTNHAEVVKLDFDPKIISYEKILKYFFKIHDPTTLNSQGPDFGTQYRSEIFYLNDNQKTTAENVISKENERLSGKVVTKLSQVKNYCPAEEYHQRYLEKR

SEQ ID NO: 103105 - protein, 147 aa, Unknown
  Bacterial polypetide isolated from the Sargasso Sea
MEIAILACGCFWGPEIKFSKLNGVYKTEVGYCGGNTSKTSYQEVCEGDTNHAEVVKLDFDPNIISYEKILDYFFEIHDPTTLNSQGLDFGTQYRSEIFYLNDNQKNIAKKIIEKYNENLSGKVVTKLSQIKNYCTAEEYHQKYLEKR

SEQ ID NO: 103106 - protein, 66 aa, Unknown
  Bacterial polypetide isolated from the Sargasso Sea
MSEGYEKAYFAGGCFWCMEPPFEDLDGVIEATSGYMGGSVENPTYEEVTTGTTGHAEVVEILYDPE

SEQ ID NO: 103107 - protein, 164 aa, Unknown
  Bacterial polypetide isolated from the Sargasso Sea
MISKLILGAGCFWGVEVLFEEMSGVKKVISGYAGGHTENPTYEEVCTGKSGHIEVVEIEYESNEVKFEELLDKFFFIHDPTQMNRQGPDIGEQYMSVIFYNSDEEKRISESKIDEINNSGEHQNKVVTELRENAKFWPAEEYHQDFIEKNGKVCYHQLYVQHKS

SEQ ID NO: 103108 - protein, 119 aa, Unknown
  Bacterial polypetide isolated from the Sargasso Sea
MDFAILGAGCFWCIEAIFLNVPGVVAVEAGYTGGDTKNPTYESVCSGKTGHAEVCRIDYDPKIITFEQVLDVFWEVHDPTTLNRQGADIGTQYRSAIYYNSLDQKNIAEESKKKYADSF

SEQ ID NO: 103109 - protein, 164 aa, Unknown
  Bacterial polypetide isolated from the Sargasso Sea
MEIAILAGGCFWGMEDLMRKLPGVQKTRVGYTGGHLKNPTYKDVCTKTTGHAEAIEILFDPSIVSYRRLLECFFQIHDPTTIDRQGNDIGDSYRSHIFTTSSEQREEAFKMISDIESSKKWPGRIVTKVTPAEEFWEAESYHQDYLVKNPNGYTCHFPRVDWTI

SEQ ID NO: 103110 - protein, 135 aa, Unknown
  Bacterial polypetide isolated from the Sargasso Sea
TEYQGIPGIISTECGYCGGKSSKVTYEQVCGGHTEHIEVVKVTFDPKIISYEDVIRLFFKIHDPTTLNRQGPNVGYQYRSEIFYATEEEKISAEKILDEVNKKLNGKVVTSIRKEKNYCKAEEYHQNYFEKRSKK

SEQ ID NO: 103111 - protein, 131 aa, Unknown
  Bacterial polypetide isolated from the Sargasso Sea
MNKIVKTDKEWKSLLTEDEYYVTRQKGTEPPFSGKNFEIINGGIFKCKCCGNELFNSSTKYDSYCGWPSFFEQISPEAIKTETDRSHGMVRIEIMCAKCDAHLGHVFDDGPEPTGKRYCVNSLSINYEEFE

SEQ ID NO: 103112 - protein, 112 aa, Unknown
  Bacterial polypetide isolated from the Sargasso Sea
EYDPGQTDFRTLLDWFWRCHDPTTLNRQGADVGTQYRSVIFCHDEEQLEHARTAKQDLESSGMFRDPVVTEISMIPEFYPAEDYHQNYYQENSGAGYCQFVIRPKMQKLGFE

SEQ ID NO: 103113 - protein, 117 aa, Unknown
  Bacterial polypetide isolated from the Sargasso Sea
MEIAVLALGCFWGREIKFSKIDGIIKIEVGYCGGNKFKIIYKEVCSGNTNHAEVVKLDFDEKIITYEKILKIFFQIHDPTTLNSQGADFGTQYRSEIFYLNNKQKKTAEKVLKDINE

SEQ ID NO: 103114 - protein, 190 aa, Unknown
  Bacterial polypetide isolated from the Sargasso Sea
MKKIFLILFFIILSQNLYASNNKKVYFAGGCFWCMEESFDKVDGVIETISGYSGGHIKNPKYRDVVKNTTGHYETLEITYDSSITNFQKLLEIYWINIDPFDANGQFCDKGESYKSVVFFENSDQKKIIETSIKNIEMKFNKKVVTYVKEFKEFYMAETYHQDYYEKNFIRYLMYKKGCQREETLSKIWG

SEQ ID NO: 103115 - protein, 158 aa, Unknown
  Bacterial polypetide isolated from the Sargasso Sea
MTKVDVIDTPFWCSATPEERAEAISKLTDEQKAVALNDGTERPFANEYWDSKEKGIYVDIISGEPLFSSLDKFDSGTGWPSFDRPINGTEIVEIVDKSLGMTRTEVRSEYGDAHLGHLFNDGPTETGLRYCINSASLKFIPVDELDENGYGVFVKLFN

SEQ ID NO: 103116 - protein, 132 aa, Unknown
  Bacterial polypetide isolated from the Sargasso Sea
MEIAIIACGCFWGPEIKFSKLEGVLKTEVGYCGGNNEKTSYEEVCSGTTNHAEVVKIEFDPEIITYENILNFFFDIHDPTTLNAQGPDIGTQYRSEIFYINEKQKSIADKVLSEKNIKFSGKSVTKISPIKN

SEQ ID NO: 103117 - protein, 124 aa, Unknown
  Bacterial polypetide isolated from the Sargasso Sea
MSKKNLDHLSEEQRYVTQEKGTEAPFTGELLHNKESGTYQCVCCGADLFSSDKKFDSGTGWPSFYDVMSSTAVKVEVDHSHGMVRQEVLCGSCNAHLGHVFNDGPDPTGLRYCINSLSLEFEKD

SEQ ID NO: 103118 - protein, 321 aa, Unknown
  Bacterial polypetide isolated from the Sargasso Sea
AEKGYESLLGVEEAISGYSDGRGVRPVYREIIKFKNKFNPNNHAEVVKVIFNKNLISTEQIIKKYFESHDPTQLNRQGNDIGTQYRSIILVRNDEQKQIAENLLSKFQSLLSLEGYGEIKTEIKTLEKFYEAEEYHQDYLVKNPNGYCPDLSTGVVFEDKNNQLEINNNDLYAGKHILVIESEFCPYCKKLREDVLDSYKGSIPLSYRKANQLEGLKISTPLWATPTIIFLENGKEILSNQGYLTKIEFYRALGFFKLGNSEAFNVAFNEGTDSRYCKEYELFKNTPEGQFIDKLSGEPLFDTKDRFNSKTGWLSFTRPIK

SEQ ID NO: 103119 - protein, 124 aa, Unknown
  Bacterial polypetide isolated from the Sargasso Sea
MTTIKRNKLTDDQYAVAREGATEPPFSGAYNYEKRKGSYLCVTCDQKLFDSETKYESGSGWPAFYAPFDEANIVNVQDTSHGMIRTEVKCSKCDSHLGHVFPDGPEPTGLRYCINSIVLNFVEE

SEQ ID NO: 103120 - protein, 147 aa, Unknown
  Bacterial polypetide isolated from the Sargasso Sea
MEIAVLALGCFWGPEIKFSKINGVIKTEVGYCGGNSSQTTYKEVCTGSTNHAEVVKIDFDEKVITYEEILKIFFEIHDPTTLNSQGPDFGTQYRSEIFYLNDNQKKIAEDVLDHVNKKLSGKVVTKISLLKNYCIAEEYHQKYLEKR

SEQ ID NO: 103121 - protein, 84 aa, Unknown
  Bacterial polypetide isolated from the Sargasso Sea
MKNILLFVTILLINQNSYALEKKAYFAGGCFWCMEESFDQVEGVLSSISGYSGGHLKNPSYQDVIYKDTGHVEAIENAYDPKYC

SEQ ID NO: 103122 - protein, 134 aa, Unknown
  Bacterial polypetide isolated from the Sargasso Sea
MNKSKNYPIVKSESEWYNELSDEEFRVLRKKGTEIPFTGKYNNHFDKGIYRCRACDAPLYDSESKFESGCGWPSYDKALPGALEFIKDNSHGMIRTEIVCAKCGGHQGHVFNDGPSSTGERYCVNSVSIRFDSE

SEQ ID NO: 103123 - protein, 138 aa, Unknown
  Bacterial polypetide isolated from the Sargasso Sea
MFFIDRSKKILMVNEQDSLPGRIDEMQFNESHFVNNSSMKGPFPEGMSEIFLGMGCFWGAERLFWNIEGVYVTSVGYAGGFTPNPLYEEVCSGLTGHTEVVHVVFDPKTISLQEILKIFWEGHDPTQGMRQGNDMGTQ

SEQ ID NO: 103124 - protein, 184 aa, Unknown
  Bacterial polypetide isolated from the Sargasso Sea
MKTVKVLLLLLFVSCTAIESVEIVESKYQKAYFAGGCFWCMEPPFEALEGVVEATSGYMGGSVENPTYEEVTTGETGHAEVVEILFNPEVVTYEELLEVFWRNIDPTALNYQFADVGSQYRTEIFTVGEEQKSLAEKSKVELDESGKFNKPIVTAISVAPEFYIAEDYHQNFYKKQSMRYKMYA

SEQ ID NO: 103125 - protein, 175 aa, Unknown
  Bacterial polypetide isolated from the Sargasso Sea
YRFRCGRDKRLEELWGDKKDKLNNIKQTSSYDLPSVEELTTKLTPLQFDVTQKDATEPPFRNKYWNNKSEGIYVDVVSGEPLFSSTDKYKSGTGWPSFTKPLEAENVVMKEDRSLFMVRTEIRSKHADSHLGHLFNDGPGPLGLRYCINSAALKFIPKNDLEREGYQIYQGLFPK

SEQ ID NO: 103126 - protein, 179 aa, Unknown
  Bacterial polypetide isolated from the Sargasso Sea
MKKFLTVFTVFISILLFSSENDSTNHIEKIVLGSGCFWGAEKGYEALDGVIDAVSGYADGEGVRPTYRDITKFSNKFNPNNHAEVVEVTYNKNLIKLEELIIHYLESHDPTQLNRQGNDIGTQYRSIVLYSDKAQHSKILELIAEYQILLKDGGYGDIQTIVKPLSQFFVAEKLSSRIT

SEQ ID NO: 103127 - protein, 124 aa, Unknown
  Bacterial polypetide isolated from the Sargasso Sea
MKIKKLTPEQYNICREKGTEAAFSGKYWNLKDKGVYSCICCDTNLFSSDTKFDSGTGWPSFFSPIKKINIKEVTDLSHGMDRTEVICSKCDAHLGHVFSDGPKPTGLRYCINSASLNFKKTDEK

SEQ ID NO: 103128 - protein, 28 aa, Unknown
  Bacterial polypetide isolated from the Sargasso Sea
MAEEYHQQYLAKNPNGYCGLGGTGCTLD

SEQ ID NO: 103129 - protein, 150 aa, Unknown
  Bacterial polypetide isolated from the Sargasso Sea
MEIAVLSCGCFWGPEIKFNKLKGVIKTEVGYCGGISKNTSYEEVCKGNTNHAEVVKIEFDNNLINYESILDYFFEIHNPTTLNRQGPDIGTQYRSEIFFLNDKQKKIAKKILEKNNEKFKGKIVTKISEIKNYITAEEYHQKYLEKKFDK

SEQ ID NO: 103130 - protein, 133 aa, Unknown
  Bacterial polypetide isolated from the Sargasso Sea
MTEKNNEKPQEELSPEEYYVTQKKGTEPAFSGKYDGEKTPGVYNCVVCGAPLFSSKAKYDSGSGWPSFWEPIKQENIGSEVDHSAGMTRTEVHCYNCKAHLGHVFPDGPQPTGLRYCINSVSLNLKPDDEVED

SEQ ID NO: 103131 - protein, 190 aa, Unknown
  Bacterial polypetide isolated from the Sargasso Sea
MKKYFIIILVLINGSFADAQDFKKVYFAGGCFWCMEESFDQINGVISTISGYSGGKLKNPTYQDVIYKDTGHVEAIEVIYDPKIVNFEKLLDIYWKNIDPFDSAGQFCDKGKSYRSVIFFQTQPEKELIDKSFKKLEKLFNNKIVTLVWKFDKFYPAEDYHQDYYEKNFIRYLMYKKGCKREETLKKIWN

SEQ ID NO: 103132 - protein, 164 aa, Unknown; identical to SEQ ID NO: 103048
  Bacterial polypetide isolated from the Sargasso Sea

SEQ ID NO: 103133 - protein, 88 aa, Unknown
  Bacterial polypetide isolated from the Sargasso Sea
TQGMRQGNDIGTQYRSVCYCDNDDSIKIIKESREQYQIALEEMGIGAITTEIKTKQPYFFAEEYHQQYLDKNPNGYCGIGGTGCEFKI

SEQ ID NO: 103134 - protein, 151 aa, Unknown
  Bacterial polypetide isolated from the Sargasso Sea
MLHYIFNRNINFDSYDGSEVAMFGMGCFWGAEKKFWELPGVQLTAVGYAGGNTKNPSYQEVCSGTTGHNEVVKIVFNQNVISYDDVIRVFWENHNPTQGNRQGNDIGTQYRSGAYFFCDKQKHSILNSMKSYEGELLKYGFGKITTEVSKA

SEQ ID NO: 103135 - protein, 142 aa, Unknown
  Bacterial polypetide isolated from the Sargasso Sea
MAKAIFAGGCFWGMEELIRMRPGVLSTRVGYTGGHASNPTYQMVCTKTTGHAEAIEVEYDNKVTSYRDLLEFFFQIHDPTTLDRQGNDIGDSYRSEIFVLSNEQEVDALEIISEINESGRWPERVVTKVSKATDFGKQSPSI

SEQ ID NO: 103136 - protein, 81 aa, Unknown
  Bacterial polypetide isolated from the Sargasso Sea
MSEGYEKAYFAGGCFWCMEPPFEDLDGVIEATSGYMGGTVENPTYEEVTTGTTGHAEVVEVLYDPEIVSYEELLEVFLEKY

SEQ ID NO: 103137 - protein, 153 aa, Unknown
  Bacterial polypetide isolated from the Sargasso Sea
MEKALFGAGCFWGVEETFSKLEGVKNTEVGYAGGSISNPTYEAVCAGDTNHAEVVLVEYDENVISYNNLIEHFWKCHDPTTLNRQGPDIGTQYRSVIFYFNQSQKEISNESKTQYGKRYQLNIVTEISEAKMYYKAEEYHQKYIQKTGLYCAS

SEQ ID NO: 103138 - protein, 133 aa, Unknown
  Bacterial polypetide isolated from the Sargasso Sea
MSDLNNDEQYRDKLTPLQFEVTRNKATEHAFTGEYWNTSDEGTYHCICCGAELFTSESKFDSMCGWPSFDKPLNDDQIVEELDTSLGMERTEVTCDSCGAHLGHVFPDGPPETTGLRYCINSASIDLKKTKDN

SEQ ID NO: 103139 - protein, 104 aa, Unknown
  Bacterial polypetide isolated from the Sargasso Sea
LNVFWQAHDPTTLNRQGGDVGTQYRSVIFYHNEKQKSLAIESIKKADASGYWSNKIVTEVTELLNYSDAEDYHNNYYDNNPNQPYCLFVIKPKLDKLEKKGIIK

SEQ ID NO: 103140 - protein, 117 aa, Unknown
  Bacterial polypetide isolated from the Sargasso Sea
DFDDKIISLELILEIFFVAHDPTQKNRQGNDIGTQYRSAIFYTNVEQKKKADEAIKRAEKTYQNTIQTELSDKLNFFVAEEYHHNYFLKNPNSIYCNALIPPKLKTLQTKYPYIFKN

SEQ ID NO: 103141 - protein, 153 aa, Unknown
  Bacterial polypetide isolated from the Sargasso Sea
MEKALFGAGCFWGVEETFRKIAGVIKTQVGYSGGNTLDPTYESVCKGDTNHAEVIKIEFDNKKISFEELLNIFWKCHDPTTLNRQGPDIGTQYRSVIFYYDSRQKEIASKSKNEYSKINNLKIVTEIQKANDFFIAEEYHQKYIQKTGLHCNI

SEQ ID NO: 103142 - protein, 129 aa, Unknown
  Bacterial polypetide isolated from the Sargasso Sea
MTNEKNLKDKLTPEEYYVTQNHGTEPAFSGKYDGVKTPGKYHCIVCGVELFSSESKYDSGSGWPSFWEPSQEENIETEQDHSAGMVRTEVHCSKCEDHLGHVFPDGPQPTGLRYCINSVSLDLKPTEEE

SEQ ID NO: 103143 - protein, 148 aa, Unknown
  Bacterial polypetide isolated from the Sargasso Sea
MEIAIIACGCFWGPEIKFSKLEGVLKTEVGYCGGNNEKTSYEEVCSGTTNHAEVVKIEFDPEIITYENILNFFFDIHDPTTLNAQGPDIGTQYRSEIFYINEKQKSIADKVLSEKNIKFSGKIVTKISPIKNYCTAENYHQKYLEKRF

SEQ ID NO: 103144 - protein, 148 aa, Unknown
  Bacterial polypetide isolated from the Sargasso Sea
MEIAILALGCFWGPEEKFSRVEGVLNTEVGYCGGDSNPTTYEEVCTGSTNHAEVVKIEFDEKIITYGNLLKKFFEMHDPTTLNRQGPDIGTQYRSEIFFTNDNQKIIAEDIKSRLNEKFNGKITTNISKQKNYCKAEDYHQKYIQKRN

SEQ ID NO: 103145 - protein, 290 aa, Unknown
  Bacterial polypetide isolated from the Sargasso Sea
MKKFLTTFTIFVSILVFSSQNESTSHIEKIVLGSGCFWGAEKGYEALEGVLDAVSGYADGEGVRPTYREITKFSNKFNPNNHAEVVEVTYNKNLITLEELIIHYLESHDPTQLNRQGNDIGTQYRSIVLYSDEAQQSKILELMAEYQTLLREGGYGDIQTIVKPLSQFFVAENFHQDYIKKNPNGYCPDHSTGIKFARNDYESKKDNNLLKIGKSIVVIEPEGFCPYCQKFREDVSNEYAGTIPLVYRDASNLEGLAIKTPTWATPTILFLERGSEVFGHQGYLSPKEFY

SEQ ID NO: 103146 - protein, 133 aa, Unknown
  Bacterial polypetide isolated from the Sargasso Sea
MEIAVLALGCFWGPEKKFGEIEGIVETEVGYCGGKMSNTSYKEVCTGETEHAEVVKLTFDPKKISYEQIIEYFFKFHDPTTLNRQGPDIGTQYRSEIFYKDDEQKNISLSKIKTLNNKFDSKITTKVSEIKNY

SEQ ID NO: 103147 - protein, 172 aa, Unknown
  Bacterial polypetide isolated from the Sargasso Sea
MLSSLIVGAGCFWGVEVLFEQMPGVINATSGYSGGHLDNPRYEDVLTSETGHVEVVKIDYDSSEVTFNELIDTFFIIHDPTTLNRQGPDIGEQYKSILFYNSEDEKKIIESKIEKIDLSGKFENPIVTEIRETAEFYPAEEYHQDYAVKTGKLCYQQLYVMYNYSPIPAATP

SEQ ID NO: 103148 - protein, 172 aa, Unknown
  Bacterial polypetide isolated from the Sargasso Sea
MLSSLIVGAGCFWGVEVLYEQMPGVINATSGYSGGHLDNPRYEDVLTGETGHIEVVKIDYDSSEVTFNELIDTFFIIHDPTTLNRQGPDIGEQYKSILFYNSEDEKEIIESRIEKIDLSGKFENPIVTEIRETTEFYPAEEYHQDYAAKTGKLCYQQLYVMYNYSPIPAATP

SEQ ID NO: 103149 - protein, 124 aa, Unknown
  Bacterial polypetide isolated from the Sargasso Sea
MNKKNLDHLSEEQRYVTQEKGTEAPFTGELLHNKESGTYQCICCGADLFSSDTKFDSGTGWPSFYDVMSSTAVKVEVDHSHGMVRQEVLCGSCNAHLGHVFNDGPDPTGLRYCINSLSLEFEKD

SEQ ID NO: 103150 - protein, 97 aa, Unknown
  Bacterial polypetide isolated from the Sargasso Sea
SFYEDGTYKCKNCGQELFKSETKYNAGCGWPSFFEAVNEKAIIYREDHSIFGRPRTEILCSNCEGHLGHVFDDGPVDKTGLRYCVNSISLDFDSENK

SEQ ID NO: 103151 - protein, 166 aa, Unknown
  Bacterial polypetide isolated from the Sargasso Sea
MKKTNKFLIYFLITFVINVSSNQTNHIQTIYLGSGCFWGAEKGYEALDGVIDAESGYANGYGIKPNYRSIIQFKNKYKENNFAEVVKVTFNSNAIKLHEILKHFFETHDPTQLNRQGNDIGTQYRSTILFLDENQKKVALEITKQYQKLLYAGGYGKVKTKIEPLD

SEQ ID NO: 103152 - protein, 122 aa, Unknown
  Bacterial polypetide isolated from the Sargasso Sea
MEIAVLALGCFWGPEIKFSKIEGIIKTEVGYCGGNSPRTTYKEVCTGNTNHAEVVKLDFDEKVISYERILKIFFQIHDPTTLNSQGPDFGTQYRSEIFYLNDNQKKIAEKVLTEVNERLSKK

SEQ ID NO: 103153 - protein, 270 aa, Unknown
  Bacterial polypetide isolated from the Sargasso Sea
GVINAESGYANGYGIKPNYRSIIQFKNKYNEKNFAEVVKVTFNSNAISLENILKHFFETHDPTQHNRQGNDIGTQYRSTILFQNESQKELAEKIIAEYQALLIEGGYGKIRTKLEPLDNFYLAEEYHQDYLKKNPNGYCPDLSTGIVFNDEEKIFEDNEYLLTGKQILVLDSQNYCPYCEKFKDDVTNSYKGSIPLSYRTSDQLHGLEIKSPTWATPSLIFLENGKEIFSYQGYINQKDFYQLLGKFKLGNSEAYNVAFNKGTDARFCKR

SEQ ID NO: 103154 - protein, 111 aa, Unknown
  Bacterial polypetide isolated from the Sargasso Sea
MEIAVLALGCFWGPEIKFSKIEGIIKTEVGYCGGNSNTTTYKEVCTGSTNHAEVVKLDFDEKIITYEKILKIFFQIHDPTTLNSQGPDFGTQYRSEIFYLNDIQKVTAEKV

SEQ ID NO: 103155 - protein, 131 aa, Unknown
  Bacterial polypetide isolated from the Sargasso Sea
MDTKKKKEISLSDEEWQKKLTPEEYHILREKGTERPFTGKYDKFYEDGIYKCAGCDTELFTSGTKYNSGCGWPAFYESLPGKIEESADNSFGMTRIEITCEKCGGHLGHVFNDGPQPTGLRYCVNSASLDF

SEQ ID NO: 103156 - protein, 122 aa, Unknown
  Bacterial polypetide isolated from the Sargasso Sea
EVGYCGGKMPNVTYKEVCSGETGHAEVVKLTFDSKKISYEKILEYFFEFHDPTTLNRQGPDIGTQYRSEIFYNNDEQKKISYSILDKLNKKFNSKIVTKVSENRNYTRAEEYHQEYLEKNQF

SEQ ID NO: 103157 - protein, 162 aa, Unknown
  Bacterial polypetide isolated from the Sargasso Sea
MLSYGLFSEDEEKIQATSQLESIVLGSGCFWGEEKRYESIPGVVSAISGYADGKGVKPTYREITKPKNRFNPNNHAEVVLVVFDRNIVSVEEILKDYFEGHDPTQFNRQGNDIGTQYRSVILTINDEQRKTAKRLLDEFQVLMNANGYGRIQTKIKPLTEFH

SEQ ID NO: 103158 - protein, 134 aa, Unknown
  Bacterial polypetide isolated from the Sargasso Sea
EIKFDKLNGVINSEVGYCGGNSASTSYEEVCAGNTNHAEVVKIEYNNNKISYKDILNYFFEIHDPTTLNRQGPDIGTQYRSEIFFLNTEQEDAAKITLKKYNEKFKGKITTKISPVKNYCRAEEYHQKYLEKKF

SEQ ID NO: 103159 - protein, 279 aa, Unknown
  Bacterial polypetide isolated from the Sargasso Sea
FWGAEKGYELMDGVINAESGYANGYGIKPNYRSIIQYKNKYNEKNFAEVVKVTFNSNAISLENILKHFFETHDPTQHNRQGNDIGTQYRSTILFQNESQKELAERIIAEYQALLIEGGYGKIRTKLEPLDNFYLAEEYHQDYLKKNPNGYCPDLSTGIVFNDEEKIFEDNEYLLTGKQILVLDSQNYCPYCEKFKDDVTNSYKGSIPLSYRTSDQLHGLEIKSPTWATPSLIFLENGKEIFSYQGYINQKDFYQLLGKFKLGNSEAYNVAFNKGTDARF

SEQ ID NO: 103160 - protein, 95 aa, Unknown
  Bacterial polypetide isolated from the Sargasso Sea
MQKFIGGIGCFWDETEYQGVPGIISTECGYCGGKNPKVTYEQVCGGDTEHIEVVKVTFDPKIISYEEITRLFFEIHDPTTLNRQGPNVGYQYRSE

SEQ ID NO: 103161 - protein, 158 aa, Unknown
  Bacterial polypetide isolated from the Sargasso Sea
MTKVDVIDTPFWCSATPEERAEAISKLTDEQKAVALNDGTERPFANEYWDSKEKGIYVDIISGEPLFSSLDKFDSGTGWPSFDRPINGTEIVEIVDKTLGMTRTEVRSEYGDAHLGHLFNDGPTETGLRYCINSASLKFIPVDELDENGYGVFVKLFN

SEQ ID NO: 103162 - protein, 168 aa, Unknown
  Bacterial polypetide isolated from the Sargasso Sea
MQKATFGAGCFWCVEAVFERLDGVVDVLPGYSGGHKKNPTYREICTGMTGHAEVAQITFDPTIVTFNDLLKMFWRSHDPTTRNRQGNDIGTQYRSAIFYHNNEQKTIAEESKNKADNSNVFLNPIVTEITKLDKFWPAEDYHNNYYVNNMDQPYCRVIIKPKLDKLFK

SEQ ID NO: 103163 - protein, 147 aa, Unknown
  Bacterial polypetide isolated from the Sargasso Sea
MSKINKAIVCGGCFWGIEENFRTKPGVISTEVAYAGGLKNHTTYEEVCSGNTGHAEAVQITFDENIVSYEKILELFFKMHDPTQKDMQYPDIGTQYRSEIFYYNQEQKKTANSVKKRFNDLLNGKVVTNINPLTTYVKAEEYHQKYI

SEQ ID NO: 103164 - protein, 148 aa, Unknown
  Bacterial polypetide isolated from the Sargasso Sea
MKKCTLALGCFWKPEENFKNKPGIIETEVGYAGGLSDKVTYEEVCRGDTGHAEVVRLTFDEKLISFKKILDLFFKMHDPTQKDMQYPDVGTQYRSEIFYEDDIQKAEANEILEIFNKELNGKIQTNISRLKNYCKAEEYHQKYIEKNR

SEQ ID NO: 103165 - protein, 124 aa, Unknown
  Bacterial polypetide isolated from the Sargasso Sea
MNKKNLDHLSEEQRYVTQEKGTEAPFTGELLHNKESGAYQCVCCGADLFSSDTKFDSGTGWPSFYDVMSSTAVKVEVDHSHGMVRQEVLCGSCNAHLGHVFNDGPDPTGLRYCINSLSLEFEKD

SEQ ID NO: 103166 - protein, 131 aa, Unknown
  Bacterial polypetide isolated from the Sargasso Sea
MSERIERSPEEWKQTLSPEQFQVARCGGTERAFTGAYWNKKDSGTYHCICCDAPLFSSQTKFESGTGWPSFWDGVSSEAITTKQDLSHGMVRVEINCARCDAHLGHVFPDGPAPTGQRYCVNSASLDFKAS

SEQ ID NO: 103167 - protein, 123 aa, Unknown
  Bacterial polypetide isolated from the Sargasso Sea
MELNKNHLSQEQFEVTQNCGTEPPFSGELLYEKREGIYSCVVCDFSLFESDTKFESGTGWPSFYDALDDTITTKEDLSYGMKRVEISCRNCNAHLGHVFPDGPRPTGLRYCVNSLSLSFNENE

SEQ ID NO: 103168 - protein, 129 aa, Unknown
  Bacterial polypetide isolated from the Sargasso Sea
MKKTDSEWRRILSSAEYYILREKGTERAFTGEYDGHFEDGIYVCAGCGHKLFDSETKYRSGCGWPAFSKAMPESVEESEDNSYGMRRIEITCSKCDGHLGHVFNDGPQPSGLRYCINSISMDFKPKEDK

SEQ ID NO: 103169 - protein, 147 aa, Unknown
  Bacterial polypetide isolated from the Sargasso Sea
MEIAVLALGCFWGPEIKFSEIDGIIKTEVGYCGGNTKTTTYKEVCTGNTNHAEVVKLDYDEKIISYEKILNIFFEIHDPTTLNSQGPDFGTQYRSEIFYLNNIQKEKAEKLLGEVNRKLSGKVVTKISLLKNYCPAEEYHQYVFKEE

SEQ ID NO: 103170 - protein, 102 aa, Unknown
  Bacterial polypetide isolated from the Sargasso Sea
AFTGKYVDWKKAGTFICKACAHPLFPSITKYKSGTGWPSFYQPINENAIREQSDNKFGWNRVEVECNRCGSHLGHVFEDGPEPTGLRYCINSVSLDFKSDTE

SEQ ID NO: 103171 - protein, 159 aa, Unknown; identical to SEQ ID NO: 103046
  Bacterial polypetide isolated from the Sargasso Sea

SEQ ID NO: 103172 - protein, 154 aa, Unknown
  Bacterial polypetide isolated from the Sargasso Sea
MEEALIGAGCFWGIEEYYRNIDGIQDTKVGYSGGIVNDPTYELVCSGNTEHAEVVKIKFDENIISYQKILDHFWNCHDPTQFNRQGPDIGSQYRSAIFYYSENQKTLALESKKQKQLSLNKKIVTEIKKANKFYLAEEYHQLYIHKNNSICISR

SEQ ID NO: 103173 - protein, 126 aa, Unknown
  Bacterial polypetide isolated from the Sargasso Sea
MVNINKSLSEEQYRVTQQHGTEPAFSGAYWDTKDNGYYKCICCDTVLFSSKTKYASGTGWPAFYKPVSEEVIGKSVDNSFFMQRTEVHCSKCNAHLGHVFPDGPEPTGLRYCINSASLNFNKTDKE

SEQ ID NO: 103174 - protein, 175 aa, Unknown
  Bacterial polypetide isolated from the Sargasso Sea
MFAQDLEKAYFAGGCFWCMEESFEKFQGVSKVISGYSGGSTENPTYEEVTYSNTGHFETIEIIYDKNITSYNKILDHFWINIDPFDAVGQFCDKGYSYRSVAFFKDDEQRKLINKSKRKIEQEFKKKVVTYVIKFDKFYKAEDYHQDYYRKKFLNYLRYKKACGREKKLNSIWNK

SEQ ID NO: 103175 - protein, 72 aa, Unknown
  Bacterial polypetide isolated from the Sargasso Sea
KYDSYCGWPSFFEQISPKAIKTETDRSHGMVRIEIMCAKCDAHLGHVFDDGPEPTGKRYCVNSLSINYEEFE

SEQ ID NO: 103176 - protein, 127 aa, Unknown
  Bacterial polypetide isolated from the Sargasso Sea
MKEINDSLTQEELYVLKDKGTERPFSGKFDTFFEDGVYKCKNCKAKLFKSESKYDAGCGWPSFFEAVNEEAIIYKEDNSIFGRPRTEILCANCEGHLGHVFEDGPKDKTGLRYCVNSISLDFDSENK

SEQ ID NO: 103177 - protein, 149 aa, Unknown
  Bacterial polypetide isolated from the Sargasso Sea
MQIFIGGIGCFWDETEYQGVAGIISTECGYCGGKNPKVTYEQVCGGNTEHIEVVKVTFDPKIISYEDITRLFFKIHDPTTLNRQGPNVGYQYRSEIFYNTEEEKKSAQKVLDEVNKKFNGKVVTTIRKEKNYCKAEEYHQKYFEKQKKR

SEQ ID NO: 103178 - protein, 190 aa, Unknown
  Bacterial polypetide isolated from the Sargasso Sea
MKKIILILFIYFINLSVFATETKKAYFAGGCFWCMEESYDQVDGVLSSISGYSGGHLKDPKYEDVIYKDTGHVEAIEVTYNPSVVSYKDLLNVYWKNIDPFDASGQFCDKGKSYRSVIFFENNSQKQLIDKSFKELEKKFNKKIVTLVWKFDIFYPAENYHQDYYEKNFIRYLMYKNACKREETLKKIWN

SEQ ID NO: 103179 - protein, 98 aa, Unknown
  Bacterial polypetide isolated from the Sargasso Sea
MEIAILGLGCFWGPEIKFSKLDGVIKTEVGYCGGHNSETNYKEVCTGTTNHAEVVKLDFDPKIISYEKIIEFFFEIHDPTTLNSQGPDFGTQYRSEIF

SEQ ID NO: 103180 - protein, 147 aa, Unknown
  Bacterial polypetide isolated from the Sargasso Sea
MEIAILGLGCFWGPEIKFSRLDGVIKTEVGYCGGHNAETNYKEVCTGSTNHAEVVKLDFDPKIISYEKILEFFFEIHDPTTLNSQGPDFGTQYRSEIFYLNDNQKTTAVNIINKENERLSGKVVTKLSQVKNYCPAEEYHQRYLEKR

SEQ ID NO: 103181 - protein, 135 aa, Unknown
  Bacterial polypetide isolated from the Sargasso Sea
MEENFKNKPGIIETEVGYAGGLSDKVTYEEVCRGDTGHAEVVRLTFDEKLISFKKILDLFFKMHDPTQKDMQYPDVGTQYRSEIFYEDDTQKAEAKEILEIFNKELNGKIQTNISRLKNYCKAEEYHQKYIEKNR

SEQ ID NO: 103182 - protein, 172 aa, Unknown
  Bacterial polypetide isolated from the Sargasso Sea
MLSSLIVGAGCFWGVEILYEQMPGVINATSGYSGGHLDNPRYEDVLTGETGHVEVVKIDYDNSEVTFNELIDTFFIIHDPTTLNRQGPDIGEQYKSILFYNSEDEKEIIESKIEKINLSGKFENPIVTEIRETAEFYPAEEYHQDYAVKTGKLCYQQLYVMYNYSPIPKATP

SEQ ID NO: 103183 - protein, 130 aa, Unknown
  Bacterial polypetide isolated from the Sargasso Sea
MSQNKDNLKDKLTPEEYYVTQNHGTEPAFSGKYDSNKMPGTYHCVVCGSEIFSSKEKYDSGSGWPSFFQPSVESNIETQEDRSAGMVRTEVHCNNCKAHLGHVFPDGPQPTGLRYCINSVSMDFTPSEED

SEQ ID NO: 103184 - protein, 147 aa, Unknown
  Bacterial polypetide isolated from the Sargasso Sea
MEIAILALGCFWGPEIKFSKINGVIKTEVGYCGGDEPKISYKEVCTGNTNHAEVVKLDFDPKIISYEDILKYFFKIHDPTTLNSQGPDFGTQYRSEIFYLNDNQKVIAEKVRKETDNKLSGRVVTKISLSKNYCPAEEYHQRYLEKR

SEQ ID NO: 103185 - protein, 90 aa, Unknown
  Bacterial polypetide isolated from the Sargasso Sea
MTQYKSGTGWPSFTKPLEVQNVVMKEDRSLFTVRTEVRSKHADSHLGHLFNDGPGPLGLRYCINSAALKFIAKKDLEQEGYQIYQSLFKN

SEQ ID NO: 103186 - protein, 279 aa, Unknown
  Bacterial polypetide isolated from the Sargasso Sea
SVLTPAVISLDTLLKRYFEMHDPTQLNRQGNDIGTQYRSTILTNSQAQYDTAQQVLAAYQPLLTKAGFGKITTVIKPLRQFFPAENYHQDYIAKNPNGYCPDHSTGVRFASDSATKTAATDNSALLKGQHILVIDSENYCPYCEKFKADVASKYSGDIPLHFRYASNLDGLTVKTPTWATPTIILLQDGKEVFGRQGYLSPDEFYLLLGKFKLGNSEAFNVAFDEGTDGRFCKQYEIFKNTPDGTFVDKLSGAALFDTRDRFDSGTGWLSFTKPVDGAV

SEQ ID NO: 103187 - protein, 140 aa, Unknown
  Bacterial polypetide isolated from the Sargasso Sea
MKKVLIIIVFLIHSNLNAGENKKAYFAGGCFWCMEESFDQVKGVISTVSGYSGGHLKNPTYQDVIYKDTGHVEAIEVIYDPKIVNYEKLLDIYWKNIDPFDSAGQFCDKGKSYRSVIFFQTQLEKESIKKSFKKLEKIFK

SEQ ID NO: 103188 - protein, 267 aa, Unknown
  Bacterial polypetide isolated from the Sargasso Sea
RPNYRSIIQLKNKYNENNFAEVVKVTFNNNAINLEEILKHFLENHDPTQLNRQGNDIGTQYRSTILFTDDSQKDLAKKLINQYQDLLTAKGFGKIKTKLEALDNFYLAEEYHQDYLKKNPNGYCPDLSTGIVFSQEQKEYLDNSKLVLGKQILILDSQSFCPYCEKLKEDVTNSYKGSIPLSYRTSDQLHGLQIQSPTWATPSVIFLENGKEIFAYQGYIEPKQFYQMLGKFKLGNSEAYDVAFNKGTDARFCKEYQIFKNTPDGIF

SEQ ID NO: 103189 - protein, 160 aa, Unknown
  Bacterial polypetide isolated from the Sargasso Sea
MKKIFLTLFFIILSTNLYASNTQKVYFAGGCFWCMEESFDKVEGVIETISGYSGGHVKNPKYKDVVKNTTGHYETLEITYDPSITNFEKLLEIFWVNIDPFDANGQFCDKGESYKSVVFYENSDQKKIIETSIKKIENKFNKKVVTYVKNFNEFYMAETY

SEQ ID NO: 103190 - protein, 29 aa, Unknown
  Bacterial polypetide isolated from the Sargasso Sea
LAEEYHQQYLAKNPNGYCGLGGTGCTLEI

SEQ ID NO: 103191 - protein, 148 aa, Unknown
  Bacterial polypetide isolated from the Sargasso Sea
MKKCTLALGCFWKPEENFKNKPGIIETEVGYAGGLSDKVTYEEVCKGNTGHAEVVRLTFDEKVISFKKILDLFFKMHDPTQKDMQFPDVGTQYRSEIFYEDDIQKVEAKEILEIFNKELNGKIQTNISQLKNYCKAEEYHQKYLEKNR

SEQ ID NO: 103192 - protein, 131 aa, Unknown
  Bacterial polypetide isolated from the Sargasso Sea
MEIAILALGCFWGPEIKFSKIEGIKKTEVGYCGGNNSNTSYKEVCTGTTNHAEVVKLEFDPKIISYENIIKKFFEFHDPTTLNSQGPDYGTQYRSEIFYENENQKEIAKKILNNINEKLSGKVVTRISSIH

SEQ ID NO: 103193 - protein, 261 aa, Unknown
  Bacterial polypetide isolated from the Sargasso Sea
AVSGYANGYGVSPSYRSIIQLKNKYNENNFAEVVKVTFNSNEISLDEILKHFFETHDPTQLNRQGNDIGTQYRSVILFSNETQRKLAEDILNEYQSLLFEAGYGKVVTLIESLDNFYLAEKYHQDYLKKNPNGYCPDLSTGVVFDKKEKDLLDNQDLLIGKQILVLDSQNYCPYCEKLKLDVTDEYKGSIQMSYRTSDQLHDLEINAPTWATPSVIFLEDGKEVFSHQGYINQKDFYLMLGKFKLGDSEAYDVAFNNGTDA

SEQ ID NO: 103194 - protein, 62 aa, Unknown
  Bacterial polypetide isolated from the Sargasso Sea
QYRSAIYYNDPSQEAKAKQSKEKNATRFSSPIVTEITAVSKYYLAEDYHQKYLEKRGMGSCH

SEQ ID NO: 103195 - protein, 311 aa, Unknown
  Bacterial polypetide isolated from the Sargasso Sea
WGAEKGYEALPGVVDAISGYADGYGVRPSYREITKFINKFNPNNHAEVVEVTYNKNIISTKELLQHYFESHDPTQINQQGNDIGTQYRSTVLFTNNEQLQITKELIFEYQQLLNESGYGQISTIVKSLDEFFAAETYHQDYIAKNPNGYCPDHSTGIRFSKDKLLAADNSQLLTEKTILVIEPKGYCPYCEKFKSLVVEEYQGSIPIAFRFAFQLEGLEVKTPTWATPTIIFLDEGKEVFGHQGYMSPDEFYKALGFFKLGNSEAYRVAFDDGTDARFCKEYEIFKNTPDGVFVDKLSGAHLFDTRDRFNS

SEQ ID NO: 103196 - protein, 124 aa, Unknown
  Bacterial polypetide isolated from the Sargasso Sea
MTKIIKTDAEWKSFLTEDEYYVTRQKGTEPPFSGKNFEIINGGIFKCKCCGNELFNSSTKYDSYCGWPSFFEQISPEAIKTETDRSHGMVRIEIMCAKCDAHLGHVFDDGPEPTGKRYCVNSLF

SEQ ID NO: 103197 - protein, 147 aa, Unknown
  Bacterial polypetide isolated from the Sargasso Sea
MEIAVLALGCFWGPEIKFSKIDGIIKTEVGYCGGNSPTTTYKEVCSGKTNHAEVVKLDFDEKIITYEKILKIFFQIHDPTTLNSQGPDFGTQYRSEIFYLNDNQKKIAEEILKKENERLSGKVVTKISLLNNYCPAEEYHQKYLEKR

SEQ ID NO: 103198 - protein, 172 aa, Unknown
  Bacterial polypetide isolated from the Sargasso Sea
MLSSLIIGAGCFWGVEVLYEQIPGVINATSGYSGGHLDNPRYEDVLTGETGHVEVVKIDYDSSEVTFNELIDTFFIIHDPTTLNRQGPDIGEQYKSIIFYNSEDEKEIIESKIEKIDLSGKFENSIVTDVRETVKFYPAEEYHQDYAVKTGKLCYQQLYVMYNYSPIPLATP

SEQ ID NO: 103199 - protein, 98 aa, Unknown
  Bacterial polypetide isolated from the Sargasso Sea
MVLRSEILVNKNVLPTQEQALPGRETPMKLPETHFVNGNPLLGPFLDDVGFAIFGLGCFWGAERKFWQRDGVVSTVVGYAGGFTPNPTYEEVCSGLTG

SEQ ID NO: 103200 - protein, 150 aa, Unknown
  Bacterial polypetide isolated from the Sargasso Sea
MKTAYFSLGCFWGPQLEFEKIKGVNKAEVGYCGGDDPNTTYEKVCSGSTNHAETVKVEFDDKVVSYEELVRFFFKIHDPTQLNRQGPDIGTQYRSEIFYQNEEQKKIAEKIKSEFDKKFDGKIVTNISKQKLYQPAEKYHQYYLKNKNIL

SEQ ID NO: 103201 - protein, 79 aa, Unknown
  Bacterial polypetide isolated from the Sargasso Sea
MIFGEQYRSVIFCKDSQQLDAANISKEVFQTKLDEKGFGPITTEIKIETKTFPAEDYHQQYLAKNPNGYCNLKGTGCFL

SEQ ID NO: 103202 - protein, 124 aa, Unknown
  Bacterial polypetide isolated from the Sargasso Sea
MEIAVLALGCFWGPEIKFSKIDGIIKTEVGYCGGNSSVTTYKEVCTGNTNHAEVVKLEYDEKTITYEKILKVFFQIHDPTTLNSQGPDFGTQYRSEIFYLNDNQKIIAEKVLNEVNERLSGKVV

SEQ ID NO: 103203 - protein, 110 aa, Unknown
  Bacterial polypetide isolated from the Sargasso Sea
MQKFIGGIGCFWDETEYQGVPGIISTECGYCGGKDSKVTYEQVCGGDTEHIEVVKVTFDPKIITYEDVARLFFEIHDPTTLNRQGPNVGYQYRSEIFYNTEEERMSAQKI

SEQ ID NO: 103204 - protein, 147 aa, Unknown
  Bacterial polypetide isolated from the Sargasso Sea
MEIAVLACGCFWGPEIKFSRLDGIYKTEVGYCGGNTSKTSYQEVCEGNTNHAEVVKLEFDPKIITYEKILDYFFEIHDPTTLNSQGLDFGTQYRSEIFYINDEQKNIAKRIIEKYNKKLSGKVVTELSQIKNYCTAEEYHQKYLEKR

SEQ ID NO: 103205 - protein, 87 aa, Unknown
  Bacterial polypetide isolated from the Sargasso Sea
MSDDKWKEKLSEQEYRICRQAETERPFTGALLDETRGGVYVCKCCDAPLFPSDTKFDAGCGWPSFYKQLDDGNVDYREDISHGMRRV

SEQ ID NO: 103206 - protein, 141 aa, Unknown
  Bacterial polypetide isolated from the Sargasso Sea
GCFWKPEENFKNKPGIIETEVGYAGGKNPEVTYEEVCSGKTGHAEVVKLTFDEKVISFRKILDLFFKMHDPTQKDMQFPDIGTQYRSEIFYENDEQKNDALEVLNEVNKFFSGKVQTNISKIKNYCKAEEYHQRYIEKNRK

SEQ ID NO: 103207 - protein, 119 aa, Unknown
  Bacterial polypetide isolated from the Sargasso Sea
TGLSGHAESVEVTFDRSKTSFEEILRFFFQIHDPTTLNRQGNDRGSQYRSAIFYQNKEQKSTAEKLISQANNSGVFPGEIVTQISKADGFYEAEDYHQDYLQKNPGGYTCHSVRKEWSF

SEQ ID NO: 103208 - protein, 147 aa, Unknown
  Bacterial polypetide isolated from the Sargasso Sea
MEIAILGLGCFWGPEIKFSKLDGVVKTEVGYCGGYNAETNYKEVCTGSTNHAEVVKLDFDPKIISYEKILKFFFEIHDPTTLNSQGPDFGTQYRSEIFYLNDNQKITAESIINKENERLSGKVVTKLSQVKNYCAAEEYHQKYLEKR

SEQ ID NO: 103209 - protein, 143 aa, Unknown
  Bacterial polypetide isolated from the Sargasso Sea
MEKALFAAGCFWGVEETFRKIIGVSKTEVGYSGGNTIDPTYESVCEGTTNHAEVILIEFDNKIISYDELLEHFWNCHNPTTLNRQGPDIGTQYRSAIFYFNDNQKNKSLISKKAYSSSTKLNIVTEITEASEFYRAEEYHQKY

SEQ ID NO: 103210 - protein, 152 aa, Unknown
  Bacterial polypetide isolated from the Sargasso Sea
MSNLDKAIICGGCFWGIEENFRTKPGIISTEVGYAGGQNSNISYEEVCTGKTGHAECVKLTFDKKIISYEKILDLFFKMHDPTQKDMQYPDIGTQYRSEIFFTNLDQKEIALKVRAKFNDLLNNKVVTNINPLTTYSVAETYHQKYIFKKNQ

SEQ ID NO: 103211 - protein, 182 aa, Unknown
  Bacterial polypetide isolated from the Sargasso Sea
MIFLISTSAQSKNFKKVYFAGGCFWCMEESFDGVEGVLSTVSGYSGGHLKNPTYHDVIYKDTGHVEALEITYDPNKVNYEKLLNIFWRNIDPFDSEGQFCDKGKSYRSVIFFQNQLEKEFIDKSFKNLEKKFGKKIVTLVWKFEEFYQAEDYHQDYYEKNFIRYLMYKKACKREDTLREIWN

SEQ ID NO: 103212 - protein, 135 aa, Unknown
  Bacterial polypetide isolated from the Sargasso Sea
MLKVTKSDAEWRTQLSPEAYNVCRKKGTERAFTGEYDKCYDPGVYVCVCCGNPLFSSDAKFDSGTGWPSFYSAIADDAIREEEDISLFMRRTETLCAICDAHLGHVFPDGPAPTGLRYCMNSVALKLVPPDDQAD

SEQ ID NO: 103213 - protein, 131 aa, Unknown
  Bacterial polypetide isolated from the Sargasso Sea
MTRKNNLRDPHWKEKLTPEQYEICRNKGTEAPFSGEYLNTKTTGTYHCFCCGNALFHSEKKFDSGTGWPSFWDPIDVESVNTQEDLSLSVVRTEVLCKQCDSHLGHVFEDGPQPTGLRYCINSVSLKLEED

SEQ ID NO: 103214 - protein, 182 aa, Unknown
  Bacterial polypetide isolated from the Sargasso Sea
MKVTTNNLNEISNYKKVYFAGGCFWCMEESFDKEKGIIKSISGYSGGHLINPTYKEVIYKDTGHVETIEITYDPKMISYKKLLDIFWKNIDPFDKYGQFCDKGKSYRSVIFYKNNKQKKVIKKSIVEIEQRFNSKVVTLLWKFDKFYQAEDYHQDYYQKNFLRYLAYKKACQREEVLNKIWN

SEQ ID NO: 103215 - protein, 406 aa, Unknown
  Bacterial polypetide isolated from the Sargasso Sea
MIAIFASTTFSSKNITIHEDTIVFGAGCFWSVEKKFAELSGVINVESGYADGIGLEPKYSEITKFKNKFNPNNFAEVVQITYDRNSISLTDLIKFFFELHDPTQKNRQGNDIGTQYRSLILFNDQSEEMLSIELKDEYQILLRKEGYGDIVTDIKKLKNFYPAEEYHQDYLVKNPNGYCPDHSTGIVFKEVEKPKIDNSYLLAGKYILVLDSEFCPYCTKLKNEVLSDYEGSIPLNYRYSSELHDLQLSSPTWATPTIFFIEDGVEKFSLQGFVQRENFYKALGIFKLGESEAYSVAFNQGTDPVFCKEYELFKDTPEGVFVDKLSGVPLFDTKDRFNSRTGWLSFTKPVDGSVTEHMDYSYGMTRVEIKSKSSGIHLGHVFQDGPNGLPRYCINATVLEFVPRNI

SEQ ID NO: 103216 - protein, 189 aa, Unknown
  Bacterial polypetide isolated from the Sargasso Sea
MKNFLLLVTLIILNSNLKAEEKKAYFAGGCFWCMEESFDQVEGVKSVVSGYSGGHLKNPTYADVIYTDSGHVEAVEITYDSSIVNYEELLEIYWQNIDPFDAEGQFCDKGKSYRSVIFFEDDKQKKIIDKSFQNLQKKLDKKIVTLVWDFEKFYQAENYHQDYYEKNFIRYLMYKKGCQREETLKKIWN

SEQ ID NO: 103217 - protein, 174 aa, Unknown
  Bacterial polypetide isolated from the Sargasso Sea
MERAIFAGGCFWCTEAYFLELEGVEDINPGYIGGHQDHPTYEMICTGNTGHVEAIEIIYDPKKISYLNLLEVFFDTHDPTQVDGQGNDIGSQYMSAIYYTNDIQKQEAANYIERIFINYPDPIITKLYSEKIFYIAEDYHKNYFNDNRQQPYCQIVIEPKYAKFKAKYSSLLKK

SEQ ID NO: 103218 - protein, 280 aa, Unknown
  Bacterial polypetide isolated from the Sargasso Sea
NNFVEVVKITYNSNAVSLENILKHFFETHDPTQLNRQGNDIGTQYRSTILFQNEYQKELAEKVMAEYQELLIEGDYGKIRTKLEPLDNFYLAEEYHQDYLKKNPNGYCPDLSTGIVFNNKEKNFLDNEYLLTAKQILVLDSQNYCPYCEKFKHDVTSGYKGSIPLSYRTSDQLHGLEISSPTWATPSLIFLENGKEVFSHQGYINQKDFYQLLGKFKLGDSEAYNVAFNKGTDARFCKEYQIFKNTPDGLFIDKLSGEPLFDTKNRFVSRSGWLSFHKTC

SEQ ID NO: 103219 - protein, 301 aa, Unknown
  Bacterial polypetide isolated from the Sargasso Sea
MNKLTDFERYVIEEKGTERPFSGEYYQHDAKGVYLCKKCHAPLYRSEDKFNAHCGWPAFDDEIPGAVSRHVDADGRRTEIVCSQCGGHLGHVFEGEYLTPKNIRHCVNSVSMVFQAADEVTTSTHKTAFATFGAGCFWCVEAIFKSLKGVLNVSSGYSGGDASDADYKSVCSGLTGHAEVVHIEFDPAQISFTTLLQVLFESHDPTTLNRQGNDKGPQYRSVVFAHDAAQIEETNAMIAKLTEARVFDAPIVTQVVAFESFYPAEDYHNDYFALHGEQPYCQIVVRPKVEKIRAIFAELQA

SEQ ID NO: 103220 - protein, 132 aa, Unknown
  Bacterial polypetide isolated from the Sargasso Sea
MNKKVLKTDVEWATCLTPQEYKILREKGTEMAFTGKYYNHKEDGTYTCAGCDYELFSSKTKFDSGTGWPSFFQAIEKDRIIEKEDKSLGMRRIEILCARCESHLGHVFNDGPNPTGLRYCVNSVSLDFKDLE

SEQ ID NO: 103221 - protein, 180 aa, Unknown
  Bacterial polypetide isolated from the Sargasso Sea
MNKAYFASGCFWCVETIYESLDGVKEVYSGYAGGLTVNPNYYQVISGKTGHAEAIEIIYDSDIISFETLLKVFFDSHDPTTPNRQGPDYGTQYRSIAFYSNIDERNKITNYINMLSANSIFGKKIITEVKEISKFYYAEDYHQDYEKKNPYSPYVQSVSIPRFKRFKKKASNYVKIKDDH

SEQ ID NO: 103222 - protein, 131 aa, Unknown
  Bacterial polypetide isolated from the Sargasso Sea
MDKVERTDKEWQACLTPAEYQILREKGTERAFTGKYYNHKEVGTYVCAGCDNELFSSNTKYDSGSGWPAFYDALDKSKVNTKMDYSFGMKRIEVTCAKCDSHLGHVFEDGPKPTGLRYCINSLALDFVSKK

SEQ ID NO: 103223 - protein, 168 aa, Unknown
  Bacterial polypetide isolated from the Sargasso Sea
MQKATFGAGCFWCVEAVFERLEGVVDVIPGYSGGHKNNPTYKEICTGMTGHAEVAQITFDPKVITFDDLLNMFWKSHDPTTRNRQGNDIGTQYRSAIFYHNNEQKTIAEESKNKVDNSNIFSNPIVTEITKLEKFWVAEDYHNNYYNNNMNQPYCKFIIKPKLDKLFK

SEQ ID NO: 103224 - protein, 182 aa, Unknown
  Bacterial polypetide isolated from the Sargasso Sea
MKVTNNNLKENSNYKKVYFAGGCFWCMEESFDKEKGIIQSISGYSGGHLKNPTYKEVIYKDTGHVETIEITYDPKMTSYKNLLEVFWKNIDPFDKYGQFCDKGKSYRSVIFYKNNSQKKVIQKSIAEIEQRFNSKVVTLLWKFDRFYQAEDYHQDYYQKNFLRYLAYKKACQREEVLNKIWN

SEQ ID NO: 103225 - protein, 189 aa, Unknown
  Bacterial polypetide isolated from the Sargasso Sea
MRIFLLLVTLIIINPALQAEEKKAYFAGGCFWCMEESFDQVEGVTSTISGYSGGHLKNPKYADVIYTDSGHVEAIEVSYDPAKIDYQKLLDIYWKNIDPFDANGQFCDKGKSYRSVIFFENEKQKELIDNSFRKLENIFNKKIVTLVWKFKKFYKAETYHQDYYEKNFIRYLMYKKGCQREETLKKIWN

SEQ ID NO: 103226 - protein, 168 aa, Unknown
  Bacterial polypetide isolated from the Sargasso Sea
MQKATFGAGCFWCVEAVFERLVGVKDVMPGYTGGHKNNPTYKEICTGMTGHAEVAQVTYDSKIITFNELLDMFWKSHDPTTRNRQGNDIGTQYRSAIFYHNDKQKLLAEESKLKVDNSHIFTNPIVTEITKLDKFWPAEDYHNNYYANNMDQPYCRIVIKPKLDKLFK

SEQ ID NO: 103227 - protein, 148 aa, Unknown
  Bacterial polypetide isolated from the Sargasso Sea
MEIAVLACGCFWGPEKKFGSLNGVYKTEVGYCGGKTENTTYKEVCSGETNHAEVVKINFDPKIITYEEILNFFFKIHDPTTLNSQGPDFGTQYRSEIFYLNTKQKEIAEKVLKSKNNDFSGKIVTKLSLLKNYCIAEEYHQKYLDKKF

SEQ ID NO: 103228 - protein, 147 aa, Unknown
  Bacterial polypetide isolated from the Sargasso Sea
MEIAILAGGCFWGMEDLMRKIPGVQKTRVGYTGGHLKNPTYKDVCTETTGHAEAIEILFDPSRVSYRRLLECFFQIHDPTTIDRQGNDIGDSYRSHIFTTSSEQREEAFKMISDIESSKKWPGRIVTKVTPAEEFWEAESYHPRLLS

SEQ ID NO: 103229 - protein, 186 aa, Unknown
  Bacterial polypetide isolated from the Sargasso Sea
MAGKLKVSTGKANENLSFKKAYFAGGCFWCMEESFDKVDGVIKSISGYSGGKMKNPTYQDVIYKDTGHVEAIEITYDPKKISYEKLLAIFWKNIDPFDKYGQFCDKGKSYRSVIFFKSDKQKSIIQNSVAEVEKRFNSKVVTMVWKFDKFYQAEDYHQDYYQKNFLRYLAYKKACQREEVLDKIWN

SEQ ID NO: 103230 - protein, 149 aa, Unknown
  Bacterial polypetide isolated from the Sargasso Sea
MEIAVLALGCFWGPEKKFGKIEGIVETEVGYCGGKIPNVTYKEVCQGNTEHAEVVKLTYDNNKISFEKILEYFFEFHDPTTLNRQGPDIGTQYRSEIFCINDKQEKISFSVIEKIKSNFNLKIVTKISKIKNYTKAEEYHQKYLEKNQF

SEQ ID NO: 103231 - protein, 131 aa, Unknown
  Bacterial polypetide isolated from the Sargasso Sea
MEEKDKRKEDLTPEQYYVTQQEGTEPAFSGKYTYTETKGSYNCVVCGEPLFDSDTKFDSGTGWPSFWEPIQAESVETQEDHSLGMTRTEVHCKKCKAHLGHVFPDGPNPTGLRYCINSVSLDLEAEEDQAD

SEQ ID NO: 103232 - protein, 190 aa, Unknown
  Bacterial polypetide isolated from the Sargasso Sea
MKKILLFVTIFLINLNLSASENKKAYFAGGCFWCMEESFDSVDGVLSSISGYSGGHLKNPTYQDVIYKDTGHVEAIEITYDPEIVSYEKLLNVYWRNIDPFDAQGQFCDKGKSYRSVIFFQNQLEKEFINKSFKDLENKFSNKIVTLVWKFDKFYPAEDYHQDYYEKNFIRYLMYKKGCKREETLKRIWN

SEQ ID NO: 103233 - protein, 120 aa, Unknown
  Bacterial polypetide isolated from the Sargasso Sea
MEKKLSEEQKEILYSCGTEVPGTSELLHEKREGVYVTADKELPVFKSEHKFESGTGWPSFYEANHENIILKEDRSHGMIRTEVISKEGEHLGHVFNDGPQPTGLRYCINGLALKFIPENE

SEQ ID NO: 103234 - protein, 135 aa, Unknown
  Bacterial polypetide isolated from the Sargasso Sea
MNKEKDSLKKKLSPEEYRVTQEKGTEMPFTGNLLNEHRFGVFKCICCEHMLFSSEHKFDSGTGWPSFFDVISEKNIKTKVDPKHIRPDGTSSGLEVLCNMCDAHLGHVFEDGPAPTGLRYCINSVSLDFETSQSG

SEQ ID NO: 103235 - protein, 128 aa, Unknown
  Bacterial polypetide isolated from the Sargasso Sea
MKKVNKNLTSEEIFILRDKGTERPFSGKFDTFFEEGVYKCKNCNAELFKSDSKYDAGCGWPSFFEAIDEKSILYKEDNSIFGRPRTEILCAKCEGHLGHVFEDGPVEKTGLRYCVNSISLDFESKKNN

SEQ ID NO: 103236 - protein, 146 aa, Unknown
  Bacterial polypetide isolated from the Sargasso Sea
MEIAILALGCFWGPEIKFDKLEGVTKTEVGYCGGNSETTTYEKVCSGNTNHAEVVKIEFDPKKISYEKILQYFFEIHDPTTLNSQGPDIGTQYRSEIFYLNENQMKIAENIIEENNKKLSGKVVTKLSKIKNYCKAEDYHQKYLEK

SEQ ID NO: 103237 - protein, 217 aa, Unknown
  Bacterial polypetide isolated from the Sargasso Sea
MINLFTLISIMSCNISAPQPIDNQQPVYSIDNQDYSQYSKAYFASGCFWCVETIYESLEGVKEVYSGYAGGSTVNPNYYQVMTGRTGHAESIEIIYDESVIKFEMLLKVFFDSHDPTTMNRQGPDYGTQYRSIAFYSDEREKEKINNYINLLSSNSIFGKNIVTEVMKIDEFYYAEDYHQDFERKNPNNPYVRNVSIPRFKEFKKKTSNYVKIKEDH

SEQ ID NO: 103238 - protein, 131 aa, Unknown
  Bacterial polypetide isolated from the Sargasso Sea
MSERIERSPEEWKQKLSPEQFQVARCGGTERAFTGAYWNKKDSGTYHCICCDAPLFSSQTKFESGTGWPSFWDGVSSEAITTKQDLSHGMVRVEINCARCDAHLGHVFPDGPAPTGQRYCVNSASLDFKAS

SEQ ID NO: 103239 - protein, 147 aa, Unknown
  Bacterial polypetide isolated from the Sargasso Sea
MEIAVLACGCFWGPEIKFSRLDGIFKTEVGYCGGNTNKTSYQEVCEGDTNHAEVVKLDFDPKIISYEKILDYFFEIHDPTTLNSQGPDFGTQYRSEIFYLNDEQKNIAKKIIEKYNKKYFGKVVTKISQIKNYCTAEEYHQKYLEKR

SEQ ID NO: 103240 - protein, 149 aa, Unknown
  Bacterial polypetide isolated from the Sargasso Sea
MKKCTLALGCFWKPEENFKDKDGIIETEVGYAGGKNPIITYKEVCEGDTGHAEVVRITFDEKIISFRKILDLFFKMHDPTQKDMQFPDVGTQYRSEIFYESDEQKKEAEEVLNEKNKEFNGKIQTNISKVKNYCKAEEYHQKYIEKNKL

SEQ ID NO: 103241 - protein, 148 aa, Unknown
  Bacterial polypetide isolated from the Sargasso Sea
MEIAILALGCFWGPEINFSKLEGVESTEVGYCGGNHNQTNYEEVCSGNTNHAEVVKIKFDNSKISYENILNYFFESHNPTTLNRQGPDIGTQYRSEIFYSNDKQKKIAEDILSKYNIKYNGKIVTKISKIKNYCKAEEYHQKYLEKKF

SEQ ID NO: 103242 - protein, 166 aa, Unknown
  Bacterial polypetide isolated from the Sargasso Sea
MRRLLLAVLIGLLALPSAVMADTETAVFAGGCFWCLEHDLEDLPGVLEATSGYSGGHVDNPTYRQVSGETTGHQEVVEVRFDPDHISYGTLLRSYWRNVDPLDGGGQFCDRGDSYRPVIFTADAAHAREAEASAQAAAVELGQPRSALKVELRDAARFWRAEDNHQ

SEQ ID NO: 103243 - protein, 153 aa, Unknown
  Bacterial polypetide isolated from the Sargasso Sea
MDKNNANIVLLGSGCFWHPEMIFHRTDGVISTKVGYAGGTTENPTYAEVCSGQTGHAEVVKVEFDTNIIDFNKLLDIFWDIHDPTQINRQGVDIGTQYRSCIFTDYEPYIEIAKNAIDALNTSKRYNNPISTILYENVTFFEAENYHQKYLFR

SEQ ID NO: 103244 - protein, 104 aa, Unknown
  Bacterial polypetide isolated from the Sargasso Sea
ERAFTGKYNNHKEEGVYVCAGCDNQLFSSKTKYDSGSGWPAFYDALDKTKVNTKMDYSFGMKRIEVTCAKCDSHLGHVFEDGPRPTGLRYCINSLALDFVSKNN

SEQ ID NO: 103245 - protein, 149 aa, Unknown
  Bacterial polypetide isolated from the Sargasso Sea
MKKAIFALGCFWKPEENFSKLNGIINTEVGYCGGNADKTTYEDVCSGETNHAEVVKIEFDEKKISYEKLVEKFFEMHDPTTLNKQGPDVGTQYRSEIFFLDDEQKIIAEKVKTNLDGKYKRKIVTNISKEKNYCKAEDYHQKYIQKNSL

SEQ ID NO: 103246 - protein, 186 aa, Unknown
  Bacterial polypetide isolated from the Sargasso Sea
MNKHKYFIALFFFFTGFTLSNQTNHIQTIYLGSGCFWGAEKGYEALDGVINAKSGYANGYGVSPNYRSIIQLKNKFNKNNFAEVVEVTFNNNFITVEEILMHFFESHDPTQYNRQGNDIGTQYRSTILYSDDDQKEIAEMLKKKYQNLLSDYGYGLIKTIIEPLDNFYLAEEYHQDYLKKIQMDIV

SEQ ID NO: 103247 - protein, 149 aa, Unknown
  Bacterial polypetide isolated from the Sargasso Sea
MQKFIGGIGCFWDETEYQGVPGIISTECGYCGGKDPKVTYEQVCGGDTEHIEVVKVTFDPKVITYEDVTRLFFKIHDPTTLNRQGPNVGYQYRSEIFYTTDEEKTSAQKVLDEVNKKLNGAVVTTIRKEKNYCKAEEYHQKYFEKRSKK

SEQ ID NO: 103248 - protein, 147 aa, Unknown
  Bacterial polypetide isolated from the Sargasso Sea
MEIAILGLGCFWGPEIKFSKLDGVIKTEVGYCGGHNAETNYKEVCTGSTNHAEVVKLDFDPKIISYEKILEFFFEIHDPTTLNSQGPDFGTQYRSEIFYLNDNQKITAENIINKENERLSGKVVTKLSQVKNYCPAEEYHQRYLEKR

SEQ ID NO: 103249 - protein, 399 aa, Unknown
  Bacterial polypetide isolated from the Sargasso Sea
MRKITLSLFLFTASFFSLFSLSSVNEATIHSEKIVLGSGCFWGAEKGYEALPGVIDAVSGYADGRGIRPTYREITKLRNKFNANNHAEVVEVTFNKNIISTEKLLMHYFESHDPTQINRQGNDIGTQYRSIILYSNEEQKKIIERVTQTFQELLLNAGYGLIATSVKPIEKFYKAENYHQDYIAKNPNGYCPDHSTGVKFAKTNEVPLIDNSVLLTGKKILVIQAEGFCPYCEKFNANVVNNYDGDIPVIYRFAHQLDGLEIYSPTWATPTIFFLNNGKEVFAHQGYLNPKEFYQALGFFKLGDSEAYRVAFEKGTDARFCKEYEIFKNTPDGIFVDKLSGAPLFDTRDRFNSATGWLSFTKPIDGSVYSKPDNSYGMRRTEIRSVTSDIHLGHVFSDG

SEQ ID NO: 103250 - protein, 148 aa, Unknown
  Bacterial polypetide isolated from the Sargasso Sea
MKKCTLALGCFWKPEENFKNKQGIIETEVGYAGGLSDKVTYEEVCKGDTGHAEVVRLTFDEKVISFKKILGLFFKMHDPTQKDMQYPDVGTQYRSEIFYEDDSQKAEAKEILETFNKELNGKIQTNISQLKNYCKAEEYHQKYLEKNR

SEQ ID NO: 103251 - protein, 148 aa, Unknown
  Bacterial polypetide isolated from the Sargasso Sea
MEIAIIALGCFWGPEIKFSKLEGVLKTEVGYCGGNSNKTTYEEVCTGTTNHAEVVKIEFDPKIISYEQLLNYFFDIHDPTTLNAQGPDIGTQYRSEIFYLNENQKNIAHKVLKERNIKLSGKIVTKISPDKNYSTAENYHQKYLEKRF

SEQ ID NO: 103252 - protein, 128 aa, Unknown
  Bacterial polypetide isolated from the Sargasso Sea
MEIAILGLGCFWGPERKFGEIEGVTNTEVGYCGGKNKDTNYQEVCTGNTGHAEVVKIEFDENIISYEKIINLFFDFHDPTTLNQQGPDIGTQYRSEIFYLNEIQKKIAGKILDKRNLDFKGRIGYKNN

SEQ ID NO: 103253 - protein, 131 aa, Unknown
  Bacterial polypetide isolated from the Sargasso Sea
FSKINGVNNTAVGYSGGNTENPTYEEVCQGDTEHVEVVEINFDENIISYENLLEHFWNCHDPTQLNRQGPDVGRQYRSAIFYYSDDQKITAEVSKKEIQNSFNNKIVTEIVEAKTFYLAEEYHQQYLKKRA

SEQ ID NO: 103254 - protein, 148 aa, Unknown
  Bacterial polypetide isolated from the Sargasso Sea
MKKCTLALGCFWKPEENFKNKPGIIETEVGYAGGLSDKVTYEEVCRGDTGHAEVVRLTFDEKVISFKKILDLFFKMHDPTQKDMQYPDVGTQYRSEIFYEDDSQKAEAKEILETFNKELNGKIQTNISQLKNYCKAEEYHQKYLEKNR

SEQ ID NO: 103255 - protein, 131 aa, Unknown
  Bacterial polypetide isolated from the Sargasso Sea
MSKIIKTDQEWKSLLTEEEYYVTRQKGTEPPFSGKNFEIINGGIFKCKCCGNELFNSSTKYDSYCGWPSFFEQISPEAIKTETDRSHGMVRIEIMCAKCDAHLGHVFDDGPEPTGKRYCVNSLSINYEEFE

SEQ ID NO: 103256 - protein, 137 aa, Unknown
  Bacterial polypetide isolated from the Sargasso Sea
MTKTAIFAAGCFWGIEEKFLSTDGVIETEVGYIGGKTPSPSYQDVCEGDTNHAEAVRVHYNEEEITYDNLLDIFFDIHDPTQLNRQGLDFGTQYRSSIFVLDEFQKMSAQNKINILNQDKFNGCIVTTIEEANEFWL

SEQ ID NO: 103257 - protein, 147 aa, Unknown
  Bacterial polypetide isolated from the Sargasso Sea
MEIAVLALGCFWGPEIKYSKIEGVIKTEVGYCGGDNPTTTYKEVCTGKTNHAEVVKLEFDEKIISYEKILKIFFQIHDPTTLNSQGPDFGTQYRSEIFYLNDNQKNIAEKVLKDTNLRMSGEVVTKISLLKNYCPAEEYHQKYLEKR

SEQ ID NO: 103258 - protein, 178 aa, Unknown
  Bacterial polypetide isolated from the Sargasso Sea
MSSTTQVATFGGGCFWCIDAAFRRVNGVSDVSSGYTGGNTDNPTYKSVCSGTTGHAEVVKVEFDSTIVSFETLLAMFFTLHDATQLNRQGNDIGTQYRSVVYYHNDEQLALTNTMIEQLQTHVSEPIVTEVSPVTTYYPAEHYHQDYYNENPQQGYCSMLIAPKLHKFETVFKEFLAE

SEQ ID NO: 103259 - protein, 96 aa, Unknown
  Bacterial polypetide isolated from the Sargasso Sea
MRIFLLFVTLIIINPVLHAEEKKAYFAGGCFWCMEESFDQVEGVISTISGYSGGHLKNPKYADVIYTDSGHVEAIEVTYDSAKIDYQKLLDIYGKI

SEQ ID NO: 103260 - protein, 183 aa, Unknown
  Bacterial polypetide isolated from the Sargasso Sea
MFFIILSTNLYASGIKKVYFAGGCFWCMEESFDKVEGVIETISGYSGGHVKNPKYKDVVKNTTGHYETLEITYDPSITNFEKLLEIFWVNIDPFDADGQFCDKGESYKSVVFYENSDQKKIIETSIKNIENKFNKKVVTYVKNFKEFYMAETYHQDYYEKNFIRYLMYKKGCQREEVLNKIWG

SEQ ID NO: 103261 - protein, 136 aa, Unknown
  Bacterial polypetide isolated from the Sargasso Sea
MKGVIVDDIEVVKEINRTDSEWRQLLDESRYSVLREKGTERAFTGNYLNHKGVGIYACGACGQDLFSSKAKYDSGSGWPSFYKPISPETITEVEDHSLGMIRVEVTCSACKSHLGHVFNDGPRETTGLRYCINSVS

SEQ ID NO: 103262 - protein, 170 aa, Unknown
  Bacterial polypetide isolated from the Sargasso Sea
ETKKAYFAGGCFWCMEESYDQVDGVLSSISGYSGGHLKNPKYEDVIYKDTGHVEVIEVTYNPLVVNYKDLLNVYWKNIDPFDASGQFCDKGKSYRSVIFFENNSQKELIDQSFKEIEKKFDKKIVTLVWKFEVFYPAENYHQDYYEKNFIRYLMYKNACKREEILKKIWN

SEQ ID NO: 103263 - protein, 304 aa, Unknown
  Bacterial polypetide isolated from the Sargasso Sea
MRFSSLLVLSLLSFSLVAQSNQSTSHLEKIVLGSGCFWGAEKGYEALPGVVDAVSGYADGYGVRPSYREITKYINKFNPNNHAEVVEVTYNKNIISTKDLLEHYFESHDPTQLNQQGNDIGTQYRSIILYTNKEQQRTAEKLIFEYQQLLTNSGYGQIATVVKSLDEFFRAETYHQDYIAKNPNGYCPDHSTGIRFAKDNPIERKDNSELLKGKNIVVIEPQGYCPYCEKFKALVAENYQGSILIHFRLALQLDSLQIDTPTWATPTIIFLEEGKEIFSHQGYMSPKEFYKALGFFKLGDSEAY

SEQ ID NO: 103264 - protein, 159 aa, Unknown; identical to SEQ ID NO: 103046
  Bacterial polypetide isolated from the Sargasso Sea

SEQ ID NO: 103265 - protein, 190 aa, Unknown
  Bacterial polypetide isolated from the Sargasso Sea
MKKYLFIIFIFLISTSAQSKNFKKVYFAGGCFWCMEESFDGVEGVLSTVSGYSGGHLKNPTYHDVIYKDTGHVEALEITYDPNKVNFEKLLNIFWRNIDPFDSEGQFCDKGKSYRSVIFYQTQLEKEFIEKSFKNYEKKFSKKIVTLVWKFEEFYQAEDYHQDYYEKNFIRYLMYKKACKREDTLKKIWN

SEQ ID NO: 103266 - protein, 146 aa, Unknown
  Bacterial polypetide isolated from the Sargasso Sea
MEIAVLALGCFWGPEIKFGKLEGIIKTEVGYCGGNNDKTTYEEVCSGNTNHAEVVKLEFDPIKISYEEILHYFFEIHNPTTLNAQGPDIGTQYRSEIFYINEEQKKIAEKIIEENDKELSGKVVTKLSKLKNYCKAEDYHQKYLEK

SEQ ID NO: 103267 - protein, 147 aa, Unknown
  Bacterial polypetide isolated from the Sargasso Sea
MEIAILGLGCFWGPEIKFGKLDGVIQTEVGYCGGNNAETNYKEVCTGTTNHAEVVKLNFDPKVISYEKILEYFFEIHDPTTLNYQGPDFGTQYRSEIFYLNDQQKIIAEKMIEKENLKLSGKVVTKTSLVKNYCPAEEYHQRYLEKR

SEQ ID NO: 103268 - protein, 147 aa, Unknown
  Bacterial polypetide isolated from the Sargasso Sea
MEIAVLALGCFWGPEIKFSKIEGIIKTEVGYCGGNSPTTTYKEVCTGKTNHAEVVKIDFDEKVITYEKILKIFFQIHDPTTLNSQGPDFGTQYRSEIFYLNDNQRIIAEKVLKNENQRMSGKVVTKISLLKNYCPAEEYHQKYLEKR

SEQ ID NO: 103269 - protein, 301 aa, Unknown
  Bacterial polypetide isolated from the Sargasso Sea
MNKLTDFERYVIEEKGTERPFSGEYYKHDAKGVYLCKKCHAPLYSSEDKFNAHCGWPAFDDEIPGAVSRHVDADGRRTEIVCSQCGGHLGHVFEGEYLTPKNIRHCVNSVSMVFQAADEVATSTHKTAFATFGAGCFWCVEAIFKSLKGVLNVSSGYSGGEASDADYKSVCSGLTGHAEVVHIEFDPAQISFTTLLQVLFESHDPTTLNRQGNDKGPQYRSVVFAHDAAQIEETNAMIAKLTEAKVFDVPIVTQVVAFESFYPAEDYHNDYFALHGEQPYCQIVVRPKVEKIRALFAELQA

SEQ ID NO: 103270 - protein, 322 aa, Unknown
  Bacterial polypetide isolated from the Sargasso Sea
FWGAEKGYEELEGVLDAVSGYADGEGVRPTYREITKFSNKFNPNNHAEVVEVTYNKNLITLEELIIHYLESHDPTQLNRQGNDIGTQYRSIILYSDVAQQSKILKLMAEYQTLLREGGYGDIQTIVKPLSQFFVAENFHQDYIKKNPNGYCPDHSTGIKFARNDYEPKKDNNLLKIGKSIVVIEPEGFCPYCQKFREDVSNEYAGTIPLVYRDASNLEGLAIKTPTWATPTILFLERGSEVFGHQGYLSPKEFYQALGLFKLGNTEAYRVAFNEGTDARYCKEYEIFKNTPDGVFIDKLSGAPLLTQNIDLILEPGWVIFYE

SEQ ID NO: 103271 - protein, 140 aa, Unknown
  Bacterial polypetide isolated from the Sargasso Sea
MALGFKRNKIYNKPMKDLKEKLSKEAFEVTQNQGTERPFSGDLLNIKEEGTYKCICCGQNLFSSQAKFESGTGWPSFFMPIDETAVKNIEDRSHGMVRVEVRCNGCDAHLGHVFPDGPEPTGLRYCMNSVAMSFEPYNSE

SEQ ID NO: 103272 - protein, 71 aa, Unknown
  Bacterial polypetide isolated from the Sargasso Sea
MDQVGRVFFQPSVESNIETQEDRSAGMIRTEVHCNNCKAHLGHVFPDGPQPTGLRYCINSVSMDFTPSEED

SEQ ID NO: 103273 - protein, 148 aa, Unknown
  Bacterial polypetide isolated from the Sargasso Sea
MEIAILALGCFWGPEIKFSKLDGVFKTEVGYCGGDYQKTSYEEVCTGKTNHAEVVKIEFNRDKLSYEEILNFFFEIHDPTTLNKQGPDIGSQYRSEIFYSNLKQKEIAEKVFLKFNGKFNGKIVTKISEIKNYCKAEDYHQKYLEKNY

SEQ ID NO: 103274 - protein, 150 aa, Unknown
  Bacterial polypetide isolated from the Sargasso Sea
MKTAYFSLGCFWGPQLEFEKIDGVKKAEVGYCGGDDPNTTYEKVCSGSTNHAETIKVEFDENIVSYEELVRIFFKIHDPTQLNRQGPDIGTQYRSEIFYKDEDQKKVAEKIKSEFNEKFKGKIVTNISKEKLYQTAEDYHQYYLKKKSII

SEQ ID NO: 103275 - protein, 176 aa, Unknown
  Bacterial polypetide isolated from the Sargasso Sea
MIKKLFKSIFKIWIITIFIFDVNFSQQKINFSGVSSPSNKEQKKMKKTESEWKRTLTPEEYYILRQKGTERAFTGEYDKHFEEGVYACAGCGAELFESGTKYNSGCGWPAFYEAMPGTVEETQDNSYGMRRIEITCSKCDGHLGHVFNDGPKPTGIRYCINSISMDFKPEKNKDQK

SEQ ID NO: 103276 - protein, 178 aa, Unknown
  Bacterial polypetide isolated from the Sargasso Sea
MNDNGYEKAYFAGGCFWCMEPPFEAMEGVIEATSGYMGGTTENPTYEEVTTGETGHAEVVEILFDPKTVTYEELLEVFWRNIDPTALNYQFADVGSQYRTEIFTVGSEQKDLAEQSKIELENSGKFDKPIVTAISEAPAFYIAEEYHQDFYKKQSMRYQMYAKASGRKGFLEDTWGED

SEQ ID NO: 103277 - protein, 147 aa, Unknown
  Bacterial polypetide isolated from the Sargasso Sea
MEIAVLALGCFWGPEIKFSKIEGVIKTEVGYCGGNSPTTTYKEVCTGKTNHAEVVKIDFDEKIITYEKILKIFFQIHDPTTLNSQGPDFGTQYRSEIFYLNDNQRVVAERVLRDVDDRMSGKVVTKISLLKNYCPAEEYHQKYLEKR

SEQ ID NO: 103278 - protein, 116 aa, Unknown
  Bacterial polypetide isolated from the Sargasso Sea
MKHFLSNLDLHSETPQDYESIIFGAGCFWGVEKKFWQLDGVWLTSVGYSGGELEDPSYEIVCSGTTNHVEVVKVVFNPEVISLADLLKVFWECHDPTQGMRQGNDIGSQYRSVIFL

SEQ ID NO: 103279 - protein, 151 aa, Unknown
  Bacterial polypetide isolated from the Sargasso Sea
MSLLDKLKKPSLGQSLPGREEQMPVPPGHFVHGRPLQAPFPEGMKVIQFGMGCFWGAERKFWEMSGVFSTAVGYSGGVTPNPSYEEVCSGYTGHTETVLVIYDESAVSTLSLLKGFWEGHDPTQGMRQGNDIGTQYRSSIYAYDDEQLQLA

SEQ ID NO: 103280 - protein, 146 aa, Unknown
  Bacterial polypetide isolated from the Sargasso Sea
MEIAVLALGCFWGPEIKFGKLEGITKTEVGYCGGNSNSTTYEEVCSGDTNHAEVVKLEFDPKKISYEKILQYFFEIHNPTTLNSQGPDIGTQYRSEIFYVNEHQMKIAEKIIEENNIKYSGKVVTNLSKLKNYCRAEDYHQKYLEK

SEQ ID NO: 103281 - protein, 147 aa, Unknown
  Bacterial polypetide isolated from the Sargasso Sea
MEIAILGLGCFWGPEIKFSKLDGVIKTEVGYCGGHNAETNYKEVCTGTTNHAEVVKLDFDPKVISYEKILEYFFEIHDPTTLNSQGPDFGTQYRSEIFYLNDQQKITAEKMIEKENVKLSGKVVTKTSLVKNYCPAEEYHQRYLEKR

SEQ ID NO: 103282 - protein, 91 aa, Unknown
  Bacterial polypetide isolated from the Sargasso Sea
MDTYKCAGCDTELFTSKTKYNSGCGWPAFYESLPGKIEESADNSFGMTRIEITCEKCGGHLGHVFNDGPQPTGLRYCVNSASLDFDPKDEE

SEQ ID NO: 103283 - protein, 194 aa, Unknown
  Bacterial polypetide isolated from the Sargasso Sea
MKRILLSFIACLGIFVYADNDQSTNHIEKIVLGSGCFWGAEKGYEALEGVIDAVSGYADGEGVRPNYREITKFTNKFNPNNHAEVVEVTFNRNLISIEDLMIHYLESHDPTQFNRQGNDIGTQYRSIVLFSNNSQKQKILELIAEYQILLNEEGYGQIRTAVKPLKKFFKAENYHQDYIKKNPNGILPRSLYGS

SEQ ID NO: 103284 - protein, 123 aa, Unknown
  Bacterial polypetide isolated from the Sargasso Sea
MPINKNHLSEEEIEVTQNCGTEPPFSGKLLYEKREGIYKCIVCNNKLFESESKFESGTGWPSFYDAIGDTVTSKEDNSFGMRRIEINCKNCDSHLGHVFNDGPTPTGLRYCVNSLSLGFDPVE

SEQ ID NO: 103285 - protein, 173 aa, Unknown
  Bacterial polypetide isolated from the Sargasso Sea
FSQDLGKVYFAGGCFWCMEESFEKKEGVLEVISGYSGGTTVNPTYEEVTYENTGHFEVVEIIFDKNKTDFNELLNHFWRNIDPFDEYGQFCDRGYSYRSVAFYQTQKEKDLIEKSIIKLEEKFGKKIVTYVRKFDKFYKAEEKHQNFYIEKFANYLRYKKACGRERILNKIWN

SEQ ID NO: 103286 - protein, 190 aa, Unknown
  Bacterial polypetide isolated from the Sargasso Sea
MKKIFLTLFFIVFSTNLYASNIKKVYFAGGCFWCMEESFDKVKGVIETISGYSGGHVKNPKYKDVVKNNTGHYETLEITYDSTITNFEKLLEVFWINIDPFDANGQFCDKGESYKSVVFYENNDQKKIIETSIKNIENRFNKKVVTYIKNFKEFYMAETYHQDYYEKNFIRYLMYKKGCQREEVLNKIWG

SEQ ID NO: 103287 - protein, 73 aa, Unknown
  Bacterial polypetide isolated from the Sargasso Sea
MLPSFTFAKLNTIYLAGGCFWCVEEVYEKLEGVDSVISGYSGGHVENPTYREVVKGNTGHIEAVEIVYDSEIV

SEQ ID NO: 103288 - protein, 148 aa, Unknown
  Bacterial polypetide isolated from the Sargasso Sea
MKKCTLALGCFWKPEENFKNKPGIIETEVGYAGGLSDKVTYEEVCKGDTGHAEVVRLTFDEKLISFKKILDLFFKMHDPTQKDMQYPDVGTQYRSEIFYEDDIQKAEAKEILEIFNKELNGKIQTNISRLKNYCKAEEYHQKYLEKNR

SEQ ID NO: 103289 - protein, 153 aa, Unknown
  Bacterial polypetide isolated from the Sargasso Sea
MEKALFGAGCFWGVEETFRKIPGVVKTEVGYTGGHTLNPTYQSICEGDTNHAEVVLVEYDNKKISYDKLLNHFWKCHDPTTLNRQGPDIGTQYRSAIFYFDDNQKKLATESKINFAKENNLIIVTEISQLSDYYKAEEYHQKYIQKTGLHCAV

SEQ ID NO: 103290 - protein, 51 aa, Unknown
  Bacterial polypetide isolated from the Sargasso Sea
TEQDTSHGMVRTEIMCATCDAHLGHVFDDGPEPTGLRYCVNSLSIQYKEFE

SEQ ID NO: 103291 - protein, 213 aa, Unknown
  Bacterial polypetide isolated from the Sargasso Sea
MRRLLLALLIGLLAFPSAVMADTETAMFAGGCFWCLEHDLEDLPGVLEATSGYSGGHVDNPTYRQVSAETTGHQEVVEVRFDPAEISYGTLLRSYWRNVDPLDGGGQFCDRGDSYRPVIFTADAAQAREAEASAQAAARELGLPRSSLKVELRDAARFWRAEDYHQNYADLNELKYNFYRFSCGRDRRLDAVWGASARSGDAWSDASQSSRNP

SEQ ID NO: 103292 - protein, 133 aa, Unknown
  Bacterial polypetide isolated from the Sargasso Sea
MGSGCFWGAEKGYELMDGVINAESGYANGYGIKPNYRSIIQFKNKYNEKNFAEVVKVTFNSNAISLENILKHFFETHDPTQHNRQGNDIGTQYRSTILFQNESQKELAEKIIAEYQALLIEGRYGKNRTKLEP

SEQ ID NO: 103293 - protein, 190 aa, Unknown
  Bacterial polypetide isolated from the Sargasso Sea
MKKTLLIVFFLLLPANLNAENISKVYFAGGCFWCMEESFDKVNGVIETISGYSGGHVKNPKYKDVVKNTTGHYETLEITYNSSITNFEKLLEIYWINIDPFDADGQFCDKGESYKSVVFFENSDQKKIVDASIKNIENKFNKKVVTYVKKFKEFYKAETYHQDYYEKNFIRYLMYKKGCQREETLNKIWG

SEQ ID NO: 103294 - protein, 164 aa, Unknown
  Bacterial polypetide isolated from the Sargasso Sea
MISKLILGAGCFWGVEVLFEEMSGVKKVISGYAGGHTENPTYEEVCTGKSGHIEVVEIEYENNEVKFEELLDKFFFIHDPTQMNRQGPDIGEQYKSVIFYNSDEERRISESKIDEINNSGEHQNEVATELRENAKFWPAEEYHQDFIEKNGKVCYHQLYVQHKS

SEQ ID NO: 103295 - protein, 172 aa, Unknown
  Bacterial polypetide isolated from the Sargasso Sea
MLSSLIVGAGCFWGVEVLYEQMPGVINATSGYSGGHLDNPRYEDVLTGETGHVEVVKIDYDSSEVTFNELIDTFFIIHDPTTLNRQGPDIGEQYKSILFFNSEDEKEIIESKIEKIDLSGKFENPIVTEIRETVEFYPAEEYHQDYAAKTGKLCYQQLYVMYNYSPIPAATP

SEQ ID NO: 103296 - protein, 123 aa, Unknown
  Bacterial polypetide isolated from the Sargasso Sea
MELNKNHLSQEQFEVTQNCGTEPPFSGELLYEKREGIYSCVVCDFSLFESDTKFESGTGWPSFYDALHDTITTKEDLSYGMKRVEISCRNCNAHLGHVFPDGPRPTGLRYCVNSLSLSFNENE

SEQ ID NO: 103297 - protein, 129 aa, Unknown
  Bacterial polypetide isolated from the Sargasso Sea
MTNEKDLKETLTPEEYYVTQNHGTEPAFSGKYDGVKTPGTYHCIVCGVELFSSESKYDSGSGWPSFWEPSQEENIETEQDHSAGMVRTEVHCSKCEAHLGHVFPDGPQPTGLRYCINSVSLDLKPTEEE

SEQ ID NO: 103298 - protein, 75 aa, Unknown
  Bacterial polypetide isolated from the Sargasso Sea
MKKIFLTLFFIILSTNLYASNIKKVYFAGGCFWCMEESFDKVEGVIETISGYSGGHVKNPKYIDVVKNTTGHYET

SEQ ID NO: 103299 - protein, 129 aa, Unknown
  Bacterial polypetide isolated from the Sargasso Sea
MKKTDSEWRRILSSAEYYILREKGTERAFTGEYDGHFEDGIYVCAGCGHKLFDSETKYRSGCGWPAFSKAMPESVEESEDNSYGMRRIEITCSKCDGHLGHVFNDGPQPSGLRYCINSVSMDFKPKEDK

SEQ ID NO: 103300 - protein, 94 aa, Unknown
  Bacterial polypetide isolated from the Sargasso Sea
MKKIAFLSIIFNFLFLIQNPSTAGELKVSIGNSESLSNYKKAYFAGGCFWCMEETFDKFDGIIKSISGYSGGHLKNPTYKDVIYKDTGHVETIE

SEQ ID NO: 103301 - protein, 122 aa, Unknown
  Bacterial polypetide isolated from the Sargasso Sea
SGGDTINPSYESVCQGNTNHTEVVLVEFDNSKISYEDLLKVFWKCHDPTTLNRQGPDIGTQYRSAIYYYNEDQKNKSIHSKNEYAKSAGINIVTEISEAKEFYKAEEYHQKYIQKTGLHCAI

SEQ ID NO: 103302 - protein, 147 aa, Unknown
  Bacterial polypetide isolated from the Sargasso Sea
MEIAILGLGCFWGPEIKFSKLDGIIKTEVGYCGGNNAETNYKEVCTGTTNHAEVVKLDFDPKIISYEKILEYFFEIHDPTTLNSQGPDFGTQYRSEIFYLSDNQKATAENLISKENERLSGKVVTKLSQVKNYCPAEEYHQRYLEKR

SEQ ID NO: 103303 - protein, 148 aa, Unknown; identical to SEQ ID NO: 103251
  Bacterial polypetide isolated from the Sargasso Sea

SEQ ID NO: 103304 - protein, 159 aa, Unknown
  Bacterial polypetide isolated from the Sargasso Sea
MALATFGAGCFWGVEYFFRQVNGVTNATCGYMGGNNEATTYEEVKKGKTGHAEVVQVEFDPAIVSYDELLDVFWKNHNPTTLNMQGGDIGTQYRSTIFFHDREQKAAAEASKLAFARSGRWGLRHIVTEIVPLQQFHVAEEYHQNYIDKNNLPSCHIEY

SEQ ID NO: 103305 - protein, 121 aa, Unknown
  Bacterial polypetide isolated from the Sargasso Sea
LALQLTPEQFRVTREGGSERAFTGAYWNHKGDGMYRCICCGAELFRSDSKFDSGTGWPSFWEGINPDAISTHQDASHGMVRTEIRCANCGSHLGHVFKDGPTPTGLRYCVNSASLEFEDKG

SEQ ID NO: 103306 - protein, 147 aa, Unknown
  Bacterial polypetide isolated from the Sargasso Sea
MEIAILGLGCFWGPEIKFSKLDGVIKTEVGYCGGNNAETNYKEVCTGTTNHAEVVKLDFDPKIISYEKILEYFFEIHDPTTLNSQGPDFGTQYRSEIFYLNENQKTIAGNVINKENERLSGKVVTKLSQVKNYCPAEEYHQRYLEKR

SEQ ID NO: 103307 - protein, 133 aa, Unknown; identical to SEQ ID NO: 103130
  Bacterial polypetide isolated from the Sargasso Sea

SEQ ID NO: 103308 - protein, 147 aa, Unknown
  Bacterial polypetide isolated from the Sargasso Sea
MEIAILGLGCFWGPEIKFSKLNGIIKTEVGYCGGNNSQTSYQEVCTGSTNHAEVVKLDFDPKIISYEKILKFFFEIHDPTTLNSQGLDFGTQYRSEIFYLNDQQELIAKKLIEEENIKLNGKVVTKISMVKNYCSAEEYHQKYLEKR

SEQ ID NO: 103309 - protein, 128 aa, Unknown
  Bacterial polypetide isolated from the Sargasso Sea
MLHYVKNIDIEKNCPEGFKEIIFGAGCFWGVEKKFWDQAGVLMTSVGYSGGDIENPSYRQVCYENTNHVEVVRIFYDPQEIGLDNLLKIFWECHDPTQGMRQGNDIGTQYRSVIFCSDENDIKVSNNS

SEQ ID NO: 103310 - protein, 170 aa, Unknown
  Bacterial polypetide isolated from the Sargasso Sea
MLASLIVGAGCFWGVEALYEDMPGVLNATSGYAGGSLENPRYEDVLTGETGHVEVVKIDYDTSEVTFDTLIDAFFIMHDPTTLNRQGPDIGEQYKSVIFYNNDEQKNIITNKIKLIDAMDIHENPVVTEIREAAKFYPAEDYHQDYAMKTGKLCYQQMYVRYNYTPLPTN

SEQ ID NO: 103311 - protein, 98 aa, Unknown
  Bacterial polypetide isolated from the Sargasso Sea
KFSRECHDPTQGMRQGNDIGEQYRSVIYCTNDEQLELANKSKELFEKILINQEYKGITTEIDINQSSYAAEEYHQQYLAKNPDGYCGIKGTGCALPPL

SEQ ID NO: 103312 - protein, 169 aa, Unknown
  Bacterial polypetide isolated from the Sargasso Sea
MVYRSGVCRIRGVKSVTSGYTGGRIPNPNYKQVCSGLTGHAEAVEIEYDPAVVPYEKLLEIFFATHDPTTLNRQGADVGTQYRSAIFYHDDTQKEIAKNVIEKLNESKVFPSPIVTTLEKAKVFYPAESYHQDYFANNGYQPYCQAVVAPKVAKVRKVFKELLKSDELQ

SEQ ID NO: 103313 - protein, 120 aa, Unknown
  Bacterial polypetide isolated from the Sargasso Sea
MDKKLSDEQIEILYSCGTEIPGTSELLNEKRKGVYVTADKELPVFKSEHKFESGTGWPSFYEANHENIILKEDRSHGMIRTEVVSKEGEHLGHVFNDGPQPTGLRYCINGLALKFIPDDE

SEQ ID NO: 103314 - protein, 147 aa, Unknown
  Bacterial polypetide isolated from the Sargasso Sea
MEIAVLALGCFWGPEIKFSKIDGIIKTEVGYCGGNSSITTYKEVCTGNTNHAEVVKLDFDEKIITYEKILKIFFQIHDPTTLNSQGPDFGTQYRSEIFYLNDNQKMIAEKVLNEVNERLSGKVVTKISLLKNYCPAEEYHQKYLEKR

SEQ ID NO: 103315 - protein, 132 aa, Unknown
  Bacterial polypetide isolated from the Sargasso Sea
MSKIIFTEKEWKEKLTTEEFEVLRNSGTERPFTGKYVDYKVSGIYMCAACDSDLFSSESKFNSGTGWPSFFKPIGNDKVVSKTDSSHGMIRTEVICANCHSHLGHVFDDGPKPTGLRYCINSISLKHKPLKK

SEQ ID NO: 103316 - protein, 127 aa, Unknown
  Bacterial polypetide isolated from the Sargasso Sea
MKEINDKLTQEELYVLKDKGTERPFSGEFDTFFEDGVYKCKNCKAELFKSDSKYDAGCGWPSFFEAVNEEAIIYKEDNSIFGRPRTEILCANCEGHLGHVFEDGPKDKTGLRYCVNSISLDFDSENK

SEQ ID NO: 103317 - protein, 103 aa, Unknown
  Bacterial polypetide isolated from the Sargasso Sea
MEIAILGLGCFWGPEIKFSKLDGVIKTEVGYCGGHNSETNYKEVCTGTTNHAEVVKLDFDPKIISYEKILEYFFEIHDPTTLNSQGPDFGTQYRSEIFYLNNQ

SEQ ID NO: 103318 - protein, 191 aa, Unknown
  Bacterial polypetide isolated from the Sargasso Sea
MKLLIIFSIFFFSSFNVFSKDFNKAYFAGGCFWCMEESFEKVDGVTSVISGYSGGNKKNPTYKEVTFGNTGHLETIEVIYDTNKVNFNSLLKVFWENIDPFDKYGQFCDKGYSYRSAVFYTNAKEKKLIEKSIKKIEETFDKKVVTYIRDFKVFYKAEENHQDYYQKKFINYLIYKQGCGREKKLNKIWKK

SEQ ID NO: 103319 - protein, 123 aa, Unknown
  Bacterial polypetide isolated from the Sargasso Sea
MAIEKHHLTDEQIEITQNCGTEPPFSGELLNEKRKGTYICVVCKDVLFNSDTKYDSNSGWPSFFDSIADKVTRKKDFSHGMIRTEINCKSCNSHLGHVFNDGPLPTGERYCVNSLSMEFNSDE

SEQ ID NO: 103320 - protein, 147 aa, Unknown
  Bacterial polypetide isolated from the Sargasso Sea
MEIAVLALGCFWGPEIKFSKIEGIIKTEVGYCGGNSTTTTYKEVCTGSTNHAEVVKLDFDEKIITYEKILKIFFQIHDPTTLNSQGPDFGTQYRSEIFYLNNIQKITAEKVLKDVNERLSNKVVTKITLLNNYCPAEEYHQKYLEKR

SEQ ID NO: 103321 - protein, 147 aa, Unknown
  Bacterial polypetide isolated from the Sargasso Sea
MEIAVLACGCFWGPEIKFSRLEGVYKTEVGYCGGNTSKTSYQEVCEGDTNHAEVVKLDFDPKIISYEEILNYFFEIHDPTTLNSQGPDIGTQYRSEIFYLNDEQKDIAKKIIEKYNKKLSGKVVTKVSQIKNYCIAEEYHQKYLEKR

SEQ ID NO: 103322 - protein, 388 aa, Unknown
  Bacterial polypetide isolated from the Sargasso Sea
MELWARKYFSGIKNNKKERNSYDSDYFEKKETFRLVRIDPIKDVRNLVMMFALPSTRELYHSKPGRQFGFVLGHEGKGSLLSYLKENGWATSLSAGAGSQTGDYGSATVSIGLTSKGQENYREVIKATMDYVDLMKKSGHVKHVFEELKTMSSLDETFTSRGEGMWRATQLANEVMMYPIEDAGRINYIYSDGSSKNYESLLTYITPNNMLTMLIAKGVETNKVEHFYQAPYSYDEDDAFYNELVYTRVRPELSIPEKNPFIPQKASIPKRKSDKTKLPKETASGNGASLFFGQDHEFLRPKGVISLKILFPKEKMSVRHRVHSRFYSACVNESLNELSYPAKQAGLNYSIREGYEGIYVDVNGYTESSLKLYELMLEHMVAFTITDV

SEQ ID NO: 103323 - protein, 420 aa, Unknown
  Bacterial polypetide isolated from the Sargasso Sea
MKKITLFVITTSLLSFSLSATVNEATIHSEKIVLGSGCFWGAEKGYEALPGVIDAVSGYADGNGIRPTYREITKLKNKFNVNNHAEVVEVTYNKNIISTEKLLMHFFESHDPTQINRQGNDIGTQYRSIILFSNEEQKRIIESVVQTFQTLLSNAGYGVIATSVKPIKKFYMAENYHQDYIAKNPNGYCPDHSTGVKFAKTNESSLIDNAELLKGKKIIVIEAEGFCPYCEKFNANVVNNYDGDIPVISRFANQLEGLEIDSPTWATPTILFLENGKEVFAHQGYLNPKEFYQALGYFKLGDSEAYRVAFEKGTDARFCKEYEIFKDTPDGIFVDKLSGAPLFDTKDRFNSSTGWLSFTRPIEGSVYSKPDNSYGMRRTEIRSVTSDIHLGHVFSDGPNGMPRYCINATVLEFKQRSSET

SEQ ID NO: 103324 - protein, 127 aa, Unknown
  Bacterial polypetide isolated from the Sargasso Sea
MKEINDSLTQEELYVLKDKGTERPFSGEFDTFFEDGVYKCKNCKAELFKSESKYDAGCGWPSFFEAVNEEAIIYKEDNSIFGRPRTEILCANCEGHLGHVFEDGPKDKTGLRYCVNSISLDFDSENK

SEQ ID NO: 103325 - protein, 148 aa, Unknown
  Bacterial polypetide isolated from the Sargasso Sea
MQKCTLALGCFWKPEENFKSKPGILKTEVGYAGGSSAKTTYEEVCTGNTGHAEVVRLTFDENKISFKKILDLFFKMHDPTQKDMQFPDVGTQYRSEIFYEDEKQKQDALEVLKEFNEKLDGKIQTNISKIKNYSKAEEYHQKYIEKNR

SEQ ID NO: 103326 - protein, 116 aa, Unknown
  Bacterial polypetide isolated from the Sargasso Sea
MEIAVLALGCFWGPEIKFSKINGVIKTEVGYCGGNSSQTTYKEVCTGSTNHAEVVKIDFDEKVINYEEILKIFFEIHDPTTLNSQGPDFGTQYRSEIFYLNDNQKKIAEDVLGPGQ

SEQ ID NO: 103327 - protein, 133 aa, Unknown
  Bacterial polypetide isolated from the Sargasso Sea
MIEKDSEKLQQDLSPEEYYVTQEKGTEPAFSGKYDGEKTPGVYNCIVCGEALFSSKTKYDSGSGWPSFWEPINQENVGSEADHSAGMIRTEVHCNKCKAHLGHVFPDGPQPTGLRYCINSVSLDLKPDEEVED

SEQ ID NO: 103328 - protein, 147 aa, Unknown
  Bacterial polypetide isolated from the Sargasso Sea
MEIAVLALGCFWGPEIKFSKIDGIIKTEVGYCGGNSPTTTYKEVCTGNTNHAEVVKLDFDEKIISYEKILKIFFQIHDPTTLNSQGPDFGTQYRSEIFYLNDKQKIIAEEVLKDTNERLSGKVVTKISLLKNYCTAEEYHQKYLEKR

SEQ ID NO: 103329 - protein, 129 aa, Unknown
  Bacterial polypetide isolated from the Sargasso Sea
NKPGILETEVGYAGGNSEQTTYEEVCTGSTGHAEVVRLTFDENKISFKKILDLFFKMHDPTQKDMQFPDVGTQYRSEIFYEDEKQKQDALEVLKEFNEKLDGKIQTNISKIKNYNKAEEYHQKYIEKNR

SEQ ID NO: 103330 - protein, 181 aa, Unknown
  Bacterial polypetide isolated from the Sargasso Sea
MLPITAYAKINTIYLAGGCFWCVEEVYEKLKGVIDVRSGYSGGHVENPTYQEVVKGDTGHIEVAEIIFDSDIVSLDKIIRVFFVNIDPFDSAGQFCDKGYSYKSALFSNDQIVIDRFNFYIDKIQENHKQKVETMILPFKNFYVAEEYHQDYYKKNPIRYTYYKYNCGREQRIKQLKINLG

SEQ ID NO: 103331 - protein, 154 aa, Unknown
  Bacterial polypetide isolated from the Sargasso Sea
MSKALFGAGCFWGPEKKFSEIKGVIETQVGYSQGLTDKTSYEEVCKGNTNHAEVVFLKFDENLVSYTSLVEFFYQIHDPTTLNQQGPDRGSQYRSLIGYYDETQCEIAKQITDKLNESQFNQKITTIIEPVKNYCPAEDYHQKYMEKKYSFLNF

SEQ ID NO: 103332 - protein, 148 aa, Unknown
  Bacterial polypetide isolated from the Sargasso Sea
MEIAILALGCFWGPEIKFDKLNGVTRTEVGYCGGNSSNTNYREVCSGNTNHAEVVKIEYDKSKISYENILNYFFEIHDPTTLNRQGPDIGTQYRSEIFFLNPEQKEIAQKMLVKYNEKYNGKISTKISPVKNYCIAEEYHQKYLEKNY

SEQ ID NO: 103333 - protein, 177 aa, Unknown
  Bacterial polypetide isolated from the Sargasso Sea
MSEQNEKAYFAGGCFWCMEPPFEALDGVVGATSGYMGGTTENPTYEEVTTGKTGHAEVVEILFDPSVVSYEELLEVFWRNIDPTALNYQFADVGSQYRTEIFTVGDKQKKLAEESKIKLEESGKFDKPIVTAITEAPTFYIAEEYHQDFYKKQSVRYQLYAKASGRKGFLEETWGDS

SEQ ID NO: 103334 - protein, 98 aa, Unknown
  Bacterial polypetide isolated from the Sargasso Sea
MSDHIKSDKEWKKLLDHESYRVTRQSGTERPFSGKYWNFNKDGIYKCVCCGQTLFESDTKFDAGCGWPSFFVPFNSNSINEFEDNSFGMNRIEVKCSN

SEQ ID NO: 103335 - protein, 126 aa, Unknown
  Bacterial polypetide isolated from the Sargasso Sea
MEIAVLGLGCFWGPEKKFGKIEGIVETEVGYCGGKMSNTSYKEVCTGETEHAEVVKLTFDPKKISYEKIIEYFFEFHDPTTLNRQGPDIGTQYRSEIFYNNDEQKNISLSKIEKLDNKFNSKITTK

SEQ ID NO: 103336 - protein, 130 aa, Unknown
  Bacterial polypetide isolated from the Sargasso Sea
MSEEKDNLKDQLTPEEYYVTQNHGTEPAFSGKYDSNKQAGIYSCVVCGAEIFSSKEKYDSGSGWPSFYQPSVESNVGTQEDFSAGMQRTEVHCNNCKAHLGHVFPDGPQPTGLRYCINSVSMRFTPSEEE

SEQ ID NO: 103337 - protein, 154 aa, Unknown
  Bacterial polypetide isolated from the Sargasso Sea
MSKALFGAGCFWGPEKKFSEIKGVIETQVGYSQGLTDKTTYEEVCTGNTNHAEVVFLTFDEEKISYENLVEFFYQIHDPTTLNQQGPDRGSQYRSVIAYYDDTQLEVAKQITDKLNENKFNQKITTVIEPVKNYCPAEDYHQKYMERKYSFLKF

SEQ ID NO: 103338 - protein, 156 aa, Unknown
  Bacterial polypetide isolated from the Sargasso Sea
MTKTAIFAAGCFWGIEEKFLSTDGVIETEVGYIGGKTPSPSYQDVCEGNTNHAEAVRVHYNEEEITYDNLLDIFFDIHDPTQLNRQDLDFGTQYRSSIFVLDEFQKMSAQNKINILNQDKFNGCIVTAIEEAKEFWLAEEYHQKYVRKKKQSGIFG

SEQ ID NO: 103339 - protein, 279 aa, Unknown
  Bacterial polypetide isolated from the Sargasso Sea
MYQILKIIFLLSLSSGLMSKEITNRELIFIYNAKSGFINELVDFAHKIISPNTYDCNLCAITYGTFTMEKSWANYVQSLPVKSVFTYKDKLVDKKLKKTKLPAVFIRDGEELNELISANEINNINDLEHLIRVLDTRLKERGMDTKKKKEISLTVEEWQKKLTPEEYHILREKGTERPFTGKYDKFYEDGTYKCAGCDTELFTSETKYNSGCGWPAFYESLPGKIEESSDNSFGMTRTEITCEKCGGHLGHVFNDGPQPTGLRYCVNSASLDFDPKEKE

SEQ ID NO: 103340 - protein, 202 aa, Unknown
  Bacterial polypetide isolated from the Sargasso Sea
MSLMKNLKLIFLVLLFSCINVETSNMSNNTEKAYFGGGCFWCMEPPFEVLDGVLEATSGYMGGETENPTYEQVSMGNTGHVEVVEIEFDPNIITYSELLEVFWRNIDPTALNYQFADVGSQYRTEIFTVGSQQMEEALKSKTDLENSGKFDKPIVTAITEAPTFYIAEEYHQDFYKKQSARYQIYAEASGRKGFLEETWGDE

SEQ ID NO: 103341 - protein, 279 aa, Unknown
  Bacterial polypetide isolated from the Sargasso Sea
MYQTIKILFLLSLSSSLMSKEITSKELIFIYNAKSGLVNELVDFAHKIISPQTYECNLCAITYGTFTMEKRWANYIKSLPIESVFTYKDKLISEKLKITKLPSIFIRDGEKLNELISANEINNINDLEDLIRVLDIRLKERGMDTKKKKEISLTDEEWQKKLTPEEYHILREKGTERPFTGKYDKFYQDGTYKCAGCDTELFTSETKYNSGCGWPAFYESLPGKIEESSDNSFGMTRIEITCEKCGGHLGHVFNDGPKPTGLRYCVNSASLDFDPKDKK

SEQ ID NO: 103342 - protein, 202 aa, Unknown
  Bacterial polypetide isolated from the Sargasso Sea
MSLMKNLKLIFLVLLFSCINVETSNMSDNTEKAYFGGGCFWCMEPPFEVLDGVLEATSGYMGGETENPTYEQVSMGNTGHVEVVEIEFDPNIITYSELLEVFWRNIDPTALNYQFADVGSQYRTEIFTVGSQQMEEALKSKTDLENSGKFDKPIVTAITEAPTFYIAEEYHQDFYKKQSARYQIYAEASGRKGYLKDTWGDS

SEQ ID NO: 103343 - protein, 177 aa, Unknown
  Bacterial polypetide isolated from the Sargasso Sea
MSQNTEKAYFAGGCFWCMEPPFEVLDGVLEATSGYMGGEIENPTYEQVSMGNTGHAEVVEIEYDPNIITYSELLEVFWRNIDPTALNYQFADVGSQYRTEIFTVGPEQMEEALRSKDELEKSNKFNKPIVTAITEAPVFYIAEEYHQDFYKKQSARYKIYAEASGRKGFLEDTWGDE

SEQ ID NO: 103344 - protein, 99 aa, Unknown
  Bacterial polypetide isolated from the Sargasso Sea
MEKALFGAGCFWGVEETFCKTPGVINTLVGYSGGDTINPSYESVCQGNTNHTEVVLVEFDNSKISYEDLLMVFWKCHDPTTLNRQGPDIGTQYRSAIYY

SEQ ID NO: 103345 - protein, 198 aa, Unknown
  Bacterial polypetide isolated from the Sargasso Sea
QDSLPGRIDEMQFNESHFVNNSSMIGPFPEGMSEIFLGMGCFWGAERLFWNIEGVYVTSVGYAGGFTPNPLYEEVCSGLTGHAEVVHVVFDPKIISLQEILKIFWEGHDPTQGMRQGNDMGTQYRSAIYYSDETLLDQIKKSEVNYSKALKKEGYTEITTEILPLEDYFYAEDYHQQYLAKNPNGYCGIGGCGVRLPD

SEQ ID NO: 103346 - protein, 349 aa, Unknown
  Bacterial polypetide isolated from the Sargasso Sea
LSASKTSHDETIYLGSGCFWGAEKGYELMDGVINAESGYANGYGIKPNYRSIIQFKNKYNEKNFAEVVKVTFNSNAISLENILKHFFETHDPTQHNRQGNDIGTQYRSTILFQNESQKELAERIIAEYQALLIEGGYGKIRTKLEPLDNFYLAEEYHQDYLKKNPNGYCPDLSTGIIFNDEEKIFEDNEYLLTGKQILVLDSQNYCPYCEKFKDDVTNSYKGSIPLSYRTSDQLHGLEIKSPTWATPSLIFLENGKEIFSYQGYINQKDFYQLLGKFKLGNSEAYNVAFNKGTDARFCKEYQIFKNTPDGIFIDKLSGEPLFDTRNRFVSRSGWLSFTKPVDGSVYETS

SEQ ID NO: 103347 - protein, 142 aa, Unknown
  Bacterial polypetide isolated from the Sargasso Sea
SVGYSAGKTTDPTYRDVCSGTTDHAEVVLVIYNSQLIDLENLLRVFWEGHDPTQFMRQGNDVGSQYRSIIFYDDDLALEKIKSSRDQYQTELSKAGFGEIVTEIKAPEEFFYAEDYHQQYLAKNPAGYCGLGGTGIKCTPNV

SEQ ID NO: 103348 - protein, 146 aa, Unknown
  Bacterial polypetide isolated from the Sargasso Sea
MNYHKNSEAIALLSPEEYWVTQENGTERPGTGKLLHNKEPGIYVDIVSGEPLFLSDDKYESGCGWPSFTKPVEASYITEISDTSHGMIRTEVRSTNGDSHLGHVFPDGPKDRGGLRYCINSASLRFIHLNDMEAEGYGKFVELIGE

SEQ ID NO: 103349 - protein, 132 aa, Unknown
  Bacterial polypetide isolated from the Sargasso Sea
MANKSKEDLKKELSSESYYVTQENGTEPPFTGQFWDHFENGSYTCICCGETLFQSDAKFDAGCGWPSFYQAADNKNIKELDDYSLSRVRTEIRCAKCDAHLGHVFTDGPQPTGLRYCLNSVALEFEKEISSK

SEQ ID NO: 103350 - protein, 95 aa, Unknown
  Bacterial polypetide isolated from the Sargasso Sea
ALFASIHKYDSNSGWPSFYQPIEEKNVKFEQDYELILPRTEVKSNQGDSHLGHVFNDGPNPTGLRYCINSAALKFIPVKEMEEKGYKKYLYLFET

SEQ ID NO: 103351 - protein, 242 aa, Unknown
  Bacterial polypetide isolated from the Sargasso Sea
MFKFLKSIMNNKDSVITYDANLVHRILNTDIKKDPNYQEDEIIFGCGCFWGAEKCFWKLPGVVTTSVGYAGGNKNNPTYYEVCSGLTGHSEVVRVIWDKSKIDISDLLKMFWECHDPTQKNRQGNDIGTQYRSAIYYKNENNKNIILASKEQYQKELNKKNLGLIETEIKMINTYFYAEDYHQQYLASAGSRQYCSASPTRVKLGNFTGSNYKLENYIWENFNWDVDKCVLRSDNNPIKNDK

SEQ ID NO: 103352 - protein, 131 aa, Unknown
  Bacterial polypetide isolated from the Sargasso Sea
METNTNSDKKWKDILDDESYRVTRLSGTERPFTGKYWNFNEKGSYKCICCGEKLFESETKFDAGCGWPSFFIPADQTCINEFKDDSLGMRRIEVKCSKCDAHLGHVFNDGPEPTGLRYCINSASLDFEKNQ

SEQ ID NO: 103353 - protein, 131 aa, Unknown
  Bacterial polypetide isolated from the Sargasso Sea
MNKIIKSDLEWKKILSEQEYYITRQKGTEPAFSGKAFDISKDGVFKCRCCGAKLFERTSKYESGCGWPSFFKGISNDAIKTEQDTSYGMIRTEIMCATCDAHLGHVFDDGPEPTGLRYCVNSLSIQYKEFE

SEQ ID NO: 103354 - protein, 196 aa, Unknown
  Bacterial polypetide isolated from the Sargasso Sea
MFWRVPGVYTTAVGYVGGHTPNPTYEEVCSGRTGHTEGVQVLFDPSVVSYADLLAMHWTCHDPTQGNRQGNDRGTQYRSGIYCTSEEQLKTAQESAETYEEALQATGRAAPITTEIKGPGDTFFYAEDYHQQYLAKPRSRPYCSAQPTGVPVPADWLKANGAKFGPGYWKTFGPAPGCTINVPNAPVTLEEALAAN

SEQ ID NO: 103355 - protein, 116 aa, Unknown
  Bacterial polypetide isolated from the Sargasso Sea
LSPEEYRILRKKGTERPFQGEYDNHFIEGNYNCAGCGTKLFESDTKYNSGCGWPAFYEAVPEKIKEIEDNSFGMRRVEVVCKKCDGHLGHVFNDGPNPTGLRYCINSVSMDFDPKK

SEQ ID NO: 103356 - protein, 112 aa, Unknown
  Bacterial polypetide isolated from the Sargasso Sea
MILKHHLEKLLDIFFKTHDPTTLNRQGNDVGTQYRSVIFYENKNELIFFEDYINKLNESNSFNSKIVTTLEKKSHFYFAEEYHHNYFEKNPLNGYCNMVVRPKVEKFRTENN

SEQ ID NO: 103357 - protein, 172 aa, Unknown
  Bacterial polypetide isolated from the Sargasso Sea
MDESTKATFGGGCFWCLEAVFQQVTGVIKVVSGYAGGASPNPSYEAVCSGLTGHAEVVQIEYDPGQTDFRTLLDWFWRCHDPTTLNRQGADVGTQYRSVIFFHDEEQLEHARTAKQDLESSGMFRDAVVTEISMIPEFYPAEDYHQNYYQKNSGAGYCQFVIRPKMQKLGFE

SEQ ID NO: 103358 - protein, 134 aa, Unknown
  Bacterial polypetide isolated from the Sargasso Sea
MSKIYKSEEEWRTFLNEESFRVTRKSGTEKPFTGKYWNFDKEGIYRCVCCGQELFLSKAKFDSGCGWPSFFVPSSNQVIDEHVDSSFGMVRTEVKCSKCDAHLGHVFNDGPNPTGLRYCINSASLDFKNYDEKK

SEQ ID NO: 103359 - protein, 177 aa, Unknown
  Bacterial polypetide isolated from the Sargasso Sea
MDESNKATFGGGCFWCLEAVFQKVTGVIKVVSGYAGGASPDPSYEAVCSGLTGHAEVVQIEYDPGQTDFRTLLDWFWRCHDPTTLNRQGADVGTQYRSVIFCHDEEQLEHARTAKQDLEISGMFRDPVVTEISMIPEFYPAEDYHQNYYQENSGAGYCQFVIRPKMQKLGLSSVRVK

SEQ ID NO: 103360 - protein, 196 aa, Unknown
  Bacterial polypetide isolated from the Sargasso Sea
MFEFLKNIMNKKNSALTNDIDLVHRVLKTDIKKVPNSKEDEIIFGCGCFWGAEKCFWKLPGVVTTSVGYAGGDKRNPTYYEVCSGLTGHSEVVRVIWNRAEIDISDLLKMFWECHDPTQKNRQGNDMGTQYRSAIYYKNDNNKKIILASKKQYQNELNKKNFGLIETEIKMIDTYFYAEQVPSTISCITWQQAVLF

SEQ ID NO: 103361 - protein, 169 aa, Unknown
  Bacterial polypetide isolated from the Sargasso Sea
ESLDGVIDAVSGYANGYGVNPNYRSIIQLKNKYNENNFAEVVKVTFNSNAISLDEILKHFFETHDPTQLNRQGNDIGTQYRSVILFSNETQRKLAQDILNEYQSLLFEAGYGRVVTLIEPLDNFYLAENYHQDYLKKNPNGYCPDLSTGVVFNEKEKNILDNQDLLIGK

SEQ ID NO: 103362 - protein, 140 aa, Unknown
  Bacterial polypetide isolated from the Sargasso Sea
MEEKKSKLTDMQYYVTQDCGTEPAFDNEYWDHKEPGIYVDIVSGEALFASVHKYDSNSGWPSFYQPIEDQNVKFEQDYELILPRTEVKSKQGDSHLGHVFNDGPNPTGLRYCINSAALKFIPLKEMEEKGYKKYLYLFET

SEQ ID NO: 103363 - protein, 147 aa, Unknown
  Bacterial polypetide isolated from the Sargasso Sea
MSQYFKDPMRIDQLNEIEHWVTQENGTERPGTGKYLNNKKVGIYVDIVSGEPLFSSDDKYESGCGWPSFTKPLVSSHIAELQDSSHGMLRTEVRSKFADSHLGHVFPDGPPERGGLRYCINSASLRFIPLDEMEAEGYGDFISQIGE

SEQ ID NO: 103364 - protein, 98 aa, Unknown
  Bacterial polypetide isolated from the Sargasso Sea
MMVTLKMGMYLCAGVGNKIFDSETKYRSGCGWPAFYEALPESVEEHEDNSFGMRRIEITCSKCDGHLGHVFNDGPQPTGLRYCINSVSMDFKPDEEDE

SEQ ID NO: 103365 - protein, 177 aa, Unknown
  Bacterial polypetide isolated from the Sargasso Sea
MSEGYDKAYFAGGCFWCMEPPFEDLDGVIEATSGYMGGSVENPTYEEVTTGTTGHAEVVEILYDPEIVTYQELLEVFWRNIDPTALNYQFADVGTQYRTEIFTVGERQKKLAEESKIELGNSGKFDKPIVTAITEAPTFYIAEEYHQDFYKKQSMRYQMYAQASGRKGYLENTWGED

SEQ ID NO: 103366 - protein, 177 aa, Unknown
  Bacterial polypetide isolated from the Sargasso Sea
MSEGYEKAYFAGGCFWCMEPPFEDLDGVIEATSGYMGGSVENPTYEEVTTGTTGHAEVVEILYDPEIVTYQELLEVFWRNIDPTALNYQFADVGTQYRTEIFTVGERQKKLAEESKIELGNSGKFDKPIVTAITEAPTFYIAEEYHQDFYKKQSMRYQMYAQASGRKGYLENTWGDD

SEQ ID NO: 103367 - protein, 217 aa, Unknown
  Bacterial polypetide isolated from the Sargasso Sea
MSLWSRKLEMPTPETALPGRDIKMPVPPIHEVLSEPLTPPFAEPSERIVFGMGCFWGAERVFWQTPGVVTTAVGYSAGLTKNPTYEEVCSGLTGHNEVVLVVYNPELVDFANILTLFWENHDPTQGMRQGNDIGTQYRSGIYVSNEQQRSLAESSKTEFQKALNGAGYGTITTEILLEDEFYYAEHYHQQYLHKVPNGYCGLGGTGVSCPSGITIRD

SEQ ID NO: 103368 - protein, 264 aa, Unknown
  Bacterial polypetide isolated from the Sargasso Sea
DIGVKPNYRSIIQFKNKYNENNFAEVVKVTFNSNAISLEEILKHFFENHDPTQHNRQGNDVGTQYRSTILFENKSQKDLAIRIMDTYQSLLNAAGYGKLKTKLEPLDNFYLAEDYHQDYLKKNPNGYCPDLSTGIVFNQSEKDFYDNTSLLSGKHILILDSQDYCPYCEKLKNDVTDKYKGSIPLTYRSSDQLHGLSIESPTWATPSLILLEDGKEIFSYQGYIESKDFYKILGRFKLGNTEAYDVAFNKGTDSRFCKEYEIFK

SEQ ID NO: 103369 - protein, 287 aa, Unknown
  Bacterial polypetide isolated from the Sargasso Sea
DVVSGYTGGTSKNPKYSNYSKSGHIEAVRIEYQPSLINYMQLLEIFWTNIDPTDKDGQFCDRGHGYTSAVFFITEEQKKLALESKSLIEQSGILKELVKTPVLEAKEFYNAEDYHQDYYKKNKIRYHYYRFRCGRDKRLEELWGEKKEKLKILNQTSSYEIPIKEDLLKKLTPLQYEVTQNDATEPPFRNKYWNNKSEGIYVDIVSGEPLFSSTDKYKSGTGWPSFTKPLEAENVVMKEDRSLFTVRTEVRSKHADSHLGHLFNDGPGPLGLRYCINSASLNFIAQK

SEQ ID NO: 103370 - protein, 306 aa, Unknown
  Bacterial polypetide isolated from the Sargasso Sea
TSLYEQVCTNKFVRTSLYEQVCTNKFVRTSLYEQVCTNKFVRTSLYEQVCTNKFVRTSLYEQVCTNKFVRTSLYEQVCTNKFVRTSLYEQVCTNKFVRTSLYEQVCTNKFVRTSLYEQVCTNKFVRTSLYEQVCTNKFVRTSLYEQVCTNKFVRKSLYEQVCTNKFVRTSLYEQVCTNKFLRTSFYEPVCTNKFVRTSLYEPVCTNQFVRTSLYEPVCTNQFVRTSLYEPVCTNQFVRTSLYKPVCTNQFVQTSLYEPAGRASDLAGWPRGGDGRTYVGKTTPFYRTLSLIGATAQKGRTRLYTRQ

SEQ ID NO: 103371 - protein, 211 aa, Unknown
  Bacterial polypetide isolated from the Sargasso Sea
MKNKFLVSALIFLFAAPIVNANQTNHIQSIYLGSGCFWGAEKGYEALDGVINAESGYANGYGVRPNYRSIIQLKNKYNENNFAEVVKVTFNNNAISLEKILKHFLESHDPTQLNRQGNDIGTQYRSTILFSNEVQKNLAKKLINQYQGLLTAKGYGKIRTKLEALDNFYLAEEYHQDYLKKNPNGYCPDLSTGIVFSQEQKEYIDNSELLL

SEQ ID NO: 103372 - protein, 147 aa, Unknown
  Bacterial polypetide isolated from the Sargasso Sea
KKCTLALGCFWKPEESFKNKLGIIETEVGYAGGENPTVTYKEVCVGDTGHAEVVRLTFDEKIISFKKILDLFFKMHDPTQKDMQFPDVGTQYRSEIFYENDEQKKEAQEVLSKKNKELNGKIQTNISKIKNYCKAEEYHQKYIEKNT

SEQ ID NO: 103373 - protein, 180 aa, Unknown
  Bacterial polypetide isolated from the Sargasso Sea
MIHYIFKIEIDFPEDSKLEQAVFGMGCFWGAEKKFWELDGVKLTAVGYAGGISTNPSYRDVCTGLTGHNEVVKVLYNPEEVSYVDILATFWENHDPTQMNRQGNDIGTQYRSGAYYFSDAQKFKLLETKALYESSLRKSGFGPIVTEIKKAPEFFLAEGYHQQYLAKNPHGYCGLGGTGI

SEQ ID NO: 103374 - protein, 153 aa, Unknown
  Bacterial polypetide isolated from the Sargasso Sea
MEKALFGAGCFWGVEETFCKTPGVINTLVGYSGGDTINPSYESVCQGNTNHTEVVLVEFDNSKISYEDLLMVFWKCHDPTTLNRQGPDIGTQYRSAIYYYNEDQKNKSIYSKNKYAKSAGLNIVTEISEAKEFYKAEEYHQKYIQKTGLHCAI

SEQ ID NO: 103375 - protein, 113 aa, Unknown
  Bacterial polypetide isolated from the Sargasso Sea
MSQYFKDPMRIDQLNEIEHWVTQENGTERPGTGKYLNNKKVGIYVDIVSGEPLFSSDDKYESGCGWPSFTKPLVSSHIAELQDSSHGMLRTEVRSKFADSHLGHVFPDGPPER

SEQ ID NO: 103376 - protein, 104 aa, Unknown
  Bacterial polypetide isolated from the Sargasso Sea
MASKEANLGAGCFWCVEAVFESLEGVESVVSGYMGGQTPNPTYEAICTGTTGHAEVVQITYDPNVISYETILKRFWVAHDPTTLNRQGADVGTQYRSAIFTHSE

SEQ ID NO: 103377 - protein, 131 aa, Unknown
  Bacterial polypetide isolated from the Sargasso Sea
MSKITKTEEEWKSFLTEDEYYVTRQKGTEPPFSGKNFEIVNGGIFKCKCCDNELFNSSTKYESGCGWPSFFEQLSPEAIKTEEDKSHGMARIEIMCAKCDAHLGHLFDDGPKPTGKRYCVNSLSINYKECE

SEQ ID NO: 103378 - protein, 152 aa, Unknown
  Bacterial polypetide isolated from the Sargasso Sea
MDTPFWCSATPEERQEAINNLTEEQRIVALENGTERPFFNEYWNSKDVGIYVDVISGEPLFSSLDKFDSGTGWPSFDKPIKGIEIVEVVDKSHGMVRTEVRSQYGDAHLGHLFDDGPTETGLRYCINSASLRFVPLEKLSEEGYEDFLELFN

SEQ ID NO: 103379 - protein, 126 aa, Unknown
  Bacterial polypetide isolated from the Sargasso Sea
IVALENGTERPFFNEYWNSKDVGIYVDVISGEPLFSSLDKFDSGTGWPSFDKPINGIEIVEVVDKSHGMVRTEVRSQYGDAHLGHLFDDGPTETGLRYCINSASLRFVPLEKLSEEGYEDFVELFN

SEQ ID NO: 103380 - protein, 181 aa, Unknown
  Bacterial polypetide isolated from the Sargasso Sea
MSFLKHNSFKEVPKDCEYITFGMGCFWGAEKRFWDVKGLKTTIVGYAGGQTNNPTYEKVCSGQTGHAEVVRVILDKKIFSWDELFQVFWESHDPTQMNRQGNDIGTQYRSAIFVKNERELQMAINSKEKFQEILNVHNLGLIQTEVKIIKTFFYAEEYHQKYLYKNPNEYCGLKGLAVSYN

SEQ ID NO: 103381 - protein, 210 aa, Unknown
  Bacterial polypetide isolated from the Sargasso Sea
MFNFLKEIEIIQPHEALKGRASSITGSEKSFINGRPLNGPWPDNYDFAIFGMGCFWGAERLFWDIDGVYVTSVGYAGGFTPNPTYEEVCSGQTGHAEVVQIVFSQNDCSYKSLLKVFFESHDPTQGMRQGNDRGTQYRSAIIYKDENQYKTALGLKDSYNTNLTSKGFNCITTEMKSFDHYYLAESYHQQYLSKNPNGYCGIQGTGIKCL

SEQ ID NO: 103382 - protein, 149 aa, Unknown
  Bacterial polypetide isolated from the Sargasso Sea
MVLCYWKINIKKLSPFHQVKSPLKVSIIVDMQHFLSGLDLQSDCPQGCESIVFGAGCFWGVEKKFWSLDGVWLTSVGYSGGTLENPSYQEVCSGTTDHVEVVKVIFEPDIMPVLELLKVFWECHDPTQGMRQGNDVGSQYRSVIFVSSK

SEQ ID NO: 103383 - protein, 123 aa, Unknown
  Bacterial polypetide isolated from the Sargasso Sea
WRSELTPEQYQIARQAGTEPPFTGKYHDSKGSGTFYCVCCGAALFESGTKYDSGTGWPSFWQPVDPTAVETRVDRAYGMVRNEVVCAKCDAHLGHVFPDGPQPTGLRYCINSASLDLKSEGEE

SEQ ID NO: 103384 - protein, 172 aa, Unknown
  Bacterial polypetide isolated from the Sargasso Sea
MLSSLIVGAGCFWGVEVLYEQMPGVINATSGYSGGHLDNPRYEDVLTGETGHVEVVKIDYDKSEVTFNELIDTFFIIHDPTTLNRQGPDIGEQYKSILFYNSEDEKEIIESKIEKIDLSGKFENPIVTEIRETAEFYPAEDYHQDYAMKTGKLCYQQLYVMYNYSPIPAATP

SEQ ID NO: 103385 - protein, 115 aa, Unknown
  Bacterial polypetide isolated from the Sargasso Sea
MSKDLKSDSEWKNILDDESYRVTRQSGTERPFTGKYWNFNKDGVYKCICCGESLFESDTKFDAGCGWPSFFVPLRKDVINEFQDHSFGMLRTEVKCAKCDAHLGHVFNDGPEPTG

SEQ ID NO: 103386 - protein, 105 aa, Unknown
  Bacterial polypetide isolated from the Sargasso Sea
EPAFSGKAFDISKDGVFKCRCCGAKLFDRTSKYDSGCGWPSFFKEISNDAIKTEQDTSHGMIRTEIMCSTCDAHLGHVFDDGPEPTGLRYCVNSLSIQYKEFDKN

SEQ ID NO: 103387 - protein, 66 aa, Unknown
  Bacterial polypetide isolated from the Sargasso Sea
MEQLVLGGGCFWCTEGGLLGLKGVHEVVPGYSGGHVDNPTYEQVCGKKTGHAEVVRVTFDPEVIPR

SEQ ID NO: 103388 - protein, 119 aa, Unknown
  Bacterial polypetide isolated from the Sargasso Sea
MKKSEQEWRQQLNDEQYRVTRQKGTEYPFSGTLLHNKDTGSYHCVCCQQPLFDSADKFDSGCGWPSFSKAIKGQVKYEKDTSHGMTRIEILCQHCDAHLGHVFDDGPAPTGQRYCVNSV

SEQ ID NO: 103389 - protein, 147 aa, Unknown
  Bacterial polypetide isolated from the Sargasso Sea
MKCTLALGCFWKPEENFKNKPGIIDTEVGYAGGKKAQVTYKEVCTGKTGHAEVVRLTFDEKIITFKEILDLFFKMHDPTQKDMQYPDIGTQYRSEIFYENETQKKDAEEIVKNQNIKFEGKIETNISKIKNYCKAEDYHQKYIEKNS

SEQ ID NO: 103390 - protein, 140 aa, Unknown
  Bacterial polypetide isolated from the Sargasso Sea
MEEKKSKLTDMQYYVTQDCGTEPAFDNEYWDHKEPGIYVDIVSGEALFASVHKYDSNSGWPSFYQPIEDQNVKFEQDYQLILPRTEVKSKQGDSHLGHVFNDGPNPTGLRYCINSAALKFIPLKEMEEKGYKKYLYLFET

SEQ ID NO: 103391 - protein, 151 aa, Unknown
  Bacterial polypetide isolated from the Sargasso Sea
MKYSIAILAAGCFWGVQDYFSKINGVKSTKVGYSGGNTDNPSYEQVCSGSTGHAECILINFDEKIINYEEILSYFWKCHDPTQLNRQGADIGTQYRSAIFYCDENQEKIAINSMKNIKQSISNIVTELSEAKTFYDAEEYHQNYITKCKVF

SEQ ID NO: 103392 - protein, 155 aa, Unknown
  Bacterial polypetide isolated from the Sargasso Sea
AERLFWTLKGVYSTAVGYAGGITVNPTYDDVCSGRTGHTEVVLTFFDPSVVSYEDLLKVFWESHNPTEGMRQGNDVGTQYRSAIYCESDEQLLTAKMSQEVFQRELDTKKFPSITTEINMLNHFYYAETYHQQYLGKNPNGYCGLVGTGCTYEQF

SEQ ID NO: 103393 - protein, 177 aa, Unknown
  Bacterial polypetide isolated from the Sargasso Sea
MIFNKPILSNYDKHLIVFGMGCFWGVEKLFWGIDGVNMTAVGYSAGKTDFPDYKKVCSGFTDHNEVVLINFNPDIISLTDLLKIFWESHDPTQGMRQGNDIGTQYRSGIYAFSDQDLDLATQSKIIYEERLKKAKYGEITTEIKKASKFYFAEEYHQQYLAKNPNGYCSLKGTGIKM

SEQ ID NO: 103394 - protein, 113 aa, Unknown
  Bacterial polypetide isolated from the Sargasso Sea
MIHFVNKRSLFDSYPSNSKEIILGAGCFWGVERIFWQLEGVWVTYASYSGGKRPNPTYEQVCTGVTGHAETINVIYDDKIITTKDILKIFWECHDPTQGMRQGNDIGEQYRSA

SEQ ID NO: 103395 - protein, 133 aa, Unknown
  Bacterial polypetide isolated from the Sargasso Sea
HMSNKSKEELQNELSPESYYVTQESGTERPFTGQYWNHVEDGVYTCICCGETLFKSETKFDAGCGWPSFYEAANNNKINELEDYSLSRVRTEIRCSRCDAHLGHVFTDGPQPTGLRYCVNSAALHFKKETTSN

SEQ ID NO: 103396 - protein, 126 aa, Unknown
  Bacterial polypetide isolated from the Sargasso Sea
YREVCTGMTGHNEVVLVVYDPAKLSYENLLTTFWEDHDPTQGMQQGNDVGTQYRSGIYFLNGSEEEIILKTKSQYQSQLDNNGLGQITTEVRNAGPFYYAEHYHQQYLAKNPDGYCALAGTGVKIK

SEQ ID NO: 103397 - protein, 118 aa, Unknown
  Bacterial polypetide isolated from the Sargasso Sea
MTPEQFHILREHGTERPFTGPYWDSFETGTYYCAGCETPLFRSDTKFDAGCGWPSFFEPVKQDAVIELRDSSLGMVRTEIRCATCGGHLGHVFPDGPKPTGLRYCMNGHAMHFVPDEK

SEQ ID NO: 103398 - protein, 115 aa, Unknown
  Bacterial polypetide isolated from the Sargasso Sea
MTKIIKTDEEWKSLLTEDEFYITRQKGTEPAFSGKNFQIVNGGTFKCKCCDNKLFNSSTKYDSGCGWPSFFEQLSPEAIKTEVDKSHGMVRIEIMCSKCDAHLGHVFDDGPKPTG

SEQ ID NO: 103399 - protein, 177 aa, Unknown
  Bacterial polypetide isolated from the Sargasso Sea
MSQNTEKAYFAGGCFWCMEPPFEVLDGVLEATSGYMGGEIENPTYEQVSVGNTGHAEVVEIEYDPNIITYSELLEVFWRNIDPTALNYQFADVGSQYRTEIFTVGPEQMEEALRSKDELEKSNKFDKPIVTAITEAPVFYIAEEYHQDFYKKQSARYKIYAEASGRKGFLEDTWGDE

SEQ ID NO: 103400 - protein, 169 aa, Unknown
  Bacterial polypetide isolated from the Sargasso Sea
MSLTDLLNKKTLLPSETEALIGRDEEIEVPKEHFIKGTPLKKPFPEGLEEAIFAMGCFWGVEKKFWETEGVYTTAAGYIGGITKNPTYKEVCTGFTGHTEAVLVVFDPLKVTYADLLKIFWEEHDPTQGMRQGNDVGTQYRSGIYHLNMEQEALAKETREIYQKKLDEN

SEQ ID NO: 103401 - protein, 68 aa, Unknown
  Bacterial polypetide isolated from the Sargasso Sea
RSDQNTSASRFCRAYGDKLIEAGFGPVTTEITDRFPDFYYAEDYHQQYLAKNPNGYCGLGGTGVSCNL

SEQ ID NO: 103402 - protein, 213 aa, Unknown
  Bacterial polypetide isolated from the Sargasso Sea
MSLMDLLNKKSLLPLESEALKGREEEIEVPPEHFIKGTPLKAPFPEGLEQAIFGMGCFWGVERRFWELEGVYTTAVGYSGGYTKNPTYREVCTGMTGHNEVVLVVYDPAKLTYENLLTTFWEDHDPTQGMQQGNDVGTQYRSGIYFLNNSEEEVILQTKSQYQSQLDSNGLGEITTEVTNAGPFYYAEHYHQQYLAKNPDGYCALAGTGVKIK

SEQ ID NO: 103403 - protein, 130 aa, Unknown
  Bacterial polypetide isolated from the Sargasso Sea
MTNILKSDEEWKKLLDDESFRVTRKSGTERPFSGKYWDFNKDGIYKCICCGEPLFQSDTKFDAGCGWPSFFIPLSKDSINEFSDNSFGMTRTEVKCSKCDAHLGHVFNDGPKPTGLRYCINSASLDFEQN

SEQ ID NO: 103404 - protein, 184 aa, Unknown
  Bacterial polypetide isolated from the Sargasso Sea
MKHFVYGNEISTNTLKETKSIIFGGGCFWGLEKKFWELNGVVLTSVGYSGGKTENPSYEEVCSGFTDHVEVVKVDYKPNDIELKDLLRVFWEAHDPTQGMRQGNDIGSQYRSVVFIEDEADRDVVELSLNLFQEELYNNNFGTITTEISITEKYFLAEEYHQQYLAKNPNGYCGLGGTGCKLKI

SEQ ID NO: 103405 - protein, 131 aa, Unknown
  Bacterial polypetide isolated from the Sargasso Sea
MTKIVKSDQEWREILSEEEYYITRQKGTEPAFSGKAFDISKEGVFKCRCCGAELFESSSKYESGCGWPSFFKGISNDAIKTEQDTSHGMIRTEIMCATCDAHLGHVFDDGPEPTGQRYCVNSLSIKYKEFE

SEQ ID NO: 103406 - protein, 172 aa, Unknown
  Bacterial polypetide isolated from the Sargasso Sea
MSINLIKSIFIIGIIVSFIFDANFSQQKINFSGVSDSNSKEEKKMKKTESEWKRRLTPEEYYILREKGTERAFTGKYDKHFEQGVYTCAGCGTDLFESGTKYDSGCGWPAFYEAMPGTVEETQDNSYGMRRIEITCSKCDGHLGHVFNDGPKPTGLRYCINSASMDFNPEKK

SEQ ID NO: 103407 - protein, 120 aa, Unknown
  Bacterial polypetide isolated from the Sargasso Sea
MKKITKTDEEWKNLLSKEEYYITRQKGTEPPFSGKNFEIINGGIFKCKCCDNELFNSATKYDSGCGWPSFFEQLSPDSIKTEVDNSLGMTRIEIMCAKCDAHLGHVFDDGPHPSGKRYCV

SEQ ID NO: 103408 - protein, 144 aa, Unknown
  Bacterial polypetide isolated from the Sargasso Sea
MTPEQFEIARRKGTERAFSGTYWNTKTPGTYRCICCGEPLFRSGEKFESGCGWPSFYAPIDAKKEDTKGNVVAEHEDRSLAGIAGFGIRTEVTCRRCGAHLGHVFNDGPPPTGLRYCINSASIILDPKVQSNGSKDEEDASKSR

SEQ ID NO: 103409 - protein, 201 aa, Unknown
  Bacterial polypetide isolated from the Sargasso Sea
MPSAADALPGRASPMPVTEPHFVNGHSLTSPYPDGMSKIIFGLGCFWGAERIFWQLKGVHVTAAGYAAGFTPNPTYEEVCSGMTGHNEVVLVVYDQKLVSYADLLRAFWEGHDPTQGMRQGNDVGTQYRSGIYCYSRGDLLEAEASSKGYAQKLEAAGHNAITTEILDAPEFYFAETYHQQYLGRNPGGYCGLGGTGVRCG

SEQ ID NO: 103410 - protein, 173 aa, Unknown
  Bacterial polypetide isolated from the Sargasso Sea
REDRRSNRPTTKVCSGRTGHTEVVRVVWSRPAVDFSDLLKLFWECHDPTQGNRQGNDTGTQYRSAIYTFNQEHLQQALASRDVYQAALSEKGYGAITTEILADQTFYFAEDYHQQYLAKPGSRPYCSAMPTQTPLDNFEGSNYKLPKQVWAKYDWSISHCVLRSDNAPIQLNA

SEQ ID NO: 103411 - protein, 147 aa, Unknown
  Bacterial polypetide isolated from the Sargasso Sea
MSKYFKDPMRIDQLNEIEHWVTQENGTERPGTGKYLNNKKLGIYVDIVSGEPLFSSNDKYESGCGWPSFTKPLVSSHVAELQDSSHGMLRTEVRSKFADSHLGHVFPDGPPERGGLRYCINSASLRFIPLDEMDAEGYGDFISQMGE

SEQ ID NO: 103412 - protein, 131 aa, Unknown
  Bacterial polypetide isolated from the Sargasso Sea
MSNHTKTDNDWKKLLSDESFRVTRQSGTERPFTGKYWNFNEDGIYKCICCGESLFESDTKFDAGCGWPSFFIPVDSDCINEFEDNSFGMTRTEVKCSKCDAHLGHVFNDGPQPTGLRYCINSASLDFEQNQ

SEQ ID NO: 103413 - protein, 140 aa, Unknown
  Bacterial polypetide isolated from the Sargasso Sea
MCCNAFCGALSRLEERIMGAESMVPKDRALPGREQKMRVSPTHHVLGSPMEGPWPAGHKVFVFANGCFWGSEKGIWRLPGGGILTTAVGYAAGYTPNPTYEEACSGLTGHTEAVQVVFDPAKISLVDILRWFWEAHDPTQ

SEQ ID NO: 103414 - protein, 185 aa, Unknown
  Bacterial polypetide isolated from the Sargasso Sea
MNYFLSNLDLHSETPQDYESIIFGAGCFWGVEKKFWQLDGVWLTSVGYSGGELEDPSYEIVCSGTTNHVEVVKVVFNPEVISLADLLKVFWECHDPTQGMRQGNDIGSQYRSVIFLNSELHKDESLSSLETYQDELELNGYGPITTEISMMKNYFLAEEYHQQYLAKNPNGYCGLGGTGCSFPNN

SEQ ID NO: 103415 - protein, 173 aa, Unknown
  Bacterial polypetide isolated from the Sargasso Sea
MTPRKPFIIQLPEKESTLPGREDPIMMPEIHYVLGTSIGPPFPEDAEQAVFGLGCFWGAERAFWKLNGVISTAVGYAGGFTPNPTYQEVCSGMTGHNEVVLVIFDPLTVSYPELLKVFWESHDPTQGMRQGNDVGTQYRSGIYWNDENQLSEASDSQKRYQTELTGAGLGEIT

SEQ ID NO: 103416 - protein, 150 aa, Unknown
  Bacterial polypetide isolated from the Sargasso Sea
MANLQVATLAGGCFWCIESAYNTVEGVEKAISGYAGGEEPSPSYQSVCGGSTGHAEVVQVTFDADTIGYREILEIFFALHDPTQLNRQGNDVGTQYRSAIFYHNEAQKEEAEKIIAEITAEEIWPNPVVTEIVEVNNYHPAEDYHQDYFQ

SEQ ID NO: 103417 - protein, 131 aa, Unknown
  Bacterial polypetide isolated from the Sargasso Sea
MKKIIKTDEEWKNLLTEKEYYITRQKGTEPPFSGKNFEIINGGIFKCKCCENELFNSSTKYESGCGWPSFFEQLSPDSIKTEVDNSLGMTRIEIMCAKCDAHLGHVFDDGPKPSGKRYCVNSLSINYEEFE

SEQ ID NO: 103418 - protein, 141 aa, Unknown
  Bacterial polypetide isolated from the Sargasso Sea
YANGYGIKPNYRSIIQFKNKYKENNFAEVVKVTFNSNAIKLHEILKHFFETHDPTQLNRQGNDIGTQYRSTILFLDENQKKVALEITKQYQKLLYAGGYGKVKTKIEPLDNFYLAEDYHQDYLKKNPNGYCPDLSTGIVFS

SEQ ID NO: 103419 - protein, 119 aa, Unknown
  Bacterial polypetide isolated from the Sargasso Sea
GHTETVRVFYKPSLVDYNVLLKIFWESHNPTQGMRQGNDIGTQYRSAIFTHSSEQKKLADDSLKVFNLQLKENGFSDITTDITQGYDFFYAEDYHQQYLSKNPNGYCGLGGTGVSYPLD

SEQ ID NO: 103420 - protein, 172 aa, Unknown
  Bacterial polypetide isolated from the Sargasso Sea
MEELDSAILGGGCFWCLEAVYIRLEGVKSVISGYSGGNVKNPTYEQVCTGETSHAEVVKINYDLNKTSFEILLEWFWRCHDPTTLNRQGGDTGTQYRSVIYYENESQKSIAQKSKKDAESSGIFENPIVTEINKLDVFYPAEDYHHDYYKKNPYAGYCSYIIRPKLEKLKLE

SEQ ID NO: 103421 - protein, 115 aa, Unknown
  Bacterial polypetide isolated from the Sargasso Sea
GNSRQTTYEEVCTGRTGHAEVVRLTFDENIVTFKKILDLFFKMHDPTQKDMQFPDVGTQYRSEIFYENEKQKQDALEVLKEFNEKLDGKIQTNISKIKNYNKAEEYHQKYIEKNR

SEQ ID NO: 103422 - protein, 93 aa, Unknown
  Bacterial polypetide isolated from the Sargasso Sea
DPAQGMRQGNDQGTQYRSAIYPLTPEQTAAAQASLERFQAAMTAAGDERTITTEITTATPFYYAEDDHQQYLHKNPYGYCGIGGIGVCLPPER

SEQ ID NO: 103423 - protein, 120 aa, Unknown
  Bacterial polypetide isolated from the Sargasso Sea
TFDADNISYRELLEIFFALHNPTQLNRQGNDVGTQYRSAVFYHDEVQKAEAEKIIAEITEEAIWPDPVVTEVVEINNYYSAEDYHQSYFKNNPQNQYCSMVVAPKLAKFKKTFASRLRTE

SEQ ID NO: 103424 - protein, 121 aa, Unknown
  Bacterial polypetide isolated from the Sargasso Sea
MLNKKDLIYQVTREGGTEPPFSGKHVNNKKIGNYTCINCDAIIFSSEHKFDSGTGWPSFYDLLDNKAVDEIEDNSFGMKRIEVKCSSCNSHLGHVFPDGPPPTGLRYCINSVALNFKEEKK

SEQ ID NO: 103425 - protein, 129 aa, Unknown
  Bacterial polypetide isolated from the Sargasso Sea
NEMQYYVTQENGTEPAFRNAYWNHKEPGIYVDVISGEALFSSKDKFDSGTGWPSFTKPLVNLIKKSDRSYGMKRTEVRSPNANSHLGHVFNDGPTGKRYCINSASLRFIHKDDLQKEGYANYVYLFELK

SEQ ID NO: 103426 - protein, 108 aa, Unknown
  Bacterial polypetide isolated from the Sargasso Sea
FEQILNVFWQAHDPTTLNRQGNDVGTQYRSVIFYHNDKQKSLAIESIKKANDSGYWPNKIVTEVTELFNYSDAEDYHNDYYDNNPNQPYCLFVIKPKLDKLEKKGIIK

SEQ ID NO: 103427 - protein, 243 aa, Unknown
  Bacterial polypetide isolated from the Sargasso Sea
DRGNEYSSAIFYLTEEQQKLAAAFKTMIEQSEILSEPVKTPILKAREFYDAEDYHQDYYKKNKLRYHYYRFRCGRDKRLLELWGDRKDKLEKINQTSGFKIPTREELVTKLTPLQFNVTQNDATETPFSNKYWNNKSEGIYVDIVSGEPLFSSTDKYKSGTGWPSFTKPLELENIVMKEDRSLFTVRTEVRSKHADSHLGHLFNDGPGPLGLRYCINSAALKFIAKNDLEQEGYQIYQSLFNN

SEQ ID NO: 103428 - protein, 91 aa, Unknown
  Bacterial polypetide isolated from the Sargasso Sea
CHDPTQGMRQGNDIGTQYRSVIFCTNEVDIKQACSSKEKFQSILSKNQFGDITTEISLLKNYYLAEEYHQQYLAKNPNGYCGLGGTGCTLD

SEQ ID NO: 103429 - protein, 134 aa, Unknown
  Bacterial polypetide isolated from the Sargasso Sea
GGYTKNPTYREVCTGMTGHNEVVLVVYDPAKLSYENLLTTFWEDHDPTQGMQQGNDVGTQYRSGIYFLNSSEEEIIIKTKSQYQSQLDNNGLGQITTEVRNAGPFYYAEHYHQQYLAKNPDGYCSLAGTGVKIK

SEQ ID NO: 103430 - protein, 167 aa, Unknown
  Bacterial polypetide isolated from the Sargasso Sea
GGGCFWCVEAVYQRVDGIISVKPGYAGGHIDKPTYKQICTGTTGHAEVARIEFDPTVVNYEQILNVFWQAHDPTTLNRQGNDVGTQYRSVIFYHNDDQKTRAERSKIGADGSGYWPNSIVTEITLINNYSDAEDYHHNYYNDNPNQPYCLFVIKPKLDKLEKSGVIE

SEQ ID NO: 103431 - protein, 245 aa, Unknown
  Bacterial polypetide isolated from the Sargasso Sea
MLLLKVRVINMNQKVKILNYLILVLLITPYVGASKTSHVETIYLGSGCFWGAEKGYELMDGVINAESGYANGYGIKPNYRSIIQFKNKYNEKNFAEVVKVTFNSNAISLENILKHFFETHDPTQHNRQGNDIGTQYRSTILFQNESQKELAEKIIAEYQALLIEGGYGKIRTKLEPLDNFYLAEEYHQDYLKKNPNGYCPDLSTGIVFNDEEKIFEDNEYLLTGKQILVLDSQIIVLTVKNLRMM

SEQ ID NO: 103432 - protein, 175 aa, Unknown
  Bacterial polypetide isolated from the Sargasso Sea
MNSSIYLGGGCFWCIESVFKKVNGITFTSPGYMGGKSDNPTYEEVCEGYTNHVEVVELQYDQTIDLNQILNIFFTVHDPTSINRQGADVGTQYRSAIFCKPEERSSIVNFIQELESQGIFKDKIVTEVNDIQKFFVAENYHHDYFTKNPENAYCQAVINPKLNKLRSSFSELISE

SEQ ID NO: 103433 - protein, 278 aa, Unknown
  Bacterial polypetide isolated from the Sargasso Sea
EKIIFGAGCFWGAEKEYAAIPGVINAVSGYSDGEGVEPTYKAITQPENKNNPDNHAEVVEVTFNSNEISIEKLTQHFFENHDPTQLNRQGNDVGTQYRSIILTTSEMQSDIANQVSDQYQLLLSAVGYGEITTVIKPLDKFYPAEEYHQDYLVKNPNGYCPIHATGVRFDKTEIVTVDNSDLMKGKTIIVIETENHCPYCEKFKEDVANNYQGTIPLTYRLANQLEGLKIKTATWATPTILFLEDGMEVFGHQGYMTSEVFYQALGAFKLGESEAYNV

SEQ ID NO: 103434 - protein, 185 aa, Unknown
  Bacterial polypetide isolated from the Sargasso Sea
MIHFVNKRSLFDSYPSNSQEIILGAGCFWGVERVFWQLEGVWVTYASYSGGKRPNPTYEQVCTGVTGHAETINVIYDDKIITTKDILKIFWECHDPTQGMRQGNDIGEQYRSAIYCINDKQLELANKSKELYEKVLIDRGHTTITTQISINQSSYPAEEYHQQYLAKNPNGYCGVKGTGCALPPL

SEQ ID NO: 103435 - protein, 167 aa, Unknown
  Bacterial polypetide isolated from the Sargasso Sea
MSIFEKDLTIDEPSHLSQIFFGMGCFWGAERKFWQLDGLYTTAVGYAGGHTKDPNYETVCNGDTGHAEVVKVIYDQQIVSLKQLLKIFWESHDPTQLNRQGNDIGSQYRSIILSNNSKEIQPLQDSKKKFQIELDKLSYGSIKTEIVILDKFYLAEDYHQKYLHKNP

SEQ ID NO: 103436 - protein, 218 aa, Unknown
  Bacterial polypetide isolated from the Sargasso Sea
RVLKTDIKKIPNPQEDEIIFGCGCFWGAEKCFWKLPGVITTSVGYAGGEKSNPTYYEVCSGLTGHSEVVRVIWNKSEIDISDLLKMFWECHDPTQKNRQGNDMGTQYRSAIYYKNENNKQIILASKKQYQNELNKNNFGKIETEIKMIDTYFYAEKYHQQYLASPGSRQYCSASPTQVKLKDFTGSNYKLKEHVWENFDWEVDKCVLRSDNNPISNYN

SEQ ID NO: 103437 - protein, 168 aa, Unknown
  Bacterial polypetide isolated from the Sargasso Sea
MSLMDLLNKKSLLPLESEALKGREEEIEVPPEHFVKGTPLKAPFPEGLEQAIFGMGCFWGVERRFWELEGVYTTAVGYSGGYTKNPTYREVCTGMTGHNEVVLVVYDPSVITYENLLVTFWEDHDPTQGMQQGNDVGTQYRSGIYFLNNSEEEVILKTKSQYQSQLDN

SEQ ID NO: 103438 - protein, 236 aa, Unknown
  Bacterial polypetide isolated from the Sargasso Sea
MLPSWLTQSGGESAKEAMHAVLDTPLRAPLMRDQEEALFACGCFWGAEKGFWRLPGVVNTAVGYAGGERVNPTYQEVCSGTTGHTEVVRVVWSTLAVDFSDLLKLFWECHDPTQGNRQGNDTGTQYRSAIYTTTDQQLSLAQASRTSYQKALNHRGFGPITTEILADQAFYFAEPYHQQYLAKPGSRPYCSAMPTQALLGDFNGNNYLLPSTVWAAYDWSINHCVLRSNNAPIRLA

SEQ ID NO: 103439 - protein, 243 aa, Unknown
  Bacterial polypetide isolated from the Sargasso Sea
MKPRLVTFFLLILFANSFVHANKTDHIQTIHLGSGCFWGAEKGYESLDGVIDAVSGYANGYGVSPNYRSIIQLKNKYNENNFAEVVKVTFNSNAISLDEILKHFFETHDPTQLNRQGNDIGTQYRSLILFSSETQRKLAENILNEYQSLLFDAGYGKVVTRIELLDNFFLAENYHQDYLKKNPNGYCPDLSTGVVFNKKEKDVLDNQDLLIGKQILILDSLNYCPYCEKLKLDVTNDYKGTIP

SEQ ID NO: 103440 - protein, 105 aa, Unknown
  Bacterial polypetide isolated from the Sargasso Sea
MNYHKNSEAIALLSPEEYWVTQENGTERPGTGKLLFNKEPGIYVDIVSGEPLFISDDKYESGCGWPSFTKPVEASYVTEISDTSHGMIRTEVRSTHGDSHLRHVF

SEQ ID NO: 103441 - protein, 98 aa, Unknown
  Bacterial polypetide isolated from the Sargasso Sea
GKNFKIINGGIFKCKCCDNELFNSSTKYESGCGWPSFFEQLSPDSIKTEIDNSHGMTRIEIMCAKCDAHLGHVFDDGPQPTGKRYCVNSLSINYEEFE

SEQ ID NO: 103442 - protein, 151 aa, Unknown
  Bacterial polypetide isolated from the Sargasso Sea
MSRDVSLDKARCEQMANQPSPEELKKNLTEMQFYVTQNHGTEPPFTGRLLHNKRDGIYHCLICDKPLFRSETKYDSGCGWPSFYEPVSDEAIHYIKDTSHGMQRIEIRCGNCDAHLGHVFPDGPKPTGERYCVNSASLNFTDSENGEQTKG

SEQ ID NO: 103443 - protein, 149 aa, Unknown
  Bacterial polypetide isolated from the Sargasso Sea
PIQKALIGAGCFWGIEEYYKKLNGVEKTKVGYSGGNSINPTYEEVCFGNTGHAEVVLIDFDHEIIKYSKILEHFWKCHDPTQLNRQGYDIGTQYRSVIFYFDENQKKIALDSFKQIQNKTNKKIVTEISAANEFYLAEEYHQCYLEKRS

SEQ ID NO: 103444 - protein, 169 aa, Unknown
  Bacterial polypetide isolated from the Sargasso Sea
VIDAVSGYANGYGVNPNYRSIIQLKNKYNENNFAEVVKVTFNSNAISLDEILKHFFETHDPTQLNRQGNDIGTQYRSVILFSNETQRKLAQDILNEYQSLLFEAGYGRVVTLIEPLDNFYLAENYHQDYLKKNPNGYCPDLSTGVVFNEKEKDILDNQDLLIGKQILII

SEQ ID NO: 103445 - protein, 157 aa, Unknown
  Bacterial polypetide isolated from the Sargasso Sea
MAQSEVATLGGGCFWCVEAVYQRVDGIISVKPGYAGGHIDKPTYKQICTGTTGHAEVARIEFDPAVVNYEQVLNVFWQAHDPTTLNRQGNDVGTQYRSVIFYHNDDQKTRAERSKIDADESGYWPNSIVTEITLINNYSDAEDYHHNYYNDNPNQPY

SEQ ID NO: 103446 - protein, 140 aa, Unknown
  Bacterial polypetide isolated from the Sargasso Sea
MTDIAIFAAGCFWGIEEKFNSTKGVVETEVGYIGGKTNNPTYEEICRGDTFHAEAVRVFYDTEIITYDQLLDIFFDIHDPTTLNSQGPDFGTQYRSAIFCKNDFEKLSSQNKIKELNRDRFNNKIVTTIELNDDFWIAEE

SEQ ID NO: 103447 - protein, 175 aa, Unknown
  Bacterial polypetide isolated from the Sargasso Sea
VEPVPDHIDKAVFGLGCFWGAERLFWSLPGIYSTAVGYAGGITANPSYEDVCSGQTGHTEVVLVFFDPTQISFKHLLKVFWESHNPTEGMKQGNDVGTQYRSAIYGYSEDQLSEAKSSLGLFQDALSEYKYPAITTEIKYLKAFYYAETYHQQYLGKNPNGYCGIEGTGAQFKIR

SEQ ID NO: 103448 - protein, 119 aa, Unknown
  Bacterial polypetide isolated from the Sargasso Sea
GSILTKESYLVTREGATERPFSGEYWDHFEDGSYKCICCGTELFKSNSKFDAGCGWPSFFESIDPRCINEIPDHSHGMIRTEIKCSKCDAHLGHVFNDGPQPTGLRYCVNSASLDFKDK

SEQ ID NO: 103449 - protein, 181 aa, Unknown
  Bacterial polypetide isolated from the Sargasso Sea
MSLTDLLNKKTLLPSESEALVGRDEEIEIPEEHFLNGTPLKKPFPEGLEEAVFAMGCFWGVEKKFWETEGVYTTAVGYVGGVTKNPTYKEVCTGFTGHTEAVLVVFDPQKVTYVDLLKIFWEEHDPTQGMRQGNDVGTQYRSGIYYLNTEQEALAKETKEIYQKKLDENGLNRITTELAQK

SEQ ID NO: 103450 - protein, 132 aa, Unknown
  Bacterial polypetide isolated from the Sargasso Sea
SGQTGHNEVVLVVYDPAQVSYETLLGAFWENHDPTQGMRQGNDIGTQYRSGIYCYGDAQETGARVSLETYQPALRSAGYGEITTEILPAPTFYFAEDYHQQYLHKNPAGYCGMGGTGVVCPLGTGVGAQAGH

SEQ ID NO: 103451 - protein, 140 aa, Unknown
  Bacterial polypetide isolated from the Sargasso Sea
MFGAGCFWGVEYNFSKVKGVKDVVSGYSGGKTQNPTYEQVCSNSTDHAEVVLIDYDANVVSYDTLLNVFWEKHDPTTLNRQGADVGTQYRSAIFYFTEVQKEIARKSLEYRQNKLGNRKIVTEITEAKEFWKAEEYHQKY

SEQ ID NO: 103452 - protein, 74 aa, Unknown
  Bacterial polypetide isolated from the Sargasso Sea
MKNKIKKTDEEWKNLLTNDEYFVTRQKGTEPPFSGKNFTIIRGGIFKCKCCNNELFNSSTKYESGCGWPSFFEQ

SEQ ID NO: 103453 - protein, 153 aa, Unknown
  Bacterial polypetide isolated from the Sargasso Sea
MKKALFGAGCFWGVEETFCKTPGVINTLVGYSGGNTINPSYESVCQGNTNHTEVVLVEFDNSKISYEDLLMVFWKCHDPTTLNRQGPDIGTQYRSAIYYYNEDQKNKSINSKNEYAKSSGLNIVTEISEAKEFYKAEEYHQKYIQKTGLHCAI

SEQ ID NO: 103454 - protein, 138 aa, Unknown
  Bacterial polypetide isolated from the Sargasso Sea
EKKSKLTDMQYYVTQDCGTEPAFDNEYWDHKEPGIYVDIISGEALFASVHKYDSNSGWPSFYQPIEDQNLKFEQDYQLILPRTEVKSKQGDSHLGHVFNDGPNPTGLRYCINSAALKFIPLKEMEEKGYKKYLYLFEN

SEQ ID NO: 103455 - protein, 122 aa, Unknown
  Bacterial polypetide isolated from the Sargasso Sea
MSKLVKNDSEWKKLLNEESYRVTRQSGTERPFTGKYWDFDKQGVYKCICCGEKLFESKTKFDAGCGWPSFFIPINNESINESEDNSFGMNRTEVKCSKCDAHLGHVFNDGPKPTGLRYCIKS

SEQ ID NO: 103456 - protein, 96 aa, Unknown
  Bacterial polypetide isolated from the Sargasso Sea
MFGMGCFWGAEKKFWELEGVKLTAVGYAGGISRNPRYRDVCTGLTGHNEVVKLQFDPTEIRYNQLLALFWENHDPTQLNRQGNDFGTQYRSGAYYF

SEQ ID NO: 103457 - protein, 217 aa, Unknown
  Bacterial polypetide isolated from the Sargasso Sea
MSLWSRKLEMPAPESALPGRAESMAVPEAHEVLATPITPPFAAGSERIVFGMGCFWGAERIFWQAPGVVTTAAGYAGGYTPNPTYEEVCSGLTGHNEVVLVVFDPTETTFDNMLKLFWENHDPTQGMRQGNDIGTQYRSGIYVSSDNQRRQAEDSRVEFQAELQKAGYGAISTEILDEDDFFYAEHYHQQYLHKVPNGYCGLGGTGVTCPSGIAITD

SEQ ID NO: 103458 - protein, 146 aa, Unknown
  Bacterial polypetide isolated from the Sargasso Sea
MNYHKNSEAIALLSPEEYWVTQENGTERPGTGKLLYNKEPGIYVDIVSGEPLFISDDKYESGCGWPSFTKPVEASYVREISDTSHGMIRTEVRSTHGDSHLGHVFPDGPKDRGGLRYCINSASLRFIHLNDMEAEGYGQFVELIGE

SEQ ID NO: 103459 - protein, 185 aa, Unknown
  Bacterial polypetide isolated from the Sargasso Sea
MKHFLSNLDLESETPQNFESIIFGAGCFWGVERKFWELDGVWLTSVGYSGGQLEDPSYEIVCSGTTNHVEVVKVVFNPEVISLADLLKVFWECHDPTQGMRQGNDIGSQYRSVIFLNSDSHKDETSSSLETYQDELELNGYGPITTEISMMQNYFLAEEYHQQYLAKNPNGYCGLGGTGCSFPNN

SEQ ID NO: 103460 - protein, 131 aa, Unknown
  Bacterial polypetide isolated from the Sargasso Sea
MNKIIKSDLEWKKILSEEEYYVTRQKGTEPAFSGKAFDISKDGIFKCRCCGAKLFERTSKYESGCGWPSFFKGISNDAIKTEQDTSYGMIRTEIMCATCDAHLGHVFDDGPEPTGLRYCVNSLSIQYKEFE

SEQ ID NO: 103461 - protein, 180 aa, Unknown
  Bacterial polypetide isolated from the Sargasso Sea
MGSEFATLGGGCFWCLEAVFDLVRGVKGTQSGYTGGHTLEPTYKQVCTGTTGHAEVVQVEFDPDVIGYADLLEIFFGIHDPTTLNRQGGDVGTQYRSAIFTHSDQQAVIASDVLAELGVEGPWHDPIVTVITPLEAFHAAEPDHDAYFERNGGQPYCAAVIAPKVVKFRQRFAHRLMAAE

SEQ ID NO: 103462 - protein, 207 aa, Unknown
  Bacterial polypetide isolated from the Sargasso Sea
MQLPLPTSDQALPGRDIPIQVSDLHFVNGNRIKPPFEDDIEIADFALGCFWGAERKFWEVENIYSTAVGYMGGFTPNASYEEVCSGLTGHTETVRVFYKPSLVDYNVLLKTFWESHNPTQGMRQGNDIGTQYRSAIFTHSSEQKKLADDSLKVFNLQLKENGFSDITTDIAQGNDFFYAEDYHQQYLSKNPNGYCGLGGTGVSYPLD

SEQ ID NO: 103463 - protein, 183 aa, Unknown
  Bacterial polypetide isolated from the Sargasso Sea
MIHYVKNISINENIPGDLEEIVFGAGCFWGVERKFWNLSGVFVTSVGYSGGDTDNPTYEDVCYKDTGHVEVVKIYYDPKVISLNEILKIFWECHDPTQGMRQGNDIGTQYRSVIFCTNEEDIKRANDSKEKFQNVLSKNKYGDITTEISLIKNYFLAEEYHQQYLAKNPNGYCGLGGTGCTLD

SEQ ID NO: 103464 - protein, 210 aa, Unknown
  Bacterial polypetide isolated from the Sargasso Sea
MEQIISPADALPGRREAMVIGQQHAVNGHPTQGPWPEGMAVAWFGMGCFWGVERLFWQQPGVYSTAAGYQGGVTQNPTYKEVCSGLTGHAETVQVVFDPKVISYGDLLKLFWEQHDPAQGMRQGGDIGTQYRSVIFFGDDTQEAIAQQSLAAYQQAMTASGDGRTITTRILPLAPFYYAEDYHQQYLEKNPDGYCGLGGIGVCLPPSLNR

SEQ ID NO: 103465 - protein, 202 aa, Unknown
  Bacterial polypetide isolated from the Sargasso Sea
MPLMAEALPGRDTPVWDGAPHCVLGTPTMGPFPDHLEEVHLGLGCFWGAERLFWQIDGVHSTAVGYAGGISPNPTYEEVCSGRTGHTEVVMVVFDPSVVTLETILKTFWEEHDPTQGYRQGNDIGTQYRSAIYCTTDEQLVAARGVAERYGAALKAAGRDAITTEIGPAGPFYYAEDYHQQYLYKVPNGYCGLKGTGVACAG

SEQ ID NO: 103466 - protein, 143 aa, Unknown
  Bacterial polypetide isolated from the Sargasso Sea
MSHDSDDKIFPYEKDDAELRRRLTPMQYEVTQHAATERAFTGEYTDTEDDGIYKCVVCSTPLFESGAKFHSGCGWPSYFKPLNGEVIDEKVDYSHGMVRVEVRCNHCGAHLGHVFEDGPRDKTGLRYCINSAALNFESRPENE

SEQ ID NO: 103467 - protein, 174 aa, Unknown
  Bacterial polypetide isolated from the Sargasso Sea
MEQLVLGGGCFWCTEGGLLGLKGVHEVVPGYSGGHVDNPTYEQVCEKKTGHAEVVRVTFDPEVIPRMTLLRVFHTLFDPTQLNRQGNDIGPHYRSIVLYADEGQKQDAEAAIEEISQYYDAPVVTEVVPLEKFWLAEDYHHDYFARNGSSNPYCVAVVAPKIAKARARHADLYE

SEQ ID NO: 103468 - protein, 162 aa, Unknown
  Bacterial polypetide isolated from the Sargasso Sea
MANDTENKKAVFAAGCFWGVESTFQQMDGVKSTTVGYIGGKVKNPSYELVCTGITGHAEAVEVEYNPNVVSFEKLLDTFFQLHDPTTLNRQGPDVGTQYRSAAYFSDDEEKKIIESKVNTLNESGKFKSKIVTEIEALSEFYNAEDYHQDYYKKRGIDGCAI

SEQ ID NO: 103469 - protein, 162 aa, Unknown
  Bacterial polypetide isolated from the Sargasso Sea
MRSKMAKAMFGAGCFWGIEETFRKVPGVSDVAVGYSGGATDNPTYEEVCSGATGHAEVVEVDFDEQKVSFESLLGVFWDCHDPTQLNHQGPDVGTQYRTAVFFMDEEQKTTAISSKQSEQTSGKHRSDVVTEISPAKKFWRAEEYHQQYITKNRSRFGRLFG

SEQ ID NO: 103470 - protein, 191 aa, Unknown
  Bacterial polypetide isolated from the Sargasso Sea
MRNDIPRKHKVLGSVIYPPYQKEASEIFLGMGCFWGAEKLFWDVDGIISTSVGYGEGETVEPTYQEVCSGKTNHIELVKLVFQDDQNTLKNILKVFWESHDPTQGNRQGNDMGSQYRSAILTTSDRHLKLVRASLNSYQKRIEPKLITTEVKECESFYYAEDYHQQYLHDNPNGYCMHWNLGVNFELSDLD

SEQ ID NO: 103471 - protein, 183 aa, Unknown
  Bacterial polypetide isolated from the Sargasso Sea
MLHYVKNISINENIPKNLNEIVFGAGCFWGVERKFWDLHGIYVTSVGYSGGNTESPSYEDVCYRNTNHVEVVKVHYDPNEIKLDEILKVFWECHDPTQGMRQGNDIGTQYRSVIFCSNEDDIKQAINSKEKFQNILTENKFGDITTEISLIKNYYFAEEYHQQYLAKNPNGYCGLGGTGCTLD

SEQ ID NO: 103472 - protein, 190 aa, Unknown
  Bacterial polypetide isolated from the Sargasso Sea
MIHFVKNIPINDDVPKNCKEIVFGAGCFWGVERKFWDLPGVFLTSVGYSGGDTENPSYEDVCYRNTNHAEVVKVTYDSNVIDLLELLKIFWECHDPTQGMRQGNDVGTQYRSVIYTNSDDDLKVALESKDTYQKELVENNFKADNLESITTEIEPVKNYYLAEEYHQQYLAKNPNGYCGIGGTGCSFPKE

SEQ ID NO: 103473 - protein, 191 aa, Unknown
  Bacterial polypetide isolated from the Sargasso Sea
MLKIAENHFVNGNKVKPPYPDNHKRLIVGMGCFWGAERMFWQQEGVYSTSVGYSAGKTSDPTYREVCSGTTDHAEVVLVIYDSQLIGLENLLRVFWEGHDPTQFMRQGNDVGSQYRSIIFYDDEPTHEKIKSSRDQYQTELSKGGFGEIVTQIKSPEEFFFAEDYHQQYLAKNPGGYCGLGGTGIKCTPNV

SEQ ID NO: 103474 - protein, 153 aa, Unknown
  Bacterial polypetide isolated from the Sargasso Sea
MEKALFGAGCFWGVEETFCKTPGVINTLVGYSGGDTINPSYESVCQGNTNHTEVVLVEFDNSKISYEDLLMVFWKCHDPTTLNRQGPDIGTQYRSAIYYYNEDQKNKSVHSKNEYAKNAGLKIITEISQAKEFYKAEEYHQKYIQKTGLHCAI

SEQ ID NO: 103475 - protein, 172 aa, Unknown
  Bacterial polypetide isolated from the Sargasso Sea
MDESNKVTFGGGCFWCLEAVFQQVTGVIKVVSGYAGGASPNPSYEAVCSGLTGHAEVVQIKYDSGQTDFRTLLDWFWRCHDPTTLNRQGADVGTQYRSVIFCHDEEQLEHAQTAKQDLESSGIFRDPIVTEISLIPEFYPAEDYHQNYYQENSGAGYCQFVIRPKMQKLGFD

SEQ ID NO: 103476 - protein, 175 aa, Unknown
  Bacterial polypetide isolated from the Sargasso Sea
MIRTIYFGGGCFWCVESIYLKINGVVDVKPGYMGGSTINPTYEEVCEGNTDHVEVAKVMFDETITLSDLLKVFFSIHDPTTLNRQGADVGTQYRSAIFCEISDRAQIIDFIKNIEKSDIFKDNIVTEVNEVVEFYEAEEYHHNYFNNNPNNSYCQIVVSPKIEKFNKGFPSLISK

SEQ ID NO: 103477 - protein, 213 aa, Unknown
  Bacterial polypetide isolated from the Sargasso Sea
MSLMDLLNKKSLLPLESEALKGREEEIEIPTEHFVKGTPLKAPFPEGLEQAIFGMGCFWGVERRFWELEGVYTTAVGYSGGYTKNPTYREVCTGMTGHNEVVLVVYDPAKLTYENLLTTFWEDHDPTQGMQQGNDVGTQYRSGIYFLNNSEEEVILQTKSQYQSQLDSNGLGEITTEVTNAGPFYYAEHYHQQYLAKNPDGYCALAGTGVKIK

SEQ ID NO: 103478 - protein, 131 aa, Unknown
  Bacterial polypetide isolated from the Sargasso Sea
MSNHTKTDNDWKKLLSDESFRVTRQSGTERPFTGKYWNFNEDGIYKCICCGESLFKSDTKFDAGCGWPSFFIPFDSDCINEFEDKSFGMTRTEVKCSKCDAHLGHVFNDGPQPTGLRYCINSASLDFEQNQ

SEQ ID NO: 103479 - protein, 152 aa, Unknown
  Bacterial polypetide isolated from the Sargasso Sea
MDTPFWCSATPEERQEAINNLTEEQRIVALENGTERPFFNEYWNSKDVGIYVDVISGEPLFSSLDKFDSGTGWPSFDKPINGIEIVEVVDKSHGMVRTEVRSQYGDAHLGHLFDDGPTETGLRYCINSASLRFVPLEKLSEEGYEDFVELFN

SEQ ID NO: 103480 - protein, 185 aa, Unknown
  Bacterial polypetide isolated from the Sargasso Sea
MIHFVKNIPIADDHSEEFKEIIFGAGCFWGVEKRFWDIQGVYLTSVGYAGGNTKDPTYEDVCYKNTNHAEVVKIIYDPKSIELNTLLKIFWECHDPTQGMRQGNDVGTQYRSVIYTSNEDDFRYAIESKEIYQSELVKNNFNKITTEIEIAPEYYLAEEYHQQYLAKNPNGYCGIGGTGCSFPNK

SEQ ID NO: 103481 - protein, 186 aa, Unknown
  Bacterial polypetide isolated from the Sargasso Sea
MVNEMLETATLGGGCFWCTEAVFLDVDGVTAVQSGYAGGHTRNPGYRDICEGDTGHAEVVNVTFDPARIGYREILEIFFATHDPTQLNRQGNDVGTQYRSVVFTHSDAQRDTALDVIRELEREQVFGQPIVTQVAPLDDNYWPAEDYHQNYYARNPGQGYCSVVIGPKLAKFRQKFSHRLKSLRGA

SEQ ID NO: 103482 - protein, 131 aa, Unknown
  Bacterial polypetide isolated from the Sargasso Sea
MSKLNRNKEEWKKLLTDESYRVTRESGTERAFTGKYWNFHEDGVYKCICCGESLFDSFSKYDSGCGWPSFFVPANNNIINEFEDNSLGMTRTEVKCSNCDAHLGHVFDDGPQPTGLRYCINSAALDFEKNN

SEQ ID NO: 103483 - protein, 146 aa, Unknown
  Bacterial polypetide isolated from the Sargasso Sea
MNYHKNSEAIALLSPEEYWVTQENGTERPGTGKLLHNKEPGIYVDIVSGEPLFLSVDKYESGCGWPSFTKPVEASYLTEISDTSYGMIRTEVRSTNGDSHLGHVFPDGPKDRGGLRYCINSASLRFIHLNDMEAEGYGKFVELIGE

SEQ ID NO: 103484 - protein, 130 aa, Unknown
  Bacterial polypetide isolated from the Sargasso Sea
MSGNTPNPEQWRRQLSAEQYHVCWEKGTERPYSGALLHNRKSGDYLCVCCKQVLFHSDAKFDSGCGWPSFDRAIEGTVTYTEDGSHGMKRVEITCSQCGSHLGHVFPDGPTETGQRYCVNSLSLDFDPEP

SEQ ID NO: 103485 - protein, 185 aa, Unknown
  Bacterial polypetide isolated from the Sargasso Sea
MIHFVNKRSLFDNYPNNSQEIILGAGCFWGVERVFWQLEGVWVTYACYSGGKRPNPTYEQVCTGVTGHVETVSVIYDEKIIATEDILKIFWECHDPTQGMRQGNDVGEQYKSAIHCSNEHQLELANRSREVYEKVLINRGHTKITTEIRINQSSYPAEEYHQQYLAKNPGGYCGIKGTGCALPPL

SEQ ID NO: 103486 - protein, 185 aa, Unknown
  Bacterial polypetide isolated from the Sargasso Sea
MKHFLSNLDLHSETPQDYELIIFGAGCFWGVEKKFWQLDGVWLTSVGYSGGELEDPSYEIVCSGTTNHVEVVKVVFNPEVISLADLLKVFWECHDPTQGMRQGNDIGSQYRSVIFLNSELHKDESLSSLETYQDELELNGYGPITTEISMMKNYFLAEEYHQQYLAKNPNGYCGLGGTGCSFPNN

SEQ ID NO: 103487 - protein, 429 aa, Unknown
  Bacterial polypetide isolated from the Sargasso Sea
MLLLKVRVINMNQKVKILNYLILVLLITPYLGASKTSHVETIYLGSGCFWGAEKGYELMVGVINAESGYANGYGIKPNYRSIIQYKNKYNEKNFAEVVKVTFNSNAISLENILKHFFETHDPTQHNRQGNDIGTQYRSTILYQNESQKELSERIIAEYQALLIEGGYGKIRTKLEPLDNFYLAEEYHQDYLKKNPNGYCPDLSTGIVFNDEEKIFEDNEYLLTGKQILVLDSQNYCPYCEKFKDDVTNSYKGSIPLSYRTSDQLHGLEIKSPTWATPSLIFLENGKEIFSYQGYINQKDFYQLLGKFKLGNSEAYNVAFNKGTDARFCKEYQIFKNTPDGIFIDKLSGEPLFDTRNRFVSRSGWLSFTKPVDGSVYELPDNSYGMKRTEIRSVSSDIHLGHVFDDGPNGMPRYCINATVLEFKPRNEIS

SEQ ID NO: 103488 - protein, 185 aa, Unknown
  Bacterial polypetide isolated from the Sargasso Sea
MIHHIKNISLEGDLPNNLKEVVLGAGCFWGVEKKFWDLKGVYLTSVGYSGGETDNPTYEDVCYKNTNHAEVVKVIYDPAIINLIDILKVFWECHDPTQGMRQGNDIGTQYRSVIYTSDNNDLNLAKESMEIYQKELEKNNFHKITTEIDVIKNYFLAEEYHQQYLAKNPNGYCGIGGTGCSFPKE

SEQ ID NO: 103489 - protein, 177 aa, Unknown
  Bacterial polypetide isolated from the Sargasso Sea
MSQNTEKAYFAGGCFWCMEPPFEVLDGVLEATSGYMGGETENPTYEQVSMGNTGHAEVVEIEYDPNIITYRELLEVFWRNIDPTALNYQFADVGSQYRTEIFTVGPNQMEEALNSKDELEKSNKFDKPIVTAITEAPVFYIAEEYHQDFYKKQSARYKIYAEASGRKGFLEDTWGDE

SEQ ID NO: 103490 - protein, 213 aa, Unknown
  Bacterial polypetide isolated from the Sargasso Sea
MKLRLVIFFSFILFANSFVYANKTNHIQTIHLGSGCFWGAEKGYESLDGVIDAVSGYANGYGVSPNYRSIIQLKNKYNENNFAEVVKVTFNSNAISLDEILKHFFEIHDPTQLNRQGNDIGTQYRSVILFSNETQRKLAQNILNEYQSLLFEAGYGRVVTLIEPLDNFYLAENYHQDYLKKNPNGYCPDLSTGVVFNEKEKDILDNQDLLIGK

SEQ ID NO: 103491 - protein, 185 aa, Unknown
  Bacterial polypetide isolated from the Sargasso Sea
MKHFLSNLDLHSETPQNFESIVFGAGCFWGVEKKFWQLDGVWLTSVGYSGGELEDPSYEIVCSGTTNHVEVVKVVFNPEVISLADLLKVFWECHDPTQGMRQGNDIGSQYRSVIFLNSEQHKDESLLSLETYQDELELNGYGPITTEISMMKNYFLAEEYHQQYLAKNPNGYCGLGGTGCSFPNN

SEQ ID NO: 103492 - protein, 162 aa, Unknown
  Bacterial polypetide isolated from the Sargasso Sea
MANDAENKKAVFAAGCFWGVESTFQQMDGVKSTTVGYIGGKVKNPSYELVCTGLTGHAEAVEIEYNPNEVSFEKLLDTFFELHDPTTLNRQGPDIGTQYRSAAYFSNDDEKQIIESKINALNESGKFKSRIVTEIEAISDFYNAEDYHQDYYKKRGIDGCAI

SEQ ID NO: 103493 - protein, 190 aa, Unknown
  Bacterial polypetide isolated from the Sargasso Sea
MLKIAENHFVNGNKVKPPYPDYHNRLIVGMGCFWGAERMFWQQEGVYSTSVGYAAGKTIDPTYREVCSGTTDHAEVVLVVYDTDITNLDSLLSIFWEGHDPTQFMRQGNDVGSQYRSIIFYDNDEMYEKIKCSRDQYQKELSNAGYGNIVTEIRATEEFFYAEDYHQQYLAKNPGGYCGLGGTGVKCSPD

SEQ ID NO: 103494 - protein, 131 aa, Unknown
  Bacterial polypetide isolated from the Sargasso Sea
MSKIVKTDDEWRNLLDHESYRVTRQSGTERPYTGKYWDFKGQGNYKCICCGHELFQSDTKFDSGCGWPSFFLPKDENFINEFEDNSFGMKRIEVKCAKCDAHLGHVFNDGPMPTGLRYCINSASLDFEQDT

SEQ ID NO: 103495 - protein, 163 aa, Unknown
  Bacterial polypetide isolated from the Sargasso Sea
MLKKLIFVLMLTISINAQTMEEVMEENKSKLNDMQYYVTQECGTEPAFDNEYWDHKEPGIYVDVVSGEALFASVHKYDSNSGWPSFFKPIEDKNVKFEQDYELILPRTEVKSKQGDSHLGHVFNDGPNPTGLRYCINSAALKFIPFKEMEEKGYKKYLYLFET

SEQ ID NO: 103496 - protein, 175 aa, Unknown
  Bacterial polypetide isolated from the Sargasso Sea
MNSSIYLGGGCFWCIESIFKKVNGITFTSPGYMGGKSDNPTYEEVCEGYTNHVEVVELHYDQTIDLNQILNIFFTVHDPTSINRQGADVGTQYRSAIFCKPEERSSIVNFIQELEGQGIFKDKIVTEVNDIQKFFVAEDYHHDYFTKNPKNAYCRAVINPKLNKLRSSFSELISE

SEQ ID NO: 103497 - protein, 131 aa, Unknown
  Bacterial polypetide isolated from the Sargasso Sea
MAKEDLKNKDWKSILDEDAYQVTRCFATEVPYSGKFLDNKREGTYICICCKKELFSSSTKYNSGCGWPSFFQPIDDVCITEYKDSSHGMIRTEVRCSDCDSHLGHVFDDGPPPTFLRYCINSLSLDFNERK

SEQ ID NO: 103498 - protein, 176 aa, Unknown
  Bacterial polypetide isolated from the Sargasso Sea
MAKSDIATLGGGCFWCVEAVFQRIEGVLSVKPGYAGGDIKNPTYKQICTGNTGHAEVAKIEFDPEKITYSQILNVFWQSHDPTTLNRQGNDVGTQYRSVIFFHGESQREIAEKSKIDANKSGYWDNKIVTEITLLNNYYDAEDYHDNYYNNNPNQPYCLFVIKPKLDKLEKQGLFD

SEQ ID NO: 103499 - protein, 207 aa, Unknown
  Bacterial polypetide isolated from the Sargasso Sea
MQLPLPTSDQALPGRDIPIEVSDLHFVNGNRIKPPFEDDIEIADFALGCFWGAERKFWEVENVYSTAVGYMGGFTPNASYEEVCSGLTGHTETVRVFYNPSLVDYNILLKTFWESHNPTQGMRQGNDIGTQYRSAIFTHSSKQKTLADESLKVFNLQLKENGFSDITTDITQGNDFFYAEDYHQQYLSKNPNGYCGLGGTGISYPQG

SEQ ID NO: 103500 - protein, 184 aa, Unknown
  Bacterial polypetide isolated from the Sargasso Sea
MQHYVKNLPLDQNFSKATNEIVVGAGCFWGVEKKFWDLPGVLMTSVGYSGGETDNPTYEDVCYKNTNHVEVVKITYDKEITSLKEILKIFWECHDPTQGMRQGNDVGTQYRSAIYCSNEDDLIAAEESKKSYQKTLSKNSYPEITTEISLIRNYYFAEEYHQQYLAKNPLGYCGIGGTGCKFEE

SEQ ID NO: 103501 - protein, 131 aa, Unknown
  Bacterial polypetide isolated from the Sargasso Sea
MSKLNRNKEEWKQLLTEESFRVTRESGTERAFTGKYWNFHENGVYKCICCGESLFDSFSKYDSGCGWPSFFVPTNKNIINELEDNSLGMTRTEVKCSNCDAHLGHVFDDGPQPTGLRYCINSAALDFEKNN

SEQ ID NO: 103502 - protein, 127 aa, Unknown
  Bacterial polypetide isolated from the Sargasso Sea
MSEIKKDWEIILTKESYLVTREGATERPFSGEYWDHFEDGSYKCICCGTELFKSNSKFDAGCGWPSFFESIDPRCINEIPDHSHGMIRTEIKCSKCDAHLGHVFDDGPQPTGLRYCVNSASLDFKEK

SEQ ID NO: 103503 - protein, 126 aa, Unknown
  Bacterial polypetide isolated from the Sargasso Sea
MTKKDNSYWSKKLDSFSYKVLREAGTEMPFSGEYNMHFEDGSYKCKGCGNLLFESNSKFDSGCGWPSFDKAVKGSVVYKEDNSLSRIRTEILCSKCDGHLGHVFNDGPTETGMRYCVNSASLNFKK

SEQ ID NO: 103504 - protein, 148 aa, Unknown
  Bacterial polypetide isolated from the Sargasso Sea
MEIATLALGCFWGPEIKFSKLDGVINTEVGYCGGNTEKTSYKEVCYGDTNHAEVVKVEFDNTKISYEEIIRNFFEFHDPTTLNRQGPDVGTQYRSEIFVHDENQNKIANKVLKEINEKFKGKIVTKISKSKNYNKAEDYHQKYLEKSF

SEQ ID NO: 103505 - protein, 131 aa, Unknown
  Bacterial polypetide isolated from the Sargasso Sea
MSKVYKDESEWQKLLDDESYRVTRLAGTERPFSGKYWDFKESGSYKCICCGEHLFDSSSKYDSGCGWPSFFIPSNEESIDEYEDNSFGMQRIEVKCSKCDAHLGHVFNDGPQPTGLRYCINSASLDFEQDK

SEQ ID NO: 103506 - protein, 352 aa, Unknown
  Bacterial polypetide isolated from the Sargasso Sea
NYRSIIQFKNKFNDNNFAEVVKVTFNSNAIEVVDILKHFFETHDPTQLNRQGNDVGTQYRSTILYINEIQKELAEKIMGEYQILLNNGGYGEIKTMLEPLDNFYSAEDYHQDYLKKNPNGYCPDLSTGIVFNDSTKTLLDNEILLTGKQILVLDSQNYCPYCEKLKVDVTDDYKGTIPLSYRTSDQLHGLKINSPTWATPSLIFMENGKEVFSYQGYINHKDFYQLLGKFKLGDSEAYDVAFNKGTDARFCKEYEIFKDTPDGIFVDKLSGESLFDTKDRFVSKSGWLSFTKPVDGSVYELPDNSYGMRRTEIRSVSSDIHLGHVFNDGPNGMPRYCINATVLEFKKRKELS

SEQ ID NO: 103507 - protein, 122 aa, Unknown
  Bacterial polypetide isolated from the Sargasso Sea
MSLKEKLSKMEYHVTQEAGTEPPFSGKYHDEKSEGIYQCVCCDDDLFSSKSKFDSGSGWPSFYDCIKKENIDYKEDSSHMMLRIEVSCKSCGSHLGHVFNDGPEPTGLRYCINSASLIFKKS

SEQ ID NO: 103508 - protein, 182 aa, Unknown
  Bacterial polypetide isolated from the Sargasso Sea
MSQTGEIATLGGGCFWCLEAVYLGVEGVNSVESGYAGGHTQRPTYEQVCDGVTGHAEVVNVDFDPAKISYREILDIFFAIHDPTQLNRQGNDVGTQYRSVIFTHSDAQRETALQAIREIGEQGIYDGQIVTQVLPLDGNYWPAEAYHQNYFAQHPNQGYCSFVVAPKVAKFRQKFAHRIKAS

SEQ ID NO: 103509 - protein, 177 aa, Unknown
  Bacterial polypetide isolated from the Sargasso Sea
MSQNTEKAYFAGGCFWCMEPPFEVLDGVIEATSGYMGGEIENPTYEQVSMGNTGHAEVVEIEYDPNIITYSELLEVFWRNIDPTALNYQFADVGSQYRTEIFTVGPEQMEEALSSKDELEKSNKFDKPIVTAITEAPVFYIAEEYHQDFYKKQSARYKIYAEASGRKGFLEDTWGDE

SEQ ID NO: 103510 - protein, 203 aa, Unknown
  Bacterial polypetide isolated from the Sargasso Sea
SILPLESEALIGREEEVEVPEHHFVKGTPLKGPFPDHLKQAIFGMGCFWGVERRFWELDGVYSTAAGYAGGYTKNPSYKEVCTGFTGHNEVVLVVYDPTIVSYESLLKTFWEDHDPTQGMRQGNDMGTQYRSGIYYSSDEEKEIIAETKQKYQSQLNLNGFGSITTEVKEARIFYYAEHYHQQYLAKNPDGYCALAGTGVKIN

SEQ ID NO: 103511 - protein, 131 aa, Unknown
  Bacterial polypetide isolated from the Sargasso Sea
MSKITKTDEEWKTLLTEDEYYVTRQKGTEPPFSGKNFEIVNGGIFKCRCCNNELFNSSSKYESGCGWPSFFEQLSPEAIKTEVDKSHGMVRIEIMCAKCDAHLGHVFDDGPQPTGKRYCVNSLSINYEEVE

SEQ ID NO: 103512 - protein, 140 aa, Unknown
  Bacterial polypetide isolated from the Sargasso Sea
MEEKKSKLTDMQYYVTQDCGTEPAFDNEYWDHKEPGIYVDIVSGEALFASIHKYDSNSGWPSFYQPIEEKNVKFEQDYELILPRTEVKSKQGDSHLGHVFNDGPNPTGLRYCINSAALKFIPVKEMEEKGYKKYLYLFET

SEQ ID NO: 103513 - protein, 417 aa, Unknown
  Bacterial polypetide isolated from the Sargasso Sea
MKNKFLVSALIFLFAAPIINANQTNHIQTIYLGSGCFWGAEKGYEALDGVINAESGYANGYGVRPNYRTITQLKNKYNENNFAEVVKVTFNNNAISLEKILKHFLENHDPTQLNRQGNDIGTQYRSTILFSNDTQKNLAKKLINQYQDLLTAKGYGKIRTKLEALDNFYLAEEYHQDYLKKNPNGYCPDLSTGIVFSQEQKEYIDNSKLLLGKQILILDSQSFCPYCKKLKEDVTNSYKGSIPLTYRTSDQLHDLQIQSPTWVTPSVIFLENGKEIFAYQGYLEPKQFYQMLGKFKLGDSEVYDVAFKKGTDARFCKEYQIFKNTPDGIFIDKLSGEPLFDTKDRFVSRSGWLSFTKPLDGSVYELPDNSYGMQRTEIRSVSTDIHLGHVFDDGPNGMPRYCINATVLEFKARKDIS

SEQ ID NO: 103514 - protein, 71 aa, Unknown
  Bacterial polypetide isolated from the Sargasso Sea
KNVKFEQDYKLILPRTEVKSKQGDSHLGHVFNDGPNPTGLRYCINSAALKFIPVKEMEEKGYKKYLYLFET

SEQ ID NO: 103515 - protein, 171 aa, Unknown
  Bacterial polypetide isolated from the Sargasso Sea
MFKFLKNIMNNEEVNLTNDSYLLHRILKTDIQKDPDVYEDEIFFGCGCFWGSEKCFWKLPGVITTSVGYAGGEKNNPTYYEVCSGLTGHSEVVRVIWDKREIDVSDLLKMFWECHDPTQKNRQGNDMGTQYRSAIYYKNENNIKTILASKEKYQNELSEKNLGLIETEIKM

SEQ ID NO: 103516 - protein, 141 aa, Unknown
  Bacterial polypetide isolated from the Sargasso Sea
EERQEAINNLTEEQRIVALENGTERPFFNEYWNSKDVGIYVDVISGEPLFSSLDKFDSGTGWPSFDKPIKGIEIVEIIDKSHGMVRTEVRSRYGDAHLGHLFDDGPTETGLRYCINSASLRFVPLEKLSEEGYEDFVELFN

SEQ ID NO: 103517 - protein, 177 aa, Unknown
  Bacterial polypetide isolated from the Sargasso Sea
MSQNTEKAYFAGGCFWCMEPPFEALDGVLEATSGYMGGETENPTYEQVSMGNTGHAEVVEIEYDPNIITYSELLEVFWRNIDPTALNYQFADVGSQYRTEIFTVGPNQMEEALNSKDELEKSNKFDKPIVTAITEAPVFYIAEEYHQDFYKKQSARYKIYAEASGRKGFLEDTWGDE

SEQ ID NO: 103518 - protein, 92 aa, Unknown
  Bacterial polypetide isolated from the Sargasso Sea
HNPTQGMRQGNDIGTQYRSAIFTHSSEQKKLADESMKIFSSQLKEHGFSDITTEISEANEFFYAEDYHQQYLAKNPNGYCGLGGTGISCSLD

SEQ ID NO: 103519 - protein, 101 aa, Unknown
  Bacterial polypetide isolated from the Sargasso Sea
RPFTGKYWDFNEDGVYKCICCGENLFESFSKYDAGCGWPSFFIPSNNNSINEFKDNSLGMVRTEVKCSSCDAHLGHVFNDGPQPTGLRYCINSAALDFDKN

SEQ ID NO: 103520 - protein, 96 aa, Unknown
  Bacterial polypetide isolated from the Sargasso Sea
EVVKVEFDNTKISYEEIIRNFFEFHDPTTLNRQGPDVGTQYRSEIFVHDENQNKIANKVLKEINEKFKGKIVTKISKSKNYNKAEDYHQKYLEKSF

SEQ ID NO: 103521 - protein, 190 aa, Unknown
  Bacterial polypetide isolated from the Sargasso Sea
MLKIAENHFVNGNKVKPPYPDNHNRLIVGMGCFWGAERMFWKQEGVYSTSVGYSAGKTKDPTYKEVCSGTTDHAEVVLVVYDNQLINLDSLLAIFWEGHDPTQFMRQGNDIGSQYRSIIFYDDDETSQKIKSSRDQYQKKLSDAGYGNIVTEIKATEDFFYAEDYHQQYLAKNPGGYCGLGGTGIKCTPG

SEQ ID NO: 103522 - protein, 419 aa, Unknown
  Bacterial polypetide isolated from the Sargasso Sea
MNQKAKILNYLILILLTIPYLDASKTSHVETIYLGSGCFWGAEKGYELMDGVINAESGYANGYGIKPNYRSIIQFKNKYNEKNFAEVVKVTFNSNAISLENILKHFFETHDPTQHNRQGNDIGTQYRSTILFQNESQKELAEKIIAEYQALLFEGGYGKIRTKLEPLDNFYLAEEYHQDYLKKNPNGYCPDLSTGIVFNDIEKIFEDNEYLLSGKQILVLDSQNYCPYCEKFKDDVTSSYKGSIPLSYRTSDQLHGLEIKSPTWATPSLIFLENGKEIFSYQGYINQKDFYQLLGKFKLGNSEAYNVAFNKGTDARFCKEYQIFKNTPDGIFIDKLSGEPLFDTRNRFVSRSGWLSFTKPIDGSVYELPDNSYGMKRTEIRSVSSDIHLGHVFDDGPNGMPRYCINATVLEFKPRKEIS

SEQ ID NO: 103523 - protein, 418 aa, Unknown
  Bacterial polypetide isolated from the Sargasso Sea
MKKTNKFLIYFLITFVINVSSNQTNHIQTIYLGSGCFWGAEKGYEALDGVIDAESGYANGYGIKPNYRSIIQFKNKYKENNFAEVVKVTFNSNAIKLHEILKHFFETHDPTQLNRQGNDIGTQYRSTILFLDENQKKVALEITKQYQKLLYAGGYGKVKTKIEPLDNFYLAEDYHQDYLKKNPNGYCPDLSTGIVFSNKQKNLLNNDDLLIGKHILILDSQAYCPYCEKLKEDVTNQYKGTIPLSYRTSNQLHGLNIKSPTWATPSIFFIENGKEVLGHQGYLAPKEFYQLLGKFKLGNTEAYDVAFNKGTDARFCKEYQIFKNTPDGVFVDKLSGEPLFDTNDRFVSRSGWLSFTKPVDGSVYELPDNSYGMRRTEIRSVSSDIHLGHVFDDGPNGMPRYCINATVLEFVDRESISS

SEQ ID NO: 103524 - protein, 58 aa, Unknown
  Bacterial polypetide isolated from the Sargasso Sea
DSEQIKEEVDTSHGMVRVEITCVKCDAHLGHVFPDGPAPTGLRYCINSVSLDFKSSSE

SEQ ID NO: 103525 - protein, 114 aa, Unknown
  Bacterial polypetide isolated from the Sargasso Sea
EEYHIARQAGTERPFTGVYWDTETAGTYRCKCCNAPLFDSDTKFDAGCGWPSFFAPLDEGSVKTREDLSLGMRRLEVLCSRCDAHLGHVFPDGPQPTGLRFCMNSASLSLEELN

SEQ ID NO: 103526 - protein, 155 aa, Unknown
  Bacterial polypetide isolated from the Sargasso Sea
MFKFLKNIMNNEDENLSNDSYSLHRILKSDIKKDPNVEEDEIIFGCGCFWGAEKCFWKLPGVITTSVGYAGGKKNNPTYYEVCSGLTGHSEVVRVIWDKREIDVSDLLKMFWECHDPTQKNRQGNDMGTQYRSAIYYKNENNIKTNISPVRNNIK

SEQ ID NO: 103527 - protein, 131 aa, Unknown
  Bacterial polypetide isolated from the Sargasso Sea
MNKIIKSDQEWKEVLSKEEYYVTRQKGTEPAFSGKAFDISKDGVFKCRCCGAKLFERTSKYESGCGWPSFFKGISNDAIKTEQDTSYGMMRTEIMCATCDAHLGHVFDDGPEPTGLRYCVNSLSIQYKEFE

SEQ ID NO: 103528 - protein, 105 aa, Unknown
  Bacterial polypetide isolated from the Sargasso Sea
GTEPPFSGKNFEIVNGGIFRCKCCNNELFNSSSKYDSGCGWPSFFEQLSPDAITTEVDKSHGMVRIEIMCAKCDAHLGHVFDDGPKPTGKRYCVNSLSINYEEVE

SEQ ID NO: 103529 - protein, 131 aa, Unknown
  Bacterial polypetide isolated from the Sargasso Sea
MNKITKTEKEWKSLLTEDEYYVTRQKGTEPPFSGKNFEIINGGTFKCKCCDNELFNSSTKYDSGCGWPSFFEQLSPEAIKTEVDNSHGMVRIEIMCSKCDAHLGHVFDDGPKPTGKRYCVNSLSINYKEFE

SEQ ID NO: 103530 - protein, 174 aa, Unknown
  Bacterial polypetide isolated from the Sargasso Sea
MEELVLGGGCFWCTEGGLLGLKGVHEVVPGYSGGHVDNPTYEQVCGKKTGHAEVVRVTFDPEVIPRMTLLRVFHTLFDPTQLNRQGNDIGPHYRSIVLYADEGQKQDAEAAIEEVSQYYDAPVVTEVVPLEKFWLAEDYHHDYFARNGSSNPYCVAVVAPKIAKARARHAELYE

SEQ ID NO: 103531 - protein, 398 aa, Unknown
  Bacterial polypetide isolated from the Sargasso Sea
MKKTNKFLICFLIASVINISANQTNHIQTIYLGSGCFWGAEKGYESIKGVINAESGYANGYGIKPNYRSIIQFKNKHNENNYAEVVKVTFNNNAITLEEILKHFFETHDPTQLNRQGNDIGTQYRSTILFSNENQKNIALEIIEEYQKLLFASGYGNIKTKLEPLDNFYLAEEYHQDYLKKNPNGYCPDLSTGIVFSEKDKDLLNNDSLLLGKHILILDSQTYCPYCDKLKENITNDYKGSIPLSYRTSDQLHGLKIQSPTWATPSILFIENGIEVFGYQGYLSPKEFYQLLGKFKLGNTEAYDVAFNKGTDARFCKEYQIFKDTPDGVFIDKLSGEPLFDTKDRFVSRSGWLSFTKPVDGSVYELPDNSYGMERTEIRSVSSDIHLGHVFDDGPNGN

SEQ ID NO: 103532 - protein, 177 aa, Unknown
  Bacterial polypetide isolated from the Sargasso Sea
MSKDNNEYAIFGGGCFWCVEAVFERIDGVSEVVSGYAGGQTKNPTYKEVTSGKTGHAEVCKIVFDPNIVTYDELLDIFWQAHDPTTLNRQGGDIGTQYRSAIYYINDAQKKSTQLALEKAAKMFDDPITTEVKELDNFYLAEGYHQDYYENNPNAPYCAFVIRPKIKKLGKKGLWDE

SEQ ID NO: 103533 - protein, 210 aa, Unknown
  Bacterial polypetide isolated from the Sargasso Sea
MDLLNKKSILPLESEALKGRDEAVEVPAEHFVKGTPLKAPFPEGLEEAIFGMGCFWGVERRFWELEGVYTTAVGYSGGFTKNPTYKEVCTGMTGHNEVVLVVYDPSIISYENLLTTFWEDHDPTQGMRQGNDVGTQYRSGIYFLNNSEEEVILKTQALYQSQLDNNGLGGITTEVKNAGPFYYAEHYHQQYLAKNPDGYCALAGTGIKIK

SEQ ID NO: 103534 - protein, 417 aa, Unknown
  Bacterial polypetide isolated from the Sargasso Sea
MKLRLVIFFSFILFANSFVYANKTNHIQTIHLGSGCFWGAEKGYESLDGVIDAVSGYANGYGVSPNYRSIIQLKNKYNENNFAEVVKVTFNNNAISLDEILKHFFETHDPTQLNRQGNDVGTQYRSVILFSNETQKKLAKDILNEYQSLLFEAGYGKVVTLIEPLDNFYLAENYHQDYLKKNPNGYCPDLSTGVVFNEKEKDILDNQDLLIGKQILILDSQSYCPYCEKLKLDVTNEYKGSIPMSYRTSDQLHDLEINAPTWATPSVIFLEDGKEVFSHQGYIDQKDFYLMLGKFKLGDSEAYDVAFNNGTDARFCKEYEIFKNTPDGIFIDKLSGEPLFDTRDRFVSRSGWLSFTRPVEGSVYEKPDNSYGMQRTEIRSVSSDIHLGHVFDDGPNGLPRYCINATVLEFIPRKGSI

SEQ ID NO: 103535 - protein, 97 aa, Unknown
  Bacterial polypetide isolated from the Sargasso Sea
HDPTTLNRQGNDVGTQYRSVIFYHNDKQKSLALESIKKAEVSGYWSNKIVTEVTELFNYSDAEDYHNNYYDNNPNQPYCLFVIKPKLDKLEKKGIIK

SEQ ID NO: 103536 - protein, 172 aa, Unknown
  Bacterial polypetide isolated from the Sargasso Sea
MLSSLIVGAGCFWGVEVLYEQMPGVIDATSGYSGGHLDNPRYEDVLTGETGHIEVVKIDYDSSEVTFNELIDRFFIIHDPTTLNRQGPDIGEQYKSILFYNSEDEKEIIESKIKKIDLSGKFENPIVTEIRETTEFYPAEDYHQDYAVKTGKLCYQQLYVMYNYSPIPISTP

SEQ ID NO: 103537 - protein, 181 aa, Unknown
  Bacterial polypetide isolated from the Sargasso Sea
MANLQVATLAGGCFWCIESAFNSVEGVEKAISGYAGGEKADPTYEEVCKGNTGHAEVVQVTFDADSISYREILEIFFALHNPTQLNRQGNDVGTQYRSAVFYHDDTQKAEAEKIIAEITEEEIWPDPVVTEIVAVNNYYDAEDYHQDYFKNNPQNQYCSMVVAPKLAKFKKTFASRLRSDA

SEQ ID NO: 103538 - protein, 143 aa, Unknown
  Bacterial polypetide isolated from the Sargasso Sea
MSNILDATFGAGCFWGVENKFMNLDGVIETSVGYMGSKFKNPTYFDVCSGLTGHAEVVKLKYDSNLIDYKSLCEFFFQIHDATTLNRQGPDVGTQYRSIIFCYDSTQMKIANNLISELNKERPSAPLIVSDVASAMEYYLAED

SEQ ID NO: 103539 - protein, 131 aa, Unknown
  Bacterial polypetide isolated from the Sargasso Sea
MKKIIKTDEEWKNLLTEKEYYITRQKGTEPPFSGKNFEIINGGIFKCKCCENELFNSSTKYESGCGWPSFFEQLAPDSIKTEVDNSLGMTRIEIMCAKCDAHLGHVFDDGPQPSGKRYCVNSLSINYEEFE

SEQ ID NO: 103540 - protein, 132 aa, Unknown
  Bacterial polypetide isolated from the Sargasso Sea
MKKTEQEWRQQLTEEQYRVTRQKGTEYPFSGSLLHNKATGCYHCICCQQPLFDSADKFDSGCGWPSFSKAIKGQVKYEKDHSHGMNRIEILCQHCDAHLGHVFDDGPAPTGQRYCVNSVSLLFNADVKISAE

SEQ ID NO: 103541 - protein, 242 aa, Unknown
  Bacterial polypetide isolated from the Sargasso Sea
MFKFLKNIMNNDEVNLINDAYSLHRILKTDIKKDPNLEEDEIIFGCGCFWGAEKCFWKLPGVITTSVGYAGGEKNNPTYYEVCSGLTGHSEVVRVIWDKREIDVSDLLKMFWECHDPTQKNRQGNDMGTQYRSAIYYKNENNIKTILASKEQYQTELSKKNFGLIETEIKLIDSYFYAEQYHQQYLASAGSRQYCSASPTKVKLGVFTGSNYKLEDHIWENFNWEVDKCVLRSDNNPIKNNI

SEQ ID NO: 103542 - protein, 128 aa, Unknown
  Bacterial polypetide isolated from the Sargasso Sea
MSKIVKKDEEWKELLNQESYRVTRQSGTEKPFTGKYWDFNKDGIYKCICCGENLFESKTKFDAGCGWPSFFIPLNMESINEFEDNSFGMNRTEVKCAKCDAHLGHVFNDGPQPTGLRYCINSASLNFE

SEQ ID NO: 103543 - protein, 115 aa, Unknown
  Bacterial polypetide isolated from the Sargasso Sea
DESFRVTRQSGTERPFTGKYSNFNEDGIYKCICCGESLFESDTKFDAGCGWPSFFIPFDSDCINEFEDKSFGMTRTEVKCSKCDAHLGHVFNDGPQPTGLRYCINSASLDFEQNQ

SEQ ID NO: 103544 - protein, 177 aa, Unknown
  Bacterial polypetide isolated from the Sargasso Sea
MSQIEITTLGGGCFWCVEAVFQRVDGVLSVKPGYAGGHIDNPTYKQICTGTTGHAEVAQIEFDSDIIKFDQILNVFWQAHDPTTLNRQGNDVGTQYRSVIFYHDEQQKEKAEISKKNADKSGYWPDPIVTEITQLNNYSDAEDYHHNYYNDNPNQPYCIFVIKPKLDKLEKDGVIED

SEQ ID NO: 103545 - protein, 131 aa, Unknown
  Bacterial polypetide isolated from the Sargasso Sea
MAKEDLKNKDWKSILDEDAYQVTRCFATEAPYSGKFLDNKREGTYICICCKKELFSSSTKYNSGCGWPSFFQPIDEACITEYKDSSHGMIRTEVRCSDCDSHLGHVFDDGPPPTFLRYCINSLSLDFNERS

SEQ ID NO: 103546 - protein, 131 aa, Unknown
  Bacterial polypetide isolated from the Sargasso Sea
MAKEDLKNKDWESILDEDAYQVTRCFATEAPYSGKFLDNKREGTYICICCKKELFSSSTKYNSGCGWPSFFQPIDEACITEYKDSSHGMIRTEVRCSDCDSHLGHVFDDGPPPTFLRYCINSLSLDFNERK

SEQ ID NO: 103547 - protein, 148 aa, Unknown
  Bacterial polypetide isolated from the Sargasso Sea
MSKALFGAGCFWGIEEYFSKINGVNNTAVGYSGGNTENPTYEEVCQGDTEHVEVVEINYDENIISYESLLEHFWNCHDPTQLNRQGPDVGRQYRSAIFYYSDNQKDIAELSKKEKQNDFNNMIVTEIVEAQTFYLAEEYHQQFLKKRV

SEQ ID NO: 103548 - protein, 131 aa, Unknown
  Bacterial polypetide isolated from the Sargasso Sea
MSNHTKTDSDWKKLLSDESFRVTRQSGTERPFTGKYWNFNEDGIYKCICCGESLFESDTKFDAGCGWPSFFIPVDSDCINEFEDNSFGMTRTEVKCSKCDAHLGHVFNDGPQPTGLRYCINSASLDFEQNQ

SEQ ID NO: 103549 - protein, 419 aa, Unknown
  Bacterial polypetide isolated from the Sargasso Sea
MNLKLRLVTFFSLILFANSFVYANKTNHIQTIHLGSGCFWGAEKGYESLDGVIDAASGYANGYGVNPNYRSIIQLKNKYNENNFAEVVKVTFNSNAISLDEILKHFFETHDPTQLNRQGNDIGTQYRSVILFSNETQRKLAQDILNEYQSLLFEAGYGRVVTLIEPLDNFYLAENYHQDYLKKNPNGYCPDLSTGVVFNEKEKDILDNQDLLIGKQILILDSQNYCPYCEKLKLDVTNEYKGSIPMSYRTSDQLHDLEINAPTWATPSVIFLEDGKEVFSHQGYIDQKDFYLMLGKFKLGDTEAYDVAFNNGTDARFCKEYEIFKNTPDGIFIDKLSGEPLFDTRDRFVSRSGWLSFTRPVEGSVYEKPDNSYGMRRTEIRSVSSNIHLGHVFDDGPNGLPRYCINATVLEFVPRKGSI

SEQ ID NO: 103550 - protein, 171 aa, Unknown
  Bacterial polypetide isolated from the Sargasso Sea
MKDIILLSVVIASIIFNNISSQVPYEDEKVLNSTNNDESKKVKRSDSEWRRMLSSAEYHILREKGTERAFTGEYDGHFENGMYLCAGCGNKIFDSETKYRSGCGWPAFYEALPESVEEHEDNSFGMRRIEITCSKCDGHLGHVFNDGPQPTGLRYCINSVSMDFKPDEEDE

SEQ ID NO: 103551 - protein, 161 aa, Unknown
  Bacterial polypetide isolated from the Sargasso Sea
MLPSWLTQRGGESSADAMHAVLGTPLRAPLMSDQEEALFACGCFWGAEKGFWRLPGVVSTAVGYAGGERVNPTYQEVCTGTTGHTEVVRVVWSTPAIDFSDLLKLFWECHDPTQGNRQGNDTGTQYRSAIYTTTDQQMSLVLASKTAYQDALNQQGYGPIT

SEQ ID NO: 103552 - protein, 107 aa, Unknown
  Bacterial polypetide isolated from the Sargasso Sea
EVISLAGLLKVFWECHDPTQGMRQGNDIGSQYRSVIFLNSELQKDESLSSLETYQDELELNGYGPITTEISMMKNYFLAEEYHQQYLAKNPNGYCGLGGTGCSFPNN

SEQ ID NO: 103553 - protein, 114 aa, Unknown
  Bacterial polypetide isolated from the Sargasso Sea
MEKATFAAGCFWGIETAYRRLEGVLDVAVGYEGGSKDNPSYQDVCTGQTGHAEVVEVDYDPEKISYDELLEVFWNIHDPTTLNRQGPDIGTQYRSAIFFHTEDQKKKAELSKSS

SEQ ID NO: 103554 - protein, 144 aa, Unknown
  Bacterial polypetide isolated from the Sargasso Sea
MSLMDLLNKKSLLPLESEALKGRDEEIEVPAEHFVKGTPLKAPFPEGLEEAIFGMGCFWGVERRFWELEGVYTTAVGYSGGFTKNPTYKEVCTGMTGHNEVVLVVYDPLVISYENLLTTFWEDHDPTQGMRQGNDVGTQYRSGI

SEQ ID NO: 103555 - protein, 142 aa, Unknown
  Bacterial polypetide isolated from the Sargasso Sea
MSTDKNTNSSTNEKDWKTELNDEEYYVCREAGTERPFTGVLLDEQRDGLYVCKCCEAPLFPSDTKFDAGCGWPSFYKQLDDGNVDYREDLTHGMRRVEIFCKQCGSHLGHVFPDGPAPTGQRYCVNSLSMTFIGEDNAKVRG

SEQ ID NO: 103556 - protein, 147 aa, Unknown
  Bacterial polypetide isolated from the Sargasso Sea
LKGVYVTSVGYAGGFTPNPTYEEVCSGKTGHAEVVQVVFDKQNCNYSDLLKLFFESHNPTQGMRQGNDRGTQYRSIILYKNEQQKVEANQIKDNYNQSLTKNGFNCITTEINEYKDYFLAEEYHQQYLAKNPNGYCGLQGTGIACQQ

SEQ ID NO: 103557 - protein, 131 aa, Unknown
  Bacterial polypetide isolated from the Sargasso Sea
MVNEDLKNKDWESILDEDAYQVTRCFATEAPYSGKFLDNKREGIYICICCKKELFSSSTKYNSGCGWPSFFQPIDEACITEYKDSSHGMIRTEVRCSDCDSHLGHVFDDGPPPTFLRYCINSLSLDFNERK

SEQ ID NO: 103558 - protein, 199 aa, Unknown
  Bacterial polypetide isolated from the Sargasso Sea
MKNLKFIFLLLLFSCISLRTSDMTQNTEKAYFAGGCFWCMEPPFEVLDGVLEATSGYMGGEIENPTYEQVSMGNTGHAEVVEIEYDPSIITYSELLEVFWRNIDPTALNYQFADVGSQYRTEIFTVGPNQMEEALNSKEELEKSNKFDKPIVTAITEAPVFYIAEEYHQDFYKKQSARYKIYAEASGRKGFLEDTWGDE

SEQ ID NO: 103559 - protein, 142 aa, Unknown
  Bacterial polypetide isolated from the Sargasso Sea
MSNNTAVTEQVLSLDISKEELADINESLEAMTAQQRVEWAFNNLPDTHIVSSSFGAQSAVMLHMLTQAKPDIPVVLTDTGYLFPETYQFIDELVAKLKLNLHVYQANMSSAWQEARFGRLWEQGIEGIETYNSLNKVEPSKE

SEQ ID NO: 103560 - protein, 78 aa, Unknown
  Bacterial polypetide isolated from the Sargasso Sea
MDTEQQQQLLAEANQLLLSFTAAERVRWALEHLPDQQILSSSFGIQSAVMLHLVTTERPDIPVVLTDTGLSVPGNLSV

SEQ ID NO: 103561 - protein, 139 aa, Unknown
  Bacterial polypetide isolated from the Sargasso Sea
QWALQHLPDQQILSSSFGIQSAVMLHLVTTERPDIPVVLTDTGYLFPETYQFIDELKERLQLNLKVYRAHLSPAWQEARFGKLWETEAGIKQYNHMNKVEPLQRALKELNVGTWFSGLRRSQSSTRADKNIIEISRGTV

SEQ ID NO: 103562 - protein, 154 aa, Unknown
  Bacterial polypetide isolated from the Sargasso Sea
MISAAPSGKANSEELMSKLDLNALNELPKVERVMALAQTNDQLEKLSAEDRVAWALENLPGEYVLSSSFGIQAAVSLHLVNQVRPDIPVILTDTGYLFPETYQFIDELTDKLKLNLQVYRAKESAAWQEARYGKLWEQGVEGIEKYMTSTKSSR

SEQ ID NO: 103563 - protein, 249 aa, Unknown
  Bacterial polypetide isolated from the Sargasso Sea
MQSVVSSSELKALLTAPKDVQRAELERINRFLAGLTAQERVLWGLAYLPGNHALSSSFGIQAAVMLHMVSQVQSDIPVILTDTGYLFPETYQFIDQLTERLSLNLKVYQAPMTAAWQEARFGQLWEQGLEGLERYNRLNKVEPMQRALAELEVGTWFAGLRRSQSSTREELPILAIHGTRFKLLPIIEWSNKDVHLYLTQFDLPYHPLWEQGYVSVGDTHSTKPLELGMSEEETRFNGLKRECGLHYEI

SEQ ID NO: 103564 - protein, 188 aa, Unknown
  Bacterial polypetide isolated from the Sargasso Sea
MLHMLTQAQPDIPVVLTDTGYLFPETYKFIDELVEKLNLNLHVYSAEMSSAWQEARFGRLWEQGIEGIEKYNKMNKVEPMQRALRDLKAGTWFAGLRRSQSDTRGKLPVLQKVGQQFKLYPIIDWSNKDLHYYLKDNDLSYHPLWEQGYVSIGDWHTTQSLQEGMSEQDTRFFGLKRECGLHEFGDGI

SEQ ID NO: 103565 - protein, 258 aa, Unknown
  Bacterial polypetide isolated from the Sargasso Sea
MARTADGRLDLDALLALSREEQVEALAPINRALDAMSAPERVRWALANLPGEHVLSSSFGIQAALMLHLVSREQADVPVVLTDTGYLFPETYRFIDELTERLALNLKIYRAELSPAWQEARFGLLWEQGVEGITRYNQLNKVEPMDRALNELGARTWFSGLRREQSGSRGKLPVLAIQRGRFKFLPVIDWSNKDVFYYFKEFDLPYHPLWEQGYLSVGDVHTTTKWEPGMSEEQTRFFGLKRECGLHEENGENDGSGI

SEQ ID NO: 103566 - protein, 249 aa, Unknown
  Bacterial polypetide isolated from the Sargasso Sea
MQSVVSHSELKALLTAPKDVQQAELERINRFLAGLTAQERVLWGLAYLPGNHALSSSFGIQAAVMLHMVSQVQSDIPVILTDTGYLFPETYQFIDQLTERLSLNLKVYQAPMTSAWQEARFGKLWEQGLDGLERYNRLNKVEPMQRALAELEVGTWFAGLRRSQSSTREELPILAIHGTRFKLLPIIEWSNKDVHLYLTQFDLPYHPLWDQGYVSVGDTHSSKPLELGMTEEETRFNGLKRECGLHYEI

SEQ ID NO: 103567 - protein, 114 aa, Unknown
  Bacterial polypetide isolated from the Sargasso Sea
MSQYKQLLQLDTEQQQQLLVEANQLLLPLTPAQRVQWALEHLPDQQILSSSFGIQSAVMLHLITTERPDIPVLLTDTGYLFPETYQFIDELKERLQLNLKVYRAHLSPAWQEAR

SEQ ID NO: 103568 - protein, 229 aa, Unknown
  Bacterial polypetide isolated from the Sargasso Sea
MSNNQTVSFEHSIPDNLKGLVADWSSDVQTFRVRWSKAMMWIFLVSDTFIFGSFLCAYMAVRLTTIEPWPSTSEVFALHVGGADVPLLLIAIMTFILISSSGTMAMAVTSGYKKERKKTAFLILLTALGGLAFVGMQMFEWSKLIFEEGIRPWGNPFGAAQFGGFFFMITGFHGLHVSIGVVYLCIVAKRVWEGRYDRLNDYQMVEVAGLYWHFVDLVWIFIFAFFYLW

SEQ ID NO: 103569 - protein, 108 aa, Unknown
  Bacterial polypetide isolated from the Sargasso Sea
MAEGHSRDHSYHLVDPSPWPIVGAFAAFILTLGMVLWFHDVTIWVFIIGAVITAYVFLVWFRDIIKEGEHLGFHTPVVQLGLRYGMVLFIASEVMFFAAWFWAYYNAA

SEQ ID NO: 103570 - protein, 299 aa, Unknown
  Bacterial polypetide isolated from the Sargasso Sea
AEGEAHLLWQHYFGFLAHPEVYVLILPAMGIVSEVIANNSRKPLWGYNSLVFATIFLGFMSFIVWAHHMFLTGMGTAMSAFFQTTTMIISIPSVIILSALFISLWGASIRFNTPMLFALAFLPMFGIGGLTGLPLGLAAADIYLHDTYYVIGHFHYVVAPGTIFGLFAGIYYWYPKITGRKMSELLGKMHFWPSLLFMNGVFMPMFIQGLAGVSRRLWDGGLEYAHASGVFHWNEFMSISAWLLGIAQIPFIINVFYSIFRGEKVDNNPWQATTLEWAAPSPPLPHVNFDTLPYCSSRS

SEQ ID NO: 103571 - protein, 163 aa, Unknown
  Bacterial polypetide isolated from the Sargasso Sea
ILYKQDAIPKADITVKAIGYQWYWGYEYPDENIFFDSYMIETKDLKENEPRLLAVDNELVVPVNKVVKVMITANDVLHAWALPSFGVKRDAVPGRINETWFKAEKVGTYYGQCSELCGIKHAFMPIEVRVVTQEEYQEWLLDAKVKFAKEVNEADQFKKLASK

SEQ ID NO: 103572 - protein, 219 aa, Unknown
  Bacterial polypetide isolated from the Sargasso Sea
MMWFFLISDAFTFSAFLIAYGVIRLKHPAYEGTLSDFTFSQSYWPVPEKVFEAFPFFHGVELPLVFVGLMTFILILSSVTMVLAVEAGHRMDRKGVEKWMLWTIVGGFTFLGCQAWEWSHFIHGTDLGSRLLDGSIIYGANLQINQYGPPDFAAFFFFITGFHGFHVFSGVALNFLIFYQTTVGIYEKRGHYEMVEKVGLYWHFVDLVWVFVFTFFYLI

SEQ ID NO: 103573 - protein, 131 aa, Unknown
  Bacterial polypetide isolated from the Sargasso Sea
LIPMMVGAPDMALPRLNNLSFWLLPFAFGILLSSLFMEGGAPNFGWTFYAPLSTTYAPPSVTFFIFSVHIMGASSIMGSINVIVTIMNMRAPGMDLMKMPLFVWSWLITAYLLIAVMPVLAGAVTMMLMLE

SEQ ID NO: 103574 - protein, 244 aa, Unknown
  Bacterial polypetide isolated from the Sargasso Sea
MLKKYAYTLFLLLPGSVLANQPKDWQLGFQKSASETMDDIVWFHDYMLLPVITAITVFVLFLIAYACIRFRASKNKEASTTSHNTFIEVIWTLVPCLILIVLAVPSFKVLYSQDEIPKADVTIKAIGYQWYWGYEYPDENIIFDSYMIEEKDLKEGQPRLLSVDNEVYVPVNKVVKVMITANDVLHAWALPSFGVKRDAVPGRINETWFKADRVGTFYGQCSELCGIKHAFMPITVNVVSQEEY

SEQ ID NO: 103575 - protein, 92 aa, Unknown
  Bacterial polypetide isolated from the Sargasso Sea
MFEWSKLIFEEGIRPWGNPFGAAQFGGFFFMITGFHGLHVSIGVVYLCIVAKRVWEGRYDRLNDYQMVEVAGLYWHFVDLVWIFIFAFFYLW

SEQ ID NO: 103576 - protein, 263 aa, Unknown
  Bacterial polypetide isolated from the Sargasso Sea
MPFVAFAKEGKSENWQLSFQEPATDLMSDIISFHSYILMPIITGISLLVLGLLLYIMFRFNSKRNVVASTTTHNTTIEILWTVIPVILLIIIAIPSFRLLYVSETIPKADLTIKAIGNQWYWTYEYPDYEDIAFDANMLLENELSDPKLRLLETDTQIVVPVNKVVKLQITSADVLHAWTIPAFGVKMDAVPGRLNETWFKANKEGIYYGQCSELCGAKHAFMPINVKVVSESEFDNWLDFAKEEYASSGIDYSSETFEIAKN

SEQ ID NO: 103577 - protein, 275 aa, Unknown
  Bacterial polypetide isolated from the Sargasso Sea
MKNIIKILFFLLIPSFSLANEGISENWQLSFQQPATDLMSDIISFHSYILMPIITGISLLVLGLLLYIMFRFNSSRNHVASTTTHNTTIEILWTVIPVILLIIIAIPSFRLLYVSETIPKADITIKAIGNQWYWTYEYPDFDDISFDANMLADHELSDPKLRLLETDTQIVVPVDKVVKLQLTSADVLHAWTIPAFGVKMDAVPGRLNETWFKANKEGIYYGQCSELCGPKHAFMPINVKVVSNKEFEEWIEFAKSEYASLEINYSNDTFEMAKK

SEQ ID NO: 103578 - protein, 121 aa, Unknown
  Bacterial polypetide isolated from the Sargasso Sea
VYYWIPKWTGNMYDERMGRLHFWLSFVGVNVTFFPQHWIGLAGMPRRYPDYALQFADWNMVSTAGAFLFGASQILFLFIVLKTVMGGKKATPQVWEGARGLEWSVESPAPYHTFSTPPKVN

SEQ ID NO: 103579 - protein, 157 aa, Unknown
  Bacterial polypetide isolated from the Sargasso Sea
KCSLYEEAMFLTKFASKVQLIHRRNELRAEKLLQKKLMENKKIEIIWDSVVEEVIGDEDPKNVKGLKINNVKTNEIKELKIDGLFIAIGHDPATQLFKDQLNMDKEGYLITKPDSTETNIPGVFAAGDVKDKIFRQAVTAAGMGCMSALEAEKYLAS

SEQ ID NO: 103580 - protein, 330 aa, Unknown
  Bacterial polypetide isolated from the Sargasso Sea
NREVDISLDRVYGKSDNEFIGMCRREVMDAFMRNRASDLGATLINGLVTSIDTGDNNQGPYKLSYSDFTNGDKKGELKELTVDLLIGADGANSRVAKAMDAGDYKVAIAFQERIKLPKEEMSYYEDLAEMYVGTDVSPDFYGWVFPKYDHVAVGTGTMQKNQSLIKGLQEGVRNRAKKRLVNGEVIKVEAHPIPEHPRPRRVVGRMALVGDAAGYVTKSSGEGIYFAAKSGRMCAEEIVEASKNGQIIPSEKDLKNYLKKWDKKYGTTYKVLEILQNIFYRNDSAREAFVEMCDDMDVQRLTFDSYLYKRVVAMKPLQQLKITMLTLGSI

SEQ ID NO: 103581 - protein, 119 aa, Unknown
  Bacterial polypetide isolated from the Sargasso Sea
VLAHNALETNDQEKTRVWLLATAMLGAVFLAGQIYEFTEFYHKGFELSTNIFSSTFYVLTGFHGLHVFIGVVLLLALWGIGQRQKGLSLNEGMNLEFIALYWHFVDIVWIVLFTVVYLI

SEQ ID NO: 103582 - protein, 200 aa, Unknown
  Bacterial polypetide isolated from the Sargasso Sea
MTTLDSSKEIINDSSDVNEHHQDFRMFGLITFLIADGMTFAGFFAAYLTYKAVNPLPDGAIYELELPIPTLNTILLLVSSATFHKAGKALLKNKNSVTQKWLIVTGLLGIAFLICQLFEYFNLPFGLTENLFASTFYALTGFHGLHVTLGTLMILIITWQTRSKGGRITNQNMFPLEAVELYWHFVDGIWVILFIILYLL

SEQ ID NO: 103583 - protein, 213 aa, Unknown
  Bacterial polypetide isolated from the Sargasso Sea
MWWKARRIGTAGTGTTPKPHLKTKRSPSRTPDMTISLPPETSSPPRLQPSGWLRYFSFSVDHKVIGLQYLVCGFVFYLIGGALAGAIRTELTSPVSDFMARDVYNQVLTLHGTVMIFLWIVPVVNGAFGNYLIPFYVGARDMAFPRLNAVAFWLIPPAGLMLITSYFLTGAAQSGWTAYPPLSITTPATGQIIWILSVLLLGGSSIFGGINFI

SEQ ID NO: 103584 - protein, 128 aa, Unknown
  Bacterial polypetide isolated from the Sargasso Sea
MSASGQKHDYHLVDPSPWPLATSVATLITAVGSVYYFHTEVMWAMLLGFLLLIYCAFMWFRDVVIEAEHKGHHTPVVQIHHRYGMTLFIASEVMFFVAWFWAYFDASLFPNEFMGNVWPPKDIKTFDP

SEQ ID NO: 103585 - protein, 125 aa, Unknown
  Bacterial polypetide isolated from the Sargasso Sea
QAKLKANKKIEIIWDSVVEDVLGEKSPKSVKSIKIKNVKTNKISELKIDGLFIAIGHDPATSLFKGQLNMDKEGYIVTKPDSTVTNVPGVFAAGDVKDKIFRQAVTAAGMGCMAALEAEKHLSSK

SEQ ID NO: 103586 - protein, 224 aa, Unknown
  Bacterial polypetide isolated from the Sargasso Sea
PIITGISLLVLGLLLYIMFRFNSKRNVVASTTTHNTTIEILWTVIPVILLIIIAIPSFRLLYVSETIPKADLTIKAIGNQWYWTYEYPDYEDITFDANMLLENELSDPKLRLLETDTQIVVPVNKVVKLQITSADVLHAWTIPAFGVKMDAVPGRLNETWFKANKEGIYYGQCSELCGAKHAFMPINVKVVSESEFDDWLDFAKEEYASSGIDYSSETFEIAKN

SEQ ID NO: 103587 - protein, 267 aa, Unknown
  Bacterial polypetide isolated from the Sargasso Sea
VWAHHMYVSGMNPWFGFFFATTTLIIAVPTAIKVYNWILTLWRGNIQLSLPMLFSLGFIVTFLNGGLTGLFLGNVTVDVPLSDTYFVVAHFHMVMGIAPILVIFGAIYHWYPLITGRMMDETLGKIHFWITFLGSYAIYFPMHYQGFVGVPRRYFEIYDSPYIDTSTLLLNKFITIAVLIVGAAQLLFLYNLFASARLGKKSEKNPWKANSLEWQTPQMPPEHGNWGKELPKVYRWPYDFSVPGAKEDYIPQNQPPSEIIGAKVEKT

SEQ ID NO: 103588 - protein, 267 aa, Unknown
  Bacterial polypetide isolated from the Sargasso Sea
FVWAHHMYVSGMNPWFGFFFATTTLIIAVPTAMKVYNWILTLWRGNIRINTVMLWCLGFIVTFVNGGITGIFLGNVSVDVPLSDTYFVIAHFHMVMGIAPLMVIMGAVYHWFPLVAGKMLHEGLGKWHFWITFLGAYSIYFPMHYLGFIGVPRRYFEMYDSPYMTSAVGMNEFISIAAFIVGAAQFILVFNIIKTLKTGKKAEQNPWKANSLEWYTSTVPPEHGNFGERLPVVHRWPYDFSVPGAKDDFIPQTTAPSEVIHTEVEKT

SEQ ID NO: 103589 - protein, 99 aa, Unknown
  Bacterial polypetide isolated from the Sargasso Sea
ATAMLGSVFLAGQIYEFTEFYHKGFELSTNIFSSTFYVLTGFHGLHVFIGVVFLIGLWIIGQRQKGLSLDSGFNLEFIALYWHFVDIVWIVLFTVVYLI

SEQ ID NO: 103590 - protein, 271 aa, Unknown
  Bacterial polypetide isolated from the Sargasso Sea
FGIVSDLISVHSRKNIFGYRMMVWAIVGIGALSFFVWAHHMYVSGMSPWFGFFFATTTLIIAVPTALKVYNWILTLWRGNIRINTVMLFCLGFIVTFVNGGITGIFLGNVAVDVPLSDTYFVIAHFHMVMGIAPLMVIFGAIYHWFPLVTGRFLDEKLGKWHFWITFLGAYSIYFPMHYLGFIGVPRRYFEMYDSPYMTSAVGMNEFISLAAFIVGAAQFIFFYNLVKSLRLGKPAGKNPWKANSLEWLTPDVPPTHGNWGEKLPVVHRWA

SEQ ID NO: 103591 - protein, 175 aa, Unknown
  Bacterial polypetide isolated from the Sargasso Sea
MTSESATSQPWHVPEPSPWPIVGTAAALATALGLVWFMHTGSPWLLGIGGILVLWTMIGWWRQVILEANDRASHTSPVKVGLRIGMLLFIASEVMFFFAFFWAYFHSSLPILNIVAGPWPNEGVEAIGAAGIPLLNTLLLITSSLTVTIAHHAILENEREKVIFWTGITAVLGII

SEQ ID NO: 103592 - protein, 145 aa, Unknown
  Bacterial polypetide isolated from the Sargasso Sea
MKLTDVYDIPFTSVSSFVLLMSSLTMVLAHNALENEDQEKTRVWLLATAMLGSVFLAGQIYEFTEFYHKGFELSTNIFSSTFYVLTGFHGLHVFIGVVFLIGLWIIGQRQKGLSLDSGFNLEFIALYWHFVDIVWIVLFTVVYLI

SEQ ID NO: 103593 - protein, 257 aa, Unknown
  Bacterial polypetide isolated from the Sargasso Sea
LFTSLPALSNGAIDWQLGFQKPASDHMQNIFDLHNFVLIMMTAITIFVLILLIYVAIRFRKSANPNPSKRTHNALLETLWTAIPVVILIFMAVPSFKLLYEQDVIPEADMTIKVIGHQWYWEYQYPEHDDLSFESYLVPDEELKDGQPRLLTVDNRLVLPVNKNIHVLVTAGDVLHSFAMPSLGVKRDAVPGRLNETWMRIDRPGIYRGQCSEICGTGHGYMPVVIEALSENDFAAWVNQAKNEFAELNSRTIALSK

SEQ ID NO: 103594 - protein, 189 aa, Unknown
  Bacterial polypetide isolated from the Sargasso Sea
SALDINLHDTYFVVAHFHLVMGISALYGLFAGVYHWFPKMFGRMMNKNLGYIHFWITAIGAYGVFFPMHFIGMAGLPRRYYTNTNFPYFDDLANINVVITMFALIAGAAQIIFLYNFISSIFYGKRTEKNPWKSNTLEWTAPIKHIHGNWPGKIPHVHRWAYDYSKPGSKEDFIPQNIPLKKGEKELQH

SEQ ID NO: 103595 - protein, 307 aa, Unknown
  Bacterial polypetide isolated from the Sargasso Sea
MAYPKLNAVAFWMIPPAGALIWLGFADFTWYAYPTYSVVSAPGPAADMWIFGLKILGVSSILGSINFVVTIMKCKHPDLPLSKMPLLAWAYLTSSLITLVAVPTFAAALLMLLTDRLGASGFFNPAMGGDPIAYQHLFWFTFHPEVYILVIPAIGFMYEIFPRFSRKPIFSHGSGVAAFTLLTIVGFASWAHHMYATGMSFTEKTVFMVGTLAAVPASAMHTFNFLATMWGGRIKFATPIMWAVGGIALFFSAGAGGVVNSAMPLDFITHDSYWVVGHFHLFVMGTILFGTVGFVYYFFPYVTGKIV

SEQ ID NO: 103596 - protein, 87 aa, Unknown
  Bacterial polypetide isolated from the Sargasso Sea
MHFLGLAGMPRRYADYPEAFAGWNMVASLGSYLSAFSALLFVYILIRTVTSGERVSENPWGEGATTMEWKLPSPPEFHTYDELPVIK

SEQ ID NO: 103597 - protein, 216 aa, Unknown
  Bacterial polypetide isolated from the Sargasso Sea
MSEAEAMNDSPEGMTGLVDDWSADRQAYQVPWGKAMMWIFLVSDTFIFSCFLVGYLNVRLTTTAPWPPQSEIFALSFGGAPIPLILIAIMTFILITSSGTMALAVNMGYRKDKVKAFWLICITAAFGASFVGMQMFEWSKLILDEGVRPWGNPFGAPQFGSIFFMVTGFHGLHVTGGVIYLLWVAFRVKRGYYDNKGFEIIEIAGLYWHFVDLVWV

SEQ ID NO: 103598 - protein, 79 aa, Unknown
  Bacterial polypetide isolated from the Sargasso Sea
VKRDAIPGRINETWFKADRTGTFYGQCSELCGIKHAFMPITVNVVSEDEYNKWLEEAKVKFAKEEIKDKIKIVKKIKEL

SEQ ID NO: 103599 - protein, 318 aa, Unknown
  Bacterial polypetide isolated from the Sargasso Sea
MSKSNAAADVASISASGITISLGAAGNFSSNIIAADKAFTMDGSGMSSADITLTAVSAVDSISITLAGSAQVSSGTIDTVDTFTLSASGASESIDINNVSASGISITTGIQGDFSASSVNSKSTITVDASGSTTAQGISLTAVSASGAISITMGAGSGFIAMTTANSTEKAFTLDASRFDGEVDISNVNASGVTISIGSGGDFSASAVGGYGNGFTLNATSSDASGEQINIGVISASGVAMNMSAAAFVTAQVSALNTGGGDFTFSGTNFNGGLHIMSISGSGASIITGENFIGSAQSVLLTDHFTLNGAALTSATIT

SEQ ID NO: 103600 - protein, 295 aa, Unknown
  Bacterial polypetide isolated from the Sargasso Sea
FNICSRKKNIFGYRMMVWAIVIIGALSFIVWAHHMYVSGMNPWFGFFFATTTLIIAVPTAIKVYNWVLTLWRGNIHLTIPMLFSLGFIVTFVNGGITGLFLGNVIIDVPLSDTYFVVAHFHMVMGIAPLMVVFGAIYHWYPLITGRHLNQTLGKIHFWITFVGAYAIYFPMHYLGFIGVPRRYFEMYDSPYMTSGVGLNQFITVAALIVGFTQFLFLYNLFTSWYKGEKSERNPWKANSLEWHTPDYPPTHGNFGKELPVVYRWPYDFSVPGSDKEYIPQDVPPSQVPTAKAEQT

SEQ ID NO: 103601 - protein, 230 aa, Unknown
  Bacterial polypetide isolated from the Sargasso Sea
NFHDKLLLPIIIAISVFVLFLMVYACIRFRASANPVPSKRTHNVAVEVLWTLIPCLILIVMAVPSFKILYKQDAIPKADITVKAIGYQWYWGYEYPDENIFFDSYMIETKDLKENEPRLLAVDNELVVPVNKVVKVMITANDVLHAWALPSFGVKRDAVPGRINETWFKAEKVGTYYGQCSELCGIKHAFMPIEVRVVTEEEYQEWLLDAKVKFAKEINEEDQFKKLASK

SEQ ID NO: 103602 - protein, 194 aa, Unknown
  Bacterial polypetide isolated from the Sargasso Sea
MSSSHAYPHEPTGVETRKLGMWVFLSTEILFFGTLITTFMIFKGSDFPGMKLTDVYDIPFTSISSFILLMSSLTMVLAHNALEANDQEKTRVWLLATAMLGAVFLAGQIYEFTEFYHKGFELTTNIFSSSFYVLTGFHGLHVFIGVVLLLALWGIGQRQKGLTLEGGMNLEFVALYWHFVDIVWIVLFTVVYLI

SEQ ID NO: 103603 - protein, 290 aa, Unknown
  Bacterial polypetide isolated from the Sargasso Sea
VALTEPRRKPRIVITQLDLLSSPIKSPLTDLSGQHFTLPYDSQGLTISYSSLNFRDSAKMRYRYWLDGPQRLVFPEQSSSSVMFPQLTPGDYQFNVVAVSPVTGLESEVATLQLQVQAAPWLSHWAYMLYASVSLVIMLFYLRTRQKQQRMLKVAHTKVTTSEQRLKQALDSIDSGAWEWHARKNIMFASRIHSMLGYQEALNPLAMTQHLSLVHPEDKDAYQQAWQKLMQTPDKTFDHTYRMQHKNGKWLWFRDIGKVAEVDDKGQPERVIGTFSNITETRANQEKARL

SEQ ID NO: 103604 - protein, 208 aa, Unknown
  Bacterial polypetide isolated from the Sargasso Sea
PMLVFRFRESRNPNPSKTTHNVAIEVLWTLIPCLILIVMAVPSFKILYSQDTIPKADVTIKAIGYQWYWGYEYPDENIIFDSYMIEEKDLLPGQPRLLAVDNEVIVPVNKVVKVLITANDVLHAWALPAFGVKRDAMPGRVNETWFKADRVGTFYGQCSELCGIKHAFMPITVKVVTEEEYQEWLDEAKIKFAKEEINNQNNNLIASK

SEQ ID NO: 103605 - protein, 181 aa, Unknown
  Bacterial polypetide isolated from the Sargasso Sea
TFIFSCFLVGYLNVRLTTTAPWPPQSEIFALSFGGAPIPLILIAIMTFILITSSGTMALAVNMGYRKDKVKAFWLICITAAFGASFVGMQMFEWSKLILDEGVRPWGNPFGAPQFGSIFFMVTGFHGLHVTGGVIYLLWVAFRVKRGYYDNKGFEIIEIAGLYWHFVDLVWVFIFAFFYLL

SEQ ID NO: 103606 - protein, 136 aa, Unknown
  Bacterial polypetide isolated from the Sargasso Sea
MFLSISATAQIDRSVQPKPGPAPTITLEVPGEFQLKNGLKVLVVENHKLPRVSYSLTIDNNPIVEGDKAGVSSILGAMLGNGTTNISKDEFNDEIDFLGARLNFGSSSAYASGLSKYSERIMELMADAAINPLLTQ

SEQ ID NO: 103607 - protein, 67 aa, Unknown
  Bacterial polypetide isolated from the Sargasso Sea
MSAGKPKHDYHLVDPSPWPIYVSFATLVLAFGAVYYFHSKALWLLLIGFALVVYGAFMWWRDVIEEA

SEQ ID NO: 103608 - protein, 260 aa, Unknown
  Bacterial polypetide isolated from the Sargasso Sea
EDELGIKLNEYQNIIPPKDRFYADPFPVYHKNKLYIFFEEMLFNQKNAFLSVLSIDSDCSISIPKKILEEKFHLSYPFIIYHDNEYFMIPETASNNKISLYKCDSFPYKWSFCKHLMHNVKAVDTTVFYYNDYFWMFTNLAESEGCSTWDELFLFFSKDLFSDCWESHPLNPIISDVSKARPAGNIFYSQKDIIRPSQNNSMIYGGNIEFNKIVKLSENEYEEITIKSSDISFDSSILGAHTINSLQGFTVADTLNKIKR

SEQ ID NO: 103609 - protein, 296 aa, Unknown
  Bacterial polypetide isolated from the Sargasso Sea
KKLKPMVLDNKHIKARSVVNKLKKALNKLLSEYSNSFVFDFIKDDNVTSQMDAHISSGIIDRGVATPDHVIRIKPKPLILTLSIQENRRGSIEKAVKSYVNDYKTYFETWSRKTKEEKIMLDPVPKIAWVEGIGLIGIGRSMKEAKTITDLAVQNIAVITDSEGAGGFYPVKNKDLFEMEYWSLEQAKLSKKPLSKLNGKVTIVTGAGGAIGAAIVRLFESEGAEVIAVDLDENALKKHNFSSRVSKQCLDITDEAQAKKLIDDIVDQFGGLDILISNAGSAMQSSILEMDIKDLR

SEQ ID NO: 103610 - protein, 301 aa, Unknown
  Bacterial polypetide isolated from the Sargasso Sea
KIIGIQYGFTALFFLLVGFSLMMVMRWQLAYPETPIPFVGSIFGDDGILLPEIYNSLGAMHGTIMIFLGIVPLAVGAFGNYLVPLQIGAPDMAFPKLNAASYWSYLVGGLVMMSSFFTEEGAARSGWTSYPPLADIEVGQTIWLIGMIFLITSSLLGSMNIITTIVQLRAPGLTWMRLPFFVWAQLVTSFLLVLAFPPLEAAAVLQLMDRVVGTSFFLPSGLVVSGELMEVSGGGSPLLWQHLFWFLAHPEVYVLILPAMGIVSEVIANNSRKPLWGYNSLVFATIFSWIHVIYCLGSSYV

SEQ ID NO: 103611 - protein, 182 aa, Unknown
  Bacterial polypetide isolated from the Sargasso Sea
MADAAIHGHEHEDQRGFFTRWFMSTNHKDIGILYLVVSALVGFIAVSFTIYMRLELMNPGVQYMCMEGMRLTAAGIGECTPNGHLWNVLITGHGILMMFFVVIPALFGGFGNYFMPLQIGSPDMAFPRMNNLSFWMYVAGTTLAICSVLSPGGNDQLGSGVGWILYPPLSVNEGGMSMDLAI

SEQ ID NO: 103612 - protein, 90 aa, Unknown
  Bacterial polypetide isolated from the Sargasso Sea
MSATTADHEHHHNPTGWKRWAYSTNHKDIGTMYLIFAIIAGLIGSAFSVLMRMELMHPGDGILGGDYHLYNVLVTGHGLIMIFFMVMPAM

SEQ ID NO: 103613 - protein, 191 aa, Unknown
  Bacterial polypetide isolated from the Sargasso Sea
MSAVIENHHDDHHHGPAKGITRWLYTTNHKDIGTLYLWFSFAMFLIGGAMAMVIRAELFQPGMQIVEPEFYNQMITLHGLIMIFGGVMPAFVGLANWLVPMMIGAPDMALPRMNNLSFWILPFAFFILLSSLFMEGGAPNFGWTFYAPLSTTYAPPSVTFFIFSVHIMGASSIMGSINVVVTIMNMRAPRR

SEQ ID NO: 103614 - protein, 283 aa, Unknown
  Bacterial polypetide isolated from the Sargasso Sea
SLITLVAVPTFAAALLMLLTDRLGASGFFNPAMGGDPIAYQHLFWFTFHPEVYILVIPAIGFMYEIFPRFSRKPIFSHGSGVAAFTLLTIVGFASWAHHMYATGMSFTEKTVFMVGTLAAVPASAMHTFNFLATMWGGRIKFATPIMWAVGGIALFFSAGAGGVVNSAMPLDFITHDSYWVVGHFHLFVMGTILFGTVGFIYYFFPYVTGRMYNETMGKIHFILSFVGTVLVFFTQHILGLFGMPRRIYDYPAIPEWVQMNIIISIGAFIIGIGMAIFLWKPN

SEQ ID NO: 103615 - protein, 259 aa, Unknown
  Bacterial polypetide isolated from the Sargasso Sea
ALSFFVWAHHMYVSGMNPWFGFFFATTTLIIAVPTAMKVYNWILTLWRGNIRINTVMLWCLGFIVTFVNGGITGIFLGNVTVDVPLSDTYFVIAHFHMVMGIAPLMVIMGAVYHWFPLVAGRMLSEKLGKWHFWITFLGAYSIYFPMHYLGFIGVPRRYFEMYDSPYMTSAVGMNEFISLAAFIVGAAQFILIYNIIVSLRMGKPSGKNPWKANSLEWHTSTVPPEHGNFGDELPVVHRWPYDFSVHGAKEDFIPQTTP

SEQ ID NO: 103616 - protein, 128 aa, Unknown
  Bacterial polypetide isolated from the Sargasso Sea
YYWLPKWTGYMYDEVLGKTHFWLSFISVNLTFFPMHFVGLAGMPRRIPDYAMQFADYNMIVSVGAFLFGLSQLLFLFNVLKCVYYGKSATAEVWEGAKGKGLEWTVDSPAPYHTFETSPDLTKPQTNS

SEQ ID NO: 103617 - protein, 149 aa, Unknown
  Bacterial polypetide isolated from the Sargasso Sea
MFLTKFASKVQLIHRRDSLRAEKLLQKKLMENKKIEIIWNSVVDEVIGDNDPKNVTGLKIKNVKTNKIDELKIDGLFIAIGHDPATSLFKDQLEMDNEGYLITKPESTETNIPGVFAAGDVKDKVFRQAVTAAGMGCMAALEAEKHLSE

SEQ ID NO: 103618 - protein, 259 aa, Unknown
  Bacterial polypetide isolated from the Sargasso Sea
ITSSAFANQPVDWQLGFQKAASETMRDIVNFHDKLLLPIIIAISVFVLFLMVYACIRFRASANPVPSKRTHNVAVEVLWTLIPCLILIVMAVPSFKILYKQDAIPKAEITVKAIGYQWYWGYEYPDENIFFDSYMIETKDLKENEPRLLAVDNELVVPVNKVVKVMITANDVLHAWALPSFGVKRDAVPGRINETWFKAEKVGTYYGQCSELCGIKHAFMPIEVRVVTEEEYQEWLIDAKVKFAKEINEEDQFKKLASK

SEQ ID NO: 103619 - protein, 266 aa, Unknown
  Bacterial polypetide isolated from the Sargasso Sea
LSFFVWAHHMYVSGMNPWFGFFFATTTLIIAVPTAMKVYNWILTLWRGNIRINTVMLWCLGFIVTFVNGGITGIFLGNVSVDVPLSDTYFVIAHFHMVMGIAPLMVIMGAVYHWFPLVAGKMLHEGLGKWHFWITFLGAYSIYFPMHYLGFIGVPRRYFEMYDSPYMTSAVGMNEFISIAAFIVGAAQFILVFNIIKTLKTGKKAEQNPWKANSLEWYTSTVPPEHGNFGERLPVVHRWPYDFSVPGAKDDFIPQTTAPSEVIHTE

SEQ ID NO: 103620 - protein, 198 aa, Unknown
  Bacterial polypetide isolated from the Sargasso Sea
LFLGNVTVDVPLSDTYFVVAHFHMVMGIAPILVIFGAIYHWYPLITGRMMNETLGQIHFWITFIGSYAIYFPMHYQGFVGVPRRYFEIYDSPYIDTSTLLLNKFITIAVLIVGAAQLLFLYNLIVSARLGKKSEKNPWKANSLEWQTPQMPPEHGNWGKELPKVYRWPYDFGVPGAKEDYIPQNQPPSEIIGEKVEKT

SEQ ID NO: 103621 - protein, 116 aa, Unknown
  Bacterial polypetide isolated from the Sargasso Sea
AVLAHQAAEKGKGKEAAKLLAFTILGALTFLMIKSYEWTIEIMAGYTITANTFWSFYYTAAGLHALHVIAGAIIMGFIAVDAYRGRELHRVEIIGIYWHFVDVVWIFLFPLLYIAK

SEQ ID NO: 103622 - protein, 114 aa, Unknown
  Bacterial polypetide isolated from the Sargasso Sea
MSTLTQDQIAAHDDHHHGAPKGIMRWLLTTNHKDIGTLYLWFSFIMFLTGGAMAMVIRAELFQPGLQLVEPNFFNQMTTVHGLIMVFGAVMPAFTGLANWLIPIMIGAPDMALP

SEQ ID NO: 103623 - protein, 208 aa, Unknown
  Bacterial polypetide isolated from the Sargasso Sea
MLWALGFLVSFLIGGVTGIYLGASALDVYFHDSYFVIAHFHYTFFPITIIGMFAAITFWFPKMFGRMMDETLNKIHFWGTFIPFNGLFLPLFLVGMAGQHRRIADFTQYPDLASPDLQSIRIFATVSLVILLLFQFVFIYNFFNSMFKGKKAPMNPWRATTLEWTVPSPPPHGNFAELPTVYRGPYEYSVPGHEEDFWPQHLPPKTTS

SEQ ID NO: 103624 - protein, 150 aa, Unknown
  Bacterial polypetide isolated from the Sargasso Sea
MVPPAESGASATDYDYHGHKHPYHLVDPSPWPFIGSISGLVMAVGAVLYMHEQIAWVLILGTLGVMGTMAGWFWEVIKEAEFRGYHNPVVQVGMRYGMALFIASEVMFFVCWFWAYFNAALFPSEQIEGTWPPPGVQTFDTWDLPFLNTL

SEQ ID NO: 103625 - protein, 266 aa, Unknown
  Bacterial polypetide isolated from the Sargasso Sea
GLSFFVWAHHMYVSGMNPWFGFFFATTTLIIAVPTAMKVYNWILTLWRGNIRINTVMLWCLGFIVTFVNGGITGIFLGNVSVDVPLSDTYFVIAHFHMVMGIAPLMVIMGAVYHWFPLVAGKMLHEGLGKWHFWITFLGAYSIYFPMHYLGFIGVPRRYFEMYDSPYMTSAVGMNEFISIAAFIVGAAQFILVFNIIKTLKTGKKAEQNPWKANSLEWYTSTVPPEHGNFGERLPVVHRWPYDFSVPGAKDDFIPQTTAPSEVIHT

SEQ ID NO: 103626 - protein, 162 aa, Unknown
  Bacterial polypetide isolated from the Sargasso Sea
LYSQDTILKADVTIKAIGYQWYWGYEYPDENIIFDSYMIEDKDLLPGQPRLLAVDNEVIVPVNKVVKVLITANDVLHAWALPAFGVKRDAMPGRVNETWFKADRVGTFYGQCSELCGIKHAFMPITVKVVTDEEYQEWLDEAKIKFAKEEITNQNNNLIASK

SEQ ID NO: 103627 - protein, 145 aa, Unknown
  Bacterial polypetide isolated from the Sargasso Sea
HPEWAEAASHTQTWIGAVNTFVLLTSSFTAVLAHQAAEKGKGKEAAKLLAFTILGALTFLMIKSYEWTIEIMAGYTITANTFWSFYYTAAGLHALHVIAGAIIMGFIAVDAYRGRELHRVEIIGIYWHFVDVVWIFLFPLLYIAK

SEQ ID NO: 103628 - protein, 293 aa, Unknown
  Bacterial polypetide isolated from the Sargasso Sea
QFTQEKIYFGYRMMVWAIVAIGALSFFVWAHHMYVSGMNPWFGFFFATTTLIIAVPTAMKVYNWILTLWRGNIRINTVMLWCLGFIVTFVNGGITGIFLGNVSVDVPLSDTYFVIAHFHMVMGIAPLMVIMGAVYHWFPLVSGRFLDEKLGKWHFWATFLGAYSIYFPMHYLGFIGVPRRYFEMYDSPYMTSATGMNEFISLAAFIVGAAQFILIYNIIKTLKIGKTAGKNPWKANSLEWHTSTVPPEHGNFGDRLPVVHRWPYDFSVPGAKDDFIPQTTPPSEVAHTEVEKT

SEQ ID NO: 103629 - protein, 126 aa, Unknown
  Bacterial polypetide isolated from the Sargasso Sea
MAMAVTSGYKKERKKTAFLILLTALGGVAFVGMQMFEWSKLIFEEGIRPWGNPFGAAQFGGFFFMITGFHGLHVSIGVVYLTIVAKRVWEGRYDRLNDYQMVEVAGLYWHFVDLVWIFIFAFFYLW

SEQ ID NO: 103630 - protein, 247 aa, Unknown
  Bacterial polypetide isolated from the Sargasso Sea
MKKFLYIFLSYFVTSKVFANQPKDWQLGFQEAASSTMRDIVNFHDKLLLPIIIAISVFVLFLMVYACVRFRASANPVPSRRTHNVAVEVLWTLIPCLILIVMAVPSFKILYSQDAIPKADVTVKAIGYQWYWGYEYPDENIIFDSYMIEDKDLKTNQPRLLAVDNEVVVPVNKVVKVLITANDVLHAWALPSFGVKRDAVPGRINETWFKAEKVGTYYGQCSELCGIKHAFMPITVRVVSEENIKNG

SEQ ID NO: 103631 - protein, 262 aa, Unknown
  Bacterial polypetide isolated from the Sargasso Sea
RIKLPKEEMSYYEDLAEMYVGTDVSPDFYGWVFPKYDHVAVGTGTMQKNQSLIKGLQEGVRNRAKKRLVNGEVIKVEAHPIPEHPRPRRVVGRMALVGDAAGYVTKSSGEGIYFAAKSGRMCAEEIVEASKNGQIIPSEKDLKNYLKKWDKKYGTTYKVLEILQNIFYRNDSAREAFVEMCDDMDVQRLTFDSYLYKRVVAMKPLQQLKITMLTLGSILRGKALAPLKYKPVDSAVRENKEVEKMLENYSIKGGIKVKSSKV

SEQ ID NO: 103632 - protein, 111 aa, Unknown
  Bacterial polypetide isolated from the Sargasso Sea
MSSGEKKHDYHLVDPSPWPIFTSFACLVLAIGAVYYFHTKALWLLLIGTALLIYGSFMWFRDVVDEAEKQGHHTMVVQITHRYGMTLFIASEVMFFVAWFWAFFNASLFPT

SEQ ID NO: 103633 - protein, 240 aa, Unknown
  Bacterial polypetide isolated from the Sargasso Sea
PSRWPIVGTLALFVAFIGGGMVLNGYIGSGQYVLALGILAIIYLFYGWFKDVIDESIAGKYNEQVDISFRWGMAWFIFSEVMFFAAFFGALFYTRVLSIPWLGLEESVSNQFLWPDFQAVWPLLTTPDMTIAGLESKYIAIKEVIPAWDIPAWNTAILLTSGATVTFAHWALKKGNRSALCWWLAATVLLGIIFVYLQVAEYGHAYHELDLTLKSGVYGSTFFMLTGFHGFHVTMGATML

SEQ ID NO: 103634 - protein, 307 aa, Unknown
  Bacterial polypetide isolated from the Sargasso Sea
FIFAATGAAVGLGNIWRFPYLMGSNGGSAFLVLYIIFLCILGLPILMSEILIGRHARQNSIDAMSSLAVAHRHSPSWKWVSIWGALALIIVLSFYSVVSGWSIAYLWHSISIGFQHTTQMQATHTWQKLISNPWQLLLWHTLFMSLTIGVIILGVEKGLERATKFMMPALYLILFILVAVAAHVGHFSKAWHYLFQFDTRAITVKTAVSALGQAFFTLAIGAGAMLTYGAYAPQKTSIPFTVSVVAVFDVLVALLSGLAIFPLVFAFHLPISSGPNLMFVTLPLAFSHVALGNVIAMLFFLLLLFAA

SEQ ID NO: 103635 - protein, 281 aa, Unknown
  Bacterial polypetide isolated from the Sargasso Sea
MAVVEQEQAPLELESGEDQITERPLGAFTRPGGGGGWKSWLFTVDHKKIGIMYGAAGLLFFIIGGIYALFMRLQLARPGNSILSAETYNQVFTMHGVVMIFLAAIPLGAAFSNYLIPLQIGARDVAFPRLNAFSFWVFLGGGLFLLTSMFIGGWWENAPDGGWFAYSPNTGVLFSPSKGIDFFAIGLQITGIASLVGAINLIVTVLNMRSPGMTLMKMPVLTWMLFIVQMLLLFAMPVISVALFLLTFDRLFGANFFNVAQGADPLLWQHLFWIFGHPEVY

SEQ ID NO: 103636 - protein, 151 aa, Unknown
  Bacterial polypetide isolated from the Sargasso Sea
MSSVIENHHEDHHHGPAKGITRWLYTTNHKDIGTLYLWFSFAMFLIGGAMAMIIRAELFSPGMQIVEPEFYNQMITLHGLIMIFGGVMPAFVGLANWLVPMMIGAPDMALPRMNNLSFWILPFAFFILLSSLFMEGGAPNFGWTFYAPLST

SEQ ID NO: 103637 - protein, 219 aa, Unknown
  Bacterial polypetide isolated from the Sargasso Sea
IAISVFVLFLMVYACIRFRASANPVPSKRTHNVAVEVLWTLIPCLILIVMAVPSFKILYKQDAIPKADITVKAIGYQWYWGYEYPDENIFFDSYMIETKDLKENEPRLLAVDNELVVPVNKVVKVMITANDVLHAWALPSFGVKRDAVPGRINETWFKAEKVGTYYGQCSELCGIKHAFMPIEVRVVTEEEYQEWLLDAKVKFAKEINEEDQFKKLVSK

SEQ ID NO: 103638 - protein, 146 aa, Unknown
  Bacterial polypetide isolated from the Sargasso Sea
GSVGETSVIAIAIAAVILLGTGVASYRIILGTILGMILMSSILNIVGSDTNPMFYVPWYWHFVIGSFAFGLVFMATEPVSGSGTNLGRWIYGALIGVTVILIRVINPAFPEGMMLAILFANLFAPVIDHMVVSNNIARRKRALSYE

SEQ ID NO: 103639 - protein, 100 aa, Unknown
  Bacterial polypetide isolated from the Sargasso Sea
NYLIPFYVGARDMAFPRLNAVAFWLIPPSGLMLVASYFVEGAAQAGWTAYPPLSITTPQSGQIIWILSVLLLGGSSIFGGINFIATIIKLRRPGLKLSNC

SEQ ID NO: 103640 - protein, 286 aa, Unknown
  Bacterial polypetide isolated from the Sargasso Sea
YIVALPAFGIVSDLISVHARKNIFGYRMMVWAIVGIGGLSFFVWAHHMYVSGMNPWFGFFFATTTLIIAVPTAMKVYNWILTLWRGNIRINTVMLWCLGFIVTFVNGGITGIFLGNVSVDVPLSDTYFVIAHFHMVMGIAPLMVIMGAVYHWFPLVAGKMLHEGLGKWHFWITFLGAYSIYFPMHYLGFIGVPRRYFEMYDSPYMTSAVGMNEFISIAAFIVGAAQFILVFNIIKTLKTGKKAEQNPWKANSLEWYTSTVPPEHGNFGERLPVVHRWPYDFSVPRS

SEQ ID NO: 103641 - protein, 149 aa, Unknown
  Bacterial polypetide isolated from the Sargasso Sea
MEIIRSLKDIQPLKESVITVGNYDGIHLGHQDIITHIVEFGKKHNIPSCVITFDPNPYYVLRNENKPINIQSVESKLNSLEKMGVDKVLVVPFTEQFSKVTAAEFAINIIKDIFNPKLIAVGTNHHFGFNKEGDIEFITDFCDKNNIDL

SEQ ID NO: 103642 - protein, 126 aa, Unknown
  Bacterial polypetide isolated from the Sargasso Sea
MLQSKLMANKKIEIIWDSVVEEVIGDDDPKNVKGLKIKNVKTNKIDELKIDGLFIAIGHDPATQLFKDQLDMDKEGYLTTKSDSTETNIPGVFAAGDVKDKIFRQAVTAAGMGCMAALEAEKFLSH

SEQ ID NO: 103643 - protein, 235 aa, Unknown
  Bacterial polypetide isolated from the Sargasso Sea
DIISFHSYILMPIITGISFLVLGLLLYIMFRFNSSRNQVASTTTHNTTIEILWTVIPVILLIIIAIPSFRLLYVSETIPKADITIKAIGNQWYWTYEYPDFDDISFDANMLADHELSDPKLRLLETDTQIVVPVDKVVKLQLTSADVLHAWTIPAFGVKMDAVPGRLNETWFKANKVGIYYGQCSELCGPKHAFMPINVKVVSNKEFEDWIEFAKSEYASSEINYTDDTFKIAKK

SEQ ID NO: 103644 - protein, 224 aa, Unknown
  Bacterial polypetide isolated from the Sargasso Sea
WGRTSWSLSGLYYWCPKFTGKFLNEKIGYLHFAIVLIGFNLTFFPMHWLGLDGMPRRIATYPESMGWEVSNLVASLGSFILGFGVLVFLYNVFYSSKGPKNAGNDPWDGRTLEWSIPSPPPHYNFEVIPEVKYRDDFWYQKYPELANNSHGGGSGAEENHGSHLEGHEEPHMPDPSYYPLFLGLGMTIMVGGFLPFTGHWIVCGVGLFIFTWSFLGWCYEPVND

SEQ ID NO: 103645 - protein, 222 aa, Unknown
  Bacterial polypetide isolated from the Sargasso Sea
PIIIAISVFVLFLMVYACIRFRASANPVPSKRTHNVAVEVLWTLIPCLILIVMAVPSFKILYKQDAIPKADITVKAIGYQWYWGYEYPDENIFFDSYMIETKDLKENEPRLLAVDNELVVPVNKVVKVMITANDVLHAWALPSFGVKRDAVPGRINETWFKAEKVGTYYGQCSELCGIKHAFMPIEVRVVTEEEYQEWLLDAKVKFAKEINEEDQFKKLASK

SEQ ID NO: 103646 - protein, 165 aa, Unknown
  Bacterial polypetide isolated from the Sargasso Sea
MEGEGVGQQDATSPTPSTTAVSQGREGKVWPSRGRGVAQARGPGLRRTGRRWTTSFARSWRRASRCRGSSSSRRLRTTRSTRSRSARRWRTRSRASSRSSSSRRGSSSASSKSTRARPTRTLPITSMRSTLGCSGHTMSSRSSTRRLAKPMSLGSTPRSSWCRPR

SEQ ID NO: 103647 - protein, 71 aa, Unknown
  Bacterial polypetide isolated from the Sargasso Sea
IVTFVNGGITGIFLGNVSVDVPLSDTYFVVAHFHMVMGIAPLMVIMGAVYHWFPLVAGRMLHEGLGKWHFW

SEQ ID NO: 103648 - protein, 148 aa, Unknown
  Bacterial polypetide isolated from the Sargasso Sea
IKVIGHQWYWEYQYPEHDDISFESYMTPDEELEPGDIRLLTVDNHLVLPANKNIHVLVTAGDVLHSFAMPSLGVKKDAVPGRLNETWFNIDEPGIYRGQCSELCGTGHGYMPIVIEALNEKDFNNWIIEQKSKLALANEITTKENTIE

SEQ ID NO: 103649 - protein, 229 aa, Unknown
  Bacterial polypetide isolated from the Sargasso Sea
FHDKLLLPIIIAISVFVLFLMVYACIRFRASANPVPSKRTHNVAVEVLWTLIPCLILIVMAVPSFKILYKQDAIPKADITVKAIGYQWYWGYEYPDENIFFDSYMIETKDLKENEPRLLAVDNELVVPVNKVVKVMITANDVLHAWALPSFGVKRDAVPGRINETWFKAEKVGTYYGQCSELCGIKHAFMPIEVKVVTEEEYQEWLLDAKVKFAKEINEEDQFKKLASK

SEQ ID NO: 103650 - protein, 145 aa, Unknown
  Bacterial polypetide isolated from the Sargasso Sea
FASKVKLIHRRNALRAEKMLQEKLKRNNKIEIIWDSVVEDVIGQDNPKEVNAIKIKNVKNNKITELKVNGLFIAIGHDPATSLFKNQLKMDKEGYLITKADSTETNIPGVFAAGDVKDKIFRQAVTAAGMGCMAALEAEKHLSHL

SEQ ID NO: 103651 - protein, 150 aa, Unknown
  Bacterial polypetide isolated from the Sargasso Sea
MSSGEKKHDYHLVDPSPWPIFTSFACLVLALGAVYYFHTKALWLLLIGTALLIYGSFMWFRDVVDEAEKQGHHTMVVQITHRYGMTLFIASEVMFFVAWFWAFFNASLFPTEAIGKIWPPADIKTFDPWDIPLINTLILLLSGTTVTWAH

SEQ ID NO: 103652 - protein, 250 aa, Unknown
  Bacterial polypetide isolated from the Sargasso Sea
FLIETENNFPTSCGLASSSSGMAALTLALCAAVSQSSSLNELEKKGYSRKKISDLARKGSGSACRSLWGGFVCWMKMNSHIKQYAAQIEESSNWPIEHCVLILSDEVKKVSSTLGHSSSWTSPLFKPRLEIIPYRIEKMKAAIKEKNLTKLGELMEEDCLEMHAVAMSSSPPLFYFQKETSAVLAWLRKKRKENGLRAYFTLDAGPNIHLIGEKESLEKIKKDVALFNPKIRVLKSQLGKGPSLKAYPSS

SEQ ID NO: 103653 - protein, 258 aa, Unknown
  Bacterial polypetide isolated from the Sargasso Sea
IGGLSGVSHAVALSDYQQQDTYYIIAHLHYVLFGGAILGIFSGIYFWFPKVTGKLLSEKLGKLHFWITFVGLNLTFFPMHYLGMNGMPRRIYTYATEFGWDNLNALSSFGYIVLFVSMLIFVYNIIKSYKSGEEAGHDPWDAPGLEWTITSPPPVYNFSELPVVEGRDPYWIVKRRAVAEGKEIPGPQPLVDPSTVHLPDPSYWPIFTSVALLILAIGFMIEIPVWFVKYPISVVGGLLVFVGVLAWSNEPPTKEKDH

SEQ ID NO: 103654 - protein, 268 aa, Unknown
  Bacterial polypetide isolated from the Sargasso Sea
YTLLLYGPANLLANEPKDWQLGFQKSASKSMDDIVWFHDYMLVPIITAITAFVLFLLLYVCIRYRASKNQVPSTTSHNTLIEVIWTLVPCLILIVMAVPSFKVLYSQDEIPKADVTIKAIGYQWYWGYEYPDENIIFDSYMVDEKDLKENQPRLLAVDNAVYVPVNKVVKVMITANDVLHAWALPSFGVKRDAIPGRINETWFKADRTGTFYGQCSELCGIKHAFMPITVNVVSENEYNKWLEEAKVKFAKEEINNKIKVAKKIEEIK

SEQ ID NO: 103655 - protein, 194 aa, Unknown
  Bacterial polypetide isolated from the Sargasso Sea
MSELAGHHEEHHDHNPSGVMRWLTTTNHKDIGTLYLFFALIMFFIGGAMAMIIRLELFEPGLQFVDPQFFNSMTTMHALIMIFGAVMPAWTGFANWLIPIMIGAPDMALPRLNNWSFWILPFAFTLLLGTLFLPGGAPAGGWTMYPPLVLQTGDAFPFLIFAVHFMGASSIAGAINVIVTVFNMRPPGMTLMKL

SEQ ID NO: 103656 - protein, 172 aa, Unknown
  Bacterial polypetide isolated from the Sargasso Sea
FFLKDKTVAVVGGGNAAVEEAMFLTKFATKVQLIHRRNSLRAEKLLQKKLIENKKIEIIWDSVVEEVIGDDEPKNVKGLKIKNVKTDDIKELKIDGLFIAIGHDPATQLFKDQLSMDKEGYLITKPDSTETNIPGVFAAGDVKDKIFRQAVTAAGMGCMSALEAEKFLSSSN

SEQ ID NO: 103657 - protein, 188 aa, Unknown
  Bacterial polypetide isolated from the Sargasso Sea
MAHEKNHDYHILNPSLWPFLSALGAFILLFGSVLFMHGGSVFIAALGLLVVLYCMFAWWSDVVFESKDGDHTPVVQIGLRYGVIMFITSEVMFFLAWFWTFFKHALYPMEAVGGVWPPTGIETFDPWHLPLINTLILLCSGAAATWAHHAIAHENDRKGLENGLILAIGLGALFTVFQIYEYTHASFS

SEQ ID NO: 103658 - protein, 167 aa, Unknown
  Bacterial polypetide isolated from the Sargasso Sea
MAHDTHHHHKESFFTKYIFSQDHKMIGKQYLLTAIFMGAIGITLSALFRMKLGWPDTQFSILESILGSDAAPDGMLDSNWYLGLVTLHGTIMVFFVLTGGLSGTFSNLLIPLQVGARDMASGLMNMIAYWLFFLSSVLMAASLFIETGPAMAGWTVYPPLSVLKNST

SEQ ID NO: 103659 - protein, 157 aa, Unknown
  Bacterial polypetide isolated from the Sargasso Sea
MVDLVFKDSEKKHKFHLVNPSPWPIVGAFSALFLVSGAILYMHYEMIWPMLAGLFLILFTMFMWWRDIIKESTFLKVHNSITEIGLRWGMALFITSEVMFFVAFFWAFFDASLLPKTFLAEYKEVFTGTLGIGVWPPKGIETFDPLDIPYLNTLILL

SEQ ID NO: 103660 - protein, 190 aa, Unknown
  Bacterial polypetide isolated from the Sargasso Sea
MSEFSKELLVTAEFCQSQDIDVFAKHVPMDWVAEAVQQTGRASLRTRRFPAEQAVWLVLGIGLMRNRSIQQVCDTLSLAFPDAKGELPPLATSSIIKAKEKLGSEPMRYLFKTTAAQWETQCEFDEIAGLKLLSVDGTYFKTHNTEENHHFGFAQSTASFPSVLAVTLMSTRSHLLSDAAFGPVTHSEIH

SEQ ID NO: 103661 - protein, 174 aa, Unknown
  Bacterial polypetide isolated from the Sargasso Sea
CDGFFFKDKTVAVVGGGNAAVEEAMFLTKFASKVQLIHRRDSLRAEKMLQNKLMSNKKIEIIWDSVVEEVMGNDKPKNVKGLKIKNVKTNEIKELKIDGLFIAIGHDPATQLFKDQLDMDKEGYLTTKPDSTETNIPGIFAAGDVKDKVFRQAVTAAGMGCMAALEAEKHLSSK

SEQ ID NO: 103662 - protein, 96 aa, Unknown
  Bacterial polypetide isolated from the Sargasso Sea
MLGAVFLAGQIYEFTEFYHKGFELSTNIFSSTFYVLTGFHGLHVFIGVVLLLALWGIGQRQKGLTLEGGMNLEFVALYWHFVDIVWIVLFTVVYLI

SEQ ID NO: 103663 - protein, 140 aa, Unknown
  Bacterial polypetide isolated from the Sargasso Sea
GYEYPDENIIFDSYMIEEKDLQAGQPRLLAVDNVVVVPVNKVVKVLITANDVLHAWALPAFGVKRDAMPGRINETWFKAEREGTFYGQCSELCGIKHAFMPIEVRVVSDEEYQLWLDEAKIKFAKDEIFENNKLIASNKQ

SEQ ID NO: 103664 - protein, 206 aa, Unknown
  Bacterial polypetide isolated from the Sargasso Sea
IQEVTKEIAELEKLKKPEGALVASVSEKSPADKAGIKAGDIILEFDGKKVDTMRTLPKLVAQTKVGKSVTLKIWRSQKLISKKVLLGRLESSKEFKAENKVETDTSKHLDIESLKISIRNLNKEDIVERKLPKNTTGVVVTKIYEGSPLMFVGVNDIIVELQKKRVINPNQFSNLIKEIINKGDKTLYLAIYNSSNQRSYLTVKLK

SEQ ID NO: 103665 - protein, 122 aa, Unknown
  Bacterial polypetide isolated from the Sargasso Sea
MFIIVIPKWTGNMYDERLGRLHFWLSFIGVNVTFFPQHFIGLAGMPRRYPDYALQFADWNMVSSVGAFLFGFSQLLFLFIVLKTVMGGKKATGQVWEGAKGLEWSVASPAPYHTFSTPPKVD

SEQ ID NO: 103666 - protein, 139 aa, Unknown
  Bacterial polypetide isolated from the Sargasso Sea
FHYVLVPGALFGIIAGAYYWLPKWTGNMYDETLGKLHFWLTFISVNVTFFPMHFVGLAGMPRRYPDYALQFADFNALISVGAFMFGLTQLLFLFIVIKTIRSGKQAKPEVWEGAGDLGLEWTLTSPPPYHSFTVQPQVK

SEQ ID NO: 103667 - protein, 163 aa, Unknown
  Bacterial polypetide isolated from the Sargasso Sea
MVSETIPKADITIKAIGNQWYWTYEYPDFDDISFDANMLADHELSDPKLRLLETDTQIVVPVDKVVKLQLTSADVLHAWTIPAFGVKMDAVPGRLNETWFKANKEGIYYGQCSELCGPKHAFMPINVKVVSNKEFEEWIEFAKSEYASLDINYTNDTFEMAKK

SEQ ID NO: 103668 - protein, 294 aa, Unknown
  Bacterial polypetide isolated from the Sargasso Sea
ELPPLATSSIIKAKEKLGSEPMRYLFKTTAAQWETQCEFDEIAGLKLLSVDGTYFKTHNTEENHHFGFAQSTASFPSVLAVTLMSTRSHLLSDAAFGPVTHSEIHYAQQLVGSAPEHSLTLFDRGFMSAELLISWQGSGTNTYWLTPIKSKTRYRIIESFSEYDHLVEMPISPQAKQQAPYLGESWQARLILIPSPKGDIKGFITSCLCPDTYPVNDLLKVYWQRWEIERGYGELKQYQLENKPVLRSKKKDGVYQELWGILTTYNIVRLEMAAMAVQHQVEPQRISFINALFL

SEQ ID NO: 103669 - protein, 126 aa, Unknown
  Bacterial polypetide isolated from the Sargasso Sea
RPSRALLKLQRLFDRHAFWARGRSFGQLRRLLAGSDAVVSLWRGKRLVGFGRASSDGFSRAVLWDIVVAGDLQGHGLGRRVIEELLHAPPVVGVERVYLMTTNSAGFYHQLGFQDASPQQLMVLRR

SEQ ID NO: 103670 - protein, 248 aa, Unknown
  Bacterial polypetide isolated from the Sargasso Sea
MNPWFGFFFATTTLIIAVPTAIKVYNWVLTLWRGNIKLTLPMLFSIAFIITFVNGGLTGLFLGNVAVDVPLSDTYFVVAHFHMVMGIAPVLVILGSVYHWFPLITGRFLNERLGRIHFWVTFIGSYSIYFPMHYLGFMGVTRRYFEVFEGEAFTYSITGINQFITIAALITGAVQFLFIYNIIVSSKFGKKAGKNPWKACSLEWRTKDVPPTHGNFDKELPVVYRWAYDYSVPGADEDYITQDTPPSA

SEQ ID NO: 103671 - protein, 141 aa, Unknown
  Bacterial polypetide isolated from the Sargasso Sea
MHAVASKGGKEAEAAVAAITAAAAAKTAEAAEQAVDDRSLAQLMLDQIEFANVIVVSKVPLFLSQHSDGDVDGEKKLGMIEGLLQKLNPKARVIAPRIENYGDLEVAATLMNTGMFNMQEAQMSAGWIQELAQGHHTPETE

SEQ ID NO: 103672 - protein, 232 aa, Unknown
  Bacterial polypetide isolated from the Sargasso Sea
YMLLPIITAITAFVLFLVIYACIKFRASNNKVASQTSHNTIIEVIWTLVPCFILIVMAVPSFKVLYSQDKIPPADVTVKAIGYQWYWGYEYPDENIIFDSYMIEEKDLKANQPRLLSVDNEVVVPVNKNIKVLITANDVLHAWALPSFGVKRDAVPGRINETWFRADRTGTFYGQCSELCGIKHAFMPITVKVVTEEEYKKWLIEAKQKFAKEVIEKDFKIAKKIAKEKDLK

SEQ ID NO: 103673 - protein, 147 aa, Unknown
  Bacterial polypetide isolated from the Sargasso Sea
MEEAHVETSRYNRKDWSHWIDDDGDCQNTRAEVLISQSDVRVEFATSRQCRVVKGYWIGGLTGIVLSDASDVDIDHVIPLSYAHRHGGFSWTPSKKEQFANDPLNLIPAYDLENRRKSDKGPSEYLPSDKTLACAYLERWQAIANKV

SEQ ID NO: 103674 - protein, 239 aa, Unknown
  Bacterial polypetide isolated from the Sargasso Sea
MKKIFYIFLGIFTSQNAFANQPVDWQLGFQKAASESMREIVAFHDKLLLPIIIAISVFVLFLMLYACVRFRASANPNPSKRTHNVTVEVLWTLIPCLILIIMAVPSFKILYKQDTIPKADLTIKAIGYQWYWGYEYPDENIIFDSYMIEEKDLKANQPRLLAVDNEVVVPVDKVVKVLITANDVLHAWALPSFGVKRDAVPGRINETWFKAEKVGTYYGQCSELCGIKHAFMPITVRVV

SEQ ID NO: 103675 - protein, 217 aa, Unknown
  Bacterial polypetide isolated from the Sargasso Sea
MIKKIAYTLFLTWPTALLANEPKDWQLGFQKSASKSMDDIVWFHDYMLVPIITAITAFVLFLLLYVCVRYRASKNQVPSTTSHNTLIEVIWTLVPCLILIVMAVPSFKVLYSQDEIPKADVTIKAIGYQWYWGYEYPDENIIFDSYMIDEKDLKENQPRLLAVDNAVYVPVNKVVKVMITANDVLHAWALPSFGVKRDAIPGRINETWFKADRTGTF

SEQ ID NO: 103676 - protein, 49 aa, Unknown
  Bacterial polypetide isolated from the Sargasso Sea
LAGMPRRYADYPDAFAGWNYISSIGSYISVIGLVVFLIKRISKVYKKYY

SEQ ID NO: 103677 - protein, 144 aa, Unknown
  Bacterial polypetide isolated from the Sargasso Sea
MVSTAADLHDKHDEHHGPAKGIGRWLFTTNHKDIGTLYLIFSLVMFFIGGAMALVIRSELAQPGLQFVHPEFFNSMTTMHALIMVFGAVMPAFVGLANWMIPMQIGAPDMALPRMNNWSFWILPVAFGILLSTLFLPGGAPASG

SEQ ID NO: 103678 - protein, 289 aa, Unknown
  Bacterial polypetide isolated from the Sargasso Sea
MWIGAVYFVPIYAVTFAVGILWEILFAVVRKHEINEGLFVSSILFALSCPPDLPLWQAAMGITFGIVIGKEVFGGTGKNFLNPALTGRAFLYFAYPSQLSGDKVWIAGLSDTGIIPEGFSGATPLGYAAEGGLQGLTDNFSWFDAFLGNIPGSVGETSVIAIGIAAVILLATGVASYRIILGTFLGMIVMTSILNIVGSDTNPMFQVPWYWHFVIGSFAFGLVFMATEPVSGSGTNAGRWIYGALIGVTVVLIRVINPAFPEGMMLAILFANLFAPVIDHMVVSNNIAK

SEQ ID NO: 103679 - protein, 305 aa, Unknown
  Bacterial polypetide isolated from the Sargasso Sea
VHVYWFDHGGIGGYFAYAFRMQLAWPGEEVPFYGLVDAAKYNMLVTNHGTIMIFWVAMPVLIAAFGNWMIPLMIGCDDMVFPRLNRLSYQVFLVSALVLILSFFVEGGGFGGAWTSYPPLSAAAEYNLTNWGASLWLLAVFLEIVAFLLGGINFITTTMNARAPGMGMMDIPIVIWMINIAVILFMASVGPLVAGAVMLFFDQRLGTSFFLPSGGGDPLLWEHLFWFFGHPEVYVVLLPTMGIVAEIITVFSRKKLFGYRTILYTAFGTGGLSFIVWAHHQFVAGIDPRMANVFVVTTILISIPI

SEQ ID NO: 103680 - protein, 327 aa, Unknown
  Bacterial polypetide isolated from the Sargasso Sea
AALEGHAECVRLLCGAGAWVDLARNNGATPLLRAASKGHAECVRLLCGAGASVDLADSEGATPLLMAASRGHAECVRLLCGAGASADLDSGRSGGVTPLLIAASRGHAESVQALCDAGASVDLADHNGFTPLRMAASKGHADCVQVLCGAGASVDRARSDGKTPLLAAAHHGHAECVQVLSSYGAARVSDAMQTNAEAVVPERNHVQVLAWLQSSRAWTALHHVEVLTAARARELLRGGADLHAGSPSPLERARAVEGEASAIIHRAAVWSPEAHDLFPPAARARAVRLLQLGYLLAWSGHDMLRRRDRLSMRGSASSCRMPSCEAR

SEQ ID NO: 103681 - protein, 121 aa, Unknown
  Bacterial polypetide isolated from the Sargasso Sea
KDNQPRLLAVDNAVYVPVNKVVKVMITANDVLHAWALPSFGVKRDAIPGRINETWFKADRTGTFYGQCSELCGIKHAFMPITVHVVSEDDYNKWLEEAKVKFAKEEINNNIKIAKKIKEIK

SEQ ID NO: 103682 - protein, 161 aa, Unknown
  Bacterial polypetide isolated from the Sargasso Sea
GGGNAAVEEAMFLTKFASKVYLIHRRNELRAEKMLQSKLKSNKKIEIIWDTVVEDVIGTKEPKTVNALKIKNVKDNKVKDLKVDGLFIAIGHDPATSLFKDQLKMDKEGYLITKPDSTETNIPGVFAAGDVKDKIFRQAVTAAGMGCMSALEAEKYLSESN

SEQ ID NO: 103683 - protein, 134 aa, Unknown
  Bacterial polypetide isolated from the Sargasso Sea
DLQEGDLRLLTVDNPLVIPANKNIQILITAGDVLHSWAVPSMGLKTDAVPGRLNETWVNVKEPGIYRGQCSEICGTGHGFMPVVVKVLPESEFIAWANEAKNNYAINEDIKTNETNEEIIISQNNLIKLEENNL

SEQ ID NO: 103684 - protein, 83 aa, Unknown
  Bacterial polypetide isolated from the Sargasso Sea
GLAGMPRRYADYPDAFAGWNYISSIGSYISIIGLAVFLLNLLYAFMKKKKAEQNPWGEGATTLEWTVSSPPPFHTFEELPKIK

SEQ ID NO: 103685 - protein, 211 aa, Unknown
  Bacterial polypetide isolated from the Sargasso Sea
FLMLYAMVRFRASRNPNPSKRTHNVLIEVIWTLVPCLILIVMAVPSFKVLYSQDTIPKADVTIKAIGYQWYWGYEYPDENIIFDSYMIEEKDLQKGQPRLLAVDNVVVVPVNKVVKVLITANDVLHAWALPAFGVKRDAMPGRVNETWFKAEREGTFYGQCSELCGIKHAFMPIEVRVVSEEDYQLWLEEAKIKFAKEDILEKNKLIASNK

SEQ ID NO: 103686 - protein, 297 aa, Unknown
  Bacterial polypetide isolated from the Sargasso Sea
MSSIAEQPNANEAHHAHHPAKGFKRWLYTTNHKDIGSLYLIFSLTMFLIGGAMAMVIRAELFQPGLQLVDPHFFNQMTTVHGLIMVFGAVMPAFTGLANWMIPLMIGAPDMALPRMNNWSFWILPFAFLILLASLFMPGGGPAFGWTFYAPLSTTYSNDNTALFVFAVHIMGISSIMGAINVVVTIVNLRAPGMTWMKLPLFVWTWLITAFLLIAVMPVLAGAVTMVLTDKYFATSFFDAAGGGDPVMFQHIFWFFGHPEVYIMILPAFGIISTIVPTFSRKKLFGYASMVYATSSI

SEQ ID NO: 103687 - protein, 201 aa, Unknown
  Bacterial polypetide isolated from the Sargasso Sea
AIRFRKSVNPNPSKRTHNPLLETLWTAIPVIILIFMAVPSFKLLYEQDVIPEAEMTIKVIGHQWYWEYQYPEHDDLSFESYLVPDDELKEGEPRLLTVDNRLVLPVNKNIHVLITAGDVLHSFAMPSLGVKRDAVPGRLNETWMKIDRPGIYRGQCSEICGTGHGYMPVVIEALSENDFAAWVNEAKNEFAELNSRTIASK

SEQ ID NO: 103688 - protein, 80 aa, Unknown
  Bacterial polypetide isolated from the Sargasso Sea
MSYGETVSHDHHDHKPGFIRRWLFSTNHKDIGTLYIIFALVAGLIGGFFSLLMRAELAAPGLDIVADGQAWNVIITAHGL

SEQ ID NO: 103689 - protein, 195 aa, Unknown
  Bacterial polypetide isolated from the Sargasso Sea
MKKILFIFSSIFIFQNAFANQPVDWQLGFQKAASESMRDIVAFHDNLLLPIIIAISVFVLFLMLYACVKFRATANPNPSKRTHNVTVEVLWTLIPCLILIVMAVPSFKILYKQDTIPKADLTIKAIGYQWYWGYEYPDENLEFDSYMIEEKDLKANQPRLLAVDNEVVVPVGKVVKILITANDVLHAWALPSFGV

SEQ ID NO: 103690 - protein, 154 aa, Unknown
  Bacterial polypetide isolated from the Sargasso Sea
MSTLTQDQIAAHDDHHHGAPKGIMRWLLTTNHKDIGTLYLWFSFIMFLTGGAMAMVIRAELFQPGLQLVEPNFFNQMTTVHGLIMVFGAVMPAFTGLANWLIPMMIGAPDMALPRMNNWSFWILPFAFAILLSSLFMEGGGPNFGWTFYAPLST

SEQ ID NO: 103691 - protein, 196 aa, Unknown
  Bacterial polypetide isolated from the Sargasso Sea
MIWDDIGFLLKKNRYNENSIIAEIFTKDHGKVAGIIFGGTSKKVKNYLQIGNKIHVNYNTKTENKMGYFKIEIQDATSPYYFDNRQKLSCITSTMDLIKLLTANSQQNQSIYNLIEEFYILLKAKHWIKNYIFWELELFKVLGYDLEFENIVEKKMIGNQFQYISKSTKEKKIIPNFLVEKNDKLEDLSTLLSGLK

SEQ ID NO: 103692 - protein, 127 aa, Unknown
  Bacterial polypetide isolated from the Sargasso Sea
SKLMANKKIEIIWDSVVEEVIGDNEPKNVKGLKIKNVKTNKIQELKIDGLFIAIGHDPATELFKNQLDMDKEGYLTTKPDSTETNIPGVFAAGDVKDKIFRQAVTAAGMGCMAALEAEKHLSHSQSK

SEQ ID NO: 103693 - protein, 194 aa, Unknown
  Bacterial polypetide isolated from the Sargasso Sea
IILGDSALDINVHDTYFVVAHFHLVMGISALYGLFAGVYHWFPRLYGRMMNKSLGYIHFWITAIGAYGIFFPMHFVGMAGLPRRYYTNTAFPYFDDLADINVLITVFALIAGLAQLVFLFNFFYSMYYGKKAEQNPWKSNTLEWTAPVEHMHGNWPGKIPQVFRWAYDYSKPGKEEDFVPQSVPIAKGEKITEH

SEQ ID NO: 103694 - protein, 125 aa, Unknown
  Bacterial polypetide isolated from the Sargasso Sea
MSTNNPKGHDYHLVDPSPWPLLASIGALVLCFGAVIYFRTDNAWTMIIGLLAVTYVAFMWFRDIIIEGEKDGHHTTVVQLGLRYGMTLFIASEVMFFVAWFWAYFNASLYPTEQIGSTWPPLDIE

SEQ ID NO: 103695 - protein, 163 aa, Unknown
  Bacterial polypetide isolated from the Sargasso Sea
MVSETIPKADITIKAIGNQWYWTYEYPDFDDISFDANMLADHELSDPKLRLLETDTQIVVPVDKVVKLQLTSADVLHAWTIPAFGVKMDAVPGRLNETWFKANKEGIYYGQCSELCGPKHAFMPINVKVVSNKEFEEWIEFAKSEYASLEINYSDDTFEMAKK

SEQ ID NO: 103696 - protein, 237 aa, Unknown
  Bacterial polypetide isolated from the Sargasso Sea
MTKIIEPDKQTNIFRRPSSEYGIWSWLTTVDHKKIGIMYGYAAFFFLLIGGLEALVLRIQLAQPDNNFLSAAEYNAMFTMHGTTMVFLAIMPISAAFFNYLLPLQIGARDVAFPRLNALSFWIWVFGGLFLYSTFVFGTAGAPEGGYLAEEVGWLGNAPNGGWFGYQPNAGFKYSPGTAMDYWAIGLQILGISSLVSAFNFIVTILNMRTQGMRLMRMPVFTWMTFAVAFSLAFFMP

SEQ ID NO: 103697 - protein, 171 aa, Unknown
  Bacterial polypetide isolated from the Sargasso Sea
MTKIIEPSKQSSIFRRPSSETGIWSWITTVDHKRIGIMYGYAAFFFLLIGGLEALILRIQLSQPDNNFLTAAEYNAMFTMHGTTMIFLAIMPISAAFFNYLLPLQIGARDVAFPRLNALSFWIFIFGGAFLYSTFIFGTAGAPEGGYLAEEVGWLGSAPNGGWFGYQPNAG

SEQ ID NO: 103698 - protein, 270 aa, Unknown
  Bacterial polypetide isolated from the Sargasso Sea
SFFVWAHHMYVSGMNPWFGFFFATTTLIIAVPTAIKVYNWILTLWRGNIQLSLPMLFSLGFIVTFLNGGLTGLFLGNVTVDVPLSDTYFVVAHFHMVMGIAPILVIFGAIYHWYPLITGRMMDETLGKIHFWITFIGSYAIYFPMHYQGFVGVPRRYFEIYDSPYIDTSTLLLNKFITIAVLIVGAAQLLFLYNLITSARLGKKSEKNPWKANSLEWQTPQMPPEHGNWGKELPKVYRWPYDFSVPGAKEDYIPQNQPPSEIVGAKVEKT

SEQ ID NO: 103699 - protein, 192 aa, Unknown
  Bacterial polypetide isolated from the Sargasso Sea
MAHARPIATTRSATGIPTPRLAVWWILASEVVIFGGLLGAYLMHRIGHPEWAEAASHTQTWIGAVNTFVLLTSSFTAVLAHQAAEKGKGKEAAKLLAFTILGALTFLVIKSYEWTIEIMAGYTITANTFWSFYYTAAGLHALHVIAGAIIMGFIAVDAYRGRELHRVEIIGIYWHFVDVVWIFLFPLLYIAK

SEQ ID NO: 103700 - protein, 126 aa, Unknown
  Bacterial polypetide isolated from the Sargasso Sea
FSKLKNNKKIEIIWDTVVEDVVGTKEPKTVNALKIKNVKDNRVKNLKVDGLFIAIGHDPATSLFKDQLKMDKEGYLITKPDSTATNVPGVFAAGDVKDKIFRQAVTAAGMGCMSALEAEKYLSETN

SEQ ID NO: 103701 - protein, 133 aa, Unknown
  Bacterial polypetide isolated from the Sargasso Sea
MPVFLWLFLYVNILNASDDSFCDPENLEIVTANKVLLYKVEVADTVYRRQKGLMNRKHLSSNRGMLFIFDRLHYAKMWMKNTSIVLDIIFVNELGIITKIVREAEPFSLEIHSSNRPVKFVLEVPSFGKIQIL

SEQ ID NO: 103702 - protein, 117 aa, Unknown
  Bacterial polypetide isolated from the Sargasso Sea
LPKWTGHMYDETLAKLHFWMSFIGMNLAFFPMHFVGLAGMPRRIPDYNMMFANFNMISSIGAFMFGATQLLFLFIVIKCIRGGKPAPAKPWDGAEGLEWTVPSPAPYHTFSTPPEVK

SEQ ID NO: 103703 - protein, 46 aa, Unknown
  Bacterial polypetide isolated from the Sargasso Sea
MADITTDQVGSHDHHPTGWRRYLYSTNHKDIGTLYLIFAIIAGLVG

SEQ ID NO: 103704 - protein, 195 aa, Unknown
  Bacterial polypetide isolated from the Sargasso Sea
STTTHNTTIEILWTVIPVILLIIIAIPSFRLLYVSETIPKADLTIKAIGNQWYWTYEYPDYEDIAFDANMLLENELSDPKLRLLETDTQIVVPVDKVVKLQITSADVLHAWTIPAFGVKMDAVPGRLNETWFKANKEGIYYGQCSELCGAKHAFMPINVKVVSESEFDDWLDFAKEEYASSGIDYSSETFEIAKN

SEQ ID NO: 103705 - protein, 164 aa, Unknown
  Bacterial polypetide isolated from the Sargasso Sea
FKLVYQQDVIPETDMTIKVIGHQWYWEYQYPEHDDLSFESYMTPDDELQEGDIRLLTVDNHLVLPANKNIHVLVTGGDVLHSFAMPSLGVKKDAVPGRLNETWFNIDEPGIYRGQCSEICGTGHGFMPIVIEALNETDFNNWIIEQKNKLAMSNNINNNELIIE

SEQ ID NO: 103706 - protein, 253 aa, Unknown
  Bacterial polypetide isolated from the Sargasso Sea
ANQPKDWQLGFQKAASESMRDIVNFHDKLLLPIIIAISVFVLFLMVYACIRFRASANPVPSKRTHNVAVEVLWTLIPCLILIVMAVPSFKILYKQDAIPKADVTVKAIGYQWYWGYEYPDENIIFDSYMIEDKDLKENQPRLLAVDNELVVPVNKVVKVLITANDVLHAWALPSFGVKRDAVPGRINETWFKAEEVGTYYGQCSELCGIKHAFMPITVRVVSEEEYQEWLTGAKIKFAKEINEEDQFKKLASK

SEQ ID NO: 103707 - protein, 103 aa, Unknown
  Bacterial polypetide isolated from the Sargasso Sea
MADGHSRDHSYHLVDPSPWPIVGAFAALVLTFGMILWFHDVTVWVFIIGSLITAYVFLVWFKDIIKEGEHQGFHTPVVQLGLRYGMVLFIASEVMFFAAWFWA

SEQ ID NO: 103708 - protein, 269 aa, Unknown
  Bacterial polypetide isolated from the Sargasso Sea
MTMTRLPLTVWAFLVTAIIGVVSFPVLLSAALLLIMDRSFGTSFFLSDIFIQGEVLHYQGGSPVLFEHLFWFLGHPEVYIVLLPALGIASEVIATNARKPIFGYRAMVGSILAIAFLSTIVWGHHMFVTGMNPFLGSVFTFTTLLIAIPSAVKAFNYITTIWKGNIQFNPAMLFAIGLVSTFITGGLTGIILGDSALDINLHDTYFVVAHFHLVMGISALYGLFAGVYHWYPRMFGRMMNKTLGYVHFWITAISAYGVFFPMPFYWYGW

SEQ ID NO: 103709 - protein, 265 aa, Unknown
  Bacterial polypetide isolated from the Sargasso Sea
ISFPTQILRMEIKKGNLKSFTVDLLIGADGANSRVAKAMDAGDYKVAIAFQERIKLPKEEMSYYEDLAEMYVGTDVSPDFYGWVFPKYDHVAVGTGTMQKNQSLIKGLQEGVRNRAKKRLVNGEVIKVEAHPIPEHPRPRRVVGRMALVGDAAGYVTKSSGEGIYFAAKSGRMCAEEIVEASKNGQIIPSEKDLKNYLKKWDKKYGTTYKVLEILQNIFYRNDSAREAFVEMCDDMDVQRLTFDSYLYKRVVAMKPLQQLKITML

SEQ ID NO: 103710 - protein, 233 aa, Unknown
  Bacterial polypetide isolated from the Sargasso Sea
MSIVTDIFLPIALAFIMFALGLGLTGADFLRVLKQPKDFFVGAISQIILLPIIAFILVKIWPISPELAIGVMIIAAAPGGVTSNILTSFARGDVALSISLTAVISLLSVLTVPFIIITSLSLLGSETVSQNISLTSMAISMFLIVTVPVILGMIFRRFASNAAIKFEPIAKKISIGLFIIVLVGAILAEKDNIVSYFADAGLITLALNVIMMIVAFYVAQLLATGNAQKKCIA

SEQ ID NO: 103711 - protein, 174 aa, Unknown
  Bacterial polypetide isolated from the Sargasso Sea
MTLSIDPQKTNNESLQPKGWLRYFSFSLDHKVIGIQYLVCGFLFYLIGGTLASAIRIELASPMSDFMPRDVYNQVLTLHGTIMIFLWIVPVVNGAFGNYLVPFYVGARDMAFPRLNAVAFWLIPPSGLMLVASYFVEGAAQAGWTAYPPLSITTPQSGQIIWILSVLLLGGSSI

SEQ ID NO: 103712 - protein, 56 aa, Unknown
  Bacterial polypetide isolated from the Sargasso Sea
MGFHVTIGAITLAVILVRCLRGHFKPDEHFGFEGAAWYWHFVDTVWVGLFIFVYIL

SEQ ID NO: 103713 - protein, 155 aa, Unknown
  Bacterial polypetide isolated from the Sargasso Sea
MSTLTQDQIAAHDDHHHGAPKGIMRWLLTTNHKDIGTLYLWFSFIMFLTGGAMAMVIRAELFQPGLQLVEPNFFNQMTTVHGLIMVFGAVMPAFTGLANWLIPMMIGAPDMALPRMNNWSFWILPFAFAILLSSLFMEGGGPNFGWTFYAPLSTT

SEQ ID NO: 103714 - protein, 186 aa, Unknown
  Bacterial polypetide isolated from the Sargasso Sea
GHLHDDHEHHDHIPKGITRWLFTTNHKDIGTLYLWFAFIMFLVGGAMAMVIRAELFQPGLQIVEPNFFNQMTTVHGLIMVFGAVMPAFTGLANWLIPMMIGAPDMALPRMNNWSFWILPGAFLILLSSLFMEGGGPAFGWTFYAPLSTTYSGDSTALFVFSVHIMGISSIMGAINVIVTIFNMRAP

SEQ ID NO: 103715 - protein, 122 aa, Unknown
  Bacterial polypetide isolated from the Sargasso Sea
KANKKIEIIWDSVVDEVLGTNEPKSVNGIKIKNTKDNKIKELKIDGLFIAIGHDPATSLFKNQLKMDKDGYLITKPDSTETSIPGVFAAGDVKDKIFRQAVTAAGMGCMSALEAEKYLSHSK

SEQ ID NO: 103716 - protein, 136 aa, Unknown
  Bacterial polypetide isolated from the Sargasso Sea
MTTTVADHHHDEVPKGITRWLFTTNHKDIGTLYLWFSFIMFLVGGAMALVIRAELFQPGLQVVDPHFYNQMVTVHALIMIFGAIMPGFVGFANWMIPMMIGAPDMALPRMNNWSFWLMPFATSLLILSLFVPGGGP

SEQ ID NO: 103717 - protein, 255 aa, Unknown
  Bacterial polypetide isolated from the Sargasso Sea
MSAVIESHGHDDHHHGPAKGLTRWLYTTNHKDIGSLYLWFSFAMFLIGGAMAMVIRAELFQPGMQIVEPEFYNQMLTLHGLIMVFGAVMPAFVGLANWLVPMMVGAPDMALPRMNNLSFWILPFAFFILLSSLFMEGGAPNFGWTFYAPLSTTYAPPSVTFFIFAVHIMGASSIMGSINVIVTIMNMRAPGMTLMKMPLFVWSWLITAYLLIAVMPVLAGAVTMMLMDIHFGTSFFNAAGGGDPVLFQHIFWFFG

SEQ ID NO: 103718 - protein, 261 aa, Unknown
  Bacterial polypetide isolated from the Sargasso Sea
AIDIILMNMCIFLGPNIGMLFYKIIDFNQIYFYLGIVTLLNLLIIRKNPNLSMLKNKKEEYSGFAKGVGFAIKNKLILSTLLILAFGNFFAFSFESMAPYVGKNILNSSPQEFSFLLSMQGLGALSGAILFFPLIVKINRPGLVFGISSISLCIFSFLFSFENSYFMTCLIIFFGGLSVAIFGNMHARILISQTPNPLRGRIQGLRQLSIGFFPLGSLFLGLSGDYFGISDSIRLFSFTGVLITILILILFRELRVKIFNK

SEQ ID NO: 103719 - protein, 112 aa, Unknown
  Bacterial polypetide isolated from the Sargasso Sea
VDNAVYVPVNKVVKVMITANDVLHAWALPSFGVKRDAIPGRINETWFKADRTGTFYGQCSELCGIKHAFMPITVHVVSEDEYNKWLEEAKVKFAKEEIDNNFKIVKKIKEIQ

SEQ ID NO: 103720 - protein, 99 aa, Unknown
  Bacterial polypetide isolated from the Sargasso Sea
VAFVGMQMFEWSKLIFEEGIRPWGNPFGAAQFGGFFFMITGFHGLHVSIGVVYLTIVAKRVWEGRYDKLNDYQMVEVAGLYWHFVDLVWIFIFAFFYLW

SEQ ID NO: 103721 - protein, 222 aa, Unknown
  Bacterial polypetide isolated from the Sargasso Sea
MNLTADSVDGHGSEHKHPWHLVDPSPWPIVGALSAGLLAIGTVIYMHGGGSWLLALGFLGVALTMFFWFRDVTLEATFQGHHSIPVQIGMRYGMALFIASEVMFFVAWFWAFFNASLFPPETINGIWPPPGIIVFDPWSLPFLNTLILLTSGVTLTWAHHALIEGNKEHVLQGLGLTIFLGLIFTGVQGYEYSHAAFSFAFEEGSPGKGGIYPTVFFMATGF

SEQ ID NO: 103722 - protein, 145 aa, Unknown
  Bacterial polypetide isolated from the Sargasso Sea
YFNDKNKILCLNSLSSILGAILPEQQPHEKIYNSLDYLLKNFNDKNWLFLYLNWEINLISNLGFGFSLDPKKFSNTNEKKIFNLRLDNVDYKVPSFLVLKNFDNLNLNDIYTGLNFSRNLMENKFFIPNNIRFPYSRKLLEKKFL

SEQ ID NO: 103723 - protein, 317 aa, Unknown
  Bacterial polypetide isolated from the Sargasso Sea
FWFLGHPEVYIVALPAFGIVSDLISVHSRKNIFGYRMMVWAIVGIGALSFFVWAHHMYVSGMSPWFGFFFATTTLIIAVPTALKVYNWILTLWRGNIRLNTVMLFCLGFIVTFVNGGITGIFLGNVAVDVPLSDTYFVIAHFHMVMGIAPLMVIFGAIYHWFPLITGRLMDETLGKWHFWVTFLGAYSIYFPMHYLGFIGVPRRYFEMYDSPYITSAVGMNEFISVAAFIVGAAQFIFFYNLVKSIRLGKPAGKNPWKANSLEWLTPDVPPVHGNWGDKLPVVHRWAYDYSVPGAKEDYITQTTPPSEVREAEVEKT

SEQ ID NO: 103724 - protein, 271 aa, Unknown
  Bacterial polypetide isolated from the Sargasso Sea
MKKFFYIFLTFFVTSSAFANQPVDWQLGFQKAASETMRDIVNFHDKLLLPIIIAISVFVLFLMIYACIRFRASANPVPSKRTHNVAVEVLWTLIPCLILIVMAVPSFKILYKQDAIPKADITVKAIGYQWYWGYEYPDENIFFDSYMIETKDLKKNEPRLLAVDNELVVPVNKVVKVMITANDVLHAWALPSFGVKRDAVPGRINETWFKAEKVGTYYGQCSELCGIKHAFMPIEVRVVTEEEYQEWLLDAKVKFAKEINDEDQFKKLASK

SEQ ID NO: 103725 - protein, 254 aa, Unknown
  Bacterial polypetide isolated from the Sargasso Sea
MKKFLYIFLTFFITSSAFANQPVDWQLGFQKAASETMRDIVNFHDKLLLPIIIAISVFVLFLIVYACIRFRASANPVPSKRTHNVAVEVLWTLIPCLILIVMAVPSFKILYKQDAIPKADITVKAIGYQWYWGYEYPDENIFFDSYMIETKDLKENEPRLLAVDNELVVPVNKVVKVMITANDVLHAWALPSFGVKRDAVPGRINETWFKAEKVGTYYGQCSELCGIKHAFMPIEVRVVTEEEYQEWLLDAKVR

SEQ ID NO: 103726 - protein, 439 aa, Unknown
  Bacterial polypetide isolated from the Sargasso Sea
MSEFSKELLVTAEFCQSQDIDVFAKHVPMDWVAEAVQQTGRASLRTRRFPAEQAVWLVLGIGLMRNRSIQQVCDTLSLAFPDAKGELPPLATSSIIKAKEKLGSEPMRYLFKTTAAQWETQCEFDEIAGLKLLSVDGTYFKTHNTEENHHFGFAQSTASFPSVLAVTLMSTRSHLLSDAAFGPVTHSEIHYAQQLVGSAPEHSLTLFDRGFMSAELLISWQGSGVNTHWLTPIKSKTRYSIIESFSEYDHLVEMPVSPQAKQQAPYLGESWQARLILIPSPKGDIKGFITSCLCPDTYPVNDLLKVYWQRWEIERGYGELKQYQLENKPVLRSKKKDGVYQELWGILTTYNIVRLEMAAMAVQHKVEPQRISFINALFLIQDEFGWSDRGSPGAIPLHLKRLRENGKRLILPPKRKRPSYPRLVLKKTIKYPSKNATRS

SEQ ID NO: 103727 - protein, 188 aa, Unknown
  Bacterial polypetide isolated from the Sargasso Sea
YLGASALDVYFHDSYFVLAHFHYTFFPITIIGMFAAITYWFPKMFGRMMNETLSKIHFWGTFIPFNCIFLPLFFLGLAGQHRRIYNFSHYPDLATENLQDIRVFATTSLVIMLLFQAIFLYNFFYSMFKGEKAPDNPWKANTLEWTVPSPPQHGNFKKLPTVYRGAYEYSVPGRDSDYWPQNMPPDKS

SEQ ID NO: 103728 - protein, 253 aa, Unknown
  Bacterial polypetide isolated from the Sargasso Sea
MPVLANGITDWQLGFQEPASGHMQNIFDLHNFVLIMMTAITIFVLILLIYVAIRFRKSANPNPSKRSHNAILETLWTAIPVLILIVMAVPSFKLVYEQDVIPEVDMTIKVIGHQWYWEYQYPEHDDLSFESYLVPDKDLKEGEPRLLTVDNRLVLPVNKNIHVLVTAGDVLHSFAMPSLGVKKDAVPGRLNETWMRIDRPGIYRGQCSEICGTGHGYMPIVIEAVSENDFYAWLNEAKNEFATLNNRTIALSK

SEQ ID NO: 103729 - protein, 251 aa, Unknown
  Bacterial polypetide isolated from the Sargasso Sea
MKKFLYIFLTFFITSSAFANQPVDWQLGFQKAASETMRDIVNFHDKLLLPIIIAISVFVLFLMVYACIRFRASANPVPSKRTHNVAVEVLWTLIPCLILIVMAVPSFKILYKQDAIPKADITVKAIGYQWYWGYEYPDENIFFDSYMIETKDLKENEPRLLAVDNELVVPVNKVVKVMITANDVLHAWALPSFGVKRDAVPGRINETWFKAEKVGTYYGQCSELCGIKHAFMPIEVRVVTEEGIPRVVVRR

SEQ ID NO: 103730 - protein, 145 aa, Unknown
  Bacterial polypetide isolated from the Sargasso Sea
GYQWYWGYEYPDENIFFDSYMIETKDLKENEPRLLAVDNELVVPVNKVVKVMITANDVLHAWALPSFGVKRDAVPGRINETWFKAEKVGTYYGQCSELCGIKHAFMPIEVRVVTEEEYQDWLLDAKVKFAKEINEEDQFKKLASK

SEQ ID NO: 103731 - protein, 116 aa, Unknown
  Bacterial polypetide isolated from the Sargasso Sea
MSAVIDSHSDDHHHGPAKGITRWLYTTNHKDIGTLYLWFSFLMLFLGGAMAMVIRAELFEPGSQIVSPEFYNQMLTNHGLIMVFGAVMPAFVGLANWIIPMQIGAPDMALPRMNNL

SEQ ID NO: 103732 - protein, 271 aa, Unknown
  Bacterial polypetide isolated from the Sargasso Sea
MKKFLLIISSLFVTSTVSADQPKDWQLGFQNAASESMRDIVNFHDNLLLPIIIAISVFVLFLMIYACIRFRASANPVPSKRTHNVAVEVLWTLIPCLILIVMAVPSFKILYKQDTIPKAEVTVKAVGYQWYWGYEYPDENIIFDSYMIEDKDLKENQPRLLAVDNELVVPVDKVVKVLITANDVLHAWALPSFGVKRDAVPGRINETWFKAEKVGTYYGQCSELCGIKHAFMPITVRVVSEEEYNEWLMDAKVKFAKEVIEEDQFKRLASK

SEQ ID NO: 103733 - protein, 174 aa, Unknown
  Bacterial polypetide isolated from the Sargasso Sea
MRWFFFKEKEVAVVGGGNAAVEEAMFLTKFASKVKLIHRRNELRAEKMLQAKLKANKKIEIIWDSVVEDVVGDTNPKSVKAIKIKNVKTNKTTELKVDGLFIAIGHDPATSLFKGQLNMDKEGYIVTNPDSTITNVPGVFAAGDVKDKIFRQAVTAAGMGCMAALEAEKHLSSK

SEQ ID NO: 103734 - protein, 498 aa, Unknown
  Bacterial polypetide isolated from the Sargasso Sea
MAKQKNLTAEDTWFFGHPKGMVTLFFTEMWERMSYYGMRALLVLYMTGAMTGFNPGLGWSQIDAQAIYGIYVGMVYFMVIPGGWLADNVLGHQKAVLIGAIIIALGHFTLALPLTETFFLGLILVVLGTGLLKGNISTIVGQLYKDGDSRVQAGYTIFYMSINIGSTLGFLICSYLGEKIGWHWGFGAAGVGMFFGVLQYINFKHLLGDAGKNPNSMPQAQRDSYIKWSKITAGLMVITIALGLLGFLNFDPRAFAENFAVFLGLVALAYFVYLFFFAGLTDQEKRNLGLLVVLFIGAAAFWSGFDQSAGSLNIFARDYTDLSVAGYIIPIGWLQFANPIFVVIFAPIFAGIWMHLGRMNLDPSLPVKFAIGLFFMAISFIVMLYAVQLAMEVSPVGMQWLILTYLLQTWGELALSPIGLSAFSTYAPKRYVGQMFGLWFLASSIGGVLAGLLGGEALGEGLESISPVFEFMIQYYIVIGVALVLVAVVGTYLRKKSS

SEQ ID NO: 103735 - protein, 268 aa, Unknown
  Bacterial polypetide isolated from the Sargasso Sea
MRILSFITATFTTFASSANGISDWQLGFQTPASDVMRNVYDLHNFVLIMMTAITIFVLFLIFYVVFRFRRKANPVASKTTHNTFIEILWTGIPVIILIFMAIPSFKLVYQQDVIPETDMTIKVIGHQWYWEYQYPEHDDISFESYMTPDDELEPGDIRLLTVDNHLVLPANKNIHVLVTAGDVLHSFAMPSLGVKKDAVPGRLNETWFNIDEPGIYRGQCSELCGTGHGYMPIVIEALNEKDFNNWIIEQKSKLALANEITTKENTIE

SEQ ID NO: 103736 - protein, 231 aa, Unknown
  Bacterial polypetide isolated from the Sargasso Sea
ITLTVPMLFCISFIITFLNGGLTGLFLGNVIVDVPLSDTYFVVAHFHMVMGIAPVQVVFAAIYHWFPLMTGRMYNETLGRLHFWFTFLGSYLIYFPMHYLGLIGVPRRYYEMGQTEALYTQSAADLNIFITLTALVTGFAQIFFFINMFWSRKYGVPAEKNPWQANSLEWRTPSMPPGHGNFGKELPVVYRWPYDFNVPGAKDDFVPQDVPNSEVELAEGYEGTEIKAEKT

SEQ ID NO: 103737 - protein, 280 aa, Unknown
  Bacterial polypetide isolated from the Sargasso Sea
MVWAIVVIGALSFFVWAHHMYVSGMNPWFGFFFATTTLIIAVPTAMKVYNWILTLWRGNIRINTVMLWCLGFIVTFVNGGITGIFLGNVTVDVPLSDTYFVIAHFHMVMGIAPLMVIMGAVYHWFPLVAGRMLSEKLGKWHFWITFLGAYSIYFPMHYLGFIGVPRRYFEMYDSPYMTSAVGMNEFISLAAFVVGAAQFILIYNIIVSLRMGKPAGKNPWKANSLEWHTSTVPPEHGNFGKDLPVVHRWPYDFSVPGAKEDFIPQTTPPSEVADTKVEKT

SEQ ID NO: 103738 - protein, 271 aa, Unknown
  Bacterial polypetide isolated from the Sargasso Sea
MDYVRPAENPEQDLYHAHSFIEKWVFCQDAKVIGVQYFLTAVFTGVVGLILSWLMRLQLGFPGLAGFITAEHYYQFVTMHGMIMVVYFLTALFLGGFGNYLIPLMVGARDMVFPYVNMLSFWMFFVAVAVLMASFFVPGGPTGAGWTLYPPQTILEGTPGHGWGILLMLISLSLFVIGFTMGGLNYMITILQARTRGMTLMRMPLTVWGIFTATVLAMLAFPALLVSSIMMTLDKLLGTSFFMPTILKAGEVLEYGGGSPILFQHLFWFFG

SEQ ID NO: 103739 - protein, 200 aa, Unknown
  Bacterial polypetide isolated from the Sargasso Sea
MTTLDSSKEIQKNNSEVNETHEDFRMFGLITFLIADGMTFAGFFAAYLTYKAVNPLPDGAIYELELPIPTLNTILLLVSSATFHKAGKALLKDKNSDSQKWLFFTAFLGIIFLICQLFEYFHLPFGLTDNLFASTFYALTGFHGLHVTLGTLMILIIAWQSRINGGRLTSQNMFPLEAVELYWHFVDGIWVVLFIILYLL

SEQ ID NO: 103740 - protein, 169 aa, Unknown
  Bacterial polypetide isolated from the Sargasso Sea
MSAVIENHHDDHHHGPAKGITRWLYTTNHKDIGTLYLWFSFAMFLIGGAMAMIIRAELFSPGMQIVEPEFYNQMITLHGLIMIFGGVMPAFVGLANWLVPMMIGAPDMALPRMNNLSFWILPFAFFILLSSLFMEGGAPNFGWTFYAPLSTTYAPPSVTFFIFSVHING

SEQ ID NO: 103741 - protein, 194 aa, Unknown
  Bacterial polypetide isolated from the Sargasso Sea
SKEIKKNDSEASEHHEDFRMFGLITFLIADGMTFAGFFAAYLTYKAVNPLPDGAIYELELPIPTLNTILLLVSSATFHKAGKALLKNKNSDSQKWLLVTALLGITFLICQLFEYFNLPFGLTDNLFASTFYALTGFHGLHVTLGTLMILIISWQTRPKEGRITNQNMFPLEAVELYWHFVDGIWVILFIILYLL

SEQ ID NO: 103742 - protein, 229 aa, Unknown
  Bacterial polypetide isolated from the Sargasso Sea
MSNNQSVSFEHSIPDNLKGLVADWSSDVQTFRVRWSKAMMWIFLVSDTFIFGSFLCAYMAVRLTTIEPWPPTSEVFALHVGGADVPLLLIAIMTFILISSSGTMAMAVTSGYKKQRKKTAFLILLTALGGVAFVGMQMFEWSKLIFEEGIRPWGNPFGAAQFGGFFFMITGFHGLHVSIGVVYLTIVAKRVWEGRYDKLNDYQMVEVAGLYWHFVDLVWIFIFAFFYLW

SEQ ID NO: 103743 - protein, 247 aa, Unknown
  Bacterial polypetide isolated from the Sargasso Sea
MATRLSKAASETMRDIVNFHDKLLLPIIIAISVFVLFLMVYACIRFRASANPVPSKRTHNVAVEVLWTLIPCLILIVMAVPSFKILYKQDSIPKADITVKAIGYQWYWGYEYPDENIFFDSYMIETKDLKENEPRLLAVDNELVVPVNKVVKVMITANDVLHAWALPSFGVKRDAVPGRINETWFKAEKVGTYYGQCSELCGIKHAFMPIEVRVVTEEEYQEWLLDAKVKFAKEINEDDQFKKLASK

SEQ ID NO: 103744 - protein, 267 aa, Unknown
  Bacterial polypetide isolated from the Sargasso Sea
FVWAHHMYVSGMNPWFGFFFATTTLIIAVPTAMKVYNWILTLWRGNIRLNTVMLWCLGFIVTFVNGGITGIFLGNVSVDVPLSDTYFVIAHFHMVMGIAPLMVIMGAVYHWFPLVAGRFLDEKLGKWHFWLTFLGAYSIYFPMHYLGFIGVPRRYFEMYDSPYVTSAVGMNEFISLAAFIVGAAQFILIYNIVKTLKTGKPAGHNPWQACSLEWLTPTVPPEHGNWGDRLPTVHRWAYDYSVPGAKEDFITQTTPPSEVAHTKVEKT

SEQ ID NO: 103745 - protein, 167 aa, Unknown
  Bacterial polypetide isolated from the Sargasso Sea
MTIASPPSPSPSPLRLQPTGWLRYFSFSLDHKVIGLQYIVCGFLFYFVGGALAGVIRTELATPISDFVSRDTYNQVLTLHGTVMIFLWIVPVVNGGFGNYLIPFYVGARDMAFPRLNAVAFWMIPPSGLLLISSYFIGGAAQSGWTAYPPLSLTTPAMGQILWIVSV

SEQ ID NO: 103746 - protein, 246 aa, Unknown
  Bacterial polypetide isolated from the Sargasso Sea
QLGFQKAASETMRDIVNFHDKLLLPIIIAISVFVLFLMVYACIRFRASANPVPSKRTHNVAVEVLWTLIPCLILIVMAVPSFKILYKQDAIPKADITVKAIGYQWYWGYEYPDENIFFDSYMIETKDLKENEPRLLAVDNELVVPVNKVVKVMITANDVLHAWALPSFGVKRDAVPGRINETWFKAEKVGTYYGQCSELCGIKHAFMPIEVRVVTEEEYQEWLLDAKVKFAKEVNEEDQFKKLASK

SEQ ID NO: 103747 - protein, 229 aa, Unknown
  Bacterial polypetide isolated from the Sargasso Sea
MSNNQTVSFEHSIPDNLKGLVADWSSDVQTFRVRWSKAMMWIFLVSDTFIFGSFLCAYMAVRLTTIEPWPPTSEVFALHVGGADVPLLLIAIMTFILISSSGTMAMAVTSGYKKERKKTAFLILLTALGGVAFVGMQMFEWSKLIFEEGIRPWGNPFGAAQFGGFFFMITGFHGLHVSIGVVYLCIVAKRVWEGRYDRLNDYQMVEVAGLYWHFVDLVWIFIFAFFYLW

SEQ ID NO: 103748 - protein, 352 aa, Unknown
  Bacterial polypetide isolated from the Sargasso Sea
MNVLNLTEGVTPTSKMVYGLHMQILYIVTAIGVVVFSVMCWSIYHHRKSKGAVAEQFHHSTTAEITWTIIPIIILVVMAIPATKALVFMEQTGDAEMTIKVTGYQWKWKYDYLDDDISFFSSLSKDSNDARQLGSGIDPKTIENYLLDVDNRVVLPINTKIRILTTAADVIHDWWVPALGWKRDAIPGFINDNWTYIEEPGVYRGKCAELCGRDHAFMPIVVEAVPKAEYAVWVEEQKTMQLAAAEGAEREWTKDELLEKGKDVYAANCTACHMAEGQGVEGLFPALSGSAIVNNTDASEMIMLILNGKNMMPAFKDILNDADIAAAMTHERNSWGNTVKDVIQPSDVKAMR

SEQ ID NO: 103749 - protein, 270 aa, Unknown
  Bacterial polypetide isolated from the Sargasso Sea
MKKILLIISSIFISGNTFADQPKDWQLGFQNPASDGMRDIVNFHNNLLLPIIIAISVFVLFLMLYACVRFRASANPTPSKRTHNVTVEILWTLIPCLILIVMAVPSFKILYKQDTIPKADLTIKAVGYQWYWGYEYPDENIIFDSYMIEEKDLKSDQPRLLSVDNEVVVPVNKVVKVLITANDVLHAWALPAFGVKRDAVPGRINETWFKAEKEGTYYGQCSELCGIKHAFMPITVKVVSDEEYQEWLSEARVKFAKEEIGNDKLKIASK

SEQ ID NO: 103750 - protein, 247 aa, Unknown
  Bacterial polypetide isolated from the Sargasso Sea
MTISIDPQKTNNESLQPKGWLRYFSFSLDHKVIGIQYLVCGFLFYLIGGTLASAIRIELASPMSDFMPRDVYNQVLTLHGTIMIFLWIVPVVNGAFGNYLIPFYVGARDMAFPRLNAVAFWLIPPSGLMLVASYFVEGAAQAGWTAYPPLSITTPQSGQIIWILSVLLLGGSSIFGGINFIATIIKLRRPGLKLMQLPMYCWAMLGTSLLVVLSTPVLAGTLILLSFDIIANTGFFNPVLGGNVVVY

SEQ ID NO: 103751 - protein, 659 aa, Unknown
  Bacterial polypetide isolated from the Sargasso Sea
MSFLGKLSLDAIPYHEPIIMVTLAVVAVIGLYVAALITKHKKWGVLWHDWLTSVDHKRLGIMYIVLAFIMLIRGFSDAIMMRTQQALATNGAAGYLPPEHYDQIFTAHGVIMIIFMAMPFMIGLMNLVLPLQIGARDVAFPFLNNLSFWLTASGAVLINISLGLGEFARTGWVAYPPLSELAYSPGVGVDYYIWALQISGIGTTLTGVNFIATVLKMRAPGMKLMQMPIFTWTCTWANILIVASFPILTAVLALLTLDRYMGFHFFTNDGGGNAMMYINLFWAWGHPEVYILILPAFGIFSDVISTFTSKRLFGYSSMVWASGAISILGFIVWLHHFFTMGSSANVNAFFGVMTMVIAVPTGVKLFNWLFTIYRGRLRLTVPVLWTLGFMVTFTIGGMTGVLLAVPGADYVLHNSLFLIAHFHNTIIGGAVFGYLAGFAYWFPKATGFHLNERLGKASFWCWQIGFYVAFMPLYVLGFMGMTRRINHIDNPAWNLWIYIAAVGACIIMVGIILQFVQLYVSIRDCDQNRDTTGDPWNGHTLEWSTASPPQFYNFAKLPQVSDIDAFTDAKEKGTAYQRQKHYQPIHMPKNTPSGILMALGITAAGFAAIWHILWLAIVGMVGAFIVFLFRAYNNDVDYYVQPDEVARIENAHLNNVVRG

SEQ ID NO: 103752 - protein, 271 aa, Unknown
  Bacterial polypetide isolated from the Sargasso Sea
MKKFLFIILSYFVASSAFANQPKDWQLGFQEAASSSMREIVNFHDKLLLPIIIAISVFVLFLMVYACIRFRASRNPNPSTTTHNVAVEVLWTLIPCLILIVMAVPSFKILYKQDAIPKADVTVKAIGYQWYWGYEYPDENIIFDSYMIETKDLKKDQPRLLAVDNEVVVPVNKVVKVLITANDVLHAWALPSFGVKRDAVPGRINETWFKAEKVGTYYGQCSELCGIKHAFMPITVRVVSDKEYQEWLTSAKIKFAKEIMEEDQFKKLASK

SEQ ID NO: 103753 - protein, 142 aa, Unknown
  Bacterial polypetide isolated from the Sargasso Sea
MSAEKKHDYHLVDPSPWPIYVSFSCLVLAIGAVYYMHSDVSWGMYLGLALLIYGAYMWFRDVVIEAEHKGHHTPVVQIHHRYGMTLFIASEVMFFVAWFWAYFDVSLFPNDFVGNVWPPKDIVTFDPWDIPLINTLVLLLSG

SEQ ID NO: 103754 - protein, 130 aa, Unknown
  Bacterial polypetide isolated from the Sargasso Sea
GAIFSIMAAVYYWIPKWSGNMYDERLGKLHFWLSFIGVNVTFFPQHFIGLAGMPRRYPDYALIFADWNMVSSIGAFLFGFSQLLFLFIVIKTVMGGKKATDQVWEGAKGLEWTVASPAPYHTFSTPPKVD

SEQ ID NO: 103755 - protein, 659 aa, Unknown
  Bacterial polypetide isolated from the Sargasso Sea
MSFLGKLSLDAIPYHEPIIMVTLAVVAVIGLYVAALITKHKKWGVLWHDWLTSVDHKRLGIMYIVLAFIMLIRGFSDAIMMRTQQALATNGAAGYLPPEHYDQIFTAHGVIMIIFMAMPFMIGLMNLVLPLQIGARDVAFPFLNNLSFWLTASGAVLINISLGLGEFARTGWVAYPPLSELAYSPGVGVDYYIWALQISGIGTTLTGVNFIATVLKMRAPGMKLMQMPIFTWTCTWANILIVASFPILTAVLALLTLDRYMGFHFFTNDGGGNAMMYINLFWAWGHPEVYILILPAFGIFSDVISTFTSKRLFGYSSMVWASGAISILGFIVWLHHFFTMGSSANVNAFFGVMTMVIAVPTGVKLFNWLFTIYRGRLRLTVPVLWTLGFMVTFTIGGMTGVLLAVPGADYVLHNSLFLIAHFHNTIIGGAVFGYLAGFAYWFPKATGFHLNERLGKASFWCWQIGFYVAFMPLYVLGFMGMTRRINHIDNPAWNMWIYIAAVGACIIMVGIILQFVQLYVSIRDRDQNRDTTGDPWNGHTLEWSTASPPQFYNFAKLPQVSDIDAFTDAKEKGTAYQRLKHYQPIHMPKNTPSGILMALGITAAGFAAIWHILWLAIVGMVGAFIVFLFRAYNNDVDYYVQPDEVARIENAHLNNVVRG

SEQ ID NO: 103756 - protein, 192 aa, Unknown
  Bacterial polypetide isolated from the Sargasso Sea
MDCDTHSYTVFIGAFSLPVLFDQQKIPEGEVNIKVTGYQWYWGYEYVDEGFEFESFLIGEGKVLTPEVELELQEAGYTRDQFLLATDTAVVVPVDKTVVMQVTGADVIHSWTIPAFGVKQDAVPGRLGQLWFKAEKEGIYFGQCSELCGKDHAFMPITVKVVSQDAYNAWLSAAKSEYAGIAQSYNIAEVSK

SEQ ID NO: 103757 - protein, 36 aa, Unknown
  Bacterial polypetide isolated from the Sargasso Sea
MYLGLALLIYGAYMWFRDVVIEAEHQGHHTPVVQIH

SEQ ID NO: 103758 - protein, 250 aa, Unknown
  Bacterial polypetide isolated from the Sargasso Sea
QPVDWQLGFQKAASESMRDIVAFHDNLLLPIIIAISVFVLFLMLYACVRFRASANPNPSKRTHNVTVEVLWTLIPCLILIVMAVPSFKILYKQDAIPKADLTIKAVGYQWYWGYEYPDENLIFDSYMIEEKDLKADQPRLLTVDNEVVVPVGKVVKVLITANDVLHAWALPSFGVKRDAVPGRINETWFKAEKVGTYYGQCSELCGIKHAFMPIAVKVVSEEEYQEWLSEARVKFAKEEIENDKLKLASK

SEQ ID NO: 103759 - protein, 270 aa, Unknown
  Bacterial polypetide isolated from the Sargasso Sea
MKKFITTLLTSLISLPAFANQPEKWQLSFQEPASQTMRDIVWFHDYMLLPIIVAISAFVLFLMLYVMVRFRESRNPNPSKRTHNVAVEIIWTLVPCLILIVMAVPSFKVLYSQDTIPKADVTIKAIGYQWYWGYEYPDENIIFDSYMIEEEDLKEGQPRLLAVDNVVVVPVNKVVKVLITANDVLHAWALPSFGVKRDAMPGRINETWFKAEKVGTYYGQCSELCGIKHAFMPIEVRVVSDEDYQAWLSDAKIKFAKDESLINKNLIASN

SEQ ID NO: 103760 - protein, 229 aa, Unknown
  Bacterial polypetide isolated from the Sargasso Sea
MSNNQSVSFEHSIPDNLKGLVADWSSDVQTFRVRWSKAMMWIFLVSDTFIFGSFLCAYMAVRLTTIEPWPPTSEVFALHVGGADVPLLLIAIMTFILISSSGTMAMAVTSGYKKQRKKTAFLILLTALGGLAFVGMQMFEWSKLIFEEGIRPWGNPFGAAQFGGFFFMITGFHGLHVSIGVVYLTIVAKRVWEGRYDKLNDYQMVEVAGLYWHFVDLVWIFIFAFFYLW

SEQ ID NO: 103761 - protein, 102 aa, Unknown
  Bacterial polypetide isolated from the Sargasso Sea
MHFWLSFVGVNVTFFPQHWIGLAGMPRRYPDYALQFADWNMVSTAGAFLFGASQILFLFIVLKTVMGGKKATRQVWEGAKGLEWSVESPAPYHTFSTPPKVD

SEQ ID NO: 103762 - protein, 347 aa, Unknown
  Bacterial polypetide isolated from the Sargasso Sea
MNTYKEIQEKLCKCQNTWLITGAAGFIGSNLVEKLLILNQKVVGLDNFDTGHQHNIDQAIHDASTSIGKDLSNNFVFKNGDIRDFKDCNSACEGVDYVLHQAALGSVPRSIKDPINSNKANIDGFLNMLVASKDADVKRFVYAASSSTYGDHPDLPKVEDKTGNPLSPYAVTKLANELYAKVFAKTYEFKTIGLRYFNIFGKRQDPNGAYAAVIPKWVAAIINGDDVYINGDGKTSRDFCYVDNAVQINILAAMTEDDEAVDQIYNVALNDNTSLNELYRIIESGLIRRIDGLKNKKPIYRDFRPGDVRHSQANIDKAKTLLSYQPKYKISEGLDEAMDWYIQNLSK

SEQ ID NO: 103763 - protein, 200 aa, Unknown
  Bacterial polypetide isolated from the Sargasso Sea
MTTLDSSKEIQKNNSEVNETHEDFRMFGLITFLIADGMTFAGFFAAYLTYKAVNPLPDGAIYELELPIPTLNTILLLVSSATFHKAGKALLKDKNSESQKWLFFTAFLGIIFLICQLFEYFHLPFGLTDNLFASTFYALTGFHGLHVTLGTLMILIIAWQSRVNDGRVTSSNIFPLEAVELYWHFVDGIWIILFIILYLL

SEQ ID NO: 103764 - protein, 189 aa, Unknown
  Bacterial polypetide isolated from the Sargasso Sea
MKGLLDEGNNVWVSKNDDPKRKLKFTLEMIEANNMFIGVNTHRANKIVHHALKNKLINEFKSIDKIQSEFKYSNDTRFDFLCDNKLLEVKNVTLLRDSKIAEFPDAVTSRGTKHLKNLINSIKKGYKPFVLFLTQIQGINNFKIAKDIDEEYYKNYLIAKKAGVNFIAYRCKLSSKEIKIEKKIKIIDE

SEQ ID NO: 103765 - protein, 170 aa, Unknown
  Bacterial polypetide isolated from the Sargasso Sea
MTKIIEPNKQSNIFKRPSSETGIWSWITTVDHKRIGIMYGYAAFFFLLIGGLEALILRIQLSQPDNNFLTAAEYNAMFTMHGTTMIFLAIMPISAAFFNYLLPLQIGARDVAFPRLNALSFWIFIFGGAFLYSTFIFGTAGAPEGGYLAEEVGWLGSAPNGGWFGYQPNA

SEQ ID NO: 103766 - protein, 194 aa, Unknown
  Bacterial polypetide isolated from the Sargasso Sea
MSDAHAYPHEPTGVETRKLGFWVFLSTEILFFGTLITTFLIFKGRDFPGIKLTDVYDIPFTSVSSFVLLMSSLTMVLAHNALETNDQEKTRVWLLATAMLGAVFLAGQIYEFTEFYHKGFELSTNIFSSTFYVLTGFHGLHVFIGVVLLLALWGIGQRQKGLSLNEGMNLEFIALYWHFVDIVWIVLFTVVYLI

SEQ ID NO: 103767 - protein, 275 aa, Unknown
  Bacterial polypetide isolated from the Sargasso Sea
MKNIIKILFFLLIPSFSHANEGISENWQLSFQQPATDLMSDIISFHSYILMPIITGISLLVLGLLLYIMFRFNSSRNHVASTTTHNTTIEILWTVIPVILLIIIAIPSFRLLYVSETIPKADITIKAIGNQWYWTYEYPDFDDISFDANMLADHELSDPKLRLLETDTQIVVPVDKVVKLQLTSADVLHAWTIPAFGVKMDAVPGRLNETWFKANKEGIYYGQCSELCGPKHAFMPINVKVVSNKEFEEWIEFAKSEYASSGINYSDDTFEMAKK

SEQ ID NO: 103768 - protein, 194 aa, Unknown
  Bacterial polypetide isolated from the Sargasso Sea
MSDAHAYPHEPTGVETRKLGFWIFLSTEILFFGTLITTFLIFKGRDFPGIKLTDVYDIPFTSVSSFVLLMSSLTMVLAHNALETDDQEKTRVWLLATAMLGAVFLAGQIYEFTEFYHKGFELSTNIFSSTFYVLTGFHGLHVFIGVVLLLALWGVGQRQRGLSLNEGMNLEFIALYWHFVDIVWIVLFTVVYLI

SEQ ID NO: 103769 - protein, 121 aa, Unknown
  Bacterial polypetide isolated from the Sargasso Sea
VVHFPKAGKALLKDKNSDSQKWLSFTAFLGVIFLICQLFEYFHLPFGLTDNLFASTFYALTGFHGLHVTLGTLMILIIAWQSRINGGRLTSQNMFPLEAVELYWHFVDGIWVILFIILYLL

SEQ ID NO: 103770 - protein, 184 aa, Unknown
  Bacterial polypetide isolated from the Sargasso Sea
MYNGKLGIWLFLASEVMLFGGLFSAYIFLRTGVDNWPAGTEYLDVRLATLNTLFLISSSVTMVMSWASLKLNDFKKFKFYSGTTLLFAFGFLVIKYFEYSAKFSHVPPYLPSTNNFLGIYFTMTGLHVLHVIGGIVVIGYYFGPGSKMWKADPERFTNRIEIVGLYWHFVDLVWIFLFPVLYLL

SEQ ID NO: 103771 - protein, 196 aa, Unknown
  Bacterial polypetide isolated from the Sargasso Sea
MDIPFTVKNRPDTGLYNGKLGVWLFLASEVMLFGGLFSAYVFLRTGVDNWPVGAEILNVPLATLNTMFLITSSVTMVMSWASLKLNDFKKFKLYAGLTLLLACFFLVVKYFEYTAKFDHHLYPSTNNFLGIYFTMTGLHVLHVIGGIIVIFFYWMPGAKMWESDPERFVNRIEIVGLYWHFVDLVWIFLFPVLYLL

SEQ ID NO: 103772 - protein, 124 aa, Unknown
  Bacterial polypetide isolated from the Sargasso Sea
AAYYWLPKWTGNIYDETLGKLHFWLTFISVNVTFFPMHFVGLAGMPRRYPDYALQFADFNALISVGAFMFGLTQLLFLFIVIKTIRSGKQAKPEVWEGAGDLGLEWTLTSPPPYHSFTVQPQVK

SEQ ID NO: 103773 - protein, 228 aa, Unknown
  Bacterial polypetide isolated from the Sargasso Sea
FHDYMLVPIIVAISAFVLFLMLYAMVRFRASRNPNPSRRTHNVLVEVVWTLIPCLILIVMAVPSFKVLYSQDEIPKAEVTIKAIGYQWYWGYEYPDENIIFDSYMIEDEDLKEGQPRLLAVDNEVVVPVNKVVKVLITANDVLHAWALPAFGVKRDAMPGRVNETWFKAERTGTFYGQCSELCGIKHAFMPITVRVVSEEEYIEWLNEAKIKFAKEPIEDKNKLIASK

SEQ ID NO: 103774 - protein, 193 aa, Unknown
  Bacterial polypetide isolated from the Sargasso Sea
MPVGSAGERSGGWWGCLTLIVTEGALFGYLIFSYLYLASQTGQQWPPEGLPKLGLGILNTGILLSSSGFVWFCERCVRRRRLRWGVASMAVAVVLGVTFMGIQLREWHNHPYGPTAQLYSSLYFTITGFHMMHVAVGIVVLFLLLLWTAFGYFDERRCVALTIGGLYWHFVDVVWLFIFTTLYLTPYLLRGAS

SEQ ID NO: 103775 - protein, 265 aa, Unknown
  Bacterial polypetide isolated from the Sargasso Sea
MTKIIEPDKQTNIFRRPSSEYGIWSWITTVDHKKIGIMYGYAAFFFLLIGGLEALVLRIQLAQPDNNFLSAAEYNAMFTMHGTTMVFLAIMPISAAFFNYLLPLQIGARDVAFPRLNALSFWIWVFGGLFLYSTFVFGTAGAPEGGYLAEEVGWLGNAPNGGWFGYQPNAGFKYSPGTAMDYWAIGLQILGISSLVSAFNFIVTILNMRTQGMRLMRMPVFTWMTFAVAFLLAFSLPIIAIALFYVTFDRQFGTTFFLTEGGGDP

SEQ ID NO: 103776 - protein, 205 aa, Unknown
  Bacterial polypetide isolated from the Sargasso Sea
MTETATDQTSTDHSEDHVSTLGVSNDKLGMWVFLGSDCLLFGGLISTYMLYKDRIGPDDLGPEEMFDIPFTSVSSFVLLMSSLTVVLAITALRRNDIRRSRIWLLSTAILGAIFVGGQVYEFTVFYREGLGYTTNLFGTAFFTLTGFHGVHVSVGVIMLMSMYIQSMRGKLTSDNEEKLEIIGLYWHFVDVVWIVIFTIVYLFPQ

SEQ ID NO: 103777 - protein, 174 aa, Unknown
  Bacterial polypetide isolated from the Sargasso Sea
MWVFLSTEILFFGTLITTFMIFKGRDFPGMKLTDVYDIPFTSVSSFVLLMSSLTMVLAHNALENKDQEKTRVWLLATAMLGSVFLAGQIYEFTEFYHKGFELSTNIFSSTFYVLTGFHGLHVFIGVVFLIGLWLIGQRQKGLSLDSGFNLEFVALYWHFVDIVWIVLFTVVYLI

SEQ ID NO: 103778 - protein, 441 aa, Unknown
  Bacterial polypetide isolated from the Sargasso Sea
MAQDIHHHKESFITKYIFSQDHKMIAKQYLLTAIFMGAIGIALSALFRLKLGWPDEKFSILETILGSDAAPDGLLDSNWYLGLVTLHGTIMVFFVLTGGLSGTFSNLLIPLQVGARDMASGLLNMIAYWLFFLSSLLMAVSLFIETGPAMGGWTVYPPLSVLEEFQPGSGLGMTLWLLSMTVFIASSLIGGINYIVTILNLRTKGMTMTRLPLTIWAFFITAILGVLSFPVLLSAAVLLLMDRGLGTSFYMSDIVTSSGALDATGGSPILYEHLFWFLGHPEVYIILLPALGMTSEIISTCSRKPIFGYRAMIGSMLAIGFLSFIVWGHHMFLTGMNPFLGGVFTFTTLLIAIPSAVKAFNYITTIWKGNVIMTPAMLFCIGSVSTFISGGVTGIILADSALDISQHDTYFVVGHFHIVMGMTAILGMFAGIYHWFPKMYG

SEQ ID NO: 103779 - protein, 174 aa, Unknown
  Bacterial polypetide isolated from the Sargasso Sea
MWVFLSTEILFFGTLITTFMIFKGRDFPGMKLTDVYDIPFTSVSSFVLLMSSLTMVLAHNALENEDQEKTRVWLLATAMLGSVFLAGQIYEFTEFYHKGFELSTNIFSSTFYVLTGFHGLHVFIGVVFLIGLWIIGQRQKGLSLDSGFNLEFIALYWHFVDIVWIVLFTVVYLI

SEQ ID NO: 103780 - protein, 268 aa, Unknown
  Bacterial polypetide isolated from the Sargasso Sea
MRILSFIIVTFIALASSANGISDWQLGFQKPASDVMRNVYDLHNFVLIMMTAITIFVLFLIFYVVFRFRRKANPVASKTTHNTFIEILWTGVPVIILIFMAIPSFKLVYQQDVIPETDMTIKVIGHQWYWEYQYPEHGDLSFESYMVPDDELEEGDIRLLTVDNHLVLPANKNIHVLVTGGDVLHSFAMPSLGVKKDAVPGRLNETWFNIDEPGIYRGQCSEICGTGHGYMPIVIEALNETDFNNWIIEQKNKLAMSNNINNNELIIE

SEQ ID NO: 103781 - protein, 176 aa, Unknown
  Bacterial polypetide isolated from the Sargasso Sea
MTSTLPVQPESSPAIDPHGHEEHADHRMFGLATFLVADAMTFAGFFAAYLTFKAVNPLPEGAIYELELPLPILNTVLLLVSSATFHKAGQAIRQNLQSRCRNWLLVTAGLGLAFLVSQMVEYFTLPFGLTDNLFASTFFAATGFHGLHVTLGALMILIVWWQARTDGGRVTADNHF

SEQ ID NO: 103782 - protein, 421 aa, Unknown
  Bacterial polypetide isolated from the Sargasso Sea
MTVAIPPQTSSSSPRLQPTGWLRYFSFSVDHKVIGLQYLVCGFLFYLIGGALAGAIRTELASPVSDFMARDVYNQVLTLHGTVMIFLWIVPVVNGAFGNYLIPFYVGARDMAFPRLNAVAFWLIPPAGLMLITSYFLTGAAQSGWTAYPPLSITTPATGQIIWILSVLLLGGSSIFGGINFIATILKLRRPGLKLMQLPMYCWAMLGTSILVVLSTPVLAGTLVLLSFDIVAHTGFFKPSSRRQCRCLSTSLLVLFPPSGLHHGAAGLRPGERNSASTRAQTAVRLRDDGLFDHGHCGARPGRLGAPHVHQWHAALDALVLHDRHRLHCRSDRNQILQLAGHPLGRAHHPEQRDAVFLRLHRQFRAGGHHRCGPRPGSLRHSCARHLLRGGSLPLHRLWWVGVRDLRLGVPLVSEVHGTDA

SEQ ID NO: 103783 - protein, 334 aa, Unknown
  Bacterial polypetide isolated from the Sargasso Sea
HPDLPLSKMPLLAWAYLTSSLITLVAVPTFAAALLMLLTDRLGASGFFNPAMGGDPIAYQHLFWFTFHPEVYILVIPAIGFMYEIFPRFSRKPIFSHGSGVAAFTLLTIVGFASWAHHMYATGMSFTEKTVFMVGTLAAVPASAMHTFNFLATMWGGRIKFATPIMWAVGGIALFFSAGAGGVVNSAMPLDFITHDSYWVVGHFHLFVMGTILFGTVGFVYYFFPYVTGRMYSEVLGKVHFILSFVGTVLVFFTQHILGLFGMPRRIYDYPAIPEWVQMNIIISIGAFIIGIGMAIFLWNLIWSSAKGKPADMDDPFGLGGKYYFPYQAKNPSH

SEQ ID NO: 103784 - protein, 200 aa, Unknown
  Bacterial polypetide isolated from the Sargasso Sea
MTISIDPQKTNNESLQPKGWLRYFSFSLDHKVIGIQYLVCGFLFYLIGGSLASAIRIELASPMSDFMPRDVYNQVLTLHGTIMIFLWIVPVVNGAFGNYLIPFYVGARDMAFPRLNAVAFWLIPPSGLMLVASYFVEGAAQAGWTAYPPLSITTPQSGQIIWILSVLLLGGSSIFGGINFIATIIKLRRPGLKLMQLPMY

SEQ ID NO: 103785 - protein, 160 aa, Unknown
  Bacterial polypetide isolated from the Sargasso Sea
MFKLVLYITLSIIPINLLAEQPKDWQLGFQKAASGHMEDLVWFHDYMLLPIITAITAFVLFLVIYACIRYRAARNPVASQTSHNTFIEIIWTLVPCLILIVMAVPSFKILYEQDEIPPADVTIKAVGYQWYWGYEYPDENIIFDSYMIEEQDLKPGQPRL

SEQ ID NO: 103786 - protein, 125 aa, Unknown
  Bacterial polypetide isolated from the Sargasso Sea
MSSLTMVLAHNALENEDQEKTRVWLLATAMLGSVFLAGQIYEFTEFYHKGFELSTNIFSSTFYVLTGFHGLHVFIGVVFLIGLWIIGQRQKGLSLDSGFNLEFIALYWHFVDIVWIVLFTVVYLI

SEQ ID NO: 103787 - protein, 282 aa, Unknown
  Bacterial polypetide isolated from the Sargasso Sea
MSIVTDIFLPIALAFIMFALGLGLTGADFLRVLKQPKDFFVGAISQIILLPIIAFILVKVWPISPELAIGVMIIAAAPGGVTSNILTSFARGDVALSISLTAVISLLSVLTVPFIIVTSLGLLGSENVAQNISLTSMAISMFLIVTVPVILGMIFRRFASNAAIKFEPIAKKISIGLFIIVLLGAILSKKEDIVPYFVDAGLITLTLNVIMMIVAFYVAKLLATGNAQKKCIAIECGLQNGTLAIFVGKTLFGGGAFVIPAATYSLIMFATSLIFVYLVKNN

SEQ ID NO: 103788 - protein, 150 aa, Unknown
  Bacterial polypetide isolated from the Sargasso Sea
MSTVTTDPHAHAEHEHHHGPAKGLKRWLYTTNHKDIGTLYLLFALTMFFIGGAMAMVIRAELFQPGLQIVQPDFFNQMTTVHGLIMVFGAVMPAFTGLANWLVPMMIGAPDMALPRMNNWSFWILPFAFSILLLSLFMEGGGPLVLAGLS

SEQ ID NO: 103789 - protein, 253 aa, Unknown
  Bacterial polypetide isolated from the Sargasso Sea
MPVLANGITDWQLGFQEPASGHMQNIFDLHNFVLIMMTAITIFVLILLIYVAIRFRKSANPNPSKRSHNAILETLWTAIPVLILIVMAVPSFKLVYEQDVIPEVDMTIKVIGHQWYWEYQYPEHDDLSFESYLVPDKDLKEGEPRLLTVDNRLVLPVNKNIHVLITAGDVLHSFAMPSLGVKKDAVPGRLNETWMRIDRPGIYRGQCSEICGTGHGYMPIVIEAVSENEFYAWINEAKNEFATLNNSTIALSK

SEQ ID NO: 103790 - protein, 142 aa, Unknown
  Bacterial polypetide isolated from the Sargasso Sea
SKVQLIHRRDSLRAEKMLQKKLMDNQKIEIIWDSVVEEVVGDNEPKNVKGLKIKNIKTNKVEELKIDGLFIAIGHDPATHLFKDQLDMDKEGYLTTKPDSTETNVPGVFAAGDVKDKIFRQAVTAAGMGCMAALEAEKFLSH

SEQ ID NO: 103791 - protein, 229 aa, Unknown
  Bacterial polypetide isolated from the Sargasso Sea
MSAVIESHDHDHHHGPAKGLTRWLYTTNHKDIGSLYLWFSFAMFLIGGAMALVIRAELFQPGMQIVEPEFYNQMLTLHGLIMVFGAVMPAFVGLANWLVPMMVGAPDMALPRMNNLSFWILPFAFLVLLSSLFMEGGAPNFGWTFYAPLSTTYAPPSVTFFIFSVHIMGASSIMGSINVIVTIMNMRAPGMTLMKMPLFVWSWLITAYLLIAVMPVLAGAVTMMLMDIH

SEQ ID NO: 103792 - protein, 409 aa, Unknown
  Bacterial polypetide isolated from the Sargasso Sea
MKIIRNYLNNVKPNFVGEGKYTTWFPLFDAIENLVFSYGKKTKNPIHVRDAVDIQKVMVTVWLATFPAMFFGMYNLGANSLEYLESIGQQNTGDWHHYFVNMVGYDANSFIAKLWFGACYFLPIYFVVFTVGIAWEALFAIVRKHEINEGAFVSTVLFSLSCPPDIPLWQAAMGISFGLVIGKEIFGGTGKNFLNPALTGRAFLYFAYPAQISGDKVWVAGISDYNIIPEGYSGATALGMAAESGMAGITNSYTWMDAFLGNIPGSVGETSIIAILIGMVILLMTKVASYRIILGTIIGMILMSSILNIVGSETNQMFYIPWYWHAVIGSFAFGLVFMATEPVSGSGTNTGRWIYGIVIGVTVILIRVINPAFPEGMMLAILFANLLAPVIDHLVVMSNIKKRKALYNE

SEQ ID NO: 103793 - protein, 85 aa, Unknown
  Bacterial polypetide isolated from the Sargasso Sea
MIDLNSIILVIIVVAITLSIIRLITTQDTYTKVLMVNLIGTKIIFLLLIVSVLFMKRDFTDVAFVYALINFITTIALSNFLEKEE

SEQ ID NO: 103794 - protein, 43 aa, Unknown
  Bacterial polypetide isolated from the Sargasso Sea
MSYGESVSHDHHDHKPGFIKRWFFSTNHKDIGTLYIIFALIAG

SEQ ID NO: 103795 - protein, 83 aa, Unknown
  Bacterial polypetide isolated from the Sargasso Sea
MSAGKPKHDYHLVDPSPWPIYVSFATLVLAFGAVYYFHSKALWLLLIGFALVVYGAFMWWRDVIEEAEHQGHDTPVVQIGHRY

SEQ ID NO: 103796 - protein, 122 aa, Unknown
  Bacterial polypetide isolated from the Sargasso Sea
MSTNVENLHDHEHTPSGIMRWITTTNHKDIGTLYLWFSLLMFFVGGFMALIIRAELFEPGLQLVVPGFFNQMTTMHALIMIFGAVMPAFVGLANWQIPLMIGAPDMALPRLNNWSFWILPFA

SEQ ID NO: 103797 - protein, 138 aa, Unknown
  Bacterial polypetide isolated from the Sargasso Sea
YEYPDENIFFDSYMIETKDLKENEPRLLAVDNELVVPVDKVVKVMITANDVLHAWALPSFGVKRDAVPGRINETWFKAEKVGTYYGQCSELCGIKHAFMPIEVRVVTEEEYQKWLLDAKVKFAKEITDEDQLKKLASK

SEQ ID NO: 103798 - protein, 53 aa, Unknown
  Bacterial polypetide isolated from the Sargasso Sea
GHGLGRRVIKELLHAPPVVGVERVYLMTTNSAGFYRQLGFQDASPQQLMVLRR

SEQ ID NO: 103799 - protein, 211 aa, Unknown
  Bacterial polypetide isolated from the Sargasso Sea
GLTGLFLGNVIVDVPLSDTYFVVAHFHMVMGIAPVQVVFAAIYHWFPLMTGRMYNETLGRLHFWFTFLGSYLIYFPMHYLGLIGVPRRYYEMGQTEALYTQSAADLNIFITLTALVTGFAQIFFFINMFWSRKYGVPAEKNPWQANSLEWRTPSMPPGHGNFGKELPVVYRWPYDFNVPGAKDDFVPQDVPNSEVELAEGYEGTEIKAEKT

SEQ ID NO: 103800 - protein, 67 aa, Unknown
  Bacterial polypetide isolated from the Sargasso Sea
STFYALTGFHGLHVTLGSIMIMIIWWQTRVPSGRVNNQNKFPFEAVELYWHFVDGIWVVLFIILYLL

SEQ ID NO: 103801 - protein, 225 aa, Unknown
  Bacterial polypetide isolated from the Sargasso Sea
MSEAEAMNDTPEGMTGLVDDWSADRQAYQVPWGKAMMWIFLVSDTFIFSCFLVGYLNVRLTTTAPWPPQSEIFALSFGGAPIPLILIAIMTFILITSSGTMALAVNMGYRKDKVKAFWLICITAAFGASFVGMQMFEWSKLILDEGVRPWGNPFGAPQFGSIFFMVTGFHGLHVTGGVIYLLWVAFRVKRGYYDNKGFEIIEIAGLYWHFVDLVWVFIFAFFYLL

SEQ ID NO: 103802 - protein, 370 aa, Unknown
  Bacterial polypetide isolated from the Sargasso Sea
MKILRNYLDNIKPNFVSDGKHVKWFPLFDAIENLFFSYGKKTKNPIHVRDAVDIQKVMVTVWLATFPAMFFGMYNLGANSLEYLESINQQNTGDWHHYFVSIVGYDSSSFLSKLWFGACYFLPIYFVVFTVGIAWEALFAIVRKHEINEGAFVSTVLFALSCPPDIPLWQAAMGISFGLVIGKEIFGGTGKNFLNPALTGRAFLYFAYPAQISGDKVWVAGISDYNIIPEGYSGATALGVAAESGMAGITNSYTWMDAFLGNIPGSVGETSIIAILIGLAVLLITKVASYRIVLGTFVGMILMSSLLNIVGSDSNPMFAIPWYWHAVIGSFAFGLVFMATEPVSGSGTNTGRWIYGIVIGVTVILIRVIN

SEQ ID NO: 103803 - protein, 200 aa, Unknown
  Bacterial polypetide isolated from the Sargasso Sea
MTTLDSSKEIQKNNSEVKETHEDFRMFGLITFLIADGMTFAGFFAAYLTYKAVNPLPDGAIYELELPIPTLNTILLLVSSATFHKAGKALLKDKNSESQKWLSFTAFLGIIFLICQLFEYFHLPFGLTDNLFASTFYALTGFHGLHVTLGTLMILIIAWQARIKGGRLTSQNMFPLEAVELYWHFVDGIWVILFIILYLL

SEQ ID NO: 103804 - protein, 325 aa, Unknown
  Bacterial polypetide isolated from the Sargasso Sea
MSSTVSSTEIQPELTQEPRPLNASYGKLMMWFFIVSDALTFTGFLIAYGFSRFKNIDSWPIADEVFTHFPGLHGVDAPMYYVALMTFILIFSSVTMVLAVDAGHKMQKDKVIFYMFLTIIGGAVFVGSQAWEWKNFIKGEYGALETRGGMIIQFVDSNNNKRLSIEDFAVYKPQYREQHKKNNGLWFQSEPALDEYSVAEVTEGFMADPSIVVRMEKIDEKGHKIVLNRQQSIEKVKQAVYVVRGANLIHNEYGNRLFADFFFFITGFHGFHVFSGVIINIIIFINVLLGTYEKRGHYEMVEKVGLYWHFVDLVWVFVFTFFYLV

SEQ ID NO: 103805 - protein, 189 aa, Unknown
  Bacterial polypetide isolated from the Sargasso Sea
MTISLKPNNSSPEKLQPTGWLKYLSFSLDHKVIGLQYLICGFLFYLIGGSLAGAIRVELISPLSDFMPREVYNQVLTLHGTIMIFLWIVPVVNGAFGNYLIPFYVGARDMAFPRLNAVAFWLIPPSGLMLITSYFINGAAQSGWTAYPPLSITTPAAGQIIWILSVLLLGGSSIFGGINFIATILKLRR

SEQ ID NO: 103806 - protein, 230 aa, Unknown
  Bacterial polypetide isolated from the Sargasso Sea
AKRGKIFSVLIRELTVAAKLGGGVTDDNPRLRTAVDKALAANMTKDTIERAIQRGAGGLEGENLEEVSFEGYGPGGIAIIVESMTDNNNRTVAEVRHAFTKSGGNLGTNGSVSYLFEKKGLINITPDQDADQVMEISIEAGAEDIEVNEDDSITVSSSPEDFENIKKALLEKEIALIDSDVALIPETTIKADLDTSLKVFKLLEMLEDLDDTQNVTSNIEFAEGMLDQLD

SEQ ID NO: 103807 - protein, 231 aa, Unknown
  Bacterial polypetide isolated from the Sargasso Sea
MSGQNESPYYFVPHPSRHPISAAAGLLVMLGSLAAWINDHELAPLGVVVGLLWLLYTLWHWFGDAIAESEGGMYGKNVDKSYRWSMSWFIFSEVMFFGAFFGALFYAREIALHQLGSLDYKLIWPDFSAVWPNNGPAALVSTFKSMQPWPVPTINTALLLSSGATLTVSHHALREDHRKKAIIWLAATLVLGVCFLFLQGFEYFHAYNELNLTLSSGVYGSTFFLLTGFHG

SEQ ID NO: 103808 - protein, 161 aa, Unknown
  Bacterial polypetide isolated from the Sargasso Sea
MSVEKKHDYHLVDPSPWPIYTSFACLVLAIGSVYYFHNDVSWGMYLGLALLIYGAYMWFRDVVIEAEHQGHHTPVVQIHHRYGMTLFIASEVMFFVAWFWAYFDVSLFPNEFTGNVWPPKDIETFDPWDIPLINTLVLLLSGTTVTWSHHALLEDDRKSFI

SEQ ID NO: 103809 - protein, 67 aa, Unknown
  Bacterial polypetide isolated from the Sargasso Sea
MGQLFICSQVFMVFMLLLGAIMLTVILFRCMKGHFAGDNHFGFEAVAWYWHFVDVVWLGLFVFVYWL

SEQ ID NO: 103810 - protein, 151 aa, Unknown
  Bacterial polypetide isolated from the Sargasso Sea
MSAEKKHDYHLVDPSPWPIYVSFSCLVLAIGTIFYMHNDVSWGMYLGLALVVYGAYMWFRDVVIEAEHQGHHTPVVQIHHRYGMTLFIASEVMFFVAWFWAYFDASLFPNEFVGNVWPPKDIETFDPWDIPLINTLVLLLSGTTVTWSHHS

SEQ ID NO: 103811 - protein, 328 aa, Unknown
  Bacterial polypetide isolated from the Sargasso Sea
GQTDHANDGDDVILTITSNEAIAAPSCVFQSGGQNVATVNGSDTSSGAGTGWTCTTTMDADIHTDGLVTFTIDASDLAGNALSTVSATNDQSSVTFDTTSPTLTAVSIASNVIGQTDHANDGDDVILTITSNEAIAAPSCVFQSGGQNVATVNGSDTSSGAGTGWTCTTTMDADIHTDGLVTFTIDASDLAGNALSTVSATNDQSSVTFDTTSPTLTAVSIASNVIGQTDHANDGDDVILTITSNEAIAAPSCVFQSGGQNVATVNGSDTSSGAGTGWTCTTTMDADIHTDGLVTFTIDASDLAGNALSTVSATNDQSSVTFDTTSPT

SEQ ID NO: 103812 - protein, 321 aa, Unknown
  Bacterial polypetide isolated from the Sargasso Sea
MKYTFVALPAFGIVSDLISVHARKNIFGYRMMVWAIVGIGALSFFVWAHHMYVSGMNPWFGFFFASTTLIIAVPTAMKVYNWILTLWRGNIRINTVMLWCLGFIVTFVNGGITGIFLGNVSVDVPLSDTYFVVAHFHMVMGIAPLMVIMGAIYHWFPLVAGKMLDEKLGKWHFWTTFLGAYSIYFPMHYLGFIGVPRRYYEMYDSPYMTSGVGLNEFISTAAFIVGAAQLILVFNIVKTMKTGKKAEKNPWKANSLEWYTSTVPPEHGNFGERLPVVHRWPYDYNVPGAEEDYLPQTAAPSEVAHTEVEKHNLIKCLTQKL

SEQ ID NO: 103813 - protein, 97 aa, Unknown
  Bacterial polypetide isolated from the Sargasso Sea
QHFLGLAGMPRRYADYPDAFAGWNYISSIGSYISVIGLVVFFINLAYAFYKKKAAAQNPWGEGATTLEWTVPSPPNFHTFEELPKFEDEEGVEKSTS

SEQ ID NO: 103814 - protein, 254 aa, Unknown
  Bacterial polypetide isolated from the Sargasso Sea
MSAVIENHHDDHHHGPAKGLTRWLYTTNHKDIGTLYLWFSFAMFLVGGAMAMIIRAELFQPGMQIVEPEFYNQMITLHGLIMIFGGVMPAFVGLANWLIPMQIGAPDMALPRMNNLSFWILPFAFFILLSSLFMEGGAPNFGWTFYAPLSTEYAPPSTTFFIFSVHIMGASSIMGSINVVVTIMNMRAPGISLMKMPLFVWSWLITAYLLIAVMPVLAGAVTMMLMDIHFGTSFFNAAGGGDPVLFQHIFWFFG

SEQ ID NO: 103815 - protein, 303 aa, Unknown
  Bacterial polypetide isolated from the Sargasso Sea
MVVYFLTALFLGGFGNYLIPLMVGARDMVFPYLNMVSFWSFFVAVAVLLASFFVPGGPTGSGWTLYPPQAILEGTPGSGYGIMLMCISLILFVAGFTMGGLNYLITVLQARTRGMTLMRMPLTVWGIFTATVLAMLAFPALLVGALMMSLDNVLGTSFFMPTILKAGEVLEYGGGSPILFQHLFWFFGHPEVYIVALPAFGIISDLISVHARKNIFGYRMMVWAIVGIGALSFFVWAHHMYVSGMNPWFGFFFATTTLIIAVPTAMKVYNWILTLWRGNIRLNTVMLWCLGFIVTFVNGGITG

SEQ ID NO: 103816 - protein, 293 aa, Unknown
  Bacterial polypetide isolated from the Sargasso Sea
RKNIFGYRMMVWAILAIGGLSFIVWAHHMYVSGMNPYFGFFFATTTLIIAVPTALKVYNWVLTLWQGNLHLRTPMLFAIGFIFTFIHGGLTGLFLGNVTIDLPLSDTYFVVAHFHMVMGVSPVLVVFASIYHWFPLMSGKMYNETLGKWHFWLTFLGAYAVYLPMHYLGFQGVPRRYFSLGNTDFLPESAHALNTSITISAIILALAQILFFVNIFMSLRNGKKAKPNCWGATSLEWLTPDQPPKHGNWGHDLPEVHRWAYDYSVPGQEQDYTPQTVPAIEVPVGREHGVEHN

SEQ ID NO: 103817 - protein, 176 aa, Unknown
  Bacterial polypetide isolated from the Sargasso Sea
VCTCDGFFFKDKTVAVVGGGNAAVEEAMFLTKFASKVQLIHRRNSLRAEKMLQSKLMANKKIEIIWDSVVEEVIGNNDPKNVKGLKIKNVKTNKINELKIDGLFIAIGHDPATQLFKDQLDMDKEGYLTTKPDSTETNIPGVFAAGDVKDKIFRQAVTAAGMGCMAALEAEKFLSK

SEQ ID NO: 103818 - protein, 288 aa, Unknown
  Bacterial polypetide isolated from the Sargasso Sea
WKNQTQHPYVFSLGSIGMFVIGGLSGVTHSVVPADTQQTDTYYIVAHFHYVLFGGALFGIFSGLYYWFPKVWGKMYNETLGKIHFWLMLIGFNLTFGPMHWLGLQGQVRRTWVYAEETNLQFWNIIVTIGAFIIAVSIIVFMINWIFSKRNGEKAPFDPWDARTIEWTIPSPTPVWNFSKAPEVKSLDDFWHAKYEEDEEGRAVRKESADQMLLDLEEEGLNPTENIVLPNPSYFPIVLAAGLPFLGYAVIYKSIPLALVGALLLLIGGFGWGTEPLEEEVEENLEHE

SEQ ID NO: 103819 - protein, 208 aa, Unknown
  Bacterial polypetide isolated from the Sargasso Sea
MSAVVENNDHHDDHHHGPRKGIWRWMTTTNHKDIGTLYLWFSFLAFLVGGAFAMGIRAELFEPGLQLMDPIRYNQLVTMHGLIMIFGGVMPAFVGLANWLIPMQIGAPDMALPRMNNLSFWLLPTAFAILMSTAFMEGGMPGFGWTFYAPLSTNYPNVAFFVFAVHIMGVSSIMGSINVIVTIMNMRAPGMTLMQMPLFTWSWLITAY

SEQ ID NO: 103820 - protein, 183 aa, Unknown
  Bacterial polypetide isolated from the Sargasso Sea
MSSKDQKHDYHLVDPSPWPIYTSFATLITAVGSVYYFHSKVMWAMLLGFALLIYGAYMWFRDVVNEAEHQGHHTPVVQIHHRYGMTLFIASEVMFFVAWFWAYFDASLYPSAFVGGVWPPKDIEVFNPWDIPLINTLVLLLSGTTVTCAHHSLLEDDRKGFIQGLWATVLLGFFFTLLQIYEY

SEQ ID NO: 103821 - protein, 324 aa, Unknown
  Bacterial polypetide isolated from the Sargasso Sea
NGLYTMHGTVMLFLFLFPVLNGLNNLLIPTMIGAPDMAFPRLNAAAFWLVPVFAVLLMASFFVPGGPAQAGWWSYPPISIQNPLGHFVNGQQLWLLAVALSGISSIFGAINFVTTIIRMRAPGMGFFKMPLYCWTAWGAQTLQLVGLPALTGGAIMLLFDLSFGTSFFKPEGGGDPVLYQHFFWFYSHPAVYVMVLPVFGIFSEVFTCYARKPLFGYKFVALASFGIVFLALIVWVHHMFYTGTPNWMRILFMFTTMLIAIPTGVKVFAWVATLWRGKLRLTTPMLFCLGGLVNFIFAGITGIMLGTVPIDIHVGNTYFVVAHF

SEQ ID NO: 103822 - protein, 224 aa, Unknown
  Bacterial polypetide isolated from the Sargasso Sea
MSAEKKHDYHLVDPSPWPIYTSFSCLVLALGAVYYMHADVSWGMYLGLALLIYGAYMWFRDVVIEAEHQGHHTPVVQIHHRYGMTLFIASEVMFFVAWFWAYFDVSLFPNEFVGNVWPPKDIETFDPWDIPLINTLILLLSGTTVTWSHHALLEDDRKGFINGLILTVILGVCFTALQAYEYHHATFAFSDHIYGSVFYMATGFHGFHVIVGTIFLAVCLWRGN

SEQ ID NO: 103823 - protein, 95 aa, Unknown
  Bacterial polypetide isolated from the Sargasso Sea
AGLGLPFLVSQMVEYFTLPFGLTDNLYASTFFAATGFHGLHVTLGALMTLIVWWQARANGGRISPENHFPLEAAELYWHFVDGIWVILFVILYLL

SEQ ID NO: 103824 - protein, 311 aa, Unknown
  Bacterial polypetide isolated from the Sargasso Sea
VTNHGTIMIFWVAMPVLIAAFGNWMIPLMIGCDDMVFPRLNRLSYQIFLVSALVLILSFFVEGGGFGGAWTSYPPLSAAAEYNLTNWGASLWLLAVFLEIVAFLLGGINFITTTMNARAPGMGMMDIPIVIWMINIAVILFMASVGPLVAGAVMLFFDQRLGTSFFLPSGGGDPLLWEHLFWFFGHPEVYVVLLPTMGIVAEIITVFSRKKLFGYRTILYTAFGTGGLSFIVWAHHQFVAGIDPRMANVFVVTTILISIPIAEMLFSFIATLYGGSIEFSTPMLWALGFLVSFLIGGVTGIYLGASALDVY

SEQ ID NO: 103825 - protein, 284 aa, Unknown
  Bacterial polypetide isolated from the Sargasso Sea
PEIYNSLGAMHGTIMIFLGVVPLAVGAFGNYLVPLQIGAPDMAFPKLNAASYWSYFAGGVVMMSSFFSEEGAARSGWTSYPPLADIEVGQTIWLIGMIFLITSSLLGSMNIITTIVQLRAPGLTWSRLPFFVWTQLVTSFLLVLAFPPLEAAAVLQLMDRVAGTSFFLPSGLVISGEALAVSGGGSPLLWQHLFWFLAHPEVYVLILPAMGIISEVIANNTRKPLWGYNSLVYSVIFLGFMSFVVWAHHMFLTGMGTAMSSFFQITTMIISIPSVIILSALFIL

SEQ ID NO: 103826 - protein, 120 aa, Unknown
  Bacterial polypetide isolated from the Sargasso Sea
MTDTAKHPYHLVDPSPWPALGALAALCLAGGLVLYMHEIAGGVALTSIGGVLTLLTMVVWWRDVIREATYEGHHTPIVQLGMRYGMVLFIASEVMFFVAWFWAFFDASLFAGEAKLVIAL

SEQ ID NO: 103827 - protein, 318 aa, Unknown
  Bacterial polypetide isolated from the Sargasso Sea
PNPRPTSPHPLPTLDMTVATPSDTLVSPPRLQPTGWLRYLSFSVDHKVIGLQYLVCGFLFYLVGGALAGAIRTELASPVSDFMARDVYNQVLTLHGTVMIFLWIVPVVNGAFGNYLIPFYVGARDMAFPRLNAVAFWLIPPAGLLLITSYFLTGAAQSGWTAYPPLSITTPATGQIIWILSVLLLGGSSIFGGINFIATILKLRRPGLKLMQLPMYCWAMLGTSILVVLSTPVLAGTLVLLSFDIVAHTGFFNPTLGGNVVVYQHLFWFYSHPAVYIMVLPAFGLVSEILPVHARKPLFGYVTMVYSIMAIVILGLVV

SEQ ID NO: 103828 - protein, 234 aa, Unknown
  Bacterial polypetide isolated from the Sargasso Sea
LVLSDLMRLQLGFPGKFAFIDANHYYQFVTMHGMIMVIYLLTALFLGGFGNYLIPLMLGARDMVFPFLNMLSYWVYLLAVLVLVASFFVPGGPTGAGWTLYPPQAILPGTPGVEWGIVLMLVSLAIFIVAATMGGLNYVTTTLQARTRGMTLMRMPLTVWGIFIATIMALLAFPALFVSAVMMLFDRTLGTSFFIPAVVSMGQTLKHAGGSPLLFQHLFWFFGHPEVYIVALPA

SEQ ID NO: 103829 - protein, 238 aa, Unknown
  Bacterial polypetide isolated from the Sargasso Sea
IAIPSAVKAFNYITTLWKGNLQLNPAMLFSIGLVSTFITGGLTGIILGDSTLDINVHDTYFVVAHFHLVMGISALYGMFAGIYHWFPRMFGRMLNKNLGYVHFWVTAICAYGVFFPMHFIGLAGLPRRYYTNTNFPLFDDLQNVNVLITMFALVGGAFQLVFLYNFFSSIFYGKKAVMNPWKSNTLEWTAPVEHIHGNWPGAIPEVHRWPYDYSNPNHEEDFVPQNVPMKEGEEVLHH

SEQ ID NO: 103830 - protein, 38 aa, Unknown
  Bacterial polypetide isolated from the Sargasso Sea
NGHFTPEKHIGFEAAAWYWHFVDVVWLFLFLVVYVWGR

SEQ ID NO: 103831 - protein, 199 aa, Unknown
  Bacterial polypetide isolated from the Sargasso Sea
MSGDQKHQYHLVEPSPWPALGSAAGFTLFLGLTLFMHEYPYSIYVLGAGLFMVIATMFYWWRDVVREAEYQGHHTPIVQIGMRYGMIFFICSEVMFFVAFFWAFFDSSLYPDTGVWPPADIVALDPFDLPLINTLILLLSGCTVTWSHHALQHNNRKDFIRGLVLTIILGAIFTAVQAYEYQHATFAFTDGIYASTFYM

SEQ ID NO: 103832 - protein, 281 aa, Unknown
  Bacterial polypetide isolated from the Sargasso Sea
MPAMGLVSEIIANQARKPIFGYKAMVLSILAIAILSFVVWAHHMFLTGMNPFVGAIFVFLTLLIAIPSAIKSFNWISTIFRGNIQFNPQMLFALGFVSTFISGGLTGIWLGNSAMDIALHDTYFVVAHFHIVMGVSAFFGMIAGVYHWFPKMFGRFMNRQLGYFHFFLTFAAAYGVFWPMHYMGMAGVPRRYYMFTKFETFNQFDDLNVMITIFAFLGFIAQVIFVVNFFMSIWHGKKMTNKNPWKSSTLEWTTGVEPLHGNWPGKIPTVYRWPYDYSKPG

SEQ ID NO: 103833 - protein, 312 aa, Unknown
  Bacterial polypetide isolated from the Sargasso Sea
AFIGRCINDELGQCARNKFLYANDLKAGEVLEYGGGSPILFQHLFWFFGHPEVYIVALPAFGIISDLISVHARKNIFGYRMMVWAIVGIGALSFFVWAHHMYVSGMNPWFGFFFATTTLIIAVPTAMKVYNWILTLWRGNIRLNTVMLWCLGFIVTFVNGGITGIFLGNVSVDVPLSDTYFVIAHFHMVMGIAPLMVIMGAVYHWFPLVAGRFLDEKLGKWHFWLTFLGAYSIYFPMHYLGFIGVPRRYFEMYDSPYVTSAVGMNEFISLAAFIVGAAQFILIYNIIKTLKTGKPAGKNPWQACSLEWLTPS

SEQ ID NO: 103834 - protein, 181 aa, Unknown
  Bacterial polypetide isolated from the Sargasso Sea
AVVMSLFVSENIRLFGWSLTLMKGGLLEGHLRAWTGIALPSLLYNTGIIIFGLVYVYLPFMLFPLAQGIAMVPEDARQAAADLGANRWQILLYVDLPLSSPGIMVGSLLCFVLGAGAMSESKLLGGQSVIVIADDIETAFTFGQNWPLGASLSMILIIIIGALAIYGINKIDLDTVMGRKR

SEQ ID NO: 103835 - protein, 306 aa, Unknown
  Bacterial polypetide isolated from the Sargasso Sea
SLSLELTTTDHKYVGILYFLFGFFFFLVGGLLALIFRIQLALPENDFLTFDEYNSFFSLHGTTMIFLAAMPMIAGFMNYILPLQIGAKDLAFPRINAFGFWILVAAAPLIFTGIWSGESADITWVMYPPYSSLAGLGTAQGPNAGTISFIAGVALLGASSTLAGVNFVTTTFTMRAPGVTWMKMPLFTWSVLISVFMLYLSLPPFIIGVFFLLFDSTLGTVFFTSGGDPLLFQHLFWFFGHPEVYVVIVPAFGIVSEVLATSARRSIFGYKSMVYAMVGIGVVGFIVWGHHMLTSGMDPFWRALFM

SEQ ID NO: 103836 - protein, 185 aa, Unknown
  Bacterial polypetide isolated from the Sargasso Sea
LAIPSFKLLYQQEKSENYDMTVKVIGHQWYWEYEYPDHGDFYFESYMVQEQDLEEGDLRLLTVDNPLVIPANKNIQILITAGDVLHSWAVPSMGLKTDAVPGRLNETWVNVKEPGIYRGQCSEICGSGHGFMPVVVKVLPEREFMAWANEAKNNYAINEDIEINKPEEEIVISQNNIIQLEENNL

SEQ ID NO: 103837 - protein, 288 aa, Unknown
  Bacterial polypetide isolated from the Sargasso Sea
YSIIFAVSVFFAGFGAANAITGNGSTMLLLGMLAVVITMSFWFSVVMKESKAGLDTPQLNNSYVFGMGWFIFSEVMFFFAFFGALFYIRQFAVPWLGGEGEKGLAGELLWPEFEATWPPMITPEQSIMGDQAVTKGPDESMYLHGISGIIKWLPLWNTIVLLTSSGTVHFAHIALKENNRKRFNFWLGITVCLAFIFVILQAAEYYEAYAHLGLTLNSGVYGTTFFMLTGFHGMHVLIGGIFLLTQLLRSTGFKHFTEKEHFGFEAASWYWHFVDVVWVCLFLFVYII

SEQ ID NO: 103838 - protein, 88 aa, Unknown
  Bacterial polypetide isolated from the Sargasso Sea
MFRGSITFETPMLFSIAFVALFTIGGFSGLMLAIVPADFQYHDTYFVVAHFHYVLVPGALFGIIAAAYYWLPKWTGNMYDETLGKLHF

SEQ ID NO: 103839 - protein, 181 aa, Unknown
  Bacterial polypetide isolated from the Sargasso Sea
MSAEKKHDYHLVDPSPWPIYTSFACLVLAIGAIFYMHNGISWGMYLGLALLIYGAYMWFRDVVIEAEHQGHHTPVVQIHHRYGMTLFIASEVMFFVAWFWAYFDISLFPNEFVGNVWPPKDIETFDPWDIPLINTLVLLLSGTTVTWAHHALLEDDRKGFIQGLTLTVILGFFFTLLQAYE

SEQ ID NO: 103840 - protein, 300 aa, Unknown
  Bacterial polypetide isolated from the Sargasso Sea
MSSESSYYVPASSKLPIFMAISLLLFVYGAGYTINDLGKEDTYSHWILISSFLLMWGTMFFWFSEVIKENDAGMYSNQLNTSFVHGMSWFIFSEVMFFFAFFLALGYVRIFAVPWLGGEGEKGISNILWPGFEASWPLMETPDNERFPGAHHNMSIPPITKIHTWLPFWNTLCLVTSSGTIALAEAALKKGNRKSFKAWMVATISLGYIFVVLQSVEYYEAYAHMGLTLGAGIYGTTFFLMTGFHGFHVCLGAIILTIMTIRGFQGAFSEHDHFGLAAGSWYWHFVDVVWILLVLVVYIF

SEQ ID NO: 103841 - protein, 277 aa, Unknown
  Bacterial polypetide isolated from the Sargasso Sea
MTMFRLPMTIWAMFITAVLQAFALPVLTAAGFMQLADRSLGTGFFTPEGNIVNNAVATAGGGQPLLWQHLFWFYSHPAVYIMILPAMGMVSDILTCFARKPLFGYRPMVYSVAGIAGLGFIVWGHHMFMSGMNPALGTTFMVSTMMIALPSAVKTFNWLGTIWAGRIQFTTSMLFALSFVSMFIIGGLSGIFMAATPVDIFIHDTYFIVAHFHYVLFAGTAMGVWAAIYFWFPKMFGRTMNEFWGKIHFFLTFIFLNGTFFTMHILGAVGFPRRLAD

SEQ ID NO: 103842 - protein, 304 aa, Unknown
  Bacterial polypetide isolated from the Sargasso Sea
SHSPDTFAFIDPTNYLQFVTMHGMIMVIYLLTALFLGGFGNYMIPLMLGARDMVFPYVNMVSFWVYFAAVLILVASFFVPGGASGAGWTLYPPQAIMPGTPGTDGGIILMLLSLALFIVGFTMGGLNYVTTVLQQRTRGMSLMRMPLTIWAIFIATILALLAFPALLVSAIMMLLDRLLETSFFMPAIISAGGQTDYDGGSPVLFQHLFWFFGHPEVYIVALPAFGLVSEILSVHARKAIFGYRMMVWAIVAIGALSFIVWAHHMYVSGMNPYFGFFFATTTLIIAVPTAIKVYNWVLTLWRGN

SEQ ID NO: 103843 - protein, 277 aa, Unknown
  Bacterial polypetide isolated from the Sargasso Sea
TALFLGGFGNLLIPLMCGARDMAFPYVNMLSYWAFVVAVVVLLASFFVPGGPTGAGWTLYPPQAITAGTPGYNGGIILMLISLILFVAGFTMGGLNYIITVLQLRARGMTLMRMPLTIWGIFTATVLAMFAFPALLVGCLMMTLDSLLGTSFFMPAMVSLGETLTHEGGSPILFQHLFWFFGHPEVYIVALPAFGIVSDLLSVHSRKTIFGYRMMVWAIVGIGALSFFVWAHHMYVSGMNPWFGFFFATTTLIIAVPTAIKVYNWILTLWRGNIQLS

SEQ ID NO: 103844 - protein, 195 aa, Unknown
  Bacterial polypetide isolated from the Sargasso Sea
MGGEGPTAKGLAGELLWPDFEATWPPMITPEESLLGENAITKGPDESMYLKSFTSVLTWLPLWNTIVLLSSSGTVHFAHVALKQNNRKRFNFWLAITVFLAFVFVILQALEYYEAYAHLGLTLNSGVYGTTFFMLTGFHGMHVLIGGIFLLTQLVRSSGFKHFSEKEHFGFEAASWYWHFVDVVWVCLFLFVYIL

SEQ ID NO: 103845 - protein, 198 aa, Unknown
  Bacterial polypetide isolated from the Sargasso Sea
MSAEKKHDYHLVDPSPWPIYTSFACLVLAIGAIFYMHNDVSWGMYLGLALLIYGAYMWFRDVVIEAEHQGHHTPVVQIHHRYGMTLFIASEVMFFVAWFWAYFDISLFPNEFVGNVWPPQDIETFDPWDIPLINTLVLLLSGTTVTWAHHSLLEDDRKGFIQGLTATVALGFFFTLLQAYEYHHATFDYSGHIYGAVF

SEQ ID NO: 103846 - protein, 177 aa, Unknown
  Bacterial polypetide isolated from the Sargasso Sea
IPVIILIAMAIPSFKLVYQQDIIPEADMTVKVIGHQWYWEYQYPEHFDITFESYMIPDEELEEGDVRLLSVDNKLVLPVNKNIHVLVTAGDVLHSFAMPSLGVKKDAVPGRLNETWMNIEKPGIYRGQCSELCGTGHGYMPIVIEAVTEEEFLAWAMDTKIKYAMNEKNTFAKLKSK

SEQ ID NO: 103847 - protein, 101 aa, Unknown
  Bacterial polypetide isolated from the Sargasso Sea
MSYDTSAESHLDHHDHKPGFIRRWFFSTNHKDIGTLYIIFALLAGLIGGFFSLLMRAELAAPGLDVVADGQVWNVIITAHGLLMVFFVVMPALIGGFGNWF

SEQ ID NO: 103848 - protein, 263 aa, Unknown
  Bacterial polypetide isolated from the Sargasso Sea
VEPEFYNQMLTLHGLIMVFGAVMPAFVGLANWLVPMMVGAPDMALPRMNNLSFWILPFAFFILLSSLFMEGGAPNFGWTFYAPLSTTYAPPSVTFFIFAVHIMGASSIMGSINVIVTIMNMRAPGMTLMKMPLFVWSWLITAYLLIAVMPVLAGAVTMMLMDIHFGTSFFNAAGGGDPVLFQHIFWFFGHPEVYIMILPAFGIASHIIETFSRKQLFGYASMVWAMASIAILSFVVWAHHMFTVGLPLAAELFFMWATMLIAV

SEQ ID NO: 103849 - protein, 289 aa, Unknown
  Bacterial polypetide isolated from the Sargasso Sea
QLQPTPEMTVTLLPDTGTERPPRLQPTGWLRYFSFSVDHKVIGLQYLVCGFLFYLIGGALAGAIRTELASPVADFMARDVYNQVLTLHGTVMIFLWIVPVVNGAFGNYLIPFYVGARDMAFPRLNAVAFWLIPPAGLLLISSYFITGAAQSGWTAYPPLSITTPATGQVLWILSVLLLGGSSIFGGINFIATILKLRRPGLKLMQLPMYCWAMLGTSILVVLSTPVLAGTLVLLSFDIVAHTGFFNPTLGGNVVVYQHLFWFYSHPAVYIMVLPAFGLVSEILPIHARK

SEQ ID NO: 103850 - protein, 264 aa, Unknown
  Bacterial polypetide isolated from the Sargasso Sea
HKKIGIMYGFTAIFFFLLGGLEAVVIRSQLAFAGNEIVSPDIYNQLFTMHALTMIFLAIMPLAVTFFNLIVPLQIGARDVAFPRLNALSYWIYLSGGLLLNAGWILGGAADSGWFAYAPLTLDQYGSGGRGMDFYSLGLLVLGVSSVAGGLNFLVTIINMRAPGMTLMRMPVFTWMAFITSILLVTAMPVITIALIELALDRILGTQFFAPGAGGDPLLWQHLFWVFGHPEVYILILPAMGIVSEVLPTFSKKPLFGYPFIIFS

SEQ ID NO: 103851 - protein, 306 aa, Unknown
  Bacterial polypetide isolated from the Sargasso Sea
AGGSPILFQHLFWFFGHPEVYIVALPAFGIVSDLISVHARKNVFGYRMMVWAIVIIGALSFIVWAHHMYVSGMNPWFGFFFATTTLIIAVPTAIKVYNWVLTLWRGNIHLTIPMLFSLGFIVTFVNGGITGLFLGNVIIDVPLSDTYFVVAHFHMVMGIAPLMVVFGAIYHWYPLITGRHLNLTLGKIHFWVTFVGAYAIYFPMHYLGFIGVPRRYFEMYDSPYMTSGVGLNQFITIAALIVGFTQFIFLYNIFTSWYKGEKSERNPWKANSLEWHTPDFPPTHGNFGKEFPVVYRWPYDFSVLRI

SEQ ID NO: 103852 - protein, 51 aa, Unknown
  Bacterial polypetide isolated from the Sargasso Sea
GLGRRVIEELLHTPPVVGVERVYLMTTNSAGFYRQLGFQDADPQQLMVLRR

SEQ ID NO: 103853 - protein, 204 aa, Unknown
  Bacterial polypetide isolated from the Sargasso Sea
FFFAFFLALGYVRVFAVPWLGGEGEKAIANMLWPEFEATWPVMQTPDQSLFQGPKENMNFPGFANVGHWLPFWNTLCLITSSGTITIAEHALKKGNRTSFKFWMVMTLILGFTFVYLQGLEYYEAYDHMGLTLGAGIYGTTFFLLTGFHGFHVCMGAIILTIMTIRGFRGAFTKEDHFGLAAGSWYWHFVDVVWILLVLVVYVF

SEQ ID NO: 103854 - protein, 266 aa, Unknown
  Bacterial polypetide isolated from the Sargasso Sea
VAVLMASFFVPGGPTGAGWTLYPPQTILEGTPGSGMGILLMLISLALFVIGFTMGGLNYMITVLQARTRGMTLMRMPLTVWGIFTATVLAMLAFPALLVSAIMMTLDKVIGTSFFMPTILKAGEVLEYGGGSPILFQHLFWFFGHPEVYIVALPAFGIVSDLISVHARKNIFGYRMMVWAIVGIGALSFFVWAHHMYVSGMNPWFGFFFATTTLIIAVPTAMKVYNWILTLWRGNIRINTVMLWCLGFIVTFVNGGYYWYFFRKRS

SEQ ID NO: 103855 - protein, 207 aa, Unknown
  Bacterial polypetide isolated from the Sargasso Sea
MSAEKKHDYHLVDPSPWPIYTSFACLVLAIGSVYYLHTDVSWGMYLGFALLIYGAYMWFRDVVIEAEHQGHHTPVVQIHHRYGMTLFIASEVMFFVAWFWAYFDASLFPNEFVGNVWPPKDIETFDPWDIPLINTLILLLSGTTVTWSHHALLENDRKGFIQGLWLTVILGFCFTLLQIYEYQHASFSFSDHIYGSVFYMATGFHGF

SEQ ID NO: 103856 - protein, 151 aa, Unknown
  Bacterial polypetide isolated from the Sargasso Sea
MSAGEKKHDYHLVDPSPWPIYTSFATLVLAIGSIYYFHSKVMWAMILGLALVCYGAFMWFRDVVIEAEHQGHHTPVVQIHHRYGMTLFIASEVMFFVAWFWAYFDASLFPSEFVGNVWPPKDIEVFDPWDIPLINTLVLLLSGTTVTWAHH

SEQ ID NO: 103857 - protein, 164 aa, Unknown
  Bacterial polypetide isolated from the Sargasso Sea
YSQDEIPKADVTIKAIGYQWYWGYEYPDENIIFDSYMIDEKDLKENQPRLLAVDNAVYVPVNKVVKVMITANDVLHAWALPSFGVKRDAIPGRINETWFKADRTGTFYGQCSELCGIKHAFMPITVNVVSEDEYNKWLEEAKVKFAKEEINTKIKVAKKIKDLN

SEQ ID NO: 103858 - protein, 282 aa, Unknown
  Bacterial polypetide isolated from the Sargasso Sea
FDFIDPSSYLQFVTMHGMIMVVYLLTALLLGGFGNYMIPLMCGARDMVFPYLNMLSFWFYFVSVLILLASFFVPGGPTGAGWTLYPPQAILNGTPGYDWGIILMLVSLAVFVVAFTMGGLNYVTTVLQARTSGMTLMRMPLTVWAIFVATILGLLAFPALLVSAIMMLLDKLIGTSFFMPALVSLGETLDYTGGSPVLFQHLFWFFGHPEVYIVALPAFGMVSDVISVHARKNIFGYRMMVWAIVAIGALSFVVWAHHMYVSGMHPAFGFFFATTTLIIAVP

SEQ ID NO: 103859 - protein, 188 aa, Unknown
  Bacterial polypetide isolated from the Sargasso Sea
MVDPSPLPFLSSIAGLAMAAGLVFYMHYGTSWLLILGTIGLLTIMFLWWRDVIKESTFQKVHTPVVELGLRYGMALFIASEVMFFVAFFWAFFDASLTPKLPIEEFSETFDSNGAVGIWPPEGIKTFDPLDVPFLNTLILLMSGTTCTWAHHAVREGHRDQAIQALWCTVGLGIFFSFMQGVEYYEAA

SEQ ID NO: 103860 - protein, 217 aa, Unknown
  Bacterial polypetide isolated from the Sargasso Sea
IGALSFIVWAHHMYVSGMNPYFGFFFATTTLIIAVPTAIKVYNWVLTLWRGNIHLTIPMLFSLGFIVTFVNGGITGLFLGNVIIDIPLSDTYFVVAHFHMVMGIAPLMVIFGAIYHWFPLISGRHLNQTLGKIHFWISFIGAYAIYFPMHYLGFIGVPRRYYEMYDSPYMTTGVGLNQFITIAALIVGFTQILFLYNIIHSTFKGEKSEKNPWKANS

SEQ ID NO: 103861 - protein, 148 aa, Unknown
  Bacterial polypetide isolated from the Sargasso Sea
VKVIGHQWYWEYQYPEQDDISFESYMIPDKDLEEGDIRLLTVDNKLVLPINKNIHVLVTAGDVLHSFAMPSLGVKKDAVPGRLNETWMNIEKTGIYRGQCSELCGTGHGYMPIVIEAVSQEDFAAWVNDTKTRLAMNEKNTFAKANTE

SEQ ID NO: 103862 - protein, 268 aa, Unknown
  Bacterial polypetide isolated from the Sargasso Sea
AFPALLVSAIMMTLDKILGTSFFMPTILKAGEVLEYGGGSPILFQHLFWFFGHPEVYIVALPAFGIVSDLISIHSRKNIFGYRMMVWAIVGIGALSFFVWAHHMYVSGMNPWFGFFFATTTLIIAVPTAMKVYNWILTLWRGNIRLNTVMLWCLGFIVTFVNGGITGIFLGNVSVDVPLSDTYFVIAHFHMVMGIAPLMVIMGAVYHWFPLVAGKMLDEGLGKWHFWITFLGAYSIYFPMHYLGFIGVPRRYFEMYDSPYMTSAVGMN

SEQ ID NO: 103863 - protein, 209 aa, Unknown
  Bacterial polypetide isolated from the Sargasso Sea
MSAEKKHDYHLVDPSPWPIYVSFSCLVLAIGAVYYMHSDVSWGMYLGLALLIYGAYMWFRDVVIEAEHQGHHTPVVQIHHRYGMTLFIASEVMFFVAWFWAYFDVSLFPNDFVGNVWPPKDIVTFDPWDIPLINTLVLLLSGTTVTWSHHSLLEGDRKGFIQGLVFTVILGAFFTALQAYEYHHATFAFSETYYGSVFIWRQAFMVFHV

SEQ ID NO: 103864 - protein, 142 aa, Unknown
  Bacterial polypetide isolated from the Sargasso Sea
MSASTDEHTEHGHDYHLVDPSPWPALGAFAAFLLTFGVVLFLHPDTLGEGLESMIASLGALIFVPGFLLVLYTMFVWWRDVILEAEVDGHHSPVVQLGLRYGMALFICSEVMFFVAFFWAFFESSLFPKEFPYELAGGVWPP

SEQ ID NO: 103865 - protein, 109 aa, Unknown
  Bacterial polypetide isolated from the Sargasso Sea
MILRQLHFWLFFIGVNVTFFPQHFLGLAGMPRRIPDYPDAYAGWNLVSTYGSYISFAATLIFLFAIVYALFFGKKEVANPWGEGADTLEWTLSSPPPFHQFETLPKFKG

SEQ ID NO: 103866 - protein, 110 aa, Unknown
  Bacterial polypetide isolated from the Sargasso Sea
MSAEKKHDYHLVDPSPWPIYTSFACLVLAIGTIFYMHNDVSWGMYLGLALLIYGAYMWFRDVVIEAEHQGHHTPVVQIHHRYGMTLFIASEVMFFVAWFWAYFDISFFQM

SEQ ID NO: 103867 - protein, 151 aa, Unknown
  Bacterial polypetide isolated from the Sargasso Sea
MLLLSYVLSLGAVFAIFAGFYYWFGKMSGYEYSEWMGQLHFWLTFIGVNIVFFPQHFLGLAGMPRRYADYPDAFADWNYISSIGSYISIVGLAVFFANLIYAFAKKKKAAQNPWGEGATTLEWTVPSPPNFHTFDELPKFENVEGAEKSSS

SEQ ID NO: 103868 - protein, 309 aa, Unknown
  Bacterial polypetide isolated from the Sargasso Sea
MHPGGPASSGWWSYPPMSLQNPLGHFINGEFLWILAVALSGISSIMGAVNFVTTIIRMRAPGMGFFKMPVFVWTAWAAQTIQLVGLPALTGGAVMLLFDLSFGTSFFRPEGGGDPVLFQHFFWFYSHPAVYVLVLPVFGIFSELFPVYARKPLFGYRFVAVASFGITFLSLIVWAHHMFYTGTPNWMRHIFMFTTMLIAVPTGVKVFAWLGTLWQGNLRLNTPMLFCLGGLFNFIFAGITGVMLATVPIDIHVGNTAFVVAHFHYVIFNTIGFGVFAGIYHWFPKFTGRMYYEGLGKVHFALTFIGATL

SEQ ID NO: 103869 - protein, 101 aa, Unknown
  Bacterial polypetide isolated from the Sargasso Sea
IFFPQHFLGLAGMPRRYADYPDAFAGWNYISSIGSYVAVAGLAVFFLNLIYAFIKKKATTKNPWGEGATTLEWTVPSPPNFHTFEELPKFEDDQETQKSHS

SEQ ID NO: 103870 - protein, 272 aa, Unknown
  Bacterial polypetide isolated from the Sargasso Sea
LIPLMCGARDMAFPYVNMLSYWAFVVAVVVLLASFFVPGGPTGAGWTLYPPQAITAGTPGYNGGIILMLISLILFVAGFTMGGLNYIITVLQLRARGMTLMRLPLTIWGIFTATVLAMFAFPALLVGCLMMTLDSLLGTSFFMPAMVSLGETLTHEGGSPILFQHLFWFFGHPEVYIVALPAFGIVSDLLSVHSRKTIFGYRMMVWAIVGIGALSFFVWAHHMYVSGMNPWFGFFFATTTLIIAVPTAIKVYNWILTIWRGNIVLSLPYVIF

SEQ ID NO: 103871 - protein, 277 aa, Unknown
  Bacterial polypetide isolated from the Sargasso Sea
HLFWFFGHPEVYIVALPAFGIVSDLISVHARKNIFGYRMMVWAIVGIGGLSFFVWAHHMYVSGMNPWFGFFFATTTLIIAVPTAMKVYNWILTLWRGNIRINTVMLWCLGFIVTFVNGGITGIFLGNVSVDVPLSDTYFVIAHFHMVMGIAPLMVIMGAVYHWFPLVAGKMLHEGLGKWHFWITFLGAYSIYFPMHYLGFIGVPRRYFEMYDSPYMTSAVGMNEFISIAAFIVGAAQFILVFNIIKTLKTGKKAEQNPWKANSLEWYTSTVPPEHGN

SEQ ID NO: 103872 - protein, 92 aa, Unknown
  Bacterial polypetide isolated from the Sargasso Sea
TFFPQHFLGLAGMPRRIPDYPDAYAGWNLISSYGSYLSFASTLIFFFAIVYALFFGKKAASNPWGEGADTLEWTLSSPPPFHQFETLPEFKE

SEQ ID NO: 103873 - protein, 254 aa, Unknown
  Bacterial polypetide isolated from the Sargasso Sea
VLMASFFVPGGPTGAGWTLYPPQTILEGTPGAGMGILLMLISLSLFVIGFTMGGLNYMITILQARTRGMTLMRMPLTVWGIFTATVLAMLAFPALLVSAIMMTLDKVLQTSFFMPTILKAGEVLEYGGGSPILFQHLFWFFGHPEVYIVALPAFGIVSDLISVHARKNIFGYRMMVWAIVGIGALSFFVWAHHMYVSGMNPWFGFFFATTTLIIAVPTAMKVYNWILTLWRGNIRINVVMLWCLGFIVTFVNGG

SEQ ID NO: 103874 - protein, 173 aa, Unknown
  Bacterial polypetide isolated from the Sargasso Sea
VGNTYFVVAHFHYVIFNAIVLGVFAAVYHWFPKFTGHMYYEGLGKLHFALTFIGCTLNWLPLHWAGLLGMPRRVASYDPEFAIWNVIASVGAFLLGVAAIPFILNMVSSWARGPKAPPNPWGAIGLEWLLPSPPPAENFEDDVPTVLNNPYGYGLDQPQVADEAFYVRRAQEA

SEQ ID NO: 103875 - protein, 305 aa, Unknown
  Bacterial polypetide isolated from the Sargasso Sea
SFSHLFWFFGHPEVYIVALPAFGIISDLISVHARKNIFGYRMMVWAIVAIGALSFFVWAHHMYVSGMNPWFGFFFATTTLIIAVPTAMKVYNWILTLWRGNIRLNTVMLWCLGFIVTFVNGGITGIFLGNVSVDVPLSDTYFVIAHFHMVMGIAPLMVIMGAVYHWFPLVAGRFLDEKLGKWHFWLTFLGAYSIYFPMHYLGFIGVPRRYFEMYDSPYVTSAVGMNEFISLAAFIVGAAQFILIYNIVKTLKTGKPAGHNPWQACSLEWLTPTVPPEHGNWGDRLPTVHRWAYDYSVPGAKEDFI

SEQ ID NO: 103876 - protein, 177 aa, Unknown
  Bacterial polypetide isolated from the Sargasso Sea
LYQQEKSENYDMTVKVIGHQWYWEYEYPDHGDFYFESYMVQEQDLEEGDLRLLTVDNPLVIPANKNIQILITAGDVLHSWAVPSMGLKTDAVPGRLNETWVNVKEPGIYRGQCSEICGSGHGFMPVVVKVLPEREFMAWANEAKNNYAINEDIEINKPEEEIVISQNNIIQLEENNL

SEQ ID NO: 103877 - protein, 155 aa, Unknown
  Bacterial polypetide isolated from the Sargasso Sea
MSAEKKHDYHLVDPSPWPIYTSFACLVLAIGAIFYMHNGISWGMYLGLALLIYGAYMWFRDVVIEAEHQGHHTPVVQIHHRYGMTLFIASEVMFFVAWFWAYFDISLFPNEFVGNVWPPKDIETFDPWDIPLINTLVLLLSGTTVTWAHHALLED

SEQ ID NO: 103878 - protein, 218 aa, Unknown
  Bacterial polypetide isolated from the Sargasso Sea
MSAEKKHDYHLVDPSPWPIYTSFSCLVLALGSVYYLHTDISWGMYLGFALLIYGAYMWFRDVVIEAEHQGHHTPVVQIHHRYGMTLFIASEVMFFVAWFWAYFDVSLFPNEFVGNVWPPKDIETFDPWDIPLINTLILLLSGTTVTWSHHALLEDDRKSFIQGLWLTVILGFCFTLLQIYEYQHASFSFSEHIYGSVFYMATGFHGIHVLVGTIFLAV

SEQ ID NO: 103879 - protein, 238 aa, Unknown
  Bacterial polypetide isolated from the Sargasso Sea
GIDFWIIGLQVFGVASLAASFNFIVTIINMRAPGLSFMRLPLFTWMTFITAILLILAFPVITVALIELMLDRTFDFNFFNTKAGANPLLWQHLFWIFGHPEVYILILPAMGIVSEILPTFSKKPVFGYAAMVLAAAFIAFMGWLVWSHHMFTTGLGPIANSVFTITTMLIAIPTGVKMFNWLGTMWGGDIEFNTPVLFSVGFLSMFLIGGISGVMHSFSASDYQQQDTYFIVAHIHYV

SEQ ID NO: 103880 - protein, 26 aa, Unknown
  Bacterial polypetide isolated from the Sargasso Sea
EAAAWYWHFVDVVWLFLFAAIYVWGS

SEQ ID NO: 103881 - protein, 242 aa, Unknown
  Bacterial polypetide isolated from the Sargasso Sea
AILPGTPGSEMGIVLMLVSLSLFVIGFTMGGLNYVITVLQARTRGMTLMRMPLTIWGIFTATVLALLAFPALFVACIMMTLDNLLGTSFFMPEIFSMGEKLEYGGGSPILFQHLFWFFGHPEVYIVALPAFGIVSDLISVHARKNIFGYRMMVWAIVIIGALSFIVWAHHMYVSGMNPWFGFFFATTTLIIAVPTAIKVYNWVLTLWRGNIHLTIPMLFSLGFIVTFVNGGITGLFLGNGNY

SEQ ID NO: 103882 - protein, 301 aa, Unknown
  Bacterial polypetide isolated from the Sargasso Sea
FLGGFGNYLIPLMVGARDMVFPYVNMLSFWMFFVAVAVLMASFFVPGGPTGAGWTLYPPQTILEGTPGAGMGILLMLVSLSLFVIGFTMGGLNYLITILQARTRGMTLMRMPLTVWGIFTATVLAMLAFPALLVSAIMMTLDKILGTSFFMPTIIQAGEVLDYGGGSPILFQHLFWFFGHPEVYIVALPAFGIVSDLISVHSRKNIFGYRMMVWAIVGIGGLSFFVWAHHMYVSGMNPWFGFFFATTTLIIAVPTAMKVYNWILTLWRGNIRLNTVMLWCLGFIVNFVNGGITGIFLGNVS

SEQ ID NO: 103883 - protein, 282 aa, Unknown
  Bacterial polypetide isolated from the Sargasso Sea
MFAFPALLVGCLMMTLDSLLGTSFFMPAMVSLGETLTHEGGSPILFQHLFWFFGHPEVYIVALPAFGIVSDLLSVHSRKTIFGYRMMVWAIVGIGALSFFVWAHHMYVSGMNPWFGFFFATTTLIIAVPTAIKVYNWILTLWRGNIQLSLPMLFSLGFIVTFLNGGLTGLFLGNVTVDVPLSDTYFVVAHFHMVMGIAPILVVFGAIYHWYPLITGRMMNETLGKVHFWITFIGSYAIYFPMHYQGFVGVPRRYYEIYDSPYIDVSTLLLNKFITIAVLIVG

SEQ ID NO: 103884 - protein, 279 aa, Unknown
  Bacterial polypetide isolated from the Sargasso Sea
ALLAFPALLVSSIMMTLDKVLETSFFMPTIIKAGEALSYDGGSPILFQHLFWFFGHPEVYIVALPAFGIVSDLISVHSRKNIFGYRMMVWAIVGIGALSFFVWAHHMYVSGMSPWFGFFFATTTLIIAVPTALKVYNWILTLWRGNIRINTVMLFCLGFIVTFVNGGITGIFLGNVAVDVPLSDTYFVIAHFHMVMGIAPLMVIFGAIYHWFPLVTGRLMDEKLGKWHFWVTFLGAYSIYFPMHYLGFIGVPRRYFEMYDSPYMTSAVGMNEFISVAAF

SEQ ID NO: 103885 - protein, 287 aa, Unknown
  Bacterial polypetide isolated from the Sargasso Sea
MSIAMRLQIAFPDTFAFIDPTNYLQFVTMHGMIMVIYLLTALFLGGFGNYMIPLMLGARDMVFPYVNMVSFWVYFAAVLILVASFFVPGGATGAGWTLYPPQAIMPGTPGTDGGIILMLLSLALFIVGFTMGGLNYVTTVLQQRTRGMSLMRMPLTIWAIFIATILALLAFPALLVSAIMMLLDRLLETSFFMPAIISAGGQTDYDGGSPVLFQHLFWFFGHPEVYIVALPAFGLVSEILSVHARKAIFGYRMMVWAIVAIGALSFIVWAHHMYVSGMNPYFGFFFA

SEQ ID NO: 103886 - protein, 303 aa, Unknown
  Bacterial polypetide isolated from the Sargasso Sea
MDGSTSSVNPDIDYVRPAEVGEQDLYHGHSFIEKWVFCQDAKVIGVQYFLTAVFTGIVGLILSWLMRLQLGFPELAGFMTAEHYYQFVTMHGMIMVVYFLTALFLGGFGNYLIPLMVGARDMVFPYVNMLSFWMFFVAVAVLMASFFVPGGPTGAGWTLYPPQTILEGTPGSGMGILLMLISLSLFVIGFTMGGLNYMITILQARTRGMTLMRMPLTVWGIFTATVLAMLAFPALLVSAIMMTLDKVLQTSFFMPTILKAGEVLEYGGGSPILFQHLFWFFGHPEVYIVTLPAFGIVSDLISV

SEQ ID NO: 103887 - protein, 155 aa, Unknown
  Bacterial polypetide isolated from the Sargasso Sea
MVDPSPLPFLSSIAGLAMAVGLVFYMHYETKWLLILGTIGLLTVMFLWWRDVIKESTFQQVHTPVVELGLRYGMALFIASEVMFFVAFFWAFFDASLTPKLPIEEFSQTYESNGAFGIWPPEGIKTFDPLDVPFLNTLVLLMSGTTCTWAHHAVR

SEQ ID NO: 103888 - protein, 297 aa, Unknown
  Bacterial polypetide isolated from the Sargasso Sea
AGFMQLADRSLGTGFFTPEGNIVNNAVATAGGGQPLLWQHLFWFYSHPAVYIMILPAMGMVSDILTCFARKPLFGYRPMVYSVAGIAGLGFIVWGHHMFMSGMNPALGTTFMVSTMMIALPSAVKTFNWLGTIWAGRIQFTTSMLFALSFVSMFIIGGLSGIFMAATPVDIFIHDTYFIVAHFHYVLFAGTAMGVWAAIYFWFPKMFGRTMNEFWGKVHFFLTFIFLNGTFFTMHILGAVGFPRRLADAYHYETFHHLQPLNAFMTYCAIGMVASQIIFAVNFFWSMFYGPVAGRNP

SEQ ID NO: 103889 - protein, 254 aa, Unknown
  Bacterial polypetide isolated from the Sargasso Sea
MAHSGLWYWLATVDHKKIGTMYGIVSFFWFIMGGIEALLIRVQLSHAEASIISPEVYNQLFTMHGTTMVFLVVMPLSAAFFNWLVPLQIGARDVAFPRLNALSLWVFIFGSILMNISWFTGEAPNGGWFGYPPNSTVQFNPGNGMTYWVLGLNVLGVASIAAGLNFIVTIINMRAPGMSLMKMPVFTWMTFITSILIVLALPVLGVAGIQMTADRVYGTNFFNSEAGGDPIFWQHIFWLFGHPEVYILILPAMG

SEQ ID NO: 103890 - protein, 149 aa, Unknown
  Bacterial polypetide isolated from the Sargasso Sea
MVDPSPWPIVTSFATLITAVGSVYYFHSETMWLMVLGFVFLIYCSFMWFRDVVIEAEHQGHHTPVVQIHHRYGMTLFIASEVMFFVAWFWAYFDASLFPNEFVGNVWPPADIKTFDPWDIPLINTLVLLLSGTTVTWSHHALLEDDRKG

SEQ ID NO: 103891 - protein, 257 aa, Unknown
  Bacterial polypetide isolated from the Sargasso Sea
MAFPRLNAVAFWLIPPSGLMLVASYFVEGAAQAGWTAYPPLSITTPQSGQIIWILSVLLLGGSSIFGGINFIATIIKLRRPGLKLMQLPMYCWAMLGTSLLVVLSTPVLAGTLILLSFDIIANTGFFNPVLGGNVVVYQHLFWFYSHPAVYIMVLPAFGLVSEILPVHARKPLFGYTTMVFSIMGIVVLGLVVWAHHMFTSGTPPWMRLFFTIATAFIAVPTGIKFFNWVATLWGGKISINSAMLFSCGFIINFVFG

SEQ ID NO: 103892 - protein, 229 aa, Unknown
  Bacterial polypetide isolated from the Sargasso Sea
MIKKIAYILFLIWPSALLANEPMDWQLGFQKSASKSMDDIVWFHDYMLVPIITAITAFVLFLLLYVCVRYRASKNKIPSTTSHNTIIEVIWTLVPCLILIVMAVPSFKVLYSQDEIPKADVTIKAVGYQWYWGYEYPDENIIFDSYMIDEKDLKENQPRLLAVDNAVYVPVNKVVKVMITANDVLHAWALPSFGVKRDAIPGRINETWFKADRTGTFYGQCSELCGIKH

SEQ ID NO: 103893 - protein, 194 aa, Unknown
  Bacterial polypetide isolated from the Sargasso Sea
MSAEKKHDYHLVDPSPWPIYVSFSCLVLALGAVYYMHSDVSWGMYLGFALLIYGAYMWFRDVVIEAEHQGHHTPVVQIHHRYGMTLFIASEVMFFVAWFWAYFDISLFPNEFVGNVWPPKDIETFDPWDIPLINTLVLLLSGTTVTWSHHALLEDDRKSFIQGLVLTVILGVCFTALQAYEYHHATFSFSDHIY

SEQ ID NO: 103894 - protein, 76 aa, Unknown
  Bacterial polypetide isolated from the Sargasso Sea
MSAEKKHDYHLVDPSPWPIYTSFSCLVLALGSVYYLHTDVSWGMYLGFALLIYGAYMWFRDVVIEAEHQGHHTPVV

SEQ ID NO: 103895 - protein, 155 aa, Unknown
  Bacterial polypetide isolated from the Sargasso Sea
MSAEKKHDYHLVDPSPWPIYTSFACLVLAIGAIFYMHNGISWGMYLGLALLIYGAYMWFRDVVIEAEHQGHHTPVVQIHHRYGMTLFIASEVMFFVAWFWAYFDISLFPNEFVGNVWPPKDIETFDPWDIPLINTLVLLLSGTTVTWAHHSLLED

SEQ ID NO: 103896 - protein, 281 aa, Unknown
  Bacterial polypetide isolated from the Sargasso Sea
MASVGPLVAGAVMLFFDQRLGTSFFIPSGGGDPLLWEHLFWFFGHPEVYVVLLPTMGIVAEIITVFSRKKLFGYRTILYTAFGTGGLSFIVWAHHQFVAGIDPRMANVFVVTTILISIPIAEMLFSFIATLYGGSIEFSTPMLWALGFLVSFLIGGVTGIYLGASALDVYFHDSYFVIAHFHYTFFPITIIGMFAAITYWFPKMFGRMMDETLNKIHFWGTFIPFNGLFLPLFLVGMAGQHRRIADFTQYPDLASPDLQSIRIFATVSLVILLLFQICFYL

SEQ ID NO: 103897 - protein, 243 aa, Unknown
  Bacterial polypetide isolated from the Sargasso Sea
MVDLVFKDSEKKHKFHLVNPSPWPIVGAFSALFLVSGAILYMHYEMIWPMLGGLFLILFTMFMWWRDIIKESTFLKVHNSITEIGLRWGMALFITSEVMFFVAFFWAFFDASLLPKTFLAEYKEVFTGTLGIGVWPPKGIETFDPLDIPYLNTLILLLSGTTCTWAHHELREGNNKEALKGLYFTVFLGFIFSLLQIYEYQHATFGFTEGIYPSTFYMATGFHGFHVLIGTLFLLVCLLRIRK

SEQ ID NO: 103898 - protein, 141 aa, Unknown
  Bacterial polypetide isolated from the Sargasso Sea
AFIAVPTGIKFFNWVATLWGGKISINSAMLFSCGFIINFVFGGITGVALAQVPFDIHVHDTYFVVAHFHYIVYGGTVFIIFSSIYHWFPKVTGKMLNEKLGILHFIITFIGFNLCFAPQHWLGLNGMPRIVAEYDPQFQFV

SEQ ID NO: 103899 - protein, 291 aa, Unknown
  Bacterial polypetide isolated from the Sargasso Sea
FWVAMPVLIAAFGNWMIPLMIGCDDMVFPRLNRLSYQVFLVSALVLILSFFVEGGGFGGAWTSYPPLSAAAEYNLTNWGASLWLLAVFLEIVAFLLGGINFITTTMNARAPGMGMMDIPIVIWMINIAVILFMASVGPLVAGAVMLFFDQRLGTSFFLPSGGGDPLLWEHLFWFFGHPEVYVVLLPTMGIVAEIITVFSRKKLFGYRTILYTAFGTGGLSFIVWAHHQFVAGIDPRMANVFVVTTILISIPIAEMLFSFIATLYGGSIEFSTPMLWALGFLVSFLIGGVTG

SEQ ID NO: 103900 - protein, 271 aa, Unknown
  Bacterial polypetide isolated from the Sargasso Sea
ATSFWTKWVFCQDAKVIGVQYALTATAIGFIGLVLSWGMRLQLGFPETFSFLGPATYYQSVTMHGMIMVIYLLTALFLGGFGNYLIPLMVGARDMVFPYVNMVSFWMFLVAVLVLIASFFVPGGPTGAGWTLYPPQAILPGTPGSEMGIVLMLVSLSLFVIGFTMGGLNYVITILQARTRGMTLMRMPLTIWGIFTATILALLAFPALLVACIMMTLDNLLGTSFFMPEIFSMGEKLEYGGGSPILFQHLFWFFGHPESLYSGITSIGIVS

SEQ ID NO: 103901 - protein, 170 aa, Unknown
  Bacterial polypetide isolated from the Sargasso Sea
MVDLVFKDSEKKHKFHLVNPSPWPLVGAFSALFLVSGAILYMHYELLWPMLAGLVLILFTMFMWWRDIIKESTFLKVHNSITEIGLRWGMALFITSEVMFFVAFFWAFFDASLLPKTFLAEYKEVFTGTFGIGVWPPKGIETFDPLDIPYLNTLILLLSGTTCTWAHHEL

SEQ ID NO: 103902 - protein, 212 aa, Unknown
  Bacterial polypetide isolated from the Sargasso Sea
MTKIIQPKKQRNIFSRPTAEEGVWSWITTVDHKRIGIMYGYAAFFFLLVGGLEALLLRIQLSQPDNNFLSAAEYNAMFTMHGTTMIFLAIMPISAAFFNYLLPLQIGARDVAFPRLNALSFWIFIAGGLFLYSTFLFGTAGAPEGGYLAEEVSRLASAPNGGWFGYQPNAGLKYSPGTAMDYWAIGLQILGIASLVSAFNFITTILNMRTKG

SEQ ID NO: 103903 - protein, 227 aa, Unknown
  Bacterial polypetide isolated from the Sargasso Sea
YYQFVTMHGMIMVVYFLTALFLGGFGNYLIPLMVGARDMVFPYLNMVSFWSFFVAVGVLLASFFVPGGPTGSGWTLYPPQAILEGTPGSGWGIMLMCISLILFVAGFTMGGLNYLITVLQARTRGMTLMRMPLTVWGIFTATVLAMLAFPALLVGALMMSLDNVLGTSFFMPTILKAGEVLEYGGGSPILFQHLFWFFGHPEVYIVALPAFGIISDLISVHARKNIF

SEQ ID NO: 103904 - protein, 304 aa, Unknown
  Bacterial polypetide isolated from the Sargasso Sea
FFSAADTNAMFTMHGPTMVFLAIMPISAAFFNYLLPLQIGARDVAFPRLNALSFWIWVFGGLFLYSTFVFGTAGAPEGGYLAEEVGWLGNAPNGGWFGYQPNAGFKYSPGTAMDYWAIGLQILGISSLVSAFNFIVTILNMRTQGMRLMRMPVFTWMTFAVAFLLAFSLPIIAIALFYVTFDRQFGTTFFLTEGGGDPVLWQHLFWLFGHPEVYILILPAFGIVSEILPTFSRKPLFGYPAIVFAGFGIAFIGFGVWAHHMFASAISPVAQAGFGISTMIIAVPTGVKIFNWLGTIWGGKLNLK

SEQ ID NO: 103905 - protein, 273 aa, Unknown
  Bacterial polypetide isolated from the Sargasso Sea
GLVYAGSGVEAYGSGSPLLWQHLFWFLAHPEVYVLILPAIGIVGEILANNTRKPLWGYKSLIYAIGFLGFMSFIVWAHHMFLTGMGQSMSAFFQLTTMIISIPSVVVLTAFFISLWGGSIRFNTPMLFALSFLPMFGIGGLTGLPLGVAASDIFLHDTYYVIGHFHYVVAPGTLFALFAGIYYWFPKVTGKQLSESLGKLHFYPSFLAMNGVFMPMFIQGLAGLSRRMYDGGQQYAHASDVVHWNEFMTISAFILGLAQIPFILNIFITLSSK

SEQ ID NO: 103906 - protein, 72 aa, Unknown
  Bacterial polypetide isolated from the Sargasso Sea
SSGVYGTTFFMLTGFHGMHVLIGGIFLLTQLTRSTGFKHFTDKEHFGFEAASWYWHFVDVVWVCLFLFVYIL

SEQ ID NO: 103907 - protein, 267 aa, Unknown
  Bacterial polypetide isolated from the Sargasso Sea
LFWFLGHPEVYVLILPAIGIVAEILCNSARRPLWGYKVMVGGVLVLGFLSFIVWAHHMYLTGMSAKVATFFQTTTMIISIPSVILLTCLFMTLWKGSIRFTTASLFALAFLPMFGIGGLTGLPLGFSFTDLHLHDSYYVIAHFHYVVAPGSIFALLAGIYYWFPKMTGRRMNEYWGKVHFWGSLLFMNIIFMPMFIQGFAGLSRRMSDGGATYSLLQNPDVTSGALSDLIIKLNEYITTGAFGMFAIQIVFVINFFYSIRHGEKVEG

SEQ ID NO: 103908 - protein, 142 aa, Unknown
  Bacterial polypetide isolated from the Sargasso Sea
MSAEKPKHDYHLVEPSPWPIYVSFATLVLAFGAVYYFHSKVLWLLLIGFALVVYGAFMWWRDVIEEAEHQGHHTPVVQIGHRYGMTLFIASEVMFFVAWFWAFFNASLFPSDSIGGIWPPADIKTFDPWDIPLINTLILLLS

SEQ ID NO: 103909 - protein, 223 aa, Unknown
  Bacterial polypetide isolated from the Sargasso Sea
MSAEKKHDYHLVDPSPWPIYVSFSCLVLALGAVYYMHSDISWGMYLGFALLIYGAYMWFRDVIIEAEHQGHHTPVVQIHHRYGMTLFIASEVMFFVAWFWAYFDVSLFPNEFVGNVWPPKDIETFDPWDIPLINTLVLLLSGTTVTWSHHALLEGDRKSFIQGLVLTVILGVCFTALQAYEYHHATFSFSDHIYGSVFYMATGFHGFHVIVGTIFLAVCLWRG

SEQ ID NO: 103910 - protein, 284 aa, Unknown
  Bacterial polypetide isolated from the Sargasso Sea
MLTILENPIWGFKSIIYSMVFLGFCSFIVWAHHMFLTGMGQAMSAFFQTTTMIISIPSVVILTSYFLSLWGGSIRFNTPMLFALAFLPMFGIGGLTGLPLGLAASDIYLHDTYYVIGHFHYVVAPGTIFALFAGIYYWFPKMTGKKMNEMLGKLHFWPSLVFMNGIFMPMFIQGLAGVSRRLADGGVSYAHASGVLEWNEFMSMSAFFLGLAQIPFIINIVMSLFAGDKASRNPWDSTTIEWAAPSPPLGHGNFDKPVNVYHSAYEYSVPDSKKDFTPQFEKNG

SEQ ID NO: 103911 - protein, 217 aa, Unknown
  Bacterial polypetide isolated from the Sargasso Sea
AFIAVPTGIKFFNWVATLWGGKISINSAMLFSCGFIINFVFGGITGVALAQVPFDIHVHDTYFVVAHFHYIVYGGTVFIIFSSIYHWFPKVTGKMLNEKLGILHFVITFIGFNLCFAPQHWLGLNGMPRRVAEYDPQFQLVNQISSLGALLMAISTIPFLINVFLSVRNGKNSGDNPWNALTPEWLTSSPPPVENWEGEAPLVEEPYGYGKEISEQK

SEQ ID NO: 103912 - protein, 273 aa, Unknown
  Bacterial polypetide isolated from the Sargasso Sea
PHARPRHGLFQMPVFVWTAWAAQTIQLIGLPALTGGAVMLLFDLSFGTSFFRPEGGGDPVLFQHFFWFYSHPAVYVLVLPVFGIFSELFPVYARKPLFGYRFVAIASFGITFLSLIVWAHHMFYTGTPNWMRHIFMFTTMLIAVPTGVKVFAWLGTLWQGNLRLNTPMLFCLGGLFNFIFAGITGVMLATVPIDIHVGNTAFVVAHFHYVIFNTIAFGVFAGIYHWFPKFTGRMYYEGLGKVHFVLTFIGATLNWLPIHWAGLLGMPRRVASY

SEQ ID NO: 103913 - protein, 95 aa, Unknown
  Bacterial polypetide isolated from the Sargasso Sea
MSAEKKHDYHLVDPSPWPIYVSFSCLVLAIGTIFYMHNDVSWGMYLGLALVIYGAYMWFRDVVIEAEHQGHHTPVVQIHHRYGMTLFIASEVMFF

SEQ ID NO: 103914 - protein, 234 aa, Unknown
  Bacterial polypetide isolated from the Sargasso Sea
SGGIMLPENYNTFGAMHGTIMIFLGVVPLAVGAFGNYLVPLQIGAPDMAFPRLNAASYWTYFVGGVVMMASFFTPEGAARSGWTSYPPLSIFESGQTMWLLSMVFLITSSLLGSMNIIVTIVQLRAPGLTWFKLPFFIWSQLVTSFLLVLAFPPLEAAAVLQLMDRLAGTSFFLPSGLVYAGEAVAAYGNGSPLLWQHLFWFLAHPEVYVLILPAIGIVGEILANNTRKPLWGY

SEQ ID NO: 103915 - protein, 272 aa, Unknown
  Bacterial polypetide isolated from the Sargasso Sea
VQYALTAIAIGLVGLVLLDLMRLQLGFPGKFAFIDANHYYQFVTMHGMIMVIYLLTALFLGGFGNYLIPLMLGARDMVFPFLNMLSYWVYLLAVLVLVASFFVPGGPTGAGWTLYPPQAILPGTPGVEWGIVLMLVSLAIFIVAATMGGLNYVTTTLQARTRGMTLMRMPLTVWGIFIATIMALLAFPALFVSAVMMLFDRTLGTSFFIPAVVSMGQTLKHAGGSPLLFQHLFWFFGHPEVYIVALPAFGIASDLISTHARKSIFGYRMMVW

SEQ ID NO: 103916 - protein, 279 aa, Unknown
  Bacterial polypetide isolated from the Sargasso Sea
VWAIVGIGALSFFVWAHHMYVSGMNPWFGFFFASTTLIIAVPTAMKVYNWILTLWRGNIRINTVMLWCLGFIVTFVNGGITGIFLGNVTVDVPLSDTYFVVAHFHMVMGIAPLMVIMGAVYHWFPLVSGRMLSEKLGKWHFWLTFLGAYSIYFPMHYLGFIGVPRRYFEMYDSPYMTSAVGMNEFISLAAFIVGAAQFILIFNVIKTLKNGKKAGKNPWQANSLEWHTSTVPPEHGNFGDRLPVVHRWAYDYSVPGAKEDYIPQTTPPSEVAHTEVEKT

SEQ ID NO: 103917 - protein, 305 aa, Unknown
  Bacterial polypetide isolated from the Sargasso Sea
QARTRGMTLMRMPLTVWGIFTATVLAMLAFPALLVSAIMMTLDKVLQTSFFMPTILKAGEVLEYGGGSPILFQHLFWFFGHPEVYIVALPAFGIVSDLISVHARKNIFGYRMMVWAIVGIGGLSFFVWAHHMYVSGMNPWFGFFFATTTLIIAVPTAMKVYNWILTLWRGNIRINTVMLWCLGFIVTFVNGGITGIFLGNVSVDVPLSDTYFVIAHFHMVMGIAPLMVIMGAVYHWFPLVAGKMLHEGLGKWHFWITFLGAYSIYFPMHYLGFIGVPRRYFEMYDSPYMTSAVGMNEFISIAAFI

SEQ ID NO: 103918 - protein, 297 aa, Unknown
  Bacterial polypetide isolated from the Sargasso Sea
MLISLILFVAGFTMGGLNYIITVLQLRARGMTLMRLPLTIWGIFTATVLAMFAFPALLVGCLMMTLDSLLGTSFFMPAMVSLGEKLTHEGGSPILFQHLFWFFGHPEVYIVALPAFGIVSDLLSVHSRKTIFGYRMMVWAIVGIGALSFFVWAHHMYVSGMNPWFGFFFATTTLIIAVPTAIKVYNWILTLWRGNIQLSLPMLFSLGFIVTFLNGGLTGLFLGNVTVDVPLSDTYFVVAHFHMVMGIAPILVIFGAIYHWYPLITGRMMNETLGKIHFWITFIGSYAIYFPMHYQSF

SEQ ID NO: 103919 - protein, 140 aa, Unknown
  Bacterial polypetide isolated from the Sargasso Sea
LGTWLPLYNTVVLLTSSGTVHFAHMALKDNNRKRFNFWLGITVLLAFIFVILQALEYYEAYAHLGLTISSGVYGTTFFMLTGFHGMHVLIGGIFLATQLTRSAGYNHFTEKEHFGFEAASWYWHFVDVVWVCLFLFVYIL

SEQ ID NO: 103920 - protein, 286 aa, Unknown
  Bacterial polypetide isolated from the Sargasso Sea
VSDLISVHARKNIFGYRMMVWAIVIIGALSFIVWAHHMYVAGMNPWFGFFFATTTLIIAVPTALKVYNWVITLWRGNIRLTIPMLFALGFIITFVNGGITGLFLGNVIVDVPLSDTYFVVAHFHMVMGIAPVLVVFGAIYHWFPLITGRYLHEGMGKFHFWVTFLGSYAIYFPMHYLGFVGVPRRYYEMYDSEFMAVSTNYLNQFITVLALIVGFTQLLFLYNIITSSKFGKKAGKNPWKACSLEWRTPEVPPGHGNFGKELPVVYRWAYDFNVPGAKEDYFLRTW

SEQ ID NO: 103921 - protein, 278 aa, Unknown
  Bacterial polypetide isolated from the Sargasso Sea
FCWTLVAGAVMLFFDQRLGTSFFLPSGGGDPLLWEHLFWFFGHPEVYVVLLPTMGIVAEIITVFSRKKLFGYRTILYTAFGTGGLSFIVWAHHQFIAGIDPRMANVFVVTTILISIPIAEMLFSFIATLYGGSIEFSTPMLWALGFLVSFLIGGVTGIYLGASALDVYFHDSYFVIAHFHYTFFPITIIGMFAAITFWFPKMFGRMMDETLNKIHFWGTFIPFNGLFLPLFLVGMAGQHRRISDFTQYPDLASPDLQGIRIFATVSLVILLLFQFVFI

SEQ ID NO: 103922 - protein, 102 aa, Unknown
  Bacterial polypetide isolated from the Sargasso Sea
MSAGKPKHDYHLVDPSPWPIYVSFATLVLAFGAVYYFHSKALWLLLIGFALVVYGAFMWWRDVIEEAEHQGHHTPVVQIGHRYGMTLFIASDSNVFCCMVLG

SEQ ID NO: 103923 - protein, 286 aa, Unknown
  Bacterial polypetide isolated from the Sargasso Sea
KWVFSQDAKVIGIQYALTATAIGFIGLILSWGMRLQLGFPETFSFLGPATYYQSVTMHGMIMVIYLLTALFLGGFGNYLIPLMVGARDMVFPYVNMVSYWMFLVAVLVLIASFFVPGGPTGAGWTLYPPQAILPGTPGSEMGIVLMLVSLSLFVIGFTMGGLNYVITILQSRTRGMTLMRMPLTIWGIFTATVLALLAFPALLVACIMMTLDNLLGTSFFMPEIFTMGEKLDYVGGSPILFQHLFWFFGHPEVYIVALPAFGIVSDLISVHARKNVIGYRNDGLGQ

SEQ ID NO: 103924 - protein, 118 aa, Unknown
  Bacterial polypetide isolated from the Sargasso Sea
EWLGQLHFWLTFVGVNLIFFPQHFLGLAGMPRRYADYPDAFAGWNYISSIGSYIAVAGLVVFFVNLVYSFLKKKAAQPNPWGVGATTLEWTVPSPPNFHTFEELPKFIDDQETEKSRS

SEQ ID NO: 103925 - protein, 286 aa, Unknown
  Bacterial polypetide isolated from the Sargasso Sea
MGFCQDAKVIGVQYFLTAVFTGIVGLILSWLMRLQLGFPELAGFMTAEHYYQFVTMHGMIMVVYFLTALFLGGFGNYLIPLMVGARDMVFPYVNMLSFWMFFVAVAVLMASFFVPGGPTGSGWTLYPPQAILDGTPGSGAGILLMLISLSLFVIGFTMGGLNYLITVLQARTRGMTLMRMPLTVWGIFTATVLAMLAFPALLVSSIMMTLDKVLGTSFFMPTILKAGEVLEYGGGSPILFQHLFWFFGHPEVYIVALPAFGIVSDLISVHARKNIFGYRMMVWAIV

SEQ ID NO: 103926 - protein, 136 aa, Unknown
  Bacterial polypetide isolated from the Sargasso Sea
LLLLTSSLTVTIAHHAILEDDRQKVILWTGITVILGILFLGVQIAEYAHLTFGLGDGIYPSTFYLATGFHGFHVFVGTVFLIVCYFRARKGHFTRDAHIGFEAAAWYWHFVDVVWIFLYINVYWWGSAEFGHLLAG

SEQ ID NO: 103927 - protein, 39 aa, Unknown
  Bacterial polypetide isolated from the Sargasso Sea
PLFAWSILVTAFLLLLSLPVLAGSNYYASNRSKFWYCIF

SEQ ID NO: 103928 - protein, 206 aa, Unknown
  Bacterial polypetide isolated from the Sargasso Sea
LNTPMLFCLGGLFNFIFAGITGVMLATVPIDVHVGNTYFVVAHFHYVIFNTIGFGVFAGIYHWFPKFTGRMYYEGLGKVHFALTFIGATLNWLPLHWAGLLGMPRRVASYDPEFAIWNVIASIGAFMLGVASIPFILNMVSSWARGPKAPPNPWRAIGLEWLLPSPPPAENFEDDIPTVISEPYGYGLGHPLVEDEEFYVRRSQEA

SEQ ID NO: 103929 - protein, 212 aa, Unknown
  Bacterial polypetide isolated from the Sargasso Sea
VGSLMMTLDKLLGTSFFMPTILKAGEVLEYGGGSPILFQHLFWFFGHPEVYIVALPAFGIISDLISVHSRKNIFGYRMMVWAIVGIGALSFFVWAHHMYVSGMNPWFGFFFATTTLIIAVPTAMKVYNWILTLWRGNIRMNTVMLWCLGFIVTFVNGGITGIFLGNVSVDVPLSDTYFVIAHFHMVMGIAPLMVIMGAVYHWFPLVAGKFLD

SEQ ID NO: 103930 - protein, 248 aa, Unknown
  Bacterial polypetide isolated from the Sargasso Sea
HARKNIFGYRMMVWAIVAIGALSFIVWAHHMYVSGMHPYFGFFFATTTLIIAVPTAIKVYNWVLTLWKGNITLTVPMLFCISFIITFLNGGLTGLFLGNVIVDVPLSDTYFVVAHFHMVMGIAPVQVVFAAIYHWFPLMTGRMYNETLGRLHFWFTFLGSYLIYFPMHYLGLIGVPRRYYEMGQTEALYTQSAADLNIFITLTALVTGFAQIFFFINMFWSRKYGVPAEKNPWQANSLEWRTPSMPPG

SEQ ID NO: 103931 - protein, 127 aa, Unknown
  Bacterial polypetide isolated from the Sargasso Sea
GKMSGYQYSEWMGKLHFWLTFIGVNLIFFPQHFLGLAGMPRRYADYPDAFADWNYISSIGSYISVAGVVVFLINLLYSFISKKTSSSNPWGEGATTLEWTVPSPPNFHTFDELPKVDVYEGAEKSKS

SEQ ID NO: 103932 - protein, 285 aa, Unknown
  Bacterial polypetide isolated from the Sargasso Sea
LLEWWVLILSWLMRLQLGFPGLAGFITAEHYYQFVTMHGMIMVVYFLTALFLGGFGNYLIPLMVGARDMVFPYVNMLSFWMFFVAVAILMASFFVPGGPTGAGWTLYPPQTILEGTPGSGMGILLMLISLALFVIGFTMGGLNYMITVLQARTRGMTLMRMPLTVWGIFTATVLAMLAFPALLVSAIMMTLDKVIGTSFFMPTILKAGEVLEYGGGSPILFQHLFWFFGHPEVYIVALPAFGIVSDLISVHARKNIFGYRMMVWAIVGIGALSFFVWAHHMYVSG

SEQ ID NO: 103933 - protein, 293 aa, Unknown
  Bacterial polypetide isolated from the Sargasso Sea
MIFWVAMPVLIAAFGNWMIPLMIGCDDMVFPRLNRLSYQIFLVSALVLILSFFVEGGGFGGAWTSYPPLSAAAEYNLTNWGASLWLLAVFLEIVAFLLGGINFITTTMNARAPGMGMMDIPIVIWMINIAVILFMASVGPLVAGAVMLFFDQRLGTSFFLPSGGGDPLLWEHLFWFFGHPEVYVVLLPTMGIVAEIITVFSRKKLFGYRTILYTAFGTGGLSFIVWAHHQFVAGIDPRMANVFVVTTILISIPIAEMLFSFIATLYGGSIEFSTPMLWALGFLVSFLIGGVTG

SEQ ID NO: 103934 - protein, 60 aa, Unknown
  Bacterial polypetide isolated from the Sargasso Sea
TGFHGFHVMMGGIMLSIMLARSVFAGHFEEHDHFGFEAASWYWHFVDVVWVMLFLFVYIL

SEQ ID NO: 103935 - protein, 297 aa, Unknown
  Bacterial polypetide isolated from the Sargasso Sea
VLMASFFVPGGPTGAGWTLYPPQTILEGTPGSGMGILLMLISLSLFVIGFTMGGLNYMITILQARTRGMTLMRMPLTVWGIFTATVLAMLAFPALLVSAIMMTLDKVLQTSFFMPTILKAGEVLEYGGGSPILFQHLFWFFGHPEVYIVALPAFGIVSDLISVHARKNIFGYRMMVWAIVGIGGLSFFVWAHHMYVSGMNPWFGFFFATTTLIIAVPTAMKVYNWILTLWRGNIRINTVMLWCLGFIVTFVNGGITGIFLGNVSVDVPLSDTYFVIAHFHMVMGIAPINGYYGSGFI

SEQ ID NO: 103936 - protein, 208 aa, Unknown
  Bacterial polypetide isolated from the Sargasso Sea
MVDLVFKDSEKKHKFHLVNPSPWPLVGAFSALFLVSGAILYMHYEMLWPMLAGLVLILFTMFMWWRDIIKESTFLKVHNSITEIGLRWGMALFITSEVMFFVAFFWAFFDASLLPKTFLAEYKEVFTGTLGIGVWPPKGIETFDPLDIPYLNTLILLLSGTTCTWAHHELREGNNKEALKGLYYTVFLGFIFSLLQIYEYQHATFGFT

SEQ ID NO: 103937 - protein, 285 aa, Unknown
  Bacterial polypetide isolated from the Sargasso Sea
LFLGGFGNYLIPLMVGARDMVFPWLNMISFWVYFTAVLLLAASFFVGGGSTGAGWTLYPPQAILPGTPGSEAGILLMLASLAVFIIGFTMGGLNYVVTILQARTRGMTLMRMPLTVWGIFVATVLALFAFPALFVSAIMMSLDVLLGTSFFMPAIMTMGNEADHVGGNPLLFQHLFWFFGHPEVYIVALPAFGIVSDLISIHARKNIFGYRMMVWAIVIIGALSFVVWAHHMYVSGMNPYFGFFFATTTLIIAVPTALKVYNWVLTLWQGNIHLTIPMLFSIAFL

SEQ ID NO: 103938 - protein, 236 aa, Unknown
  Bacterial polypetide isolated from the Sargasso Sea
LAGIAVILFMLVGWFRTVIKESMTGLYSHQMDRSFRQGMSWFIFSEVMFFAAFFGALFYARMIAVPWLGGASNNAMTHEVLWPHFEAVWPLVTTPDGTKTEAMPWNGLPLINTIVLLTSSVTLHFAHISLEKGKRSAITLWLGLTILLGISFLALQAEEYSHAYHEMGLTLTSGVYGNTFFLLTGFHGMHVTLGTIFLLVLFFRVLKGHFSADKHFAFQAGSWYWHFVDVVWLCLF

SEQ ID NO: 103939 - protein, 279 aa, Unknown
  Bacterial polypetide isolated from the Sargasso Sea
FGAVMPAFVGLANWLVPMMVGAPDMALPRMNNLSFWILPFAFFMMLSSLFMEGGAPNFGWTFYAPLSTTYAPPSVTFFIFSVHILGASSIMGAINVIVTIMNMRAPGMTLMKMPLFVWSWLITAYLLIAVMPVLAGAVTMMLMDIHFGTSFFNAAGGGDPVLFQHIFWFFGHPEVYIMILPAFGIVSHIISTFSRKELFGYSSMVWAMVSIAILSFVVWAHHMFTVGMPLAAELFFMWATMLIAVPTGVKVFNWVATMFRGSITYETPMLFAIAFVVLF

SEQ ID NO: 103940 - protein, 169 aa, Unknown
  Bacterial polypetide isolated from the Sargasso Sea
MSAEKKHDYHLVDPSPWPIYVSFSCLVLAIGAVYYMHSDVSWGMYLGLALLIYGAYMWFRDVVIEAEHQGHHTPVVQIHHRYGMTLFIASEVMFFVAWFWAYFDVSLFPNDFVGNVWPPKDIVTFDPWDIPLINTLVLLLSGTTVTWSHHSLLEGDRKGFIQGLVLTVI

SEQ ID NO: 103941 - protein, 287 aa, Unknown
  Bacterial polypetide isolated from the Sargasso Sea
KSAIPIIFAVSVFFAGFGAANAITGNGSTMLLLGMLAVVITMSFWFSVVMKESKAGLDTPQLNNSYVFGMGWFIFSEVMFFFAFFGALFYIRQFAVPWLGGEGEKGLAGELLWPEFEATWPPMITPEQSIMGNQAVTKGPDESMYLHGISGIIKWLPLWNTIVLLTSSGTVHFAHIALKENNRKRFNFWLGITVCLAFIFVILQAAEYYEAYAHLGLTLNSGVYGTTFFMLTGFHGMHVLIGGIFLLTQLFRSTGFKHFTEKEHFGFEAASWYWHFVDVVWVLLFLF

SEQ ID NO: 103942 - protein, 134 aa, Unknown
  Bacterial polypetide isolated from the Sargasso Sea
LYNTLILLASSVTLQFAHMGLEQNKRGQLKLMLGLTILLGASFLYLQGIEYVHAYQDLGLKLDSGIYGNTFFLLTGFHGLHVTLGAIFLLVMFLRIVLKNHFTAHKHFAFQAAAWYWHFVDVVWLCLFIFVYVL

SEQ ID NO: 103943 - protein, 187 aa, Unknown
  Bacterial polypetide isolated from the Sargasso Sea
LAVLVLVASFFVPGGPTGAGWTLYPPQAILPGTPGVEWGIVLMLVSLAIFIVAATMGGLNYVTTTLQARTRGMTLMRMPLTVWGIFIATIMALLAFPALFVSAVMMLFDRTLGTSFFIPAVVSMGQTLKHAGGSPLLFQHLFWFFGHPEVYIVALPAFGIASDLISTHARKSIFGYRMMVWTILSPL

SEQ ID NO: 103944 - protein, 110 aa, Unknown
  Bacterial polypetide isolated from the Sargasso Sea
WLTFIGVNLVFFPQHFLGLAGMPRRYADYPDAFADWNYISSIGSYISVVGLVVFFANLIYAFAKKKKAAQNPWGEGATTLEWTVPSPPNFHTFDELPKFEDYEGTEKSSS

SEQ ID NO: 103945 - protein, 253 aa, Unknown
  Bacterial polypetide isolated from the Sargasso Sea
LFMEGGAPAFGWTFYAPLSTTYAAPSVTFFIFAIHILGVSSIMGSINIIATVMNMRAPGMTYMKMPMFVWTWLITAFLLVAVMPVLAGAVTMMLMDIHFGTSFFSAAGGGDPVLFQHIFWFFGHPEVYIIILPAFGVVSQIIPAFSRKPLFGYASMVYATASIAFLSFIVWAHHMYTVGMPIAGELFFMYATMLIAVPTGVKVFNWISTMWRGALSFETPMLFCIGFLILFTLGGFTGLMLSIAPADFQYHDT

SEQ ID NO: 103946 - protein, 171 aa, Unknown
  Bacterial polypetide isolated from the Sargasso Sea
MSAEKKHDYHLVDPSPWPIYTSFACLVLAIGAIFYMHNGISWGMYLGLALLIYGAYMWFRDVVIEAEHQGHHTPVVQIHHRYGMTLFIASEVMFFVAWFWAYFDISLFPNEFVGNVWPPKDIETFDPWDIPLINTLVLLLSGTTVTWAHHALLEDDRKGFIQGLTLTVILG

SEQ ID NO: 103947 - protein, 215 aa, Unknown
  Bacterial polypetide isolated from the Sargasso Sea
VIIGGLSFIVWAHHMYVAGMNPWFGFFFATTTLIIAVPTAIKVYNWVLTLWRGNIQLTLPMLFSIAFIITFINGGLTGIFLGNVAVDIPLSDTYFVVAHFHMVMGIAPVLVILGSIYHWFPLITGRLLDERLGKIHFWVTFIGSYSIYFPMHYLGFMGVTRRYFEVFEGEAFTYSITGINQFITIAALITGAAQFVFFYNIIVSSKLGKKAGKNP

SEQ ID NO: 103948 - protein, 281 aa, Unknown
  Bacterial polypetide isolated from the Sargasso Sea
MQLAFPGAHVPGFGTVTSGEYNALVTNHGTIMIFWVAMPVLIAAFGNYLIPLMIGCDDMVFPRINRLSYQVFLLSAIVLIASFFVPGGGFGGAWTAYPPLSSTAEYNLTPLGSTLWVIAVALEFVAFLLGGINFITTAMNSRAPGMKAFDMPIVVWMIVIASILFMCSVGPLIAGAAMLVFDQQIGTFFFDHARGGDPILWQHLFWFFGHPEVYVVLLPALGIVAEIITVFSRKKLFGYKTVLYTTFATGILSFFVWAHHQFIAGIDPRMANIFTVTTLLI

SEQ ID NO: 103949 - protein, 289 aa, Unknown
  Bacterial polypetide isolated from the Sargasso Sea
YYQFITMHGMIMVVYLLTALFLGAFGNYLIPLMVGARDMVFPYLNMVSYWTYLVAVLVLFVSFFTPGGPTGAGWTLYPPQAILGGTPGQETGIVLMLVSLCIFIVGFTMGGLNYVITVLQARTRGMTLMRMPLTVWGIFTATVLALFAFPALFVSAVMMLFDKLLMTSFFMPALVEFGENLSYGGGSPILFQHLFWFFGHPEVYIVALPAFGIVSDLISIHARKNIFGFRMMVWAIVGIGALSFIVWAHHMYVSGMNPYFGFFFATTTLIIAVPTALKVYNWILTLWKG

SEQ ID NO: 103950 - protein, 205 aa, Unknown
  Bacterial polypetide isolated from the Sargasso Sea
YRASKNQVPSTTSHNTLIEVIWTLVPCLILIVMAVPSFKVLYSQDEIPKADVTIKAIGYQWYWGYEYPDENIIFDSYMIDEKDLKENQPRLLAVDNAVYVPVNKVVKVMITANDVLHAWALPSFGVKRDAIPGRINETWFKADRTGTFYGQCSELCGIKHAFMPITVNVVSEDEYNKWLEEAKVKFAKEEIKNNIKVAKKIKEIK

SEQ ID NO: 103951 - protein, 278 aa, Unknown
  Bacterial polypetide isolated from the Sargasso Sea
GLQIVEPNFFNQMTTVHGLIMVFGAVMPAFTGLANWLIPMMIGAPDMALPRMNNWSFWILPGAFLILLSSLFMEGGGPAFGWTFYAPLSTTYSGDSTALFVFSVHIMGISSIMGAINVIVTIFNMRAPGMTWMKMPLFVWTWLITAFLLIAVMPVLAGAVTMVLTDKFFGTSFFDAAGGGDPVMFQHIFWFFGHPEVYIMILPAFGIISQIVPTFSRKPLFGYASMVYATASIALLSFVVWAHHMFTTGMPVYMEMFFMFATHAYLCADGSESIQLGR

SEQ ID NO: 103952 - protein, 103 aa, Unknown
  Bacterial polypetide isolated from the Sargasso Sea
NILFLPMHFLGLAGMPRRVPDYALQFTDFNQIVSWGGFIFGAAQILFVVAVVHAIRKGKPATGQVWEGAKGLEWTIDSPAPYHTFMVPPTAETLAAVGPPRGD

SEQ ID NO: 103953 - protein, 321 aa, Unknown
  Bacterial polypetide isolated from the Sargasso Sea
EQDLYHAHSFIEKWIFCQDAKVIGVQYFLTAVFTGIVGLILSWLMRLQLGFPELAGFMTAEHYYQFVTMHGMIMVVYFLTALFLGGFGNYLIPLMVGARDMVFPYVNMLSFWMFFVAVAVLMASFFVPGGPTGAGWTLYPPQTILEGTPGSGMGILLMLISLSLFVIGFTMGGLNYMITILQARTRGMTLMRMPLTVWGIFTATVLAMLAFPALLVSAIMMTLDKVLQTSFFMPTILKAGEVLEYGGGSPILFQHLFWFFGHPEVYIVALPAFGIVSDLISVHARKNIFGYRMMVWAIVGIGGLSFFVWAHHMYVSGMNPW

SEQ ID NO: 103954 - protein, 294 aa, Unknown
  Bacterial polypetide isolated from the Sargasso Sea
FWFYSHPAVYVMVLPVFGIFSEVFTCYSRKPLFGYKFVALASFGIVFLSLIVWVHHMFYTGTPNWMRILFMFTTMTIAVPTGVKVFAWVATLWRGKLRLTTPMLFCLGGLVNFIFAGITGVMLGTVPIDIHVGNTYFVVAHFHYVIFNAIVLGVFAAVYHWFPKFTGHMYYEGLGKLHFALTFIGCTLNWLPLHWAGLLGMPRRVASYDPEFAIWNVIASVGAFLLGVAAIPFILNMVSSWARGPKAPPNPWGAIGLEWLLPSPPPAENFEDDVPTVLNNPYGYGLDQPQVADE

SEQ ID NO: 103955 - protein, 224 aa, Unknown
  Bacterial polypetide isolated from the Sargasso Sea
MSFLVAVPSAIKVFNWTATLYKGSVSYLSPMLYALGFIGLFTIGGLTGLFLASLATDIHLHDTYFIVAHFHYIMVGGAVMAYLGAIHYWWPKITGRLYPEGWARFAALMVFVGFNLTFFPQFLLGYLGMPRRYHSYPDEFQVLNVLSTAGASTLAVGYAIPLVYLLWSLRYGKIAGSNPWGAKGLEWQTTSPPPTFNFDETPAVVEEAYAYGYADGPEENRGHG

SEQ ID NO: 103956 - protein, 299 aa, Unknown
  Bacterial polypetide isolated from the Sargasso Sea
MAYVPLADQDHEMEMHHPHSFVEKYVWSQDHKVIAIQYGGLAVFTGIVGLVLSLLFRMQLGFPDTATFIDPNFYYQAVTMHGMIMVVYLLTALFLGGFGNYMIPLMCGARDMVFPFLNMLSVWVFLLSVIILMASFFVSGGPTGGGWTLYPPQTNLAGTPGHDMGIVLMLISLAVFIVAATMGGLNYVVTVLQYRCRGLTMMRLPLTVWGIFVATLLALFAFPALLVSAIMMLFDILLGTSFFMPAIIESGTPLDHNGGSPILFQHLFWFFGHPEVYIVALPAFGLVSDVLSVHARKNI

SEQ ID NO: 103957 - protein, 281 aa, Unknown
  Bacterial polypetide isolated from the Sargasso Sea
MHGMIMVVYFLTALFLGGFGNYLIPLMVGARDMVFPYVNMLSFWMFFVAVTVLMASFFVPGGPTGAGWTLYPPQTILEGTPGSGMGILLMLVSLSLFVIGFTMGGLNYMITILQARTRGMTLMRMPLTVWGIFTATVLAMLAFPALLVSAIMMTLDKVLQTSFFMPTILKAGEVLEYGGGSPILFQHLFWFFGHPEVYIVALPAFGIVSDLISVHARKNIFGYRMMVWAIVGIGGLSFFVWAHHMYVSGMNPWFGFFFATTTLIIAVPTAMKVYNWILTLW

SEQ ID NO: 103958 - protein, 294 aa, Unknown
  Bacterial polypetide isolated from the Sargasso Sea
VQYFLTAVFTGVVGLILSWLMRLQLGFPGLAGFITAEHYYQFVTMHGMIMVVYFLTALFLGGFGNYLIPLMVGARDMVFPYVNMLSFWMFFVAVAVLMASFFVPGGPTGAGWTLYPPQTILEGTPGHGWGILLMLISLSLFVIGFTMGGLNYMITILQARTRGMTLMRMPLTVWGIFTATVLAMLAFPALLVSSIMMTLDKLLGTSFFMPTILKAGEVLEYGGGSPILFQHLFWFFGHPEVYIVALPAFGIVSDLISVHARKNIFGYRMMVWAIVGIGALSFFVWAHHMYVSGM

SEQ ID NO: 103959 - protein, 99 aa, Unknown
  Bacterial polypetide isolated from the Sargasso Sea
MINCREILSVISIKSLYIVLKMQKTFFILSTLIFLPSKVFADQPRDWQLGFQDAASQSMYEIVSFHNSILLPIIIAISVFVLFLMAYACFRFRESRNPN

SEQ ID NO: 103960 - protein, 42 aa, Unknown
  Bacterial polypetide isolated from the Sargasso Sea
MIFFMVMPAMISGFGNWFVPIMIGAPDMAFPRMNNISFWLLP

SEQ ID NO: 103961 - protein, 263 aa, Unknown
  Bacterial polypetide isolated from the Sargasso Sea
YLIPLMVGARDMVFPYVNMLSFWMFFVAVAVLMASFFVPGGPTGAGWTLYPPQTILEGTPGSGMGILLMLISLSLFVIGFTMGGLNYMITILQARTRGMTLMRMPLTVWGIFTATVLAMLAFPALLVSAIMMTLDKVLQTSFFMPTILKAGEVLEYGGGSPILFQHLFWFFGHPEVYIVALPAFGIVSDLISVHARKNIFGYRMMVWAIVGIGGLSFFVWAHHMYVSGMNPWFGFFFATTTLIIAVPTAMKVYNWILTLWRGN

SEQ ID NO: 103962 - protein, 266 aa, Unknown
  Bacterial polypetide isolated from the Sargasso Sea
EAIGVSKPWQMGFREAASPVMERIIIFHDFLMIISVAIAVFVTLLLAYVMIKFRASKNPNPSKRTHNTFIEVLWTVIPIIILVVMVVPSFRLLYYMDKTSEPEMTLKAIGHQWYWSYEYPDHGDFVFDAVMIEEDDLKPGQERLLHTDNEVVLPIDTNIKILITADDVIHNWALPSFGIKMDAVPGQLNETWVNITKPGLYYGMCSELCGVRHSFMPITIRAVSKEKFANWVEKAKIEFAKNDTYPINKDTDDITEIVSLTSTMNK

SEQ ID NO: 103963 - protein, 294 aa, Unknown
  Bacterial polypetide isolated from the Sargasso Sea
FYLIGGTLASAIRIELASPMSDFMPRDVYNQVLTLHGTIMIFLWIVPVVNGAFGNYLIPFYVGARDMAFPRLNAVAFWLIPPSGLMLVASYFVEGAAQAGWTAYPPLSITTPQSGQIIWILSVLLLGGSSIFGGINFIATIIKLRRPGLKLMKLPMYCWAMLGTSLLVVLSTPVLAGTLILLSFDIIAKTGFFNPVLGGNVVVYQHLFWFYSHPAVYIMVLPAFGLVSEILPVHARKPLFGYTTMVFSIMGIVVLGLVVWAHHMFTSGTPPWMRLFFTIATAFIAVPTRYKIFQ

SEQ ID NO: 103964 - protein, 113 aa, Unknown
  Bacterial polypetide isolated from the Sargasso Sea
ITFLVNFHWCHLVFFPHHFLGLAGMPRRYADYPDAFAGWNYISSIGSYISVLGLVVFFANLIYAFSKKKAAAQNPWGEGATTLEWTVPSPPNFHTFEELPKFEDDESIEKSTS

SEQ ID NO: 103965 - protein, 282 aa, Unknown
  Bacterial polypetide isolated from the Sargasso Sea
LLVGALMMSLDNVLGTSFFMPTILKAGEVLEYGGGSPILFQHLFWFFGHPEVYIVALPAFGIVSDLISVHARKNIFGYRMMVWAIVGIGALSFFVWAHHMYVSGMNPWFGFFFATTTLIIAVPTAMKVYNWILTLWRGNIRINTVMLWCLGFIVTFVNGGITGIFLGNVSVDVPLSDTYFVIAHFHMVMGIAPLMVIMGAVYHWFPLVAGRMLDETLGKWHFWITFLGAYSIYFPMHYLGFIGVPRRYFEMYDSPYMTSAVGMNEFISLAAFVVGAAQFILI

SEQ ID NO: 103966 - protein, 227 aa, Unknown
  Bacterial polypetide isolated from the Sargasso Sea
VGALMMSLDNVLGTSFFMPTILKAGEVLEYGGGSPILFQHLFWFFGHPEVYIVALPAFGIISDLISVHARKNIFGYRMMVWAIVGIGALSFFVWAHHMYVSGMNPWFGFFFATTTLIIAVPTAMKVYNWILTLWRGNIRLNTVMLWCLGFIVTFVNGGITGIFLGNVSVDVPLSDTYFVIAHFHMVMGIAPLMVIMGAVYHWFPLVAGRFLDEKLGKWHFWLTFLGA

SEQ ID NO: 103967 - protein, 176 aa, Unknown
  Bacterial polypetide isolated from the Sargasso Sea
ATCDGFFFKEKEVAVVGGGNAAVEEAMFLTKFASKVRLIHRRNELRAEKLLQEKLKANKKIEIIWDSIVEEVMGTNEPKGVNGIKIKNVKTNKASEIKVDGLFIAIGHDPATALFKDQLKMDKEGYLITKPDSTITNVPGVFAAGDVKDKIFRQAVTAAGMGCMAALEAEKHLSHK

SEQ ID NO: 103968 - protein, 231 aa, Unknown
  Bacterial polypetide isolated from the Sargasso Sea
QPDNNFLSAAEYNAMFTMHGTTMVFLAIMPISAAFFNYLLPLQIGARDVAFPRLNALSFWIWVFGGLFLYSTFVFGTAGAPEGGYLAEEVGWLGNAPNGGWFGYQPNAGFKYSPGTAMDYWAIGLQILGISSLVSAFNFIVTILNMRTQGMRLMRMPVFTWMTFAVAFLLAFSLPIIAIALFYVTFDRQFGTTFFLTEGGGDPVLWQHLFWLFGHPEVYILILPAFGIVSE

SEQ ID NO: 103969 - protein, 301 aa, Unknown
  Bacterial polypetide isolated from the Sargasso Sea
TLWLVSMAFFIASSLLAALNYIVTVLNLRTKGMTMTRLPLTVWAFLVTAIIGVVSFPVLLSAALLLIMDRSFGTSFFLSDIFIQGEVLHYQGGSPVLFEHLFWFLGHPEVYIVLLPALGIASEVIATNARKPIFGYRAMVGSILAIAFLSTIVWGHHMFVTGMNPFLGSVFTFTTLLIAIPSAVKAFNYITTIWKGNIQFNPAMLFAIGLVSTFITGGLTGIILGDSALDINLHDTYFVVAHFHLVMGISALYGLFAGVYHWYPRMFGRMMNKTLGYVHFWITAISAYGVFFPMHFIGMAG

SEQ ID NO: 103970 - protein, 273 aa, Unknown
  Bacterial polypetide isolated from the Sargasso Sea
MDVFCCSWCFNGKLFVPGGPTGSGWTLYPPQAILEGTPGSGMGIILMLVSLALFVIGFTMGGLNYLITVLQARTRGMTLMRMPLTVWGIFTATVLAMLAFPALLVSAIMMTLDKILGTSFFMPTILQAGEVLDYSGGSPILFQHLFWFFGHPEVYIVALPAFGIVSDLISVHSRKNIFGYRMMVWAIVGIGALSFFVWAHHMYVSGMNPWFGFFFATTTLIIAVPTAMKVYNWILTLWRGNIRINTVMLWCLGFIVTFVNGGITGIFLGNVTV

SEQ ID NO: 103971 - protein, 186 aa, Unknown
  Bacterial polypetide isolated from the Sargasso Sea
GLAGELLWPEFEATWPPMITPEQSIMGNQAVTKGPDESMYLHGISGIIKWLPLWNTIVLLTSSGTVHFAHIALKENNRKRFNFWLGITVCLAFIFVILQAAEYYEAYAHLGLTLNSGVYGTTFFMLTGFHGMHVLIGGIFLLTQLFRSTGFKHFTEKEHFGFEAASWYWHFVDVVWVCLFLFVYII

SEQ ID NO: 103972 - protein, 303 aa, Unknown
  Bacterial polypetide isolated from the Sargasso Sea
NKIETKAADSSSGSYVPPAETIPAKESPDQELYHAKSFWTKWVFCQDAKVIGIQYALTATAIGFIGLILSWGMRLQLGFPETFSFLGPATYYQSVTMHGMIMVIYLLTALFLGGFGNYLIPLMVGARDMVFPYVNMVSFWMFLIAVLILIASFFVPGGPTGAGWTLYPPQAILPGTPGSEMGIVLMLVSLSLFVIGFTMGGLNYVITILQARTRGMTLMRMPLTIWGIFTATVLALLAFPALFVACIMMTLDNLLGTSFFMPEIFSMGEKLDYAGGSPILFQHLFWFFGHPEVYIVALPAFGI

SEQ ID NO: 103973 - protein, 253 aa, Unknown
  Bacterial polypetide isolated from the Sargasso Sea
FWFFGHPEVYIVALPAFGIVSDLISVHSRKNIFGYRMMVWAIVAIGALSFFVWAHHMYVSGMNPWFGFFFATTTLIIAVPTAMKVYNWILTLWRGNIRINTVMLWCLGFIVTFVNGGITGIFLGNVSVDVPLSDTYFVVAHFHMVMGIAPLMVIMGAVYHWFPLVAGRILDEGLGKWHFWITFLGAYSIYFPMHYLGFIGVPRRYFEMYDSPYMTSGVGLNEFISKAAFIVGAAQFILIYNIIKTLKTGKARW

SEQ ID NO: 103974 - protein, 247 aa, Unknown
  Bacterial polypetide isolated from the Sargasso Sea
TSGTPPWMRLFFTIATAFIAVPTGIKFFNWLATLWGGRINLNSAMLFSCGFIVNFVLGGITGVALAQVPFDIHVHDTYFVVAHFHYIVFGGSVFVIFASVYHWYPKFTGRLLNEDLGRLHCALTFIGFNLCFGPQHWLGLNGMPRRVAEYDPQFTLINQISSVGALLMAISTLPFLWNVIRSAIAGPVAGDNPWNALTPEWLTSSPPPVENWIGEAPLVEEPYGYGVPAEQLDLAATTGRDLWSSGK

SEQ ID NO: 103975 - protein, 104 aa, Unknown
  Bacterial polypetide isolated from the Sargasso Sea
MSYGKAVSHEDHDHRPGFIKRWFFSTNHKDIGTLYIIFAILAGLVGGYFSLIMRAELAAPGLDVVADGQAWNVIITAHGLLMVFFVVMPALIGGFGNWFVPLMI

SEQ ID NO: 103976 - protein, 90 aa, Unknown
  Bacterial polypetide isolated from the Sargasso Sea
VVVQGIEYYEAYAHYGLTLNTGIYGTTFFMLTGFHGFHVCLGAIILTIMLFRSLKGHFTADDHFGFEAGSWYWHFVDVVWILLVAFVYVM

SEQ ID NO: 103977 - protein, 281 aa, Unknown
  Bacterial polypetide isolated from the Sargasso Sea
MDRSFGTSFFLSDIFIQGEVLHYQGGSPVLFEHLFWFLGHPEVYIVLLPALGIASEVIATNARKPIFGYRAMVGSILAIAFLSTIVWGHHMFVTGMNPFLGSVFTFTTLLIAIPSAVKAFNYITTIWKGNIQFNPAMLFAIGLVSTFITGGLTGIILGDSALDINLHDTYFVVAHFHLVMGISALYGLFAGVYHWYPRMFGRMMNKTLGYVHFWITAISAYGVFFPMHFIGMAGLPRRYYTNTNFPYFDDVANINVIITLFALLAGAAQIIFLYNFISQYV

SEQ ID NO: 103978 - protein, 127 aa, Unknown
  Bacterial polypetide isolated from the Sargasso Sea
GKMSGYQYSEWMGKLHFWLTFIGVNLIFFPQHFLGLAGMPRRYADYPDAFADWNYISSVGSYISVAGVVVFLINLLYSFITKKASSSNPWGEGATTLEWTVPSPPNFHTFDELPKVDVYEGAEKSKS

SEQ ID NO: 103979 - protein, 308 aa, Unknown
  Bacterial polypetide isolated from the Sargasso Sea
MGGFGNILFPLWVGARDMVFPYVNMVSFWMFLVAVLVLIASFFVPGGPTGAGWTLYPPQAILPGTPGSEMGIVLMLVSLSLFVIGFTMGGLNYVITILQSRTRGMTLMRMPLTIWGIFTATVLALLAFPALFVACIMMTLDNLLGTSFFMPEIFTMGEKLDYAGGSPILFQHLFWFFGHPEVYIVALPAFGIVSDLISVHARKNVFGYRMMVWAIVIIGALSFIVWAHHMYVSGMNPWFGFFFATTTLIIAVPTAIKVYNWVLTLWRGNIHLTIPMLFSLGFIVTFVNGGITGLFLGNVIIDVPLSDT

SEQ ID NO: 103980 - protein, 279 aa, Unknown
  Bacterial polypetide isolated from the Sargasso Sea
MDRSFGTSFYLSDIYIAGEALANEGGSAILFQHLFWFLGHPEVYIVILPALGIASEVIATCSRKPIFGYKFMVYSILAIGGLSFVVWAHHMFISGMNPFLGSVFTVLTLIIAVPSAIKAFNYIATLWRGNIIFTPAMLFSIGLVSTFISGGVTGIFLGNSALDINLHDTYFVVAHFHIVMGVSAFFGLFAGVYHWFPKMFGRMMNNGLGYIHFWLTFIGSYLVFFPLHYIGMAGFPRRYYSFSTFQAGNIESFVDLNVFVSYAALITFAAQFILLFNFF

SEQ ID NO: 103981 - protein, 54 aa, Unknown
  Bacterial polypetide isolated from the Sargasso Sea
FLAICMLRAMRGHFTKDQHLGFEAAAWYWHFVDVVWLFLFAAIYVWGSVGATIH

SEQ ID NO: 103982 - protein, 169 aa, Unknown
  Bacterial polypetide isolated from the Sargasso Sea
MSAEKKHDYHLVDPSPWPIYTSFACLVLAIGAIFYMHNGISWGMYLGLALLIYGAYMWFRDVVIEAEHQGHHTPVVQIHHRYGMTLFIASEVMFFVAWFWAYFDISLFPNEFVGNVWPPKDIETFDPWDIPLINTLVLLLSGTTVTWAHHALLEDDRKGFIQGLTLTVI

SEQ ID NO: 103983 - protein, 273 aa, Unknown
  Bacterial polypetide isolated from the Sargasso Sea
GGLNYLITVLQARTRGMTLMRMPLTVWGIFTATVLAMLAFPALLVGSLMMMLDKLLGTSFFMPTILKAGEVLEYGGGSPILFQHLFWFFGHPEVYIVALPAFGIISDLISVHSRKNIFGYRMMVWAIVGIGALSFFVWAHHMYVSGMNPWFGFFFATTTLIIAVPTAMKVYNWILTLWRGNIRMNTVMLWCLGFIVTFVNGGITGIFLGNVSVDVPLSDTYFVIAHFHMVMGIAPLMVIMGAVYHWFPLVTGKFLSEKLGKWHFWTTFLGAYS

SEQ ID NO: 103984 - protein, 127 aa, Unknown
  Bacterial polypetide isolated from the Sargasso Sea
LAQILVFHDTYFVVAHFHYVMAIAAILAMFAGYFYWIGKMSGRKYPRGMAKLQFWVFFIGVNVLFFPQHFSGFAGMPRRIPDYPAPYEGWNYVSSLGALITMIGTILFFIVVWRTFYGERAEANEWG

SEQ ID NO: 103985 - protein, 116 aa, Unknown
  Bacterial polypetide isolated from the Sargasso Sea
MSVEKKHDYHLVDPSPWPIYVSFSCLVLALGSVYYLHTDVSWGMYLGFALLIYGAYMWFRDVVIEAEHQGHHTPVVQIHHRYGMTLFIASEVMFFVAWFWAYFDVSLFPNEFVGNV

SEQ ID NO: 103986 - protein, 305 aa, Unknown
  Bacterial polypetide isolated from the Sargasso Sea
TALFLGGFGNYLIPLMVGARDMVFPYVNMISFWMFFIAVAVLMASFFVPGGPTGSGWTLYPPQAILEGTPGSGMGILLMLISLSLFVIGFTMGGLNYLITVLQARTRGMTLMRMPLTVWGIFTATVLAMLAFPALLVSSIMMTLDKVLETSFFMPTIIKAGEVLGYGGGSPILFQHLFWFFGHPEVYIVALPAFGIVSDLISVHSRKNIFGYRMMVWAIVAIGALSFFVWAHHMYVSGMNPWFGFFFATTTLIIAVPTAMKVYNWILTLWRGNIRINTVMLWCLGFIVTFVNEGITGIFLGNSFC

SEQ ID NO: 103987 - protein, 207 aa, Unknown
  Bacterial polypetide isolated from the Sargasso Sea
FNFIVTILNMRTQGMRLMRMPVFTWMTFAVAFLLAFSLPIIAIALFYVTFDRQFGTTFFLTEGGGDPVLWQHLFWLFGHPEVYILILPAFGIVSEILPTFSRKPLFGYPAIVFAGFGIAFIGFGVWAHHMFASAISPVAQAGFGISTMIIAVPTGVKIFNWLGTIWGGKLNLKTPMLFALGFIGMFVIGGLSGVTHSVVPADTQQTD

SEQ ID NO: 103988 - protein, 183 aa, Unknown
  Bacterial polypetide isolated from the Sargasso Sea
MSGEQKHQYHLVEPSPWPALGAAAGFTLVLGLTLFMHEYPYSIYVMIAGALMVLLTMFLWWRDVVREAEYQGHHTPIVQIGMRYGMIFFICSEVMFFVAFFWAFFDSSLYPDTGVWPPEGIETFDPFDLPLINTLILLLSGCTVTWSHHALQHNNRKDFIIGLILTIILGALFTALQAYEYDH

SEQ ID NO: 103989 - protein, 296 aa, Unknown
  Bacterial polypetide isolated from the Sargasso Sea
FPYVNMVSFWVFFLAVIILASSYFVPGGPTGAGWTLYPPQAITSGTPGGDGLGIVLMLVSLAVFVIGFTMGGLNYVITVLQARTRGMTLMRLPLTVWGIFTATVLALFAFPALFVAGIMMTLDNMLGTSFFMPAIIQFGEKLTHEGGSPILFQHLFWFFGHPEVYIVALPAFGIVSDLISVHARKNIFGYRMMVWAIVIIGGLSFIVWAHHMYVAGMNPWFGFFFATTTLIIAVPTAIKVYNWVLTLWRGNIKLTLPMLFSIAFIITFVNGGLTGLFLGNVAVDVPLSDTYFVVAH

SEQ ID NO: 103990 - protein, 157 aa, Unknown
  Bacterial polypetide isolated from the Sargasso Sea
MSGQEQKHDYHLVDPSPWPIYTSFATLVTAIGTVYYFHSKVMWAMIVGFALLIYGAYMWFRDVVIEAEHQGHHTPVVQIHHRYGMTLFIASEVMFFVAWFWAYFDASLFPSEFVGNVWPPKDIETFDPWDIPLINTLVLLLSGTTVTWAHHALLEDD

SEQ ID NO: 103991 - protein, 282 aa, Unknown
  Bacterial polypetide isolated from the Sargasso Sea
MFWFFGHPEVYIVALPAFGIISDLISVHSRKNIFGYRMMVWAIVVIGALSFFVWAHHMYVSGMNPWFGFFFATTTLIIAVPTAMKVYNWILTLWRGNIRMNTVMLWCLGFIVTFVNGGITGIFLGNVTVDVPLSDTYFVIAHFHMVMGIAPLMVIMGAVYHWFPLVTGKFLSEKLGKWHFWLTFLGAYSIYFPMHYLGFIGVPRRYFEMYDSPYMTSAVGMNEFISTAAFIVGAAQFILIFNIIKSLKTGKSAGKNPWQSNSLEWLTPTVPPEHGNWGERLP

SEQ ID NO: 103992 - protein, 176 aa, Unknown
  Bacterial polypetide isolated from the Sargasso Sea
RFEANCPLMITPDQAVFAGPEKDMSLSTAYAAGGLGGVLGWLPLWNTVLLLTSSLTVHIAHLGLKNGNRKQFNLWLGATLVLGYAFVVVQGVEYYEAYTHYGLTLQTGIYGTTFFMLTGFHGFHVCLGAIILTIMLFRSLKGHFSADDHFGFEAGSWYWHFVDVVWVCLVAFVYVM

SEQ ID NO: 103993 - protein, 32 aa, Unknown
  Bacterial polypetide isolated from the Sargasso Sea
MIKNTFGFEAASWYWHFVDVVWVCLFLFVYIL

SEQ ID NO: 103994 - protein, 166 aa, Unknown
  Bacterial polypetide isolated from the Sargasso Sea
LFVWSWLITAYLLIEVMPVLAGVVTMMLMDINFGTSFFNAAGGGDPVLFQHVFWFFGHPEVYIMILPAFGIVSHIIETFSRKPIFGYSSMVYAMASITILSFVVWAHHMFTVGMPLAGELFFMYSTMLIAIPTGVKVFNWVATMFRGSITFETPMLFSIAFVALFT

SEQ ID NO: 103995 - protein, 218 aa, Unknown
  Bacterial polypetide isolated from the Sargasso Sea
TAIQFFVLILIIYVVIRFRKSVNPNPSKRTHNALIEILWTGIPVIILIVMAIPSFKLLYQQDVIPKADMTVKVIGHQWYWEYQYPEQDDISFESYMIPDEDLQEGDVRLLTVDNKLVLPINKNIHVLVTAGDVLHSFAMPSLGVKKDAVPGRLNETWMNIEKPGIYRGQCSELCGTGHGYMPIVIEAVSQEDFIAWVTETKTKLAMNDKNTFAKANTE

SEQ ID NO: 103996 - protein, 112 aa, Unknown
  Bacterial polypetide isolated from the Sargasso Sea
MPNKPSSTGQKHPYHLVDPSPLPFLSSIAGLGMAAGLVFYMHYETTWLLILGTIGLLTIMFLWWRDVIKESTIQKVHTPVVELGLRYGMALFIASEVMFFVAFFWAFFDASL

SEQ ID NO: 103997 - protein, 266 aa, Unknown
  Bacterial polypetide isolated from the Sargasso Sea
MRIFILFFLTFFAFSSLANTPYDWQLGFQEPASPVMRSVLELHDFVLIMMTAITIFVLFLIIYVVIRFRKAANPNPSKRTHNALIEILWTGIPVIILIVMAIPSFKLLYQQDVIPEADMTVKVIGHQWYWEYQYPEQDNISFESYMIPDEELNEDDIRLLTVDNKLVLPINKNIHVLVTAGDVLHSFAMPSLGVKKDAVPGRLNETWMNIEKVGTYRGQCSELCGTGHGYMPIVIEAVSQEDFVKWVNQTKLAMNNKNTFAKANTK

SEQ ID NO: 103998 - protein, 293 aa, Unknown
  Bacterial polypetide isolated from the Sargasso Sea
TPGSGMGILLMLISLSLFVIGFTMGGLNYMITILQARTRGMTLMRMPLTVWGIFTATVLAMLAFPALLVSAIMMTLDKVLQTSFFMPTILKAGEVLEYGGGSPILFQHLFWFFGHPEVYIVALPAFGIVSDLISVHARKNIFGYRMMVWAIVGIGGLSFFVWAHHMYVSGMNPWFGFFFATTTLIIAVPTAMKVYNWILTLWRGNIRINTVMLWCLGFIVTFVNGGITGIFLGNVSVDVPLSDTYFVIAHFHMVMGIAPLMVIMGAVYHWFPLVAGKNVHEGLGKWHFWDTFL

SEQ ID NO: 103999 - protein, 140 aa, Unknown
  Bacterial polypetide isolated from the Sargasso Sea
PSFKVLYSQDEIPKADVTIKAIGYQWYWGYEYPDENIIFDSYMIDEKDLKENQPRLLAVDNEVYVPVNKVVKVMITANDVLHAWALPSFGVKRDAIPGRINETWFKADRTGTFYGQCSELCGIKHAFMPITVNVVSEDEV

SEQ ID NO: 104000 - protein, 308 aa, Unknown
  Bacterial polypetide isolated from the Sargasso Sea
GGLNYLITILQARTRGMTLMRMPLTVWGIFTATVLAMLAFPALLVSAIMMTLDKILGTSFFMPTIIQAGEVLDYGGGSPILFQHLFWFFGHPEVYIVALPAFGIVSDLISVHSRKNIFGYRMMVWAIVGIGGLSFFVWAHHMYVSGMNPWFGFFFATTTLIIAVPTAMKVYNWILTLWRGNIRLNTVMLWCLGFIVTFVNGGITGIFLGNVSVDVPLSDTYFVIAHFHMVMGIAPLMVIMGAVYHWFPLVSGKFLDEKLGKWHFWLTFLGAYSIYFPMHYLGFIGVPRRYFEMYDSPYMTSAVGMMNS

SEQ ID NO: 104001 - protein, 301 aa, Unknown
  Bacterial polypetide isolated from the Sargasso Sea
MSAVLDNHGHAGDHAHDGHDHHGPTGWRRWVFATNHKDIGTLYLLFSFTMLMVGGILALLIRAELFQPGLQLVNPELFNQLTTMHGLIMVFGAIMPAFVGFANWMIPLQIGASDMAFARMNNFSFWLMIPAALMLVSSFFMPGGAPAAGWTLYAPLTLQMGPSMDAGIFAMHILGASSIMGSINIIVTILNMRAPGMTLMKMPMFAWTWLITAYLLIAVMPVLAGAITMTLTDRHFGTSFFNPAGGGDPVMYQHIFWFFGHPEVYIMILPAFGIISQIVPAFSRKKLFGYASMVYATSSIA

SEQ ID NO: 104002 - protein, 97 aa, Unknown; identical to SEQ ID NO: 103813
  Bacterial polypetide isolated from the Sargasso Sea

SEQ ID NO: 104003 - protein, 213 aa, Unknown
  Bacterial polypetide isolated from the Sargasso Sea
AFPPLEAAAVMQLMDRVAGTSFFLPSGLVMSGEIVDVAGSGSPLLWQHLFWFLAHPEVYVLILPALGIVGEILANNTRKPIWGFKSIIYSMVFLGFCSFIVWAHHMFLTGMGQAMSAFFQTTTMIISIPSVVILTSYFLSLWGGSIRFNTPMLFALAFLPMFGIGGLTGLPLGLAASDIYLHDTYYVIGHFHYVVAPGTIFALFAGIYYWFPK

SEQ ID NO: 104004 - protein, 293 aa, Unknown
  Bacterial polypetide isolated from the Sargasso Sea
LSWLMRLQLGFPGLAGFMTAEHYYQFVTMHGMIMVVYFLTALFLGGFGNYLIPLMVGARDMVFPYVNMISFWMFFVAVAVLMASFFVPGGPTGSGWTLYPPQAILEGTPGSGAGILLMLISLSLFVIGFTMGGLNYLITVLQARTRGMTLMRMPLTVWGIFTATVLAMLAFPALLVSSIMMTLDKVLETSFFMPTIIKAGEVLGYGGGSPILFQHLFWFFGHPEVYIVALPAFGIVSDLISVHSRKNIFGYRMMVWAIVAIGALSFFVWAHHMYVSGMNPWFGFFFATTTLIM

SEQ ID NO: 104005 - protein, 282 aa, Unknown
  Bacterial polypetide isolated from the Sargasso Sea
CGKYVWSQDHKVIAIQYGGLAVFTGIVGLVLSLLFRMQLGFPDTATFIDPNFYYQAVTMHGMIMVVYLLTALFLGGFGNYMIPLMCGARDMVFPFLNMLSVWVFLLSVIILMASFFVSGGPTGGGWTLYPPQTNLAGTPGHDMGIVLMLISLAVFIVAATMGGLNYVVTVLQYRCRGLTMMRLPLTVWGIFVATLLALFAFPALLVSAIMMLFDILLGTSFFMPAIIESGTPLDHNGGSPILFQHLFWFFGHPEVYIVALPAFGLVSDVLSVHARKNIFGYR

SEQ ID NO: 104006 - protein, 223 aa, Unknown
  Bacterial polypetide isolated from the Sargasso Sea
PTGAGWTLYPPQAITAGTPGSDMGIILMLISLILFVAGFTMGGLNYIITVLQLRARGMTLMRLPLTIWGIFTATVLAMFAFPALLVGCLMMTLDSLLGTSFFMPAMVSLGETLTHEGGSPILFQHLFWFFGHPEVYIVALPAFGIVSDLLSVHSRKTIFGYRMMVWAIVGIGALSFFVWAHHMYVSGMNPWFGFFFATTTLIIAVPTAIKVYNWILTLWRGNI

SEQ ID NO: 104007 - protein, 36 aa, Unknown
  Bacterial polypetide isolated from the Sargasso Sea
FKHFTDKEHFGFEAASWYWHFVDVVWVCLFLFVYIL

SEQ ID NO: 104008 - protein, 289 aa, Unknown
  Bacterial polypetide isolated from the Sargasso Sea
TATVLAMLAFPALLVGALMMMLDKLLGTSFFMPTILKAGEVLEYGGGSPILFQHLFWFFGHPEVYIVALPAFGIISDLISVHSRKNIFGYRMMVWAIVGIGALSFFVWAHHMYVSGMNPWFGFFFATTTLIIAVPTAMKVYNWILTLWRGNIRMNTVMLWCLGFIVTFVNGGITGIFLGNVSVDVPLSDTYFVIAHFHMVMGIAPLMVIMGAVYHWFPLVTGKFLSEKLGKWHFWATFLGAYSIYFPMHYLGFIGVPRRYFEMYDSPYMTSAVGMNEFISTAAFLVGAA

SEQ ID NO: 104009 - protein, 309 aa, Unknown
  Bacterial polypetide isolated from the Sargasso Sea
MTAEHYYQFVTMHGMIMVVYFLTALFLGGFGNYLIPLMCGARDMVFPYVNMISFWMFFVAVAVLMASFFVPGGPTGSGWTLYPPQAILEGTPGSGMGILLMLISLSLFVIGFTMGGLNYLITVLQARTRGMTLMRMPLTVWGIFTATVLAMLAFPALLVSSIMMTLDKILQTSFFMPTILKAGEVLDYGGGSPILFQHLFWFFGHPEVYIVALPAFGIVSDLISVHSRKNIFGYRMMVWAIVGIGALSFFVWAHHMYVSGMNPWFGFFFATTTLIIAVPTAMKVYNWILTLWRGNIRINTVMLWCLGFI

SEQ ID NO: 104010 - protein, 116 aa, Unknown
  Bacterial polypetide isolated from the Sargasso Sea
MITGGMLLLTLPILSGALLMVLADLHSNTLFFDSIFGGDPIFYQHLFWFFGHPEVYILIIPAFGIISIIISGILQKIIFGNQSMIFAMSCISLLGSVVWGHHMYTVGLETDTRAYY

SEQ ID NO: 104011 - protein, 277 aa, Unknown
  Bacterial polypetide isolated from the Sargasso Sea
MHKLILLITLAISPINLFAEQPKDWQLGFQKAASGHMEDLVWFHDYMLLPIITAITVFVLFLVIYACIRFRAARNPIASQTSHNTFIEIIWTLVPCLILIVMAVPSFKILYEQDEIPPADVTIKAVGYQWYWGYEYPDENIIFDSYMIEEKDLKPGQPRLLSVDNEIVVPVNKVVKVLITANDVLHAWALPSFGVKRDAVPGRINETWFKADRKGTFYGQCSELCGIKHAFMPITVNVVSQEEYDKWLNEAKQKFAKEEIGFNNQKVVKRILKGEIK

SEQ ID NO: 104012 - protein, 378 aa, Unknown
  Bacterial polypetide isolated from the Sargasso Sea
PGSGMGILLMLISLSLFVIGFTMGGLNYMITILQARTRGMTLMRMPLTVWGIFTATVLAMLAFPALLVSAIMMTLDKVLQTSFFMPTILKAGEVLEYGGGSPILFQHLFWFFGHPEVYIVALPAFGIVSDLISVHARKNIFGYRMMVWAIVGIGGLSFFVWAHHMYVSGMNPWFGFFFATTTLIIAVPTAMKVYNWILTLWRGNIRINTVMLWCLGFIVTFVNGGITGIFLGNVSVDVPLSDTYFVIAHFHMVMGIAPLMVIMGAVYHWFPLVAGKMLHEGLGKWHFWITFLGAYSIYFPMHYLGFIGVPRRYFEMYDSPYMTSAVGMNEFISIAAFIVGAAQFILVFNIIKTLKTGKKAEQNPGKQIHLNGIHLLSA

SEQ ID NO: 104013 - protein, 306 aa, Unknown
  Bacterial polypetide isolated from the Sargasso Sea
MSTNTTGHQKYYVPESSSIPIVFAIAMLFFGVGAADAVMGKGTTLLFIGVATVIGTLAYWWSVVIRESHAGLDTPQLNTSYVYGMAWFIFSEVMFFAAFFGALFYIRTFSISWLGGEGDKGLAGELLWPEFEATWPPMITPEESLMGDQAVTKGPDESMYLRSIGNLGTWLPLYNTIVLLTSSGTVHFAHMALKENNRKRFNFWLGITVLLAFIFVILQALEYYEAYAHLGLTLNTGVYGTTFFMLTGFHGMHVLIGGIFLATQLTRSAGYNHFTDKEHFGFEAASWYWHFVDVVWVCLFLFVYIL

SEQ ID NO: 104014 - protein, 197 aa, Unknown
  Bacterial polypetide isolated from the Sargasso Sea
MADAAIHGHEHEDQQGFFTRWFMSTNHKDIGILYLVVSALVGFIAVSFTIYMRLELMNPGVQYMCMEGMRLTAAGIGECTPNGHLWNVLITGHGILMMFFVVIPALFGGFGNYFMPLQIGSPDMAFPRMNNLSFWMYVAGTTLALCSVLSPGGNDQLGSGVGWILYPPLSVNEGGMSMDLAIFAVHVSGASSILGAI

SEQ ID NO: 104015 - protein, 122 aa, Unknown
  Bacterial polypetide isolated from the Sargasso Sea
LTVHIAHLGLKNGNRRQFNIWLGLTLVLGYLFVFFQGLEYYEAYAHMGLTLNTGIYGTTFFMLTGFHGFHVCLGAIILTIMLLRSLKGHFTADDHFGFEAGSWYWHFVDVVWVCLVAFVYVM

SEQ ID NO: 104016 - protein, 431 aa, Unknown
  Bacterial polypetide isolated from the Sargasso Sea
TILEGTPGSGMGILLMLISLSLFVIGFTMGGLNYLITVLQARTRGMTLMRMPLTVWGIFTATVLAMLAFPALLVSAIMMTLDKVLQTSFFMPTILKAGEVLEYGGGSPILFQHLFWFFGHPEVYIVALPAFGIVSDLISVHSRKNIFGYRMMVWAIVGIGALSFFVWAHHMYVSGMNPWFGFFFATTTLIIAVPTAMKVYNWILTLWRGNIRINTVMLWCLGFIVTFVNGGITGIFLGNVSVDVPLSDTYFVIAHFHMVMGIAPLMVIMGAVYHWFPLVAGKMLDEGLGKWHFWITFLGAYSIYFPMHYLGFIGVPRRYFEMYDSPYMTSAVGMNEFISLAAFIVGAAQFILIYNIIKTLKTGKKAGKNPWKANSLEWYTSTVPPEHGNFGDRLPVVHRWPYDFSVPGAKEDFIAQTTPPSEVIHTKVEKT

SEQ ID NO: 104017 - protein, 497 aa, Unknown
  Bacterial polypetide isolated from the Sargasso Sea
MNLIEHYVNGSKYTGSSKRKGKVFNPATGDISSEVLLGSKEDLNKTVDFAKKAFENWSTKPPIQRARIIFKYKELIEKNYDELTKLIVSEHGKVYEDAKGSLTRGLEVIEFACGIPQMLKGEFTENVGTDIDSWSLRQPLGVCAGITPFNFPAMVPMWMFPMAIACGNTFILKPSEKDPSCSMKLAELFSEAGLPDGVLNIVNGDKEVVESILENKDIQAVSFVGSTPIAKYIYENAAKNEKRVQALGGAKNHCVVMPDCDLDQAVNGLMGAAYGSAGERCMAQSVAVAVGSIGDELVSELSKKVEKLKVGPGMDKSSEMGPLVTKEHLEKVTGYVDLGIKEGANLVVDGRKMKLQGYENGFYIGGCLFDNVTKDMRIYKEEIFGPVLSVVRVDDFNEATKLVNNHEFGNGTSIYTRDGDVGRTFANKIKVGMVGINIPIPVPVAHHSFGGWKRSLFGDQHMHGPEGVRFYTKLKTITSRWPSGVRSNPEFIMPTMK

SEQ ID NO: 104018 - protein, 389 aa, Unknown
  Bacterial polypetide isolated from the Sargasso Sea
TRGMTLMRMPLTVWGIFTATVLAMLAFPALLVSAIMMTLDKVLQTSFFMPTILKAGEVLEYGGGSPILFQHLFWFFGHPEVYIVALPAFGIVSDLISVHARKNIFGYRMMVWAIVGIGALSFFVWAHHMYVSGMNPWFGFFFATTTLIIAVPTAMKVYNWILTLWRGNIRINVVMLWCLGFIVTFVNGGITGIFLGNVSVDVPLSDTYFVIAHFHMVMGIAPLMVIMGAVYHWFPLVAGKMLDEGLGKWHFWITFLGAYSIYFPMHYLGFIGVPRRYFEMYDSPYMTSAVGMNEFISIAAFIVGAAQFILIFNIIKTLKTGKKAEQNPWKANSLEWYTSTVPPEHGNFGERLPVVHRWPYDFSVPGAKEDYIPQTTAPSEVIHTEVEKT

SEQ ID NO: 104019 - protein, 275 aa, Unknown
  Bacterial polypetide isolated from the Sargasso Sea
VGIGALSFFVWAHHMYVSGMNPWFGFFFASTTLIIAVPTAMKVYNWILTLWRGNIRINTVMLWCLGFIVTFVNGGITGIFLGNVSVDVPLSDTYFVVAHFHMVMGIAPLMVIMGAVYHWFPLVAGRMLHEGLGKWHFWITFLGAYSIYFPMHYLGFIGVPRRYFEMYDSPYMTSGVGLNEFISLAAFIVGAAQFILIYNIIKTLKTGKPAGKNPWKANSLEWHTSTVPPEHGNFGERLPVVHRWAYDYSVPGAKEDFMPQTTPPSEVTNTEVEKT

SEQ ID NO: 104020 - protein, 344 aa, Unknown
  Bacterial polypetide isolated from the Sargasso Sea
SFFMPTIIKAGEVLSYDGGSPILFQHLFWFFGHPEVYIVALPAFGIVSDLISVHARKNIFGYRMMVWAIVGIGALSFFVWAHHMYVSGMSPWFGFFFATTTLIIAVPTALKVYNWILTLWRGNIRLNTVMLFCLGFIVTFVNGGITGIFLGNVAVDVPLSDTYFVIAHFHMVMGIAPLMVIFGAIYHWFPLVTGRFLDETLGKWHFWVTFLGAYSIYFPMHYLGFIGVPRRYFEMYDSPYMTSAVGMNEFITISAFIVGAAQFIFFYNVVKSIRLGKSAGKNPWKANSLEWLTPNVPPAHGNWGDKLPVVHRWAYDYSVPGAKDDFIPQTTPPSEVIEAEVEKT

SEQ ID NO: 104021 - protein, 212 aa, Unknown
  Bacterial polypetide isolated from the Sargasso Sea
MLFAIGLVSTFITGGLTGIILGDSALDINLHDTYFVVAHFHLVMGISALYGLFAGVYHWYPRMFGRMMNKTLGYVHFWITAISAYGVFFPMHFIGMAGLPRRYYTNTNFPYFDDVANINVIITLFALLAGAAQIIFLYNFISSMYYGKKTEQNPWKSTTLEWTAPIKHIHGNWPGKIPHVFRWAYDYSKPGSKDDFVPQNVPLKKGEKELQH

SEQ ID NO: 104022 - protein, 255 aa, Unknown
  Bacterial polypetide isolated from the Sargasso Sea
MVVKDQSFEDVIKYYWDATYPWLTTTDHKYIGTLYIVTGFGFFFIGGILGLLIRWQLLEPRVDGDFLTYEEYNSTFTMHGTTMIFLAAMPIIFGFANYLIPLQIGARDLAFPRLNALGYWLLPTGGLVIYMGYFTGGAGDVGWTGYTPYSSGDTATRPGTDFWVAGQIMLGASSTLTAINFLTTMLRMRAPGVTLMRMPLFAWSILVTVFLLLLSIPVFTVALLLLMADRTFGTLYFDVTAGGDPILWQHLFWYF

SEQ ID NO: 104023 - protein, 575 aa, Unknown
  Bacterial polypetide isolated from the Sargasso Sea
MSSDSHSHDHHEEGFIRKYIFSVDHKIIGIQYGITSLLFLLFGFSLMAIMRWQLAYPDTVIPVVGFLFGESGTLASEQYNSLGAMHGTIMIFLGIVPLAVGAFGNYLVPLQIGAIDMAFPKLNAASYWTYFVGGVIMISSFFMPEGAARSGWTSYPPLSIFENGQTIWLISMIFLITSSLLGSMNIIVTIVQLRAPGLSWMRLPIFVWAQFVTSFLLVLAFPPLEAAAVMQLMDRVAGTSFFLPSGLVMSGEIVDVAGSGSPLLWQHLFWFLAHPEVYVLILPALGIVGEILANNTRKPIWGFKSIIYSMVFLGFCSFIVWAHHMFLTGMGQAMSAFFQTTTMIISIPSVVILTSYFLSLWGGSIRFNTPMLFALAFLPMFGIGGLTGLPLGLAASDIYLHDTYYVIGHFHYVVAPGTIFALFAGIYYWFPKMTGKKMNEILGKLHFWPSLVFMNGIFMPMFIQGLAGVSRRLADGGVSYAHASGVLEWNEFMSMSAFFLGLAQIPFIINIVMSLFAGEKASRNPWDSTTVEWSAPSPPVGHGNFDKPVNVYHSAYEYSVPDSKKDFTPQFEKNG

SEQ ID NO: 104024 - protein, 174 aa, Unknown
  Bacterial polypetide isolated from the Sargasso Sea
MSASGQKHDYHLVDPSPWPLATSIATLVTAVGSVYYFHSKVMWAMVLGFLLIIYCAFMWFRDVVIEAEHKGHHTPVVQIHHRYGMTLFIASEVMFFVAWFWAYFDASLFPNEFMGNVWPPKDIETFDPWDIPLINTLVLLLSGTTVTWAHHSLLEDDRKGFINGLICTVVLGAF

SEQ ID NO: 104025 - protein, 277 aa, Unknown
  Bacterial polypetide isolated from the Sargasso Sea
MHKLILIITLIVYPINLFAEQPKDWQLGFQKAASGHMEDLVWFHDYMLLPIITAITVFVLFLVIYACIRYRAARNPVASQTSHNTFIEIIWTLVPCLILIVMAVPSFKLLYEQDEIPPADITIKAIGYQWYWGYEYPDENIIFDSYMIEDEDLKPGQPRLLTVDNEIVVPVNKVVKVLITANDVLHAWALPSFGVKRDAVPGRINETWFKADRTGTFYGQCSELCGIKHAFMPITVNVVSQEEYDKWLEEAKQKFAKEELGLNNKKVVKRILEGEVK

SEQ ID NO: 104026 - protein, 348 aa, Unknown
  Bacterial polypetide isolated from the Sargasso Sea
MSDEYEHKIEAKSDYATDASSVSTPDIDTVPDAELPDQELYHSHSWWTTYVFSQDAKYIGIQYALTAVGTGLLGLVLSWLMRIQLAFPGLGWLDPAAYYQFVTMHGMIMVVYLLTALFLGGFGNLLIPLMCGARDMAFPYVNMLSYWAFVVAVLVLLASFFVPGGPTGAGWTLYPPQAITAGTPGSDMGIILMLISLILFVAGFTMGGLNYIITVLQLRARGMTLMRLPLTIWGIFTATVLAMFAFPALLVGCLMMTLDSLLGTSFFMPAMVSLGEKLTHEGGSPILFQHLFWFFGHPEVYIVALPAFGIVSDLLSVHSRKTIFGYRMMVWAIVGIGALSFFVWAHHM

SEQ ID NO: 104027 - protein, 138 aa, Unknown
  Bacterial polypetide isolated from the Sargasso Sea
NTLLLITSSLTVTIAHHAILENEREKVIFWTGITAVLGIIFLGVQIYEYHVLSFGLKDGVYPSTFYLATGFHGFHVFVGTIFLIICYFRARAGHFTPEAHIGYEAAAWYWHFVDVVWIFLYVNVYWWGASSFGHLVVE

SEQ ID NO: 104028 - protein, 314 aa, Unknown
  Bacterial polypetide isolated from the Sargasso Sea
MFWFFGHPEVYIVALPAFGIVSDLISVHARKNIFGYRMMVWAIVGIGALSFFVWAHHMYVSGMNPWFGFFFASTTLIIAVPTAMKVYNWILTLWRGNIRINTVMLWCLGFIVTFVNGGITGIFLGNVSVDVPLSDTYFVVAHFHMVMGIAPLMVIMGAIYHWFPLVAGKMLDEKLGKWHFWTTFLGAYSIYFPMHYLGFIGVPRRYYEMYDSPYMTSGVGLNEFISTAAFIVGAAQLILVFNIVKTMKTGKKAEKNPWKANSLEWFTSTVPPEHGNFGERLPVVHRWPYDYNVPGAEEDYLPQTAAPSEVAHTE

SEQ ID NO: 104029 - protein, 336 aa, Unknown
  Bacterial polypetide isolated from the Sargasso Sea
MSEDFNDNKTIQAQSSEAISGGGSGIASDADYVRPAEVADQDLYHGHSFITKWIFCQDAKVIGVQYFLLATFTGIIGLILSWLMRLQLGYPELVPFMTAEHYYQFVTMHGMIMVVYFLTALFLGGFGNYLIPLMVGARDMVFPYLNMVSFWSFFVAVGVLLASFFVPGGPTGSGWTLYPPQAILEGTPGSGWGIMLMCISLILFVAGFTMGGLNYLITVLQARTRGMTLMRMPLTVWGIFTATVLAMLAFPALLVGALMMSLDNVLGTSFFMPTILKAGEVLEYGGGSPILFQHLFWFFGHPEVYIVALPAFGIISDLISVHARKNIFGYRMMVWA

SEQ ID NO: 104030 - protein, 151 aa, Unknown
  Bacterial polypetide isolated from the Sargasso Sea
VVPHFHYVMSLGAVLAIFAGIYFYFSKMTGRAYPEWAGKLHFWMMFIGSNLTFFPQHFLGRQGMPRRYIDYPEAFAYWNVISSYGAFLAFASFLFFFVIIFYSLFFGARQNAANPWNEYADTLEWTLPSPPPEHTFEILPEQKDWDKSEAH

SEQ ID NO: 104031 - protein, 167 aa, Unknown
  Bacterial polypetide isolated from the Sargasso Sea
MSVEKKHDYHLVDPSPWPIYTAFACLVLAIGTIFYMHNDVSWGMYLGLALLIYGAYMWFRDVVIEAEHQGHHTPVVQIHHRYGMTLFIASEVMFFVAWFWAYFDISLFPNEFVGNVWPPKDIETFDPWDIPLINTLVLLLSGTTVTWAHHSLLEGDRKGFIQGLTAT

SEQ ID NO: 104032 - protein, 148 aa, Unknown
  Bacterial polypetide isolated from the Sargasso Sea
MSSNNHSYHLVEPSPWPAVGAAAGFVLALGGAMYMHEYEYGGITSLVGFGLVFLTMFYWWRDIVREGEFQGHHSPIVQIGLRYGMMLFIASEVMFFVAFFWAFFASSLFPVGGVWPPEGIKTFDPFDLPLINTLILLLSGCTVTWAHH

SEQ ID NO: 104033 - protein, 326 aa, Unknown
  Bacterial polypetide isolated from the Sargasso Sea
MTISIDPQKTNNESLQPKGWLRYFSFSLDHKVIGIQYLVCGFLFYLIGGTLASAIRIELASPMSDFMPRDVYNQVLTLHGTIMIFLWIVPVVNGAFGNYLIPFYVGARDMAFPRLNAVAFWLIPPSGLMLVASYFVEGAAQAGWTAYPPLSITTPQSGQIIWILSVLLLGGSSIFGGINFIATIIKLRRPGLKLMQLPMYCWAMLGTSLLVVLSTPVLAGTLILLSFDIIANTGFFNPVLGGNVVVYQHLFWFYSHPAVYIMVLPAFGLVSEILPVHARKPLFGYTTMVFSIMGIVVLGLVVWAHHMFTSGTPPWMRLFFTIATAN

SEQ ID NO: 104034 - protein, 256 aa, Unknown
  Bacterial polypetide isolated from the Sargasso Sea
MSKATEVISPDTSAPHSGQVNGGHLHDDHEHHDHIPKGITRWLFTTNHKDIGTLYLWFAFIMFLVGGAMAMVIRAELFQPGLQIVEPNFFNQMTTVHGLIMVFGAVMPAFTGLANWLIPMMIGAPDMALPRMNNWSFWILPGAFLILLSSLFMEGGGPAFGWTFYAPLSTTYSGDSTALFVFSVHIMGISSIMGAINVIVTIFNMRAPGMTWMKMPLFVWTWLITAFLLIAVMPVLAGAVTMVLTDKFFGTSFFDA

SEQ ID NO: 104035 - protein, 286 aa, Unknown
  Bacterial polypetide isolated from the Sargasso Sea
MSGSNGYYVPHQTKWPFLTTVSVFILFIGAANFMNGTGGLYTVFFGLLLLFIMAYVWFSEVISESEAGIYNAQVDISFRWGMVWFIFSEVMFFAAFFGALYYARELSLPWLGGEGYKTTTNIVLWPQFETIWPSNGPTNTGGDFTVMRAGGIPAINTLLLLTSGLTVTYAHHALKKQDRKNLIIGLAATIALGFIFVGFQAYEYMHAYSDLNLKMTTGIYGSTFYMLTGFHGFHVTLGAIMLTVILFRCMKGHFAGDNHFGFEAVAWYWHFVDVVWLGLFVFVYWL

SEQ ID NO: 104036 - protein, 317 aa, Unknown
  Bacterial polypetide isolated from the Sargasso Sea
MNEYSGAAVGDIDYVRPAELPEQDLYHGHTFLTKWVFCQDAKVIGVQYFLTAVFTGVVGLILSWLMRLQLGFPGLAGFMTAEHYYQFVTMHGMIMVVYFLTALFLGGFGNYLIPLMVGARDMVFPYVNMLSFWMFFVAVAVLMASFFVPGGPTGSGWTLYPPQAILEGTPGSGAGILLMLISLSLFVIGFTMGGLNYMITILQARTRGMTLMRMPLTVWGIFTATVLAMLAFPALLVSSIMMTLDKVLGTSFFMPTILKAGEVLEYGGGSPILFQHLFWFFGHPEVYIVALPAFGIVSDLISVHARKNIFGYRMMVW

SEQ ID NO: 104037 - protein, 333 aa, Unknown
  Bacterial polypetide isolated from the Sargasso Sea
EMLSYDGGSPILFQHLFWFFGHPEVYIVALPAFGIVSDLLSVHARKNIFGYRMMVWAIVGIGALSFFVWAHHMYVSGMNPWFGFFFASTTLIIAVPTALKVYNWILTLWRGNIRLTTVMLFCLGFIVTFVNGGITGIFLGNVIVDVPLSDTYFVIAHFHMVMGIAPLMVIFGAIYHWFPLITGRFLDETLGKWHFWVTFLGAYSIYFPMHYLGFIGVPRRYFEMYDSPYMTSAVGMNEFISVAAFIVGAAQFIFFYNLVKSIRLGKPAGKNPWKANSLEWLTPQVPPEHGNWGEKLPVVHRWAYDFNVPGAKKDYITQTTPPSEVIEAEVEKT

SEQ ID NO: 104038 - protein, 577 aa, Unknown
  Bacterial polypetide isolated from the Sargasso Sea
MDQNSATYEGQKMYDPKGWWDTYVFSQDHKVIALQYVCVALAIGLTGMFLSLLMRMQLGFPGLFESIDAGSYYQDVTMHGMIMVIYLLTALFLGGFGNYLIPLMLGCRDMAFPFVNMLSFWMYFLSVIILVASFFVESGPTGAGWTLYPPQSILEGTPGGDGAGIILMLASLAVFIIAFTMGGLNYITTVLQSRAKGMTLMRMPLIIWCIFLATFLGLLAFPALLVGAIMLIFDRVLETSFFMPEIFKGGEVLDYGGGSPVLFQHLFWFFGHPEVYIIALPAFGIISELISVHARKNIFGYNMMVWALIAIAGIAFIVWAHHMYVAGMNPYLGFFFATTTLIIAVPTAIKVYNWVLTLWNANIKMTVPMLYCLAFLVTFLNGGLTGLFLGNVAVDVPLSDTYFVVGHFHMVMAVSPVLALYGGLYHWYPSVTGRMLNDTLGKIHFWITFIGTYLIYFPMHYIGFLGVPRRYYSNEQYDFIPQSVADLNQFITVCALIVGAAQFILLYNFVVSLYKGAIAPKNPWGACTLEWQTLESPPGHGNWGEQLPVVYRWPYEYGLPGATSDFVPQNVPDEQIT

SEQ ID NO: 104039 - protein, 306 aa, Unknown
  Bacterial polypetide isolated from the Sargasso Sea
MSTEASGHEKYYIPEKSSIPIVFAAATLLVGWGAANAVVGGGTSMLLVGMMALVATMGFWWAVVIRESQAGLDTPALNSSYVYGMAWFIFSEVMFFFAFFGALFYIRSFAVPWLGGEGDKGLAGELLWPEFEATWPPMITPEQSVMGDQAVTVGPGESMYLHSINSIFTWLPLWNTVVLLSSSGTVHFAHMALKDNNRKRFNFWLGITVALAFIFVILQAVEYYEAYAHLGLTISSGVYGTTFFMLTGFHGMHVLIGGIFLLTQLTRSTGFKHFTDKEHFGFEAASWYWHFVDVVWVCLFLFVYIL

SEQ ID NO: 104040 - protein, 209 aa, Unknown
  Bacterial polypetide isolated from the Sargasso Sea
MADAAIHGHEHEDQRGFFTRWFMSTNHKDIGILYLVVSALAGFIAVSFTIYMRLELMNPGVQYMCMEGMRLTAAGVGECTPNGHLWNVLITGHGILMMFFVVIPALFGGFGNYFMPLQIGSPDMAFPRMNNLSFWMYVAGTTLAICSVLSPGGNDQLGSGVGWILYPPLSVNEGGMSMDLAIFAVHVSGASSILGAINMITTFLNMRAP

SEQ ID NO: 104041 - protein, 304 aa, Unknown
  Bacterial polypetide isolated from the Sargasso Sea
MSDQPYYVPESSKLPFAMAITMLVFIVGAANTVIDLGTDSNSYLILVLSFAMMWTTMYFWFKQVIQENHAGLNNPMLKDSYVYGMAWFIFSEVMFFFAFFFALAYIRNFAVPWLGGEGEKAISNILWPGFEATWPLMVTPDEAVFAGPEKDMSFATAYAAGGLGGVLGWLPLWNTVLLLTSSLTVHIAHLGLKNGNRQQFNLWLGITLILGYAFVVVQGVEYYEAYTHYGLTLNTGIYGTTFFMLTGFHGFHVCLGAIILTIMLFRSLKGHFTADDHFGFEAGSWYWHFVDVVWVCLVAFVYVM

SEQ ID NO: 104042 - protein, 674 aa, Unknown
  Bacterial polypetide isolated from the Sargasso Sea
MFGKLSLDSIPYHEPIIMVTAAGIALGGALVLGLITYFGKWRYLWTEWLTSVDHKKLGVMYIVVALIMLFRGFADAIMMRTQLALSYNAPGFLPPHHYDQIFTAHGVIMIFFMAMAFMVGLMNIIVPLQIGARDVAFPFLNSLSFWMTAISAILINISLVIGEFAQTGWLAYPPLSELQFSPGVGVDYYLWSLQLSGIGTLLTGVNFFVTIVKMRAPGMTWMKMPVFTWTALCTNVLIMAAFPILTVTLALLGLDRYLGMHFFTNDGGGNAMLYLNLIWAWGHPEVYILILPAFGIFSEVVATFAKKPLFGYKTMVWATCAIMVLSFLVWLHHFFTMGSGADVNAFFGIATMVIAIPTGVKVFNWLFTIYKGRLQFTTPILWTLGFMVTFTIGGMTGVMMAIPGADFVLHNSLFLIAHFHNVIIGGVLFGYLAGFNYWFPKAFGFKLNEKWGKASFWFWQIGFWVAFTPLYVLGFMGMTRRLNHYDNPDWHPWLMFAWVGAVLIAIGIACQVVQLVVSIRDRNLAKNRDVTGDPWDGHTLEWATSSPPASYNFAIIPDVRELDAFAEMKSRKNQPKPVYRDIHMPSNTSAGLVVAMFSLVLGFAAVWHIWWLAIVGLVGSIATVIIYSFQKNEGFYIPAATVAAIEQQRSGAGAQVAIEEKRSGADAQVALEVD

SEQ ID NO: 104043 - protein, 113 aa, Unknown
  Bacterial polypetide isolated from the Sargasso Sea
MSYADSASYDHNDHKPGFIKRWFFSTNHKDIGTLYIIFAILAGLVGGFFSLLMRAELAAPGLDVVADGQVWNVIITAHGLLMVFFVVMPALIGGFGNWFVPLMIGAPEYGFSQ

SEQ ID NO: 104044 - protein, 202 aa, Unknown
  Bacterial polypetide isolated from the Sargasso Sea
MTSTLPVQPESSHAIDSHGHEEHADYRMFGLATFLVADAMTFAGFFAAYLTFKAVNPLPEGAIYELELPLPILNTVLLLVSSATFHKAGQAIRQNLQGRCRNWLLVTAGLGLAFLVSQMVEYFTLPFGLTDNLYASTFFAATGFHGLHVTLGALMILIVWWQARANGGRVTAEDHFPLEAAELYWHFVDGIWVILFVILYLL

SEQ ID NO: 104045 - protein, 218 aa, Unknown
  Bacterial polypetide isolated from the Sargasso Sea
MTTISYPTFIRRPNEYVSGIWGWITTVDHKRIGTLYGVTAFLWFLVGGIEALLIRLQLAQPESSLLSPEVYNQVFTMHGTTMIFLVIMPLSAAFFNWLVPLQIGARDVAFPRLNAFSFWAFLFGGILLNLSWLTGDAPNAGWFAYAPNTEVPYNPRNGVTYWILGLQLLGIASLAAGFNFLTTIINMRAPGMSFMKMPVFIWMTAVVNVLIVLAFPII

SEQ ID NO: 104046 - protein, 304 aa, Unknown
  Bacterial polypetide isolated from the Sargasso Sea
MSDQAYYVPESSKLPFAMAITMLVFIIGAANTVIDLGTDSNSYLILVLSFAMMWTTMYFWFKKVIQENHAGLNNPMLKDSYVYGMAWFIFSEVMFFFAFFFALAYIRNFAVPWLGGEGEKGLANMLWPGFEATWPLMITPDQAVFTGPEKDMSLATAYASGGLGGVLGWLPLWNTVLLLTSSLTVHIAHLGLKNGNRKQFNLWLGITLILGYAFVVVQGVEYYEAYTHYGLTLNTGIYGTTFFMLTGFHGFHVCLGAIILTIMLFRSLKGHFTADDHFGFEAGSWYWHFVDVVWVCLVAFVYVM

SEQ ID NO: 104047 - protein, 139 aa, Unknown
  Bacterial polypetide isolated from the Sargasso Sea
MSEAVIHDDHHDHKPSGIGRWLFSTNHKDIGTMYLVFALIMFFVGGAMSMVIRAELFQPGIQYVDPQFYNSMVTVHALVMIFGALMPAGVGLANWMVPLMIGAPDMALPRMNNMSFWILPFAFTLLLSTFFMQGGAPAG

SEQ ID NO: 104048 - protein, 102 aa, Unknown
  Bacterial polypetide isolated from the Sargasso Sea
MVFFPQHFLGLAGMPRRYADYPDAFTGWNYISSIGSYISVIGLVVFFINLAYAFYKKKAAAQNPWGDGATTLEWTVPSPPNFHTFEELPKFEDEEGVEKSTS

SEQ ID NO: 104049 - protein, 104 aa, Unknown
  Bacterial polypetide isolated from the Sargasso Sea
YIWLGATLVLGYLFVFFQGLEYYEAYAHMGLTLNAGIYGTTFFMLTGFHGFHVCLGAIILTIMFLRSLKGHFKPDDHFGFEAGSWYWHFVDVVWICLVAFVYVM

SEQ ID NO: 104050 - protein, 382 aa, Unknown
  Bacterial polypetide isolated from the Sargasso Sea
MDQNSATYEGQKMYDPKGWWDTYVFSQDHKVIALQYVCVALAIGLTGMFLSLLMRMQLGFPGLFESIDAGSYYQDVTMHGMIMVIYLLTALFLGGFGNYLIPLMLGCRDMAFPFVNMLSFWMYFLSVIILVASFFVESGPTGAGWTLYPPQSILEGTPGGDGAGIILMLASLAVFIIAFTMGGLNYITTVLQSRAKGMTLMRMPLIIWCIFLATFLGLLAFPALLVGAIMLIFDRVLETSFFMPEIFKGGEVLDYGGGSPVLFQHLFWFFGHPEVYIIALPAFGIISELISVHARKNIFGYNMMVWALIAIAGIAFIVWAHHMYVAGMNPYLGFFFATTTLIIAVPTAIKVYNWVLTLWNANIKMTVPMLYCLAFLGHFLEW

SEQ ID NO: 104051 - protein, 307 aa, Unknown
  Bacterial polypetide isolated from the Sargasso Sea
MASAAGPDQSVYYVPAQGWYPVWLAFGLMLTVTGLASVLNMQKTGGSAEWTQSLFGFAIVAFVFFRWFAKVIQENAEGYNNAQLKKSYVWGMGWFIFSEVMFFAAFFGALFYVRMWVVPWLGGEGSKSIVGDYLWPEFEATWPVVSNPNPEIFENPGQSMAPPALGAAWLTYLPFLNTVILLSSSVTVHMAHLAINTQERGKIAGWLGFTVLLGVIFLGLQVLEYYEAYAHMGLTLASGIYGSTFFILTGFHGFHVTMGTVILLIQFFRVLKGHFKEHDCFGFEAASWYWHFVDVVWVGLFIFVYVL

SEQ ID NO: 104052 - protein, 347 aa, Unknown
  Bacterial polypetide isolated from the Sargasso Sea
GTSFFMPAMVSLGETLTHEGGSPILFQHLFWFFGHPEVYIVALPAFGIVSDLLSVHSRKTIFGYRMMVWAIVGIGALSFFVWAHHMYVSGMNPWFGFFFATTTLIIAVPTAIKVYNWILTLWRGNIQLSLPMLFSLGFIVTFLNGGLTGLFLGNVTVDVPLSDTYFVVAHFHMVMGIAPILVIFGAIYHWYPLITGRMMNETLGKIHFWITFIGSYAIYFPMHYQGFVGVPRRYFEIYDSPYIDTSTLLLNKFITIAVLIVGAAQLVFLYNLITSARLGKKSEKNPWKANSLEWQTPQMPPEHGNWGKELPKVYRWPYDFSVPGAEKDYIPQNQPPSEIIGAKVEKT

SEQ ID NO: 104053 - protein, 347 aa, Unknown
  Bacterial polypetide isolated from the Sargasso Sea
AFAKKPLFGYPFIVFSGIAIGLMGWAVWSHHMFTVGLGPIAVSVFTITTMLIAVPTGVKIFNWIGTLWGGSIEYKSAMLFAVGFIAMFIIGGLSGVSHAVAPSDYQQQDTYYIIAHLHYVLFGGAILGIFAGIYFWFPKVTGKLLSEKLGKLHFWITFVGLNLTFFPMHYLGMNGMPRRIYTYATEFGWDNLNALSSFGYIVLFVSMLIFVYNIIKSYKSGEEAGHDPWDAPGLEWTITSPPPVYNFSELPVVEGRDPYWIVKRRAAAEGKEIPGPQPLVDPSTVHLPDPSYWPFFTSVALLILAIGFMIEIPVWFVKYPISVVGGLLVFVGVLAWSNEPPTKEKDH

SEQ ID NO: 104054 - protein, 668 aa, Unknown
  Bacterial polypetide isolated from the Sargasso Sea
MFGKLTLSAIPFDQPIIMGAGAFMGLVVLGILAALTITGRWKWLWTQWLTTVDHKKLGVMYIIVALIMLLRGFADAIMMRMQLALSYNGPGYLPPHHYDQVFTAHGVIMIFFMAMVFMVGLMNLIVPLQIGARDVAFPFINSLSFWMTAVSAILINISLVIGEFAQTGWLAYPPLSELQFSPGVGVDYYLWALQISGVGTLLTGVNFFVTIIKMRAPGMTLMKMPVFTWTALCTNVLIMASFPILTATLALLGLDRYLGMHFFTNEAGGNAMLYLNLIWAWGHPEVYILILPAFGIFSEVISTFARKPLFGYKTMVYATCAIMVLSFLVWLHHFFTMGSGANVNAFFGIMTMIIAIPTGVKVFNWLFTMYRGRIEFTTPVLWTIGFMVTFTLGGMTGVMMAIPGADFVLHNSLFLIAHFHNVIIGGVLFGYLAGFNYWFPKAFGFKLNEKLGKAAFWFWQIGFYVAFVPLYVLGFMGMTRRINHYDNPAWHPWLLVAAFGAVLIAIGIACQLLQLVVSIRNRNLPEYRDTTGDPWGGRTLEWATSSPPADYNFAVIPQVRTLDAYADMKAHGEGRPNPAAISDIHMPSNTCAGLVVAIFSLVLGFALVWHIWWMAIGGLVGIVATLVIYSSRDNDGYYIPASTVRKIEDKQPTKRVAARVDDVELEAN

SEQ ID NO: 104055 - protein, 101 aa, Unknown
  Bacterial polypetide isolated from the Sargasso Sea
VFFPQHFLGLAGMPRRYADYPDAFAGWNYISSIGSYISVIGLVVFFANLIYAFSKKKAAAQNPWGEGATTLEWTVPSPPNFHTFEELPKFEDEEGIEKSTS

SEQ ID NO: 104056 - protein, 270 aa, Unknown
  Bacterial polypetide isolated from the Sargasso Sea
MKKILFIISSIFISQNAFANQPVDWQLGFQKAASESMRDIVAFHDNLLLPIIIAISVFVLFLMLYACVRFRASANPNPSKRTHNVTVEVLWTLIPCLILIVMAVPSFKILYKQDTIPKADLTIKAIGYQWYWGYEYPDENLEFDSYMIEEKDLKANQPRLLAVDNQVVVPVGKVVKVLITANDVLHAWALPSFGVKRDAVPGRINETWFKAEKVGTYYGQCSELCGIKHAFMPIAVKVVSEDEYQEWLSEARVKFAKEEIENEKLKLVSK

SEQ ID NO: 104057 - protein, 214 aa, Unknown
  Bacterial polypetide isolated from the Sargasso Sea
MFQQGIKFFNWVATLWGGKISINSAMLFSCGFIINFVFGGITGVALAQVPFDIHVHDTYFVVAHFHYIVYGGTVFIIFSSIYHWFPKVTGKMLNEKLGILHFIITFIGFNLCFAPQHWLGLNGMPRRVAEYDPQFQFVNQISSLGALLMAISTIPFLINVFLSFRNGKDAGDNPWNALTPEWLTSSPPPVENWEGEAPLVEEPYGYGKEISEQK

SEQ ID NO: 104058 - protein, 381 aa, Unknown
  Bacterial polypetide isolated from the Sargasso Sea
MSDEQDHKLEAKSDYVADASSVSTPDIDAVPAAELPDQELYHSHSWWTTYVFSQDAKYIGIQYALTAIGTGLLGLVLSWLMRIQLAFPGLGWLEPSSYYQFVTMHGMIMVVYLLTALFLGGFGNLLIPLMCGARDMAFPYVNMLSYWAFVVAVLVLLASFFVPGGPTGAGWTLYPPQAITAGTPGYNGGIILMLISLILFVAGFTMGGLNYIITVLQLRARGMTLMRMPLTIWGIFTATVLAMFAFPALLVGCLMMTLDSLLGTSFFMPAMVSLGETLTHEGGSPILFQHLFWFFGHPEVYIVALPAFGIVSDLLSVHSRKTIFGYRMMVWAIVGIGALSFFVWAHHMYVSGMNPWFGFFFATTTLIIAVPTAIKVYNWIL

SEQ ID NO: 104059 - protein, 76 aa, Unknown
  Bacterial polypetide isolated from the Sargasso Sea
GLTISSGVYGTTFFMLTGFHGMHVLIGGIFLLTQLTRSTGFKHFTDKEHFGFEAASWYWHFVDVVWVCLFLFVYIL

SEQ ID NO: 104060 - protein, 343 aa, Unknown
  Bacterial polypetide isolated from the Sargasso Sea
FFMPTILKAGEVLEYGGGSPILFQHLFWFFGHPEVYIVALPAFGIVSDLISVHARKNIFGYRMMVWAIVGIGALSFFVWAHHMYVSGMNPWFGFFFATTTLIIAVPTAMKVYNWILTLWRGNIRLNTVMLWCLGFIVTFVNGGITGIFLGNVSVDVPLSDTYFVIAHFHMVMGIAPLMVIMGAVYHWFPLVAGKFLDEKLGKWHFWITFLGAYSIYFPMHYLGFIGVPRRYFEMYDSPYMTSAVGMNEFISLAAFIVGAAQFILIYNIIKTLKTGKPAPKNPWKANSLEWHTSTVPPEHGNFGDRLPVVHRWPYDFSVPGAKDDYIPQTTPPSEVVHTKVEKT

SEQ ID NO: 104061 - protein, 575 aa, Unknown
  Bacterial polypetide isolated from the Sargasso Sea
MSNDHSHHEESFFRKYIWSTDHKIIGIQYGFTALFFLLVGFSLMMVMRWQLAYPETPIPFVGSIFGDDGILLPEIYNSLGAMHGTIMIFLGIVPLAVGAFGNYLVPLQIGAPDMAFPKLNAASYWSYLVGGLVMMSSFFTEEGAARSGWTSYPPLADIEVGQTIWLIGMIFLITSSLLGSMNIITTIVQLRAPGLTWMRLPFFVWAQLVTSFLLVLAFPPLEAAAVLQLMDRVVGTSFFLPSGLVVSGELMEVSGGGSPLLWQHLFWFLAHPEVYVLILPAMGIVSEVIANNSRKPLWGYNSLVFATIFLGFMSFIVWAHHMFLTGMGTAMSAFFQTTTMIISIPSVIILSALFISLWGASIRFNTPMLFALAFLPMFGIGGLTGLPLGLAAADIYLHDTYYVIGHFHYVVAPGTIFGLFAGIYYWYPKITGRKMSELLGKMHFWPSLLFMNGVFMPMFIQGLAGVSRRLWDGGLEYAHASGVFHWNEFMSISAWLLGLAQIPFIINVFYSIFRGEKVDNNPWQATTLEWAAPSPPLPHVNFDTLPTVHRDPYEYSLPGRNRDFTPQTEPKKINN

SEQ ID NO: 104062 - protein, 274 aa, Unknown
  Bacterial polypetide isolated from the Sargasso Sea
MIKKIAYTLLLAWPTALIANEPKDWQLGFQKSASKSMDDIVWFHDYMLVPIITAITAFVLFLLLYVCVRYRASKNQVPSTTSHNTLIEVIWTLVPCLILIVMAVPSFKVLYSQDEIPKADVTIKAIGYQWYWGYEYPDENIIFDSYMIDEKDLKENQPRLLAVDNAVYVPVNKVVKVMITANDVLHAWALPSFGVKRDAIPGRINETWFKADRTGTFYGQCSELCGIKHAFMPITVNVVSEDEYKKWLEEAKVKFAKEDINNTIKVAKKIKEIN

SEQ ID NO: 104063 - protein, 338 aa, Unknown
  Bacterial polypetide isolated from the Sargasso Sea
IIQAGEVLDYGGGSPILFQHLFWFFGHPEVYIVALPAFGIVSDLISVHARKNIFGYRMMVWAIVGIGGLSFFVWAHHMYVSGMNPWFGFFFATTTLIIAVPTAMKVYNWILTLWRGNIRINTVMLWCLGFIVTFVNGGITGIFLGNVSVDVPLSDTYFVIAHFHMVMGIAPLMVIMGAVYHWFPLVAGKLLDEGLGKWHFWITFLGAYSIYFPMHYLGFIGVPRRYFEMYDSPYMTSAVGMNEFISIAAFIVGAAQFILIFNIIKTLKTGKKSEQNPWKANSLEWYTSTVPPEHGNFGERLPVVHRWPYDFSVPGAKEDFIPQTTAPSEVVHTKVEKT

SEQ ID NO: 104064 - protein, 356 aa, Unknown
  Bacterial polypetide isolated from the Sargasso Sea
MSTVTTDPHAHAEHEHHHGPAKGLKRWLYTTNHKDIGTLYLLFALTMFFIGGAMAMVIRAELFQPGLQIVEPNFFNQMTTVHGLIMVFGAVMPAFTGLANWLIPMMIGAPDMALPRMNNWSFWILPFAFSILLLSLFMEGGGPSFGWTFYAPLSTTYSNDSTALFVFSVHIMGISSIMGAINVIVTIMNLRAPGMTYMKMPLFVWTWFITAYLLIAVMPVLAGAVTMVLTDKYFGTSFFDAAGGGDPVLFQHIFWFFGHPEVYIMILPAFGIISAIVPTFARKPLFGYASMVYATASIALLSFLVWAHHMFTTGMPVFAELFFMYCTMLIAVPTGVKVFNWVATMWRGAMTFEVPM

SEQ ID NO: 104065 - protein, 263 aa, Unknown
  Bacterial polypetide isolated from the Sargasso Sea
MTIATPPSQAPEASLSLQPTGWLKYFSFSLDHKVIGLQYIVCGFLFYLVGGALAGVIRTELATPISDFVSRDTYNQVLTLHGTVMIFLWIVPVVNGGFGNYLIPFYVGARDMAFPRLNAVAFWMIPPSGLLLISSYFIGGAAQSGWTAYPPLSITTPAMGQILWIVSVLLLGGSSIFGGINFIATILKFRQPGLKLMQLPMYCWAMLGTSILVVLATPVLAGTLILLSMDIVAHTGFFNPASGGNVVVYQHLFWFYSHPAVYI

SEQ ID NO: 104066 - protein, 356 aa, Unknown
  Bacterial polypetide isolated from the Sargasso Sea
MENGEGFASWFFTVDHKRIGVMYLWAIAVFFIIAAIASFLVRFEHLTPGQTIVSADTYNVLFTLHGSMMVFLFIVPGVAASFGNFLIPLMIGAKDVIFPKLNLYSFWIYLAGAAIFMIALAGPADTGWTFYTPYSIETGANVILITLGIFVLGFSSILTGINFIVTMHKLRAPGMTWDRLPLFCWAAYATSLLQVLATPVVGITLLLLIGERYFGLGFFDPARGGDPVMFQHFFWFYSHPAVYIMILPAMGIISEIMPVFSRKPIFGYKAIAYASLAIALISFLVWGHHMFVSGQSKLVNIIFSVITYAVAVPTAIKVFNWLWTMHKGSIELSTAMLYSLAFIFLFTIGGLTGYSW

SEQ ID NO: 104067 - protein, 43 aa, Unknown
  Bacterial polypetide isolated from the Sargasso Sea
MYRVYKNHFTPDRHFGLEAAAWYWHFVDVVWLFLFVCVYVWGA

SEQ ID NO: 104068 - protein, 268 aa, Unknown
  Bacterial polypetide isolated from the Sargasso Sea
MRILILFIATVFSFPGLANTPYDWQLGFQEPASPVMRSVLELHDFVLIMMTAITIFVLLLIIYVVIRFRKSANPTPSKRTHNALIEILWTGIPVIILIAMAIPSFKLLYQQDVIPEADMTVKVIGHQWYWEYQYPEQDDISFESYMIPDDELEEGDIRLLTVDNKLVLPINKNIHVLVTAGDVLHSFAMPSLGVKKDAVPGRLNETWMNIEKTGIYRGQCSELCGTGHGYMPIVIEAVSQEDFIAWVTETKTKLAMNEKNTFAKVNTE

SEQ ID NO: 104069 - protein, 297 aa, Unknown
  Bacterial polypetide isolated from the Sargasso Sea
MQPEVQNHEYQKYYVPAQSPWPIVGAVALFLIAVGAGNYVVQATKGETGYGGHILLAGIAVLLVMLVGWFKNQIDESMAGLYSDQLGRSYRQGMSWFIFSEVMFFAAFFGALYYARFISVPWLGGASNNAMTNEVLWPTFEAMWPLVSTPGGTTTQEMSAAGLPTINTVILLISSITLHFAHVGLEQNKRKQLTLMLGITILLGCGFLFLQVEEYIHAYRDLGLTLQSGIYGNTFFMLTGFHGMHVTLGTIILIVLFFRVLKGHFTPENHFAFQAGSWYWHFVDVVWVMLYIFVYVL

SEQ ID NO: 104070 - protein, 570 aa, Unknown
  Bacterial polypetide isolated from the Sargasso Sea
MSEGNHKQSFWTKYIWSTDHKIIGIQYGITSLAWLLFGFVLISIMRYQLAYPGTPIPLIGSLLGPDGALPPETYNSMGAMHGTIMIFLGVVPLAFGAFGNYLVPLQIGAIDMAFPKLNAASYWIYFLGSVIMVVGFFVPGGAANSGWTSYPPLSNIATTGQTVWLWGMVMLITSSLLGSVNILVTVIQLRTKGMTWMKLPIFVWTQFITAFLLLLAFPPLEAAGILQLMDRLVGTSFFMPSGLVVSGGGPYAGGGSPLLWQHLFWFLAHPEVYVLILPAFGIVTEVIANNTRKPIKGYKSLVYAMIFLGFMSFIVWAHHMYLTGMGTTIGAFFQTTTMIISIPSVVILTALLLSLWGGSIRFNTPMLFALGFLPMFGIGGLTGLPLGLAAADIHLHDTYYVIGHFHYVVAPGTIFALFAGIYYWFPKLTGKRTNEMLGKLHFYSSFIFMNGVFMPMFIQGLAGLSRRMNDGGETYAHAAGVIHLNEFMTISAWLLGVAQLFFIVNMIISLRSEKTGESNPWNATTIDWTDTTSPPLGHGNFETVPTVYRGPYEYSVPNEKNDFSPQSQKG

SEQ ID NO: 104071 - protein, 337 aa, Unknown
  Bacterial polypetide isolated from the Sargasso Sea
LKAGEVLEYGGGSPILFQHLFWFFGHPEVYIVALPAFGIISDLISVHARKNIFGYRMMVWAIVGIGALSFFVWAHHMYVSGMNPWFGFFFATTTLIIAVPTAMKVYNWILTLWRGNIRLNTVMLWCLGFIVTFVNGGITGIFLGNVSVDVPLSDTYFVIAHFHMVMGIAPLMVIMGAVYHWFPLVAGRFLDEKLGKWHFWLTFLGAYSIYFPMHYLGFIGVPRRYFEMYDSPYVTSAVGMNEFISIAAFIVGAAQFILIYNIIKTLKTGKPAGHNPWQACSLEWLTPTVPPEHGNWGDRLPTVHRWAYDYSVPGAKEDFITQTTPPSEVAHTKVEKT

SEQ ID NO: 104072 - protein, 304 aa, Unknown
  Bacterial polypetide isolated from the Sargasso Sea
MSQQAYYVPESSKLPFAMAISLLVFIIGAAKTVIDAGTESNSYMILLLSFAMIWVTMYFWFKQTIIENQAGLNNPMLKDSYVYGMAWFIFSEVMFFFAFFFALAYIRNFAVPWLGGEGEKGLANMLWPGFEASWPLMITPDQAVFAGPEKDMSLATAYASGGLGGVLGWLPLWNTVLLLTSSLTVHIAHLGLKNGNRKQFNLWLGATLVLGYAFVVVQGIEYYEAYTHYGLTLNTGIYGTTFFMLTGFHGFHVCLGAIILTIMLFRSLKGHFSSDDHFGFEAGSWYWHFVDVVWVCLVAFVYVM

SEQ ID NO: 104073 - protein, 300 aa, Unknown
  Bacterial polypetide isolated from the Sargasso Sea
MSDQSSYFVPASSRLPIWMAFGLMLFVLGAGYTINDLDKPDSNSYWILIAAFAVIFSVFFFWFGEVIKENDKGMYSDQLNRSFVMGMQWFIFSEVMFFFAFFLALGYVRIFAVPWLGGEGEKAISNMLWPGFEATWPVMQTPDPSLFQGPKENMNFPGFTNVGHWLPFWNTLCLITSSGTITIAEHALKKGNRSSFKFWMVMTLILGFTFVYLQGLEYYEAYDHMGLTLGAGIYGTTFFLLTGFHGFHVCMGAIILTIMTIRGFRGAFTKDDHFGLAAGSWYWHFVDVVWILLVLVVYVF

SEQ ID NO: 104074 - protein, 571 aa, Unknown
  Bacterial polypetide isolated from the Sargasso Sea
MSNDHHHEENFIQKYVFSVDHKIIGLQYGITSLLFLLFGFMLMMLMRYQIAYPETVIPYFGEWLFAGSGGVMLPENYNTLGAMHGTIMIFLGVVPLAVGAFGNYLVPLQIGAPDMAFPKLNAASYWSYFVGGVVMMASFFTPEGAARSGWTSYPPLSIFESGQTMWLLGMVFLITSSLLGSMNIIVTIVQLRAPGLTWFRLPFFIWAQLVTSFLLILAFPPLESAAILQLMDRLVGTSFFLPSGLVYAGSPVEAYGSGSPLLWQHLFWFLAHPEVYVLILPAIGIVGEIIANNTRKPLWGYKSLVYAIGFLGFMSFIVWAHHMFLTGMGQSMSAFFQLTTMIISIPSVVVLTAFFISLWGGSIRFNTPMLFALSFLPMFGIGGLTGLPLGVAASDIFLHDTYYVIGHFHYVVAPGTIFALFAGIYYWFPKVTGKRMSETLGKLHFWPSLLFMNGVFMPMFIQGLAGLSRRMYDGGQQYAHASDVLHWNEFMTISAFCLGAAQIPFIVNLIISLAGQKSDDRNPWKSTTIEWSAPSPPLPHVNFDSSVEVNHGPYEYSVPGQDEDYCPQTSP

SEQ ID NO: 104075 - protein, 226 aa, Unknown
  Bacterial polypetide isolated from the Sargasso Sea
MASTEKKHDYHLVEPSPWPIFCSIASLILAVGAVYYFRTKNMWMMIVGLAITTYGAYMWFRDVIIEAHEKGDHTPIVQIGMRYGMTLFIASEVMFFVAWFWAYFDASLFPDQIIGGIWPPKGIQTLDPWHIPLINTLILLLSGTTVTWAHHALLENDRQGLKQGLILTVILGAIFTMFQAYEYMAASFKITSGIYGSTFYMATGFHGFHVLVGTIFLFVCWFRARA

SEQ ID NO: 104076 - protein, 264 aa, Unknown
  Bacterial polypetide isolated from the Sargasso Sea
MFTIEGLSGVTHAVSPSDAQQQDTYYVVAHFHYVLFGGAIFAIFSGIYFWWPKFTGWFLNERIGVVNFILMIVGFNLQFAPMHWVGLDGMPRRIYTYAENMGWELSNAAATAGGFLIALSVLVFLANVYLSSRKKVMAGGDPWDGRTLEWSISSPPPHYNFVEIPEVEHIDHWWYKKYPGLLEGSPKNNSEPSVEVEDTTNVDESKIHLPDLSYYPLFIGIGLSIAALGVLYSYALVTIGLILVFWGSIGWSTEPVNEPHEGDH

SEQ ID NO: 104077 - protein, 274 aa, Unknown
  Bacterial polypetide isolated from the Sargasso Sea
MIKKIAYTLFLAWPIALFANEPRDWQLGFQKSASKSMDDIVWFHDYMLVPIITAITAFVLFLLLYVCVRYRASKNQVPSTTSHNTLIEVIWTLVPCLILIVMAVPSFKVLYSQDEIPKADVTIKAIGYQWYWGYEYPDENIIFDSYMIDEKDLKENQPRLLAVDNEVYVPVNKVVKVMITANDVLHAWALPSFGVKRDAIPGRINETWFKADRTGTFYGQCSELCGIKHAFMPITVNVVSEEEYNKWLEEAKVKFAKEEINNNIKVAKKIKEIK

SEQ ID NO: 104078 - protein, 279 aa, Unknown
  Bacterial polypetide isolated from the Sargasso Sea
WAIVIIGALSFVVWAHHMYVAGMNPWFGFFFATTTLIIAIPTAIKVYNWVLTLWRGNIKLTIPMLFSIAFIITFVNGGLTGLFLGNVAVDVPLSDTYFVVAHFHMVMGIAPVLVILGSIYHWFPLITGRFLNERLGRIHFWVTFIGSYSIYFPMHYLGFMGVTRRYFEVFEGDNFTYSITGINQFITVAALITGAAQFVFFYNIIVSSKFGKKAGKNPWKACSLEWQTEDVPPTHGNFGKELPVVYRWAYDYSVPGADQDYITQDTPPSAVANARAEQT

SEQ ID NO: 104079 - protein, 304 aa, Unknown
  Bacterial polypetide isolated from the Sargasso Sea
MSDQPYYVPESSKLPFAMALTMLVFIIGAANTVIDLGTDSNSYLILVLSFAMMWTTMYFWFKQVIQENHAGLNNPMLKDSYVYGMAWFIFSEVMFFFAFFFALAYIRNFAVPWLGGEGEKAISNILWPGFEASWPLMITPDQAVFSGPEKDMSLATAYAAGGIGGVLGWLPLWNTVLLLTSSLTVHIAHLGLKNGNRKQFNLWLGVTLILGYAFVVVQAVEYYEAYTHYGLTLNTGIYGTTFFMLTGFHGFHVCLGAIILTIMLFRSLSGHFTADDHFGFEAGSWYWHFVDVVWVCLVAFVYVM

SEQ ID NO: 104080 - protein, 155 aa, Unknown
  Bacterial polypetide isolated from the Sargasso Sea
MSAEKKHDYHLVDPSPWPIYVSFSCLVLALGSVYYLHTDVSWGMYLGFALLIYGAYMWFRDVVIEAEHQGHHTPVVQIHHRYGMTLFIASEVMFFVAWFWAYFDVSLFPNEFVGNVWPPKDIETFDPWDIPLINTLILLLSGTTVTWSHPCSFRR

SEQ ID NO: 104081 - protein, 270 aa, Unknown
  Bacterial polypetide isolated from the Sargasso Sea
MKKILFIFSSIFISQNAFANQPVDWQLGFQKAASESMRDIVAFHDNLLLPIIIAISVFVLFLMLYACVRFRASANPNPSKRTHNVTVEVLWTLIPCLILIVMAVPSFKILYKQDTIPKADLTIKAIGYQWYWGYEYPDENLEFDSYMIEEKDLKANQPRLLAVDNQVVVPVGKVVKVLITANDVLHAWALPSFGVKRDAVPGRINETWFKAEKVGTYYGQCSELCGIKHAFMPIAVKVVSEDEYQEWLSEARVKFAKEEIENDKLKLASK

SEQ ID NO: 104082 - protein, 392 aa, Unknown
  Bacterial polypetide isolated from the Sargasso Sea
CSSYKRMTLMRMPLTVWGLFTATVLAMLAFPALLVSSIMMTLDKVLGTSFFMPTILKAGEVLEYGGGSPILFQHLFWFFGHPEVYIVALPAFGIVSDLISVHSRKNIFGYRMMVWAIVVIGALSFFVWAHHMYVSGMNPWFGFFFATTTLIIAVPTAMKVYNWILTLWRGNIRLNTVMLWCLGFIVTFVNGGITGIFLGNVTVDVPLSDTYFVIAHFHMVMGIAPLMVIMGAVYHWFPLVTGRMLSEKLGKWHFWATFLGAYSIYFPMHYLGFIGVPRRYFEMYDSPYMTSAVGMNEFISLAAFLVGAAQFILIYNIVKSLKTGEPAGKNPWKANSLEWFTSTVPPEHGNFGDRLPVVHRWPYDFSVPGSKEDFIPQTTAPSAVVDTEVEKT

SEQ ID NO: 104083 - protein, 25 aa, Unknown
  Bacterial polypetide isolated from the Sargasso Sea
FEAVAWYWHFVDVVWIGLFIFVYWL

SEQ ID NO: 104084 - protein, 301 aa, Unknown
  Bacterial polypetide isolated from the Sargasso Sea
FGIISDLISVHARKNIFGYRMMVWAIVGIGALSFFVWAHHMYVSGMNPWFGFFFATTTLIIAVPTAMKVYNWILTLWRGNIRMNTVMLWCLGFIVTFVNGGITGIFLGNVSVDVPLSDTYFVVAHFHMVMGIAPLMVIMGAIYHWFPLVAGRFLSEKLGKWHFWLTFLGAYSIYFPMHYLGFIGVPRRYYEMYDSPYVTSAVGMNEFISLAAFLVGAAQFILIYNIIKTLKTGKPAGKNPWKANSLEWLTPTVPPEHGNWGDRLPVVHRWPYDFSVPGAKDDYITQTTPPSEVSNTGVEKT

SEQ ID NO: 104085 - protein, 124 aa, Unknown
  Bacterial polypetide isolated from the Sargasso Sea
MSGANKHPYHLVEASPWPAVGAAAAFTAAVGGVMYMHEVAYGVAVLGLGFALVLATMFMWWRDIVREAEYQGHHTSIVQIGMRYGMMLFIASEVMFFVAFFWAFFDRALYPNDGVWPPEGITTL

SEQ ID NO: 104086 - protein, 219 aa, Unknown
  Bacterial polypetide isolated from the Sargasso Sea
MSAVIENHHDDHHHGPAKGITRWLYTTNHKDIGTLYLWFSFAMFLIGGAMAMVIRAELFQPGMQIVEPEFYNQMITLHGLIMIFGGVMPAFVGLANWLVPMMIGAPDMALPRMNNLSFWILPFAFFVLLSSLFMEGGAPNFGWTFYAPLSTTYAPPSVTFFIFSVHIMGASSIMGSINVVVTIMNMRAPGITLMKMPLFVWSWLITAYLLIAVMPVLAG

SEQ ID NO: 104087 - protein, 182 aa, Unknown
  Bacterial polypetide isolated from the Sargasso Sea
LVPCLILIVMAVPSFKVLYSQDEIPKADVTIKAIGYQWYWGYEYPDENIIFDSYMIDEKDLKENQPRLLAVDNAVYVPVNKVVKVMITANDVLHAWALPSFGVKRDAIPGRINETWFKADRTGTFYGQCSELCGIKHAFMPITVNVVSEDEYNKWLEEAKVKFAKEEINTKIKVAKKIKDLN

SEQ ID NO: 104088 - protein, 254 aa, Unknown
  Bacterial polypetide isolated from the Sargasso Sea
MSSVIESHHDDHHHGPAKGLMRWLLTTNHKDIGTLYLWFSFAMFLIGGAMAMVIRAELFQPGMQIVEPEFYNQMLTLHGLIMVFGAVMPAFVGLANWLVPMMVGAPDMALPRLNNLSFWLLPFAFGILLSSLFMEGGAPNFGWTFYAPLSTTYAPPSVTFFIFSVHIMGASSIMGSINVIVTIMNMRAPGMDLMKMPLFVWSWLITAYLLIAVMPVLAGAVTMMLMDIHFGTSFFNAAGGGDPVLFQHIFWFFG

SEQ ID NO: 104089 - protein, 256 aa, Unknown
  Bacterial polypetide isolated from the Sargasso Sea
MSAVIENHHDDHHHGPAKGITRWLYTTNHKDIGTLYLWFSFAMFLIGGAMAMVIRAELFQPGMQIVEPDFYNQMITLHGLIMIFGGVMPAFVGLANWLVPMMIGAPDMALPRMNNLSFWILPFAFFVLLSSLFMEGGAPNFGWTFYAPLSTTYAPPSVTFFIFSVHIMGASSIMGSINVVVTIMNMRAPGITLMKMPLFVWSWLITAYLLIAVMPVLAGAVTMMLMDIHFGTSFFNAAGGGDPVLFQHIFLVFWSP

SEQ ID NO: 104090 - protein, 302 aa, Unknown
  Bacterial polypetide isolated from the Sargasso Sea
PAKGGDPVLFQHFFWFYSHPAVYIMILPAMGIISEVIPVFSRKPIFGYKAIAYSSLAIALISFLVWGHHMFVSGQSKLINIIFSVITFAVAVPTAIKVFNWLWTMYKGSIELSAAMLYSLAFIFLFTIGGLTGLFLGALAADVHLHDTYFVVAHMHYVMIGGTVFGLFSAIHFWYPKMWGKMFDEFKAKIAFVLIFIGFNVVFFPQFILGTLGMPRRYFNYSPEFTTLHQISTYGTWILGIGFIIMLYALLKPISDKAEANPYESASLEWSMPSPPPTLNFEKIPTLTASTYDYGTKLEQEA

SEQ ID NO: 104091 - protein, 552 aa, Unknown
  Bacterial polypetide isolated from the Sargasso Sea
MGFLYKYILPVDHKMIAMQYMFTGLIMAVIGGFFSYVFRMQLAFPGESVPLYGIVGPGEYNMMVTNHGTIMIFWVAMPVLIAAFGNYLIPLMCGCDDMVFPRLNRLSYQIFLVSALVLIFSFFVKGGGFGGAWTAYPPLSSVPEYNLTDWGASLWILAVALEFVSFLLGGINFVTTAMNARAPGMKMLDIPIVVWFIVIAVILFMASVGPLIAGAVMLFMDQRIGTTFFLPSGGGDPLLWEHLFWFFGHPEVYVVLLPTMGIVAEIITVFSRKKLFGYRTILYTAFATGGLSFVVWAHHQFVAGIDPRMANVFVVTTLLISIPIAEMLFSYIATLYGGSIEYKTPMLWALSFLFAFLIGGVTGIYLGASALDVYFHDSYFVLAHFHYTFFPITIIGMFAAITYWFPKMFGRMMNETLGKIHFWGTFIPFNCIFLPLFFLGLAGQHRRIYNFSHYPDLATENMQDVRVFATTSLVVMLLFQAIFLYNFFYSIFKGKKAPENPWKANTLEWTVPSPPPHGNFKELPTVYRGAYEYSVPGRESDYWPQNMPPDKS

SEQ ID NO: 104092 - protein, 415 aa, Unknown
  Bacterial polypetide isolated from the Sargasso Sea
MVRFKDMAYPKLNAVAFWMIPPAGALIWLGFADFTWYAYPTYSVVSAPGPAADMWIFGLKILGVSSILGSINFVVTIMKCKHPDLPLSKMPLLAWAYLTSSLITLVAVPTFAAALLMLLTDRLGASGFFNPAMGGDPIAYQHLFWFTFHPEVYILVIPAIGFMYEIFPRFSRKPIFSHGSGVAAFTLLTIVGFASWAHHMYATGMSFTEKTVFMVGTLAAVPASAMHTFNFLATMWGGRIKFATPIMWAVGGIALFFSAGAGGVVNSAMPLDFITHDSYWVVGHFHLFVMGTILFGTVGFVYYFFPYVTGRMYNEAMGKIHFILSFVGTVLVFFTQHILGLFGMPRRIYDYPAIPEWVQMNIIISIGAFIIGIGMAIFLGNLVWSAAKGKPADMDDPFGLGGKYYFPYQAKNPSH

SEQ ID NO: 104093 - protein, 236 aa, Unknown
  Bacterial polypetide isolated from the Sargasso Sea
MTTISYPTLIPRPKEYVSGVWSWLTTVDHKKIGTMYGVIAFFWFLVGGIEALLIRIQLSGPEGTFLTPEVYNQVFTMHGTTMIFLVVMPLSAAFFNWMVPLMIGARDVAFPRLNAFSLWAFLFGGILLNISWFTGEAPNAGWFAYAPNTELPFNPKNGVTYWILGLQVLGIASLAAGFNFLTTIINMRAPGMTFMKLPVFIWMTAVVNVLIVLAFPVITVALIQLQFDRLYGTHFF

SEQ ID NO: 104094 - protein, 176 aa, Unknown
  Bacterial polypetide isolated from the Sargasso Sea
MCTCDGFFFKDKAVAVIGGGNAAVEEAMFLTKFASKVQLIHRRDSLRAEKMLQSKLMANKKIEIIWDSVVEEVIGDNDPKSVKGLKIKNVKTNKIDELKIDGLFIAIGHDPATQLFKDQLDMDKEGYLTTKSDSTETNVPGVFAAGDVKDKIFRQAVTAAGMGCMAALEAEKFLSK

SEQ ID NO: 104095 - protein, 600 aa, Unknown
  Bacterial polypetide isolated from the Sargasso Sea
MSVAVNNNVDNHDEHVHHHKETFITKWIFSQDHKMIAKQYFVTGVIVMGIIGVLMSLLFRIQLGWPEESFQVFKIFLGDRWAPDGVMDPNIYLALVTIHGTIMVFFVLTAGLSGTFSNLLIPLQIGARDMASGFLNMIAYWLFFVSSVIMVASLFVEAGPAAAGWTIYPPLSALPQTQPGSGLGMTLWLVSMAFFIASSLLGSLNYIVTVLNLRTKGMTFFRLPLTIWAFFITAIIGVISFPVLLSAALLLIMDRSFGTSFFLSDIFVQGEVLHYQGGSPVLFEHLFWFLGHPEVYIVLLPALGITSEIIATHARKPIFGYRAMVASILAIAFLSTIVWGHHMFITGMNPFLGSVFTFTTLLIAIPSAVKAFNYIATLWKGNLQLNPAMLFSIGLVSTFITGGLTGIILGDSALDINVHDTYFVVAHFHLVMGISALYGLFAGVYHWFPRLYGRMMNKSLGYIHFWITAIGAYGIFFPMHFVGMAGLPRRYYTNTAFPYFDDLADINVLITVFALITGLAQLVFLYNFFHSMYYGKKSEQNPWKSNTLEWTAPVEHIHGNWPGKIPQVFRWAYDYSKPGKKEDFVPQSVPIAEGEKITEH

SEQ ID NO: 104096 - protein, 368 aa, Unknown
  Bacterial polypetide isolated from the Sargasso Sea
MRAPGMTFFRMPLFLWTAWAAQTIQLIGLPALTGGAVMLLFDLSFGTSFFRPEGGGDPVLFQHFFWFYSHPAVYVLVLPVFGIFSELFPVYARKPLFGYRFVAIASFGITFLSLIVWAHHMFYTGTPNWMRHIFMFTTMLIAVPTGVKVFAWLGTLWQGNLRLNTPMLFCLGGLFNFIFAGITGVMLATVPIDIHVGNTAFVVAHFHYVIFNTIGFGVFAGIYHWFPKFTGRMYYEGLGKVHFVLTFIGATLNWLPLHWAGLLGMPRRVASYDPEFAIWNVLGSIGAFMLGVASIPFILNIVSSWAQGQKAPPNPWRAIGLEWLLPSPPPAENFEDDIPTVISEPYGYGLGHPLVEDEEFYVRRSQEA

SEQ ID NO: 104097 - protein, 132 aa, Unknown
  Bacterial polypetide isolated from the Sargasso Sea
YYWFSKMSGYEYSEWLGQLHFWLTFIGVNLVFFPQHFLGLAGMPRRYADYPDAFADWNYISSIGSYISVVGLGVFFVNIIYAFIKKEKAAQNPWGEGATTLEWTVPSPPNFHTFEELPKFEEEYETAEKSGS

SEQ ID NO: 104098 - protein, 206 aa, Unknown
  Bacterial polypetide isolated from the Sargasso Sea
MSAGEKKHDYHLVDPSPWPIYTSFATLVLAIGSIYYFHSKVMWAMILGLALVCYGAFMWFRDVVIEAEHQGHHTPVVQIHHRYGMTLFIASEVMFFVAWFWAYFDASLFPSEFVGNVWPPKDIEVFDPWDIPLINTLVLLLSGTTVTWAHHALLEDDRKGFIQGLSWTVFLGVCFTALQAYEYQHATFEFSNHIYGATFYMATGFH

SEQ ID NO: 104099 - protein, 269 aa, Unknown
  Bacterial polypetide isolated from the Sargasso Sea
ITGNVSTMLLLGMLAVVITMSFWFSVVMKESKAGLDTPQLNNSYVFGMGWFIFSEVMFFFAFFGALFYIRQFAVPWLGGEGEKGLAGELLWPEFEATWPPMITPEQSIMGDQAVTKGPDESMYLHGISGIIKWLPLWNTIVLLSSSGTVHFAHIALKENNRKRFNFWLGITVCLAFIFVILQAAEYYEAYAHLGLTLNSGVYGTTFFMLTGFHGMHVLIGGIFLLTQLFRSTGFKHFTEKEHFGFEAASWYWHFVDVVWVCLFLFVYII

SEQ ID NO: 104100 - protein, 99 aa, Unknown
  Bacterial polypetide isolated from the Sargasso Sea
MSSKDQKHDYHLVDPSPWPIYTSFATLITAVGSVYYFHSKVMWAMLLGFALLIYGAYMWFRDVVNEAEHQGHHTPVVQIHHRYGMTLFIASEVMFFVAW

SEQ ID NO: 104101 - protein, 313 aa, Unknown
  Bacterial polypetide isolated from the Sargasso Sea
LILSWFMRLQLGFPGLAGFMTAEHYYQFVTMHGMIMVVYFLTALFLGGFGNYLIPLMVGARDMVFPYVNMLSFWMFFVAVAVLMASFFVPGGPTGSGWTLYPPQAILEGTPGSGAGILLMLISLSLFVIGFTMGGLNYLITVLQARTRGMTLMRMPLTVWGIFTATVLAMLAFPALLVSSIMMTLDKVLGTSFFMPTILKAGEVLEYGGGSPILFQHLFWFFGHPEVYIVALPAFGIVSDLISVHSRKNIFGYRMMVWAIVGIGALSFFVWAHHMYVSGMNPWFGFFFATTTLIIAVPTAMKSIQLDFDSMER

SEQ ID NO: 104102 - protein, 362 aa, Unknown
  Bacterial polypetide isolated from the Sargasso Sea
SAIMMLFDILLGTSFFMPAIIESGSPLDHNGGSPILFQHLFWFFGHPEVYIVALPAFGLVSDVLSVHARKNIFGYRMMVWAIIAIGGLSFIVWAHHMYVSGMHPYFGFFFATTTLIIAVPTALKVYNWILTLWEGDIRLNAPMYFAIGFIFTFIHGGITGLFLGNVVIDLPLSDSYFVVAHFHMVMGVSPVLVVFAAIYHWYPKITGRMFNEGMAKLHFWCTFLGTYAIYLPMHYLGFLGVPRRYYALGTTDFIPASAQDLNTTITIAALFVGASQLLFFINVFWSLRNGPKADPNPWGAASLEWQTPDTPPVHGNWGDSLPTVYRWAYDYSVPGAEQDFIPQNTPEEEGPTMNDDGMDKEA

SEQ ID NO: 104103 - protein, 323 aa, Unknown
  Bacterial polypetide isolated from the Sargasso Sea
MNEYSGAAAADIDYVRPAEIPEQDLYHGHSFITKWIFCQDAKVIGVQYFLTAVFTGIVGLILSWLMRLQLGFPGLAGFMTAEHYYQFVTMHGMIMVVYFLTALFLGGFGNYLIPLMVGARDMVFPYVNMISYWMFFVAVAVLMASFFVPGGPTGSGWTLYPPQAILEGTPGSGMGILLMLVSLSLFVIGFTMGGLNYLITVLQARTRGMTLMRLPLTVWGIFTATVLAMLAFPALLVSSIMMTLDKVLGTSFFMPTILKAGEVLEYGGGSPILFQHLFWFFGHPEVYIVALPAFGIVSDLISVHARKNIFGYRMMVWAIVGIG

SEQ ID NO: 104104 - protein, 210 aa, Unknown
  Bacterial polypetide isolated from the Sargasso Sea
MSASGQKHDYHLVDPSPWPLATSIATLVTAVGSVYYFHSKVMWAMVLGFLLIIYCAFMWFRDVVIEAEHKGHHTPVVQIHHRYGMTLFIASEVMFFVAWFWAYFDASLFPNEFMGNVWPPKDIETFDPWDIPLINTLVLLLSGTTVTWAHHSLLEDDRKGFINGLICTVILGAFFTLLQIYEYQHATFSFSGPYLWSYILYGHRVSWFPR

SEQ ID NO: 104105 - protein, 227 aa, Unknown
  Bacterial polypetide isolated from the Sargasso Sea
IIKAGEALSYDGGSPILFQHLFWFFGHPEVYIVALPAFGIVSDLISVHSRKNIFGYRMMVWAIVGIGALSFFVWAHHMYVSGMSPWFGFFFATTTLIIAVPTALKVYNWILTLWRGNIRINTVMLFCLGFIVTFVNGGITGIFLGNVAVDVPLSDTYFVIAHFHMVMGIAPLMVIFGAIYHWFPLVTGRFLDEKLGKLAFLDNFFRCLLYLFSNALFRLHWCTKKIL

SEQ ID NO: 104106 - protein, 291 aa, Unknown
  Bacterial polypetide isolated from the Sargasso Sea
MTTKHETYYVPAQSAWPIVGAIGLFLIAFGAGHFVHQLKSGASGGGYILLAGIAVILFMLVGWFRTVIKESMTGLYSHQMDRSFRQGMSWFIFSEVMFFAAFFGALFYARMIAVPWLGGASNNAMTHEVLWPHFEAVWPLVTTPDGTKTEAMPWNGLPLINTIVLLTSSVTLHFAHISLEKGKRSAITLWLGLTILLGICFLALQAEEYSHAYHEMGLTLTSGVYGNTFFLLTGFHGMHVTLGTIFLLVLFFRVLKGHFSADKHFAFQAGSWYWHFVDVVWLCLFIFVYVL

SEQ ID NO: 104107 - protein, 243 aa, Unknown
  Bacterial polypetide isolated from the Sargasso Sea
MSAVIENHHDDHHHGPAKGLTRWLFTTNHKDIGTLYLWFSFAMFLIGGAMAMIIRAELFQPGMQIVEPEFYNQMITLHGLIMIFGGVMPAFVGLANWLVPMQIGAPDMALPRMNNLSFWILPFAFFILLSSLFMEGGAPNFGWTFYAPLSTTYAPPSVTFFIFSVHIMGASSIMGAINVVVTIMNMRAPGVGLMKMPLFVWSWLITAYLLIAVMPVLAGAVTMMLMDIHFGTSFFNAAGGGDP

SEQ ID NO: 104108 - protein, 173 aa, Unknown
  Bacterial polypetide isolated from the Sargasso Sea
MAEKSTSTGQKHPYHLVDPSPLPFLSSIAGLAMAAGLVFYMHYGTSWLLILGTIGLLTVMFLWWKDVIKESTYQKAHTPVVELGLRYGMALFIASEVMFFVAFFWAFFDASLTPKLPIEEFSETFDSEGAVGIWPPEGIKTFDPLDVPFLNTLILLMSGTTCTWAHHAVREGH

SEQ ID NO: 104109 - protein, 115 aa, Unknown
  Bacterial polypetide isolated from the Sargasso Sea
PWLKKDNRKQFNIWLGATLVLGYLFVFFQGVEYYEAYAHMGLTLDAGIYGTTFFMLTGFHGFHVCLGAIILTIMFLRSLKGHFKPDDHFGFEAGSWYWHFVDVVWICLVAFVYVM

SEQ ID NO: 104110 - protein, 291 aa, Unknown
  Bacterial polypetide isolated from the Sargasso Sea
MTTKHETYYVPAQSAWPIVGAIGLFLIAFGAGHFVHQLKSGASGGGYILLAGIVVILFMLVGWFRTVIQESMTGLYSHQMDRSFRQGMSWFIFSEVMFFAAFFGALFYARMVAVPWLGGASNNAMTHEVLWPHFEAVWPLLTTPDGTKTEAMPWNGLPLVNTIVLLTSSVTLHFAHTSLEKGKRSAITLWLGLTILLGISFLALQAEEYSHAYHEMGLTLTSGVYGNTFFLLTGFHGMHVTLGTIFLLVLFFRVLKGHFSADKHFAFQAGSWYWHFVDVVWLCLFIFVYVL

SEQ ID NO: 104111 - protein, 180 aa, Unknown
  Bacterial polypetide isolated from the Sargasso Sea
CDTSNTFNNIAIPSFRILYTAETIPKADLTIKAIGNQWYWSYEYPDYDDFSFDANMLQDDELSDPSLRLLETDTQIVVPVNKVVKLLITSNDVLHAWTIPAFAVKKDAVPGRLNETWFKAEKTGTYYGQCSELCGPKHAFMPINVKVVSQDEFDNWLSFAKEEYASSKTNFNQTFQVAKN

SEQ ID NO: 104112 - protein, 439 aa, Unknown
  Bacterial polypetide isolated from the Sargasso Sea
TGAGWTLYPPQSILEGTPGGDGAGIILMLASLAVFIIAFTMGGLNYITTVLQSRAKGMTLMRMPLIIWCIFLATFLGLLAFPALLVGAIMLIFDRVLETSFFMPEIFKGGEVLDYGGGSPVLFQHLFWFFGHPEVYIIALPAFGIISELISVHARKNIFGYNMMVWALIAIAGIAFIVWAHHMYVAGMNPYLGFFFATTTLIIAVPTAIKVYNWVLTLWNANIKMTVPMLYCLAFLVTFLNGGLTGLFLGNVAVDVPLSDTYFVVGHFHMVMAVSPVLALYGGLYHWYPSVTGRMLNDTLGKIHFWITFIGTYLIYFPMHYIGFLGVPRRYYSNEQYDFIPQSVADLNQFITICALIVGLAQFILLYNFIVSLKKGAIASKNPWGACTLEWQALESPPGHGNWGEQLPVVYRWPYEYGLPGAKEDFIPQNVPDEQIVKA

SEQ ID NO: 104113 - protein, 438 aa, Unknown
  Bacterial polypetide isolated from the Sargasso Sea
MSDDLDNNKTIYQAQSSETMGGSGSASPDMDYVRPAEIPDQDLYHGHSFITKWVFCQDAKVIGVQYFLTAVFTGIVGLILSWLMRLQLGFPGAAGFMTAEHYYQFVTMHGMIMVVYFLTALFLGGFGNYLIPLMVGARDMVFPYVNMISFWMFFIAVAVLMASFFVPGGPTGAGWTLYPPQTILEGTPGHGMGILLMLVSLSLFVIGFTMGGLNYLITVLQARTRGMTLMRMPLTVWGIFTATVLAMLAFPALLVSAIMMTLDKILGTSFFMPTILKAGEVLEYGGGSPILFQHLFWFFGHPEVYIVALPAFGIVSDLISVHSRKNIFGYRMMVWAIVGIGALSFFVWAHHMYVSGMNPWFGFFFATTTLIIAVPTAMKVYNWILTLWRGNIRLNTVMLWCLGFIVTFVNGGITGIFLGNVSVDVPLSDTYFVIAHFH

SEQ ID NO: 104114 - protein, 335 aa, Unknown
  Bacterial polypetide isolated from the Sargasso Sea
MSDEYDNNKSYQAQSSEVMDGTTGSVNPDIDYVRPAEVGEQDLYHGHSFIEKWVFCQDAKVIGVQYFLTAVFTGIVGLILSWLMRLQLGFPELAGFMTAEHYYQFVTMHGMIMVVYFLTALFLGGFGNYLIPLMVGARDMVFPYVNMLSFWMFFVAVAVLMASFFVPGGPTGAGWTLYPPQTILEGTPGSGMGILLMLISLSLFVIGFTMGGLNYMITILQARTRGMTLMRMPLTVWGIFTATVLAMLAFPALLVSAIMMTLDKVLQTSFFMPTILKAGEVLEYGGGSPILFQHLFWFFGHPEVYIVALPAFGIVSDLISVHARKNIFGYRNDGL

SEQ ID NO: 104115 - protein, 279 aa, Unknown
  Bacterial polypetide isolated from the Sargasso Sea
FWFFGHPEVYIMILPAFGIVSQIISTFSKKPVFGYLGMAYAMVSIGVVGFVVWAHHMYTVGMDVDTRAYFTAATMVIAVPTGIKIFSWIATMWGGSIEFKTPMLWALGFIFLFTVGGVTGVVLSNAGLDVVLHNTYYVVAHFHYVLSLGAVFGLFAGFYYWFSKMTGCEYNEKLGQLHFWVTFVGVNLTFFPMHFLGLAGMPRRYVDYPDAFAGWNLVASIGSLISVVGVVIFFIVIIEAFSSRRKAENSPWGIGGTTIEWSTTSPPPFHTFDELPKVK

SEQ ID NO: 104116 - protein, 275 aa, Unknown
  Bacterial polypetide isolated from the Sargasso Sea
MVLPAFGLVSEILPVHARKPLFGYTTMVFSIMGIVVLGLVVWAHHMFTSGTPPWMRLFFTIATAFIAVPTGIKFFNWVATLWGGKISINSAMLFSCGFIINFVFGGITGVALAQVPFDIHVHDTYFVVAHFHYIVYGGTVFIIFSSIYHWFPKVTGKMLNEKLGILHFIITFIGFNLCFAPQHWLGLNGMPRRVAEYDPQFQFVNQISSLGALLMAISTIPFLINIFLSLTNGKDSGDNPWNALTPEWLTSSPPPVENWEGEAPLVEEPYGYGKQ

SEQ ID NO: 104117 - protein, 124 aa, Unknown
  Bacterial polypetide isolated from the Sargasso Sea
MYTKTASHDDHHTPTGWKRWAYSTNHKDIGTMYLIFAIIAGVIGTAFSVLMRMELMHPGDGILGGNYHLYNVLVTGHGLIMIFFMVMPAMIGGFGNWFVPIMIGAPDMAFPRMNNISFWLLPTS

SEQ ID NO: 104118 - protein, 311 aa, Unknown
  Bacterial polypetide isolated from the Sargasso Sea
MSTTTAHTQDHHTPTGWKRWAYSTNHKDIGTMYIIFAIIAGVIGTVFSVVMRMELMHPGDGILNGNYHLYNVLVTGHGLIMIFFMVMPAMIGGFGNWFVPIMIGAPDMAFPRMNNISFWLLPVSFILLIASIFMDGPPGAKGVGGGWTIYPPLSSKAGQPGPAMDFAILSLHIAGASSILGAVNFITTILNMRTPGMTLHKMPLFAWSILVTAFLLLLSLPVLAGAITMLLTDRNFGTAFFEAQTGGDPTLFQHLFWFFGHPEVYILILPGFGMISHIVSTFSKKPVFGYLGMAYAMVAIGVVGFVVWAHH

SEQ ID NO: 104119 - protein, 226 aa, Unknown
  Bacterial polypetide isolated from the Sargasso Sea
MIPKAYFLAATMIIAVPTGIKIFSWIATMWGGSISFKTPMVWALGFIFLFTVGGVTGVVLANAGVDTALHDTYYVVAHFHYVLSLGAVFAIFAGFYYWFGKMSGYEYSEWMGQLHFWLTFIGVNIVFFPQHFLGLAGMPRRYADYPDAFADWNYISSIGSYISIVGLAVFFANLIYAFAKKKKAAQNPWGEGATTLEWTVPSPPNFHTFDELPKFENVEGAEKSSS

SEQ ID NO: 104120 - protein, 331 aa, Unknown
  Bacterial polypetide isolated from the Sargasso Sea
DGILGGNYHLYNVLVTGHGLIMIFFMVMPAMIGGFGNWFVPIMIGAPDMAFPRMNNISFWLLPVSLTLLILSIFADGPPGQTGVGGGWTIYPPLSSKAGQPGPAMDLAILSLHLAGASSILGAVNFITTILNMRTPGMTLHKMPLFAWSILVTAFLLLLSLPVLAGAITMLLTDRNFGTAFFEAQTGGDPVLFQHLFWFFGHPEVYILILPGFGMISHIVSTFSRKPVFGYLGMAYAMVAIGIVGFVVWAHHMYTVGLSTDTKAYFLAATMIIAVPTGIKIFSWIATMWGGSISFKTPMMWALGFIFMFTVGGVTGVVLANAGVDTAMHDT

SEQ ID NO: 104121 - protein, 262 aa, Unknown
  Bacterial polypetide isolated from the Sargasso Sea
MSAEKKHDYHLVDPSPWPIYVSFSCLVLAIGAVYYMHSDVSWGMYLGLALLIYGAYMWFRDVVIEAEHQGHHTPVVQIHHRYGMTLFIASEVMFFVAWFWAYFDVSLFPNDFVGNVWPPKDIVTFDPWDIPLINTLVLLLSGTTVTWSHHSLLEGDRKGFIQGLVLTVILGAFFTALQAYEYHHATFAFSDHIYGSVFYMATGFHGFHVIVGTIFLAVCLWRGKLGHFTKDHHFGFEAAAWYWHFVDVVWLFLFAAIYIWGS

SEQ ID NO: 104122 - protein, 172 aa, Unknown
  Bacterial polypetide isolated from the Sargasso Sea
GFIFLFTVGGVTGVVLANAGIDHSLHDTYYVVAHFHYVLSMGAVFAIFAGFYYWFGKMFGRNYSEFLGKLHFWLTFIGVNIIFFPQHFLGLAGMPRRYVDYPDAYAGWNYISSIGSFISVLGLAVFFVMLVHALMKVRDCADNPWGEGATTLEWTLPSPPPFHQFEELPKVK

SEQ ID NO: 104123 - protein, 263 aa, Unknown
  Bacterial polypetide isolated from the Sargasso Sea
MSASGQKHDYHLVDPSPWPLATSIATLVTAVGSVYYFHSKVMWAMVLGFLLIIYCAFMWFRDVVIEAEHKGHHTPVVQIHHRYGMTLFIASEVMFFVAWFWAYFDASLFPNEFMGNVWPPKDIETFDPWDIPLINTLVLLLSGTTVTWAHHSLLEDDRKGFINGLICTVILGAFFTLLQIYEYQHATFSFSGHIYGATFYMATGFHGFHVLVGTIFLAVCLWRGKLGHFTKEHHFGFEAAAWYWHFVDVVWLFLFAAIYIWGS

SEQ ID NO: 104124 - protein, 226 aa, Unknown
  Bacterial polypetide isolated from the Sargasso Sea
MSTITADNHHTPYGWKRWAYSTNHKDIGTMYLIFAIIAGIIGSAFSVLMRIELMHPGDGILGGNHHLYNVLVTGHGLIMIFFMVMPAMIGGFGNWFVPIMIGAPDMAFPRMNNISFWLLPVSLILLLASIFVDGPPGQQGVGGGWTIYPPLSSKTGQPGPAMDLAILSLHIAGASSILGAINFITTILNMRTPGMTLHKMPLFAWSILVTAFLLLLSLPVLAGAIT

SEQ ID NO: 104125 - protein, 299 aa, Unknown
  Bacterial polypetide isolated from the Sargasso Sea
AITMLLTDRNFGTTFFDPAGGGDPILYQHILWFFGHPEVYIIILPGFGIISHVIATFSRKPVFGYLPMVWALIAIGALGFVVWAHHMYTVGMSLTQQSYFMLATMVIAVPTGIKIFSWIATMWGGSIEFKTPMLWAFGFLFLFTLGGVTGIVLAQAGVDRAYHDTYYVVAHFHYVMSLGAVFAIFAGIYFYFPKMTGRIIPEWAGQLHFWTMFVGSNITFFPQHFLGRQGMPRRYIDYPEAFALWNQVSSYGAFLSFASFVFFFIVIIYAIVAGKKETRANPWNEYADTLEWTLPSPPP

SEQ ID NO: 104126 - protein, 182 aa, Unknown
  Bacterial polypetide isolated from the Sargasso Sea
LTFETPMLFAVAFVVLFTIGGLSGLMLAIVPADFQYHDTYFVVAHFHYVLVPGAIFSIMAAVYYWIPKWSGNMYDERLGKLHFWLSFIGVNVTFFPQHFIGLAGMPRRYPDYALIFADWNMVSSIGAFLFGFSQLLFLFIVIKTVMGGKKATDQVWEGAKGLEWTVASPAPYHTFSTPPKVD

SEQ ID NO: 104127 - protein, 283 aa, Unknown
  Bacterial polypetide isolated from the Sargasso Sea
MHPGDGILGGNYHLYNVLVTGHGLIMIFFMVMPAMIGGFGNWFVPIMIGAPDMAFPRMNNISFWLLPTSFILLIMSIFMDGPPGQTGVGGGWTIYPPLSSTAGQPGPAMDFAILSLHLAGASSILGAVNFITTILNMRTPGMTLHKMPLFAWSILVTAFLLLLSLPVLAGAITMLLTDRNFGTAFFDAQTGGDPVLFQHLFWFFGHPEVYILILPGFGMISHIVSTFSRKPVFGYLGMAYAMVAIGIVGFVVWAHHMYTVGLSTDTKAYFLAATMIIAVPTGI

SEQ ID NO: 104128 - protein, 111 aa, Unknown
  Bacterial polypetide isolated from the Sargasso Sea
GNKKTFNIWLGITVLLALIFVGLQAAEYYEAYEHFGLTLNSGIYGSTFFMLTGFHGFHVMLGGLMLAVMFIRSVFYGHFNEHKHFGFEAASWYWHFVDVVWVMLFLFVYIL

SEQ ID NO: 104129 - protein, 88 aa, Unknown
  Bacterial polypetide isolated from the Sargasso Sea
FKTPMVWALGFIFLFTVGGVTGVVLANAGVDTAMHDTYYVVAHFHYVLSLGAVFAIFAGFYYWFGKMTGYEYSEWMGQLHFWLTFIGV

SEQ ID NO: 104130 - protein, 294 aa, Unknown
  Bacterial polypetide isolated from the Sargasso Sea
SPILFQHLFWFFGHPEVYIVALPAFGIVSDLISVHARKNIFGYRMMVWAIVGIGALSFFVWAHHMYVSGMNPWFGFFFATTTLIIAVPTAMKVYNWILTLWRGNIRINTVMLWCLGFIVTFVNGGITGIFLGNVSVDVPLSDTYFVVAHFHMVMGIAPVMVIMGAVYHWFPLITGRLLNETLGKWHFWATFLGAYSIYFPMHYLGFIGVPRRYYEMYDSPYMTSAVGMNEFISLAAFLVGAAQFILIFNIIKTLKTGKPAPKNPWKANSLEWHTSTQPPEHGNFGERLPVVHRW

SEQ ID NO: 104131 - protein, 211 aa, Unknown
  Bacterial polypetide isolated from the Sargasso Sea
LFFMWATMLIAVPTGVKVFNWVATMFKGSITYETPMLFAISFVVLFTIGGFSGLMLAIVPADFQYHDTYFVVAHFHYVLVPGSIFSIMAAVYYWIPKWTGNMYDERMGRLHFWLSFVGVNVTFFPQHWIGLAGMPRRYPDYALQFADWNMVSTAGAFLFGASQILFLFIVLKTVMGGKKATPQVWEGARGLEWSVESPAPYHTFSTPPKVN

SEQ ID NO: 104132 - protein, 262 aa, Unknown
  Bacterial polypetide isolated from the Sargasso Sea
SVYILYSGFACLFLTMFFWFRQVIKEHLAGLDSNQLKQSYVYGMAWFIFSEVMFFAAFFGALFYVRTLAVPWLAGEGSKGAAITAIELWPAFESSWPVMTTPDQGNEYDLADKSMAWPGWSKALLWLPLWNTIVLLSSSWTVHLAHLGLKKGNRKKFNVYLGVTVLLALIFVGLQALEYYEAYAHYGLKLNSGIYGSTFFMLTGFHGFHVMMGGFMLAIMLARSVFAGHFEQHDHFGFEAASWYWHFVDVVWLMLFIFVYIL

SEQ ID NO: 104133 - protein, 297 aa, Unknown
  Bacterial polypetide isolated from the Sargasso Sea
WLLPTSFILLIMSIFMDGPPGQTGVGGGWTIYPPLSSTAGQPGPAMDFAILSLHLAGASSILGAVNFITTILNMRTPGMTLHKMPLFAWSILVTAFLLLLSLPVLAGAITMLLTDRNFGTAFFDAQTGGDPVLFQHLFWFFGHPEVYILILPGFGMISHIVSTFSRKPVFGYLGMAYAMVAIGIVGFVVWAHHMYTVGLSTDTKAYFLAATMIIAVPTGIKIFSWIATMWGGSISFKTPMVWALGFIFLFTVGGVTGVVLANAGVDTAMHDTYYVVAHFHYVLSLGACICNLCWILY

SEQ ID NO: 104134 - protein, 302 aa, Unknown
  Bacterial polypetide isolated from the Sargasso Sea
AQTGGDPVLFQHLFWFFGHPEVYILILPGFGMISHIVSTFSRKPVFGYLGMAYAMVAIGIVGFVVWAHHMYTVGLSTDTKAYFLAATMIIAVPTGIKIFSWIATMWGGSISFKTPMMWALGFIFMFTVGGVTGVVLANAGVDTAMHDTYYVVAHFHYVLSLGAVFAIFAGFYYWFSKMSGYEYSEWMGHLHFWLTFIGVNLIFFPQHFLGLAGMPRRYADYPDAFAGWNYISSIGSYVAVAGLAVFFANLIYAFAKKKAAEQNPWGEGATTLEWTVPSPPNFHTFEELPKFVDDQETEKSHS

SEQ ID NO: 104135 - protein, 295 aa, Unknown
  Bacterial polypetide isolated from the Sargasso Sea
MDFAILSLHLAGASSILGAVNFITTILNMRTPGMTLHKMPLFAWSILVTAFLLLLSLPVLAGAITMLLTDRNFGTAFFEAQTGGDPVLFQHLFWFFGHPEVYILILPGFGMISHIVSTFSRKPVFGYLGMAYAMVAIGVVGFVVWAHHMYTVGLSTDTKAYFLAATMIIAVPTGIKIFSWIATMWGGSISFKTPMMWALGFIFMFTVGGVTGVVLANAGVDTAMHDTYYVVAHFHYVLSLGAVFAIFAGFYYWFSKMSGYEYSEWMGQLHFWLTFIGVNLIFIPQHFLGLAGMPR

SEQ ID NO: 104136 - protein, 241 aa, Unknown
  Bacterial polypetide isolated from the Sargasso Sea
MLLSGQSVFSQMFFSFITYFVGIPTGVKIFSWILTMYKGQVSFTPPMFYALSFLFLFTIGGLTGIFLGAVALDIHLHDTYFVVAHFHYVMQGGTIVAFLGGLHHWWPKSFGVMYNQTIANIAALGVFIGFNGTFFPQFLLGLRGMPRRYATYDEQFVELHSYSTFWSGILGISIFIAVMNLFWSFIKKNKVDPGSNPWGGMTLEWTHTSSPPHPHNFEEEPVLQHGPYDYDKVIVDKTYKK

SEQ ID NO: 104137 - protein, 300 aa, Unknown
  Bacterial polypetide isolated from the Sargasso Sea
GARDVAFPRLNALSFWIWVFGGLFLYSTFVFGTAGAPEGGYLAEEVGWLGNAPNGGWFGYQPNAGFKYSPGTAMDYWAIGLQILGISSLVSAFNFIVTILNMRTQGMRLMRMPVFTWMTFAVAFLLAFSLPIIAIALFYVTFDRQFGTTFFLTEGGGDPVLWQHLFWLFGHPEVYILILPAFGIVSEILPTFSRKPLFGYPAIVFAGFGIAFIGFGVWAHHMFASAISPVAQAGFGISTMIIAVPTGVKIFNWLGTIWGGKLNLKTPMLFALGFIGMFVIGGLSGVTHSVVPADTQQTDT

SEQ ID NO: 104138 - protein, 317 aa, Unknown
  Bacterial polypetide isolated from the Sargasso Sea
MLGTSFFMPAIIQFGEKLTHEGGSPILFQHLFWFFGHPEVYIVALPAFGIVSDLISVHARKNIFGYRMMVWAIVIIGGLSFVVWAHHMYVAGMNPWFGFFFATTTLIIAVPTAIKVYNWVLTLWRGNIKLTLPMLFSIAFIITFVNGGLTGLFLGNVAVDVPLSDTYFVVAHFHMVMGIAPVLVILGSVYHWFPLITGRFLNERLGKIHFWVTFIGSYSIYFPMHYLGFMGVTRRYFEVFEGEAFTYSITGINQFITVAALVTGAAQFLFIYNIIVSSKFGKKAGKNPWKACSLEWRTKDVPPTHGNFDKELPVVYR

SEQ ID NO: 104139 - protein, 189 aa, Unknown
  Bacterial polypetide isolated from the Sargasso Sea
TPNGWALGFIFLFTVGGVTGVVLANAGVDTAMHDTYYVVAHFHYVLSLGAVFAIFAGFYYWFGKMSGYEYSEWMGQLHFWLTFIGVNLIFFPQHFLGLAGMPRRYADYPDAFAGWNYISSIGSYISVLGLVVFFANLIYAFSKKKAAAQNPWGEGATTLEWTVPSPPNFHTFEELPKFEDDESIEKSTS

SEQ ID NO: 104140 - protein, 310 aa, Unknown
  Bacterial polypetide isolated from the Sargasso Sea
RFNFITTIINMRTEGMRFMRMPVFTWMTFAVSFLLAFSLPIIAIALFYVTFDRKFGTTFFLTEGGGDPILWQHLFWLFGHPEVYILILPAFGIVSEVLPTFSRKPLFGYAAIVFAGFGIAFIGFGVWAHHMFASAISPVAQAGFGLSTMVIAVPTGVKIFNWLGTIWGGKLKLNTPMLFSLGFIGMFVIGGLSGVTHSIVPADTQQTDTYYVVAHFHYVLFGGALFGIFSGLYYWFPKVWGKMYNESLGKIHFWLMMIGFNLTFGPMHWLGLQGQVRRTWVYAEETNLQFWNIIVTVGAFIIALSIIVFM

SEQ ID NO: 104141 - protein, 270 aa, Unknown
  Bacterial polypetide isolated from the Sargasso Sea
VYIMILLAFGIVSHIIETFSRKPIFGYTSMVYAIASIAILSFIVWAHHMFTVGMPIAGELFFMYTTMLIAIPTGVKVFNWLSTMFKGSISFETPMLFSIAFVALFTIGGLSGLMLAIAPADFQYHDTYFVVAHFHYVLVPGAIFGIIAGVYYWLPKWTGNMYDEVLGKTHFWMSFISVNITFFPMHFVGLAGMPRRIPDYALQFADFNMVISIGAFIFGLTQLLFLFIILKSIFAGKQATSEVWEGAKGLEWTVASPAPYHTFETPPEVK

SEQ ID NO: 104142 - protein, 238 aa, Unknown
  Bacterial polypetide isolated from the Sargasso Sea
ASIAILSFVVWAHHMFTVGMPLAGELFFMYSTMLIAIPTGVKVFNWVATMFRGSITFETPMLFSIAFVALFTIGGFSGLMLAIVPADFQYHDTYFVVAHFHYVLVPGALFGIIAAAYYWLPKWTGNMYDETLGKLHFWLTFISVNITFFPMHFVGLAGMPRRYPDYALQFADFNALISVGAFMFGLTQLLFLFIVIKTIRSGKQAKPEVWEGAGDLGLEWTLTSPPPYHSFTVQPQVK

SEQ ID NO: 104143 - protein, 242 aa, Unknown
  Bacterial polypetide isolated from the Sargasso Sea
MAYAMVAIGVVGFVVWAHHMYTVGLDTDTKAYFLAATMIIAVPTGIKIFSWIATMWGGSISFKTPMLWAIGFIFLFTLGGVTGVVLANAGVDTALHDTYYVVAHFHYVLSLGAVFAIFAGWYYWFSKMSGYEYSEFLGKLHFWLTFIGVNLIFFPQHFLGLAGMPRRYADYPDAFAGWNYISSIGSYISIVGLAVFLLNLLYSFIKKRKAEQNPWGEGATTLEWTVTSPPPFHTFEELPKVK

SEQ ID NO: 104144 - protein, 179 aa, Unknown
  Bacterial polypetide isolated from the Sargasso Sea
MTLFIASEVMFFVAWFWAYFDVSLFPNDFVGNVWPPKDIETFDPWDIPLINTLILLLSGTTVTWSHHALLEDDRKGFIQGLWLTVILGFCFTLLQIYEYQHASFSFSDHIYGSVFYMATGFHGFHVLVGTIFLAVCLFRGKRGHFNKDHHFGFEAAAWYWHFVDVVWLFLFAAIYIWGS

SEQ ID NO: 104145 - protein, 63 aa, Unknown
  Bacterial polypetide isolated from the Sargasso Sea
MATGFHGFHVLIGTLFLLVCLLRIRKGHLTTERHFGFEAAAWYWHFVDVVWLFLYISIYWWGK

SEQ ID NO: 104146 - protein, 281 aa, Unknown
  Bacterial polypetide isolated from the Sargasso Sea
FVWSILITAFLLLLSLPVLAGAITMMLTDRNFGTAFFNPEAGGDPVLFQHLFWFFGHPEVYILILPGFGIISHVVSTFSKKPVFGYLGMAYAMAAIGVVGFVVWAHHMYTTGLDVDTRAYFLAATMVIAVPTGIKIFSWIATMWGGSIEFKTPMLFAIAMIFLFTLGGVTGVVLANTGIDVALHDTYYVVAHFHYVMSMGALFSIYAGFYYWFSKMSGIEYSEILGKIHFWLTFIGVNITFFPMHFSGLAGMPRRIPDYPDAYAGWNYVSGIGAYISVFAA

SEQ ID NO: 104147 - protein, 122 aa, Unknown
  Bacterial polypetide isolated from the Sargasso Sea
MVQQLLVAHHSLLEDDRKGFINGLICTVILGAFFTLLQIYEYQHATFSFSGHIYGATFYMATGFHGFHVLVGTIFLAVCLWRGKLGHFTKEHHFGFEAAAWYWHFVDVVWLFLFAAIYIWGS

SEQ ID NO: 104148 - protein, 258 aa, Unknown
  Bacterial polypetide isolated from the Sargasso Sea
VFGYLGMAYAMVAIGIVGFVVWAHHMYTVGLSTDTKAYFLAATMIIAVPTGIKIFSWIATMWGGSISFKTPMVWALGFIFMFTVGGVTGVVLANAGVDTAMHDTYYVVAHFHYVLSLGAVFAIFAGFYYWFSKMSGYEYSEWMGQLHFWLTFIGVNLIFFPQHFLGLAGMPRRYADYPDAFAGWNYISSIGSYVAVAGLAVFFMNLIYAFAKKKAAAQNPWGEGATTLEWTVPSPPNFHTFEELPKFEDGQGTQKSHG

SEQ ID NO: 104149 - protein, 149 aa, Unknown
  Bacterial polypetide isolated from the Sargasso Sea
MYTQTAPHDDHHTPTGWKRWAYSTNHKDIGTMYLIFAIFAGVIGTAFSVLMRMELMHPGDGILGGNYHLYNVLVTGHGLIMIFFMVMPAMIGGFGNWFVPIMIGAPDMAFPRMNNISFWLLPVSLTLLILSVFADGPPGQTGVGGGWTI

SEQ ID NO: 104150 - protein, 167 aa, Unknown
  Bacterial polypetide isolated from the Sargasso Sea
VLAQAGVDRAYHDTYYVVAHFHYVMSLGAVFAIFAGIYFYFSKMTGRAYPEWAGKLHFWMMFIGSNLTFFPQHFLGRQGMPRRYIDYPEAFAYWNVISSYGAFLAFASFLFFFGIIFYSLFFGARQNAPNPWNEYADTLEWTLPSPPPEHTFEILPEQKDWDKSEVH

SEQ ID NO: 104151 - protein, 230 aa, Unknown
  Bacterial polypetide isolated from the Sargasso Sea
VGLSTDTKAYFLAATMIIAVPTGIKIFSWIATMWGGSISFKTPMMWALGFIFMFTVGGVTGVVLANAGVDTAMHDTYYVVAHFHYVLSLGAVFAIFAGFYYWFSKMSGYEYSEWMGQLHFWLTFIGVNLIFFPQHFLGLAGMPRRYADYPDAFAGWNYVSSIGSYIAVIGLGVFFINLIYAFAKKKSAEKNPWGEGATTLEWTVPSPPNFHTFEELPKFEDDQEVEKSHG

SEQ ID NO: 104152 - protein, 73 aa, Unknown
  Bacterial polypetide isolated from the Sargasso Sea
DGNIYGSTFYMATGFHGFHVIIGTIFLAVCLYRSIKGHFKPDHHFGFEAAAWYWHFVDVVWLFLFAAIYIWGS

SEQ ID NO: 104153 - protein, 125 aa, Unknown
  Bacterial polypetide isolated from the Sargasso Sea
TGYEYSEWMGQLHFWLTFIGVNLVFFPQHFLGLAGMPRRYADYPDAFAGWNYISSIGSYISVIGLVVFFVNLAYAFYKKKAAAQNPWGEGATTLEWTVPSPPNFHTFEELPKFEEEEEGVEKSTS

SEQ ID NO: 104154 - protein, 166 aa, Unknown
  Bacterial polypetide isolated from the Sargasso Sea
MILPAFGIVSQVISTFSRKPIFGYLGMVYAMVSIGFIGFIVWAHHMFTVGLSADLRAYFMLATIIIAVPTGIKIFSWIATMWGGSLTFETPMLFSIGFVFLFTLGGVTGVILANAGIDTVMHDTYYVVAHFHYVLSMGAMFGIFAGIYYWFGKMTGRQYNEFFGKL

SEQ ID NO: 104155 - protein, 326 aa, Unknown
  Bacterial polypetide isolated from the Sargasso Sea
AIFALHLAGASSILGAVNFITTILNMRTPGMTLHKMPLFVWAMLITAFLLLLAVPVLAGAITMLLTDRNFGTTFFNPAGGGDPVLFQHLFWFFGHPEVYIMILPAFGIVSQVISTFSRKPVFGYLGMVYAMISIGFIGFIVWAHHMFTVGMSADLRAYFMLATIIIAVPTGIKIFSWIATMWGGSLTFETPMLFAIGFVFLFTLGGVTGVILANAGIDTVMHDTYYVVAHFHYVLSMGAMFGIFAGIYYWFGKMSGRKYNEFLGKLHFWLFFIGVNVTFFPQHFLGLAGMPRRIPDYPDAYAGWNLVSTYGSYISFAATLIFLFAI

SEQ ID NO: 104156 - protein, 106 aa, Unknown
  Bacterial polypetide isolated from the Sargasso Sea
FNVWLGITVTLALIFVGLQAAEYYEAYAHYGLTLNSGIYGSTFFMLTGFHGFHVMMGGFMLAVMLSRSVFYNHFDPHSHFGFEAASWYWHFVDVVWVMLFLFVYIL

SEQ ID NO: 104157 - protein, 143 aa, Unknown
  Bacterial polypetide isolated from the Sargasso Sea
MSSEAISHHSNPSGWKRWVYSTNHKDIGTMYLIFAIVSGIVGGVLSLFMRLELQQPGLQIFGDPHVYNVFTTGHGLIMIFFMVMPAMIGGFGNWFVPLMIGAPDMAFPRMNNISFWLLPPALALLVISMFVPGPPGANGVGGG

SEQ ID NO: 104158 - protein, 241 aa, Unknown
  Bacterial polypetide isolated from the Sargasso Sea
MSATTVSHEHHHNPTGWKRWAYSTNHKDIGTMYLIFAIIAGIIGTAFSVLMRMELAHPGDGILGGNYHLYNVLVTGHGLIMIFFMVMPAMIGGFGNWFVPIMIGAPDMAFPRMNNISFWLLPVALILLIASIFVDGPPGAQGVGGGWTIYPPLSSKTGQPGPAMDLAILSLHVAGASSILGAINFITTILNMRTPGMTLHKMPLFSWSILVTAFLLLLSLPVLAGAITMLLTDRNFGTAFL

SEQ ID NO: 104159 - protein, 261 aa, Unknown
  Bacterial polypetide isolated from the Sargasso Sea
MSAEKKHDYHLVDPSPWPIYTSFACLVLAIGAIFYMHNGISWGMYLGLALLIYGAYMWFRDVVIEAEHQGHHTPVVQIHHRYGMTLFIASEVMFFVAWFWAYFDISLFPNEFVGNVWPPKDIETFDPWDIPLINTLVLLLSGTTVTWAHHSLLEDDRKGFIQGLTLTVILGFFFTLLQAYEYHHATFTYSGHIYGAVFYMATGFHGFHVIIGTIFLAVCLWRGRLGHFNKDHHFGFEAAAWYWHFVDVVWLFLFAANIYLG

SEQ ID NO: 104160 - protein, 259 aa, Unknown
  Bacterial polypetide isolated from the Sargasso Sea
SSNNHSYHLVEPSPWPAVGAAAGFVLALGGAMYMHEYEYGGITSLVGFGLVFLTMFYWWRDIVREGEFQGHHSPIVQIGLRYGMMLFIASEVMFFVAFFWAFFASSLFPVGGVWPPEGIKTFDPFDLPLINTLILLLSGCTVTWAHHALIENDRSDFLLGLLLTVILGISFTGLQALEYMHAPFGFTEGIYPSVFFMATGFHGFHVIVGTIFLFVCLIRGYLGHFTSTQHFGFEAAAWYWHFVDVVWLFLFICIYMWGA

SEQ ID NO: 104161 - protein, 224 aa, Unknown
  Bacterial polypetide isolated from the Sargasso Sea
DVSWGMYLGLALLIYGAYMWFRDVVIEAEHQGHHTPVVQIHHRYGMTLFIASEVMFFVAWFWAYFDVSLFPNEFIGNVWPPKDIETFDPWDIPLINTLVLLLSGTTVTWSHHALLEDDRKSFINGLILTVILGVCFTALQAYEYHHATFTFSDHIYGSVFYMATGFHGFHVIVGTIFLAVCLFRGRRGHFNKDHHFGFEAAAWYWHFVDVVWLFLFAAIYIWGS

SEQ ID NO: 104162 - protein, 300 aa, Unknown
  Bacterial polypetide isolated from the Sargasso Sea
ISFWLLPTSFILLIMSIFMDGPPGQTGVGGGWTIYPPLSSTAGQPGPAMDFAILSLHLAGASSILGAVNFITTILNMRTPGMTLHKMPLFAWSILVTAFLLLLSLPVLAGAITMLLTDRNFGTAFFDAQTGGDPVLFQHLFWFFGHPEVYILILPGFGMISHIVSTFSRKPVFGYLGMAYAMVAIGIVGFVVWAHHMYTVGLSTDTKAYFLAATMIIAVPTGIKIFSWIATMWGGSISFKTPMVWALGFIFLFTVGGVTGVVLANAGVDTAMHDTYYVVAHFHYVLSLGAVFCIFAGFYY

SEQ ID NO: 104163 - protein, 284 aa, Unknown
  Bacterial polypetide isolated from the Sargasso Sea
FFNPVLGGNVVVYQHLFWFYSHPAVYIMVLPAFGLVSEILPIHARKPLFGYTTMVFSIMGIVVLGLVVWAHHMFTSGTPPWMRLFFTIATAFIAVPTGIKFFNWVATLWGGKISINSAMLFSCGFIINFVFGGITGVALAQVPFDIHVHDTYFVVAHFHYIVYGGTVFIIFSSIYHWFPKVTGKMLNEKLGVLHFIITFIGFNLCFAPQHWLGLNGMPRRVAEYDPQFQFVNQISSLGALLMAISTIPFLINVFISARNGKDAGDNPWNALTPEWLTSSPPPVE

SEQ ID NO: 104164 - protein, 301 aa, Unknown
  Bacterial polypetide isolated from the Sargasso Sea
KNLQFSPFVLRWFFSTNHKDIGTLYFIFGGFASVVGTWLSILIRMQLAFPGGEALSGNWQLYNVIVTAHAFIMIFFMVMPIMIGGFGNWLVPLMIGAPDMAFPRMNNISFWLLPPALILLLMSSLVEAGAGTGWTVYPPLAGVSGHPGPSVDLAIFSLHLAGASSILGAINFITTVFNMRAPGLYYYRLPLFVWSVLITAFLLLLSLPVLAGAITMLLTDRNFNTTFFEPAGGGDPILYQHLFWFFGHPEVYILILPAFGIISHVVSNLSNKSVFGYLGMVYAMLSIGILGFVVWAHHMFT

SEQ ID NO: 104165 - protein, 114 aa, Unknown
  Bacterial polypetide isolated from the Sargasso Sea
MNDHHDHKPGFFTRWFFSTNHKDIGTLYLIYAIIAGVVGGALSVIMRMELSEPGMQFVADGQMWNVIISAHGLLMIFFVVMPALIGGFGNWFIPLMIGAPDMAFPRLNNISFWL

SEQ ID NO: 104166 - protein, 173 aa, Unknown
  Bacterial polypetide isolated from the Sargasso Sea
IYCFRGYVFCTFFWAFFASSLFPVGGVWPPEGIKTFDPFDLPLINTLILLLSGCTVTWAHHALIENDRSDFLLGLLLTVILGISFTGLQALEYMHAPFGFTEGIYPSVFFMATGFHGFHVIVGTIFLFVCLIRGYLGHFTSAQHFGFEAAAWYWHFVDVVWLFLFICIYMWGS

SEQ ID NO: 104167 - protein, 156 aa, Unknown
  Bacterial polypetide isolated from the Sargasso Sea
MGHQWYWSYEYPDAGNLAFDSNLIPDEEIDVSKGQIRLLEVDNRVAIPVDTTIRVIMTSDDVLHNWAIPAFGIKMDTVPGRINEAWIRVPAEKAGVYRGQCSELCGVNHGYMPIVIDAMPKQRFAKWLEKAKKEFASNGGQVDLAQTKITIDTMVD

SEQ ID NO: 104168 - protein, 282 aa, Unknown
  Bacterial polypetide isolated from the Sargasso Sea
YMKNGHVWNVYVTAHGLIMVFFVVMPALIGGFGNWFVPLMIGAPDMAFPRMNNISFWLLIPAFLLLLLSVFADGGAGVGWTIYPPMSGKEGTPGMSMDMAILSLHLAGASSILGAANFITTIFNMRAPGMTLHRMPLFVWAMLITAFLLLLSLPVLAGAITMLLTDRNFGTTFFVAAGGGDPILFLHLFWFFGHPEVYIMILPAFGIVSHVISTFSKKPIFGYLGMAYAMVAIGFVGFIVWAHHMYTVGLDVDTRAYFTAATMVIAVPTGVKIFSWDCYDVG

SEQ ID NO: 104169 - protein, 149 aa, Unknown
  Bacterial polypetide isolated from the Sargasso Sea
EMYGRQKDIETFDPWDIPLINTLVLLLSGTTVTWAHHSLLEDDRKGFINGLICTVILGAFFTLLQIYEYQHATFSFSGHIYGATFYMATGFHGFHVLIGTIFLAVCLWRGKLGHFTKEHHFGFEAAAWYWHFVDVVWLFLFAAIYIWGS

SEQ ID NO: 104170 - protein, 127 aa, Unknown
  Bacterial polypetide isolated from the Sargasso Sea
LVLLLSGTTVTWSHHALLEDDRKGFIQGLVLTVILGVCFTALQAYEYHHATFAFSDHIYGSVFYMATGFHGFHVIVGTIFLAVCLWRGKLGHFNKDHHFGFEAAAWYWHFVDVVWLFLFAAIYIWGS

SEQ ID NO: 104171 - protein, 198 aa, Unknown
  Bacterial polypetide isolated from the Sargasso Sea
MWGGSISFKTPMMWALGFIFMFTVGGVTGVVLANAGVDTAMHDTYYVVAHFHYVLSLGAVFAIFAGFYYWFSKMSGYEYSEWLGQLHFWLTFVGVNLIFFPQHFLGLAGMPRRYADYPDAFAGWNYISSIGSYIAVAGLAVFFVNLIYAFAKKKAAAQNPWGVGATTLEWTVPSPPNFHTFEELPKFEDDQEAQKSHS

SEQ ID NO: 104172 - protein, 274 aa, Unknown
  Bacterial polypetide isolated from the Sargasso Sea
MYTQTASTDDHHTPTGWKRWAYSTNHKDIGTMYLIFAIVAGVIGTAFSVLMRMELMHPGDGILGGNYHLYNVLVTGHGLIMIFFMVMPAMIGGFGNWFVPIMIGAPDMAFPRMNNISFWLLPVSLTLLILSIFVDGPPGQTGVGGGWTIYPPLSSKAGQPGPAMDLAILSLHLAGASSILGAVNFITTILNMRTPGMTLHKMPLFAWSILVTAFLLLLSLPVLAGAITMLLTDRNFGTAFFEAQTGGDPVLFQPFILVLWSSKSLYFNSSQALE

SEQ ID NO: 104173 - protein, 275 aa, Unknown
  Bacterial polypetide isolated from the Sargasso Sea
WVLVPALVLLVVSATIGSGAGTGWTIYPPLSNKIGHAGPSVDMAIFALHLAGASSILGAVNFITTILNMRTPGMTLHKMPLFVWSMLITAFLLLLAVPVLAGAITMLLTDRNFGTTFFNPAGGGDPVLFQHLFWFFGHPEVYIMILPAFGIVSQVISTFSRKPVFGYLGMVYAMIAIGFIGFIVWAHHMFTVGMSADLRAYFMLATIIIAVPTGIKIFSWIATMWGGSLTFETPMLFAIGFVFLFTLGGVTGVILANAGIDTVMHDTYYVVAHFH

SEQ ID NO: 104174 - protein, 86 aa, Unknown
  Bacterial polypetide isolated from the Sargasso Sea
TDRNFGTTFFSAAEGGDPVLFQHLFWFFGHPEVYILILPGFGIVSHVVATFSKKPVFGYLGMAYAMVSIGFLGFIVWAHHMYTVGM

SEQ ID NO: 104175 - protein, 248 aa, Unknown
  Bacterial polypetide isolated from the Sargasso Sea
MSYGTSTENHLDHHDHRPGFIRRWFFSTNHKDIGTLYIIFALIAGLIGGFFSLLMRAELAAPGLDIVADGQMWNVIITAHGLLMVFFVVMPALIGGFGNWFVPLMIGAPDMAFPRMNNFSFWVLVPALVLLVVSATIGTGAGTGWTIYPPLSNKLGHAGPSVDMAIFALHLAGASSILGAVNFITTILNMRTPGMTLHKMPLFVWAMLITAFLLLLAVPVLAGAITMLLTDRNFGTTFFNPAGGGDPV

SEQ ID NO: 104176 - protein, 187 aa, Unknown
  Bacterial polypetide isolated from the Sargasso Sea
VQIHHRYGMTLFIASEVMFFVAWFWAYFDISLFPNEFVGNVWPPKDIETFDPWDIPLINTLVLLLSGTTVTWAHHSLLEDDRKGFIQGLTLTVILGFFFTLLQAYEYHHATFTYSGHIYGAVFYMATGFHGFHVIIGTIFLAVCLWRGRLGHFTKDHHFGFEAAAWYWHFVDVVWLFLFAAIYIWGS

SEQ ID NO: 104177 - protein, 50 aa, Unknown
  Bacterial polypetide isolated from the Sargasso Sea
TIFLAVCLFRGIKGHFTSNHHFGFEAAAWYWHFVDVVWLFLFVCVYWWGG

SEQ ID NO: 104178 - protein, 235 aa, Unknown
  Bacterial polypetide isolated from the Sargasso Sea
HHMYTVGLDTDTKAYFLAATMIIAVPTGIKIFSWIATMWGGSISFKTPMVWALGFIFLFTVGGVTGVVLANAGVDTALHDTYYVVAHFHYVLSLGAVFAIFAGFYYWFGKMSGYEYSEWMGQLHFWLTFIGVNLVFFPQHFLGLAGMPRRYADYPDAFADWNYISSIGSYISVVGLVVFFANLIYAFAKKKKAAQNPWGEGATTLEWTVPSPPNFHTFDELPKFEDYEGTEKSSS

SEQ ID NO: 104179 - protein, 131 aa, Unknown
  Bacterial polypetide isolated from the Sargasso Sea
LINTLVLLLSGTTVTWAHHSLLEDDRKGFIQGLWATVLLGFFFTLLQIYEYQHASFNFSGHIYGATFYMATGFHGFHVVVGTIFLAVCLWRGKLGHFNKEHHFGFEAAAWYWHFVDVVWLFLFAAIYVWGS

SEQ ID NO: 104180 - protein, 220 aa, Unknown
  Bacterial polypetide isolated from the Sargasso Sea
YTVGLDTDTKAYFLAATMIIAVPTGIKIFSWIATMWGGSISFKTPMVWALGFIFLFTVGGVTGVVLANAGVDTALHDTYYVVAHFHYVLSLGAVFAIFAGFYYWFGKMSGYEYSEWMGQLHFWLTFIGVNLVFFPQHFLGLAGMPRRYADYPDAFADWNYISSIGSYISVVGLVVFFANLIYAFAKKKKAAQNPWGEGATTLEWTVPSPPNFHTFDELPK

SEQ ID NO: 104181 - protein, 293 aa, Unknown
  Bacterial polypetide isolated from the Sargasso Sea
RLLETSFFMPAIISAGGQTDYDGGSPVLFQHLFWFFGHPEVYIVALPAFGLVSEILSVHARKAIFGYRMMVWAIVAIGALSFIVWAHHMYVSGMNPYFGFFFATTTLIIAVPTAIKVYNWVLTLWRGNIKLTVPMLFAIGFIFTFINGGLTGLFLGNVTIDLPLSDTYFVVAHFHMVMAVSPVLVVFGAIYHWYPKITGRMFNDKLGRIHFWFTFVGSYAIYYPMHYLGLEGMPRRYFSYGDTEFISASSADLNVAISIAAIFVAASQIFFFWNMIQSLFKGEKADPNPWGAT

SEQ ID NO: 104182 - protein, 202 aa, Unknown
  Bacterial polypetide isolated from the Sargasso Sea
MSSHAPSFFKRYFFSTNHKDIGVLYLVFAIIAGLIGGIFSLLIRMELAEPGMQILGDDYQRYNVWITAHGLLMIFFMIMPAMVGGFGNYFVPLLIGAPDMAFPRMNNLSFWLLPPSIILLIGSAFVGDGAGPGWTLYAPLSTSGHGGPAVDMAILSMHLAGASSILGAINFITTIFNMRAPGMTMHKMPLFAWSILITAFLL

SEQ ID NO: 104183 - protein, 313 aa, Unknown
  Bacterial polypetide isolated from the Sargasso Sea
LTDGEGGLILLIIKNIGTMYLIFAIIAGLIGSIFSVLMRMELMHPGDGILGGNHHLYNVLVTGHGLIMIFFMVMPAMIGGFGNWFVPIMIGAPDMAFPRMNNISFWLLPVSLILLLASIFVDGPPGQSGVGGGWTIYPPLSSKTGQPGPAMDLAILSLHIAGASSILGAINFITTILNMRTPGMTLHKMPLFAWSILVTAFLLLLSLPVLAGAITMLLTDRNFGTAFFEAQTGGDPVLFQHLFWFFGHPEVYILILPGFGMISHIVSTFSKKPIFGYLGMAYAMVAIGVVGFVVWAHHMYTVGLDTDTKAYFL

SEQ ID NO: 104184 - protein, 75 aa, Unknown
  Bacterial polypetide isolated from the Sargasso Sea
LYGSAFFMATGFHGAHVVIGTIFLTVCLLRLYAGNMTKDKHLGFEFAAWYWHFVDVVWLFLFAFVYVIPHLVLGH

SEQ ID NO: 104185 - protein, 274 aa, Unknown
  Bacterial polypetide isolated from the Sargasso Sea
MADITADQVDSHDHHPTGWRRYLYSTNHKDIGTLYLIFAVIAGLVGTGMSVLMRMELMYPGDGILGGDHNLYNVLVTSHGLLMIFFMVMPAMIGGFGNWIVPLMIGAPDMAFPRMNNISFWLLPASLILLIASLFVEGTSGGAGVGGGWTIYPPLSANLGSPGPAVDLAIFSLHLAGASSILGAINFITTIFNMRAPGMTLHKMPLFVWSILVTAVLLLLSLPVLAGAITMLLTDRNFGTTFFSAAEGGDPVLFQHLFWFFGHPEVYILILPGF

SEQ ID NO: 104186 - protein, 290 aa, Unknown
  Bacterial polypetide isolated from the Sargasso Sea
LLSLPVLAGAITMLLTDRNFGTAFFEAQTGGDPVLFQHLFWFFGHPEVYILILPGFGMISHIVSTFSRKPVFGYLGMAYAMVAIGIVGFVVWAHHMYTVGLSTDTKAYFLAATMIIAVPTGIKIFSWIATMWGGSISFKTPMMWALGFIFMFTVGGVTGVVLANAGVDTAMHDTYYVVAHFHYVLSLGAVFAIFAGFYYWFSKMSGYEYSEWMGQLHFWLTFIGVNLIFFPQHFLGLAGMPRRYADYPDAFAGWNYISSIGSYIAVAGLAVFFVNLIYAFAKKKAAAQNP

SEQ ID NO: 104187 - protein, 310 aa, Unknown
  Bacterial polypetide isolated from the Sargasso Sea
TAGQPGPAMDFAILSLHLAGASSILGAVNFITTILNMRTPGMTLHKMPLFAWSILVTAFLLLLSLPVLAGAITMLLTDRNFGTAFFDAQTGGDPVLFQHLFWFFGHPEVYILILPGFGMISHIVSTFSRKPVFGYLGMAYAMVAIGIVGFVVWAHHMYTVGLSTDTKAYFLAATMIIAVPTGIKIFSWIATMWGGSISFKTPMVWALGFIFLFTVGGVTGVVLANAGVDTAMHDTYYVVAHFHYVLSLGAVFAIFAGFYYWFGKMTGYEYSEWMGQLHFWLTFIGVNLVFFPQHFLGLAGMPRRYADYPD

SEQ ID NO: 104188 - protein, 302 aa, Unknown
  Bacterial polypetide isolated from the Sargasso Sea
VQFLLAFAVPVITVALFLLMFDRNFGSHFFNPEMGADPLLWQHLFWIFGHPEVYILILPSFGIISEVIPTFSRKPIFGYPFMVFSGIAIGFMGWGVWAHHMFVSGIGPISVAAFSLSTMFIAVPTGVKILNWMATMWGGKLLFNTPMLFAAGVVSMFTIGGLSGVTHSVAPADTQQTDTYYIVAHFHYVIFGGALLGIFAGFYFWWPKVFGYMLGEKLGKLNFWLMIIGFNLTFGPMHILGLQGMSRRIHSYSPGFGFEFWNLVETIGSFVIGIGVLLFLINIYASAKKAKGHPPVGPDPWT

SEQ ID NO: 104189 - protein, 306 aa, Unknown
  Bacterial polypetide isolated from the Sargasso Sea
VGGGWTIYPPLSSKAGQPGPAMDLAILSLHLAGASSILGAVNFITTILNMRTPGMTLHKMPLFAWSILVTAFLLLLSLPVLAGAITMLLTDRNFGTAFFEAQTGGDPVLFQHLFWFFGHPEVYILILPGFGMISHIVSTFSRKPVFGYLGMAYAMVAIGIVGFVVWAHHMYTVGLSTDTKAYFLAATMIIAVPTGIKIFSWIATMWGGSISFKTPMMWALGFIFMFTVGGVTGVVLANAGVDTAMHDTYYVVAHFHYVLSLGAVFAIFAGFYYWFSKMSGYEYSEWMGQLHFWLHLLVLLNFLPTA

SEQ ID NO: 104190 - protein, 165 aa, Unknown
  Bacterial polypetide isolated from the Sargasso Sea
LGGVTGVVLANAGVDTALHDTYYVVAHFHYVLSMGALFAIFAGFYYWFSKMSGYEYSEFLGKLHFWLTFIGVNLLFFPQHFLGLAGMPRRYADYPDAFAGWNYVSSIGSYISLVGVGVFLINLLYSFIKKRAAAQNPWGEGATTLEWTVSSPPPFHTFEELPKVK

SEQ ID NO: 104191 - protein, 296 aa, Unknown
  Bacterial polypetide isolated from the Sargasso Sea
ILGAVNFITTILNMRTPGMTLHKMPLFAWSILVTAFLLLLSLPVLAGAITMLLTDRNFGTAFFEAQTGGDPVLFQHLFWFFGHPEVYILILPGFGMISHIVSTFSRKPVFGYLGMAYAMVAIGVVGFVVWAHHMYTVGLSTDTKAYFLAATMIIAVPTGIKIFSWIATMWGGSISFKTPMMWALGFIFMFTVGGVTGVVLANAGVDTAMHDTYYVVAHFHYVLSLGAVFAIFAGFYYWFSKMSGYEYSEWMGQLHFWLTFIGVNLIFFPQHFLGLAGMPRRYADYPDAFAGWNYIH

SEQ ID NO: 104192 - protein, 326 aa, Unknown
  Bacterial polypetide isolated from the Sargasso Sea
GWTLYPPQAILEGTPGSGWGIMLMCISLILFVAGFTMGGLNYLITVLQARTRGMTLMRMPLTVWGIFTATVLAMLAFPALLVGALMMSLDNVLGTSFFMPTILKAGEVLEYGGGSPILFQHLFWFFGHPEVYIVALPAFGIISDLISVHARKNIFGYRMMVWAIVGIGALSFFVWAHHMYVSGMNPWFGFFFATTTLIIAVPTAMKVYNWILTLWRGNIRLNTVMLWCLGFIVTFVNGGITGIFLGNVSVDVPLSDTYFVIAHFHMVMGIAPLMVIMGAVYHWFPLVAGRFLDEKLGKWHFWLTFLGAYSIYFPMHYLGFIGVPRR

SEQ ID NO: 104193 - protein, 136 aa, Unknown
  Bacterial polypetide isolated from the Sargasso Sea
NFAGFYYWFGKMTGYEYSEWMGQLHFWLTFIGVNLVFFPQHFLGLAGMPRRYADYPDAFAGWNYISSIGSYISVIGLVVFFMNLAYAFYKKKAAAQNPWGEGATTLEWTVPSPPNFHTFEELPKFEDEEGVEKSTS

SEQ ID NO: 104194 - protein, 275 aa, Unknown
  Bacterial polypetide isolated from the Sargasso Sea
MLLSLPVLAGAITMLLTDRNFGTNFFVPEGGGDPILFLHLFWFFGHPEVYIMILPAFGIVSQIISTFSKKPVFGYLGMAYAMVAIGVVGFVVWAHHMYTVGLSIDTRAYFTAATMVIAVPTGVKIFSWIATMWGGSITFRIPMLWAIGFIFLFTVGGVTGVVLANAGLDVVLHNTYYVIAHFHYVLSLGAVFGLFAGFYYWFSKMTGYEYNSFLARIHFWLTFIGVNLTFFPMHFLGLAGMPRRYVDYPDAFAGWNFVASISSYISAFCTLVFFY

SEQ ID NO: 104195 - protein, 156 aa, Unknown
  Bacterial polypetide isolated from the Sargasso Sea
DTYYVVAHFHYVLSLGAVFAIFAGFYYWFGKMSGYEYSEWMGQLHFWLTFIGVNLVFFPQHFLGLAGMPRRYADYPDAFADWNYISSIGSYISVVGLVVFFANLIYAFAKKKKAAQNPWGEGATTLEWTVPSPPNFHTFDELPKFEDYEGTEKSSS

SEQ ID NO: 104196 - protein, 178 aa, Unknown
  Bacterial polypetide isolated from the Sargasso Sea
MLFSIAFVALFTIGGFSGLMLAIVPADFQYHDTYFVVAHFHYVLVPGALFGIIAAAYYWLPKWTGNMYDETLGKLHFWLTFISVNVTFFPMHFVGLAGMPRRYPDYALQFADFNALISVGAFMFGLTQLLFLFIVIKTIRSGKQAKPEVWEGAGDLGLEWTLSSPPPYHSFTVQPQVK

SEQ ID NO: 104197 - protein, 284 aa, Unknown
  Bacterial polypetide isolated from the Sargasso Sea
ENQKDRFHERPSQTPLSHGDPSPWPALGAFGALVLALGAILYFHEVPVFGMEDLGVITLIPGFALVILTMVFWWRDVVKESVVQKAHTEPVNDGLRFGMVLFIASEVMFFVAFFWAFFHNATGFSTTTLQWPPANITPLDAWELPFYNTVILLTSGGTVTRAHLFIEEGNNEAAARWIFLTAALGAIFLGLQAFEYVHAEFSLTEGIYPSTFYLATGFHGFHVFVGTVFLIVCGFRAAKGHFKPHKHVGFQSAAWYWHFVDVVWLFLFVWVYWLLALPVRTFSG

SEQ ID NO: 104198 - protein, 264 aa, Unknown
  Bacterial polypetide isolated from the Sargasso Sea
MDLAILSLHIAGASSILGAVNFITTILNMRTPGMTLHKMPLFAWSILVTAFLLLLSLPVLAGAITMLLTDRNFGTAFFDAQTGGDPLLFQHLFWFFGHPEVYILILPGFGMISHIVSTFSKKPVFGYLGMAYAMVAIGIVGFVVWAHHMYTVGLNTDTKAYFLAATMIIAVPTGIKIFSWIATMWGGSISFKTPMMWALGFIFLFTVGGVTGVVLANAGVDTALHDTYYVVAHFHYVLSLGAVFAIFAGFYYWFGKMSGYEYSE

SEQ ID NO: 104199 - protein, 101 aa, Unknown
  Bacterial polypetide isolated from the Sargasso Sea
NGLIATVFLGFIFSCFQAYEYHHATFTLDGGIYGSTFYMSTGFHGFHVIVGTVFLAVCLFRSMRGHSTPQHHFGFEAAAWYWHFVDVVWLFLFAAIYIWGS

SEQ ID NO: 104200 - protein, 166 aa, Unknown
  Bacterial polypetide isolated from the Sargasso Sea
RRSGTGVILANAGIDTVMHDTYYVVAHFHYVLSMGAMFGIFAGIYYWFGKMSGRKYNEYLGKLHFWLFFIGVNVTFFPQHFLGLAGMPRRIPDYPDAYAGWNLVSTYGSYISFAATLVFLFSIIYSLFFGKKEASNPWGEGADTLEWTLSSPPPFHQFETLPKFKG

SEQ ID NO: 104201 - protein, 211 aa, Unknown
  Bacterial polypetide isolated from the Sargasso Sea
IYGAYMWFRDVVIEAEHQGHHTPVVQIHHRYGMTLFIASEVMFFVAWFWAYFDISLFPNEFVGNVWPPKDIETFDPWDIPLINTLVLLLSGTTVTWAHHALLEDDRKGFIQGLTLTVILGFFFTLLQAYEYHHATFTYSGHIYGAVFYMATGFHGFHVIVGTIFLAVCLWRGKLGHFTKDHHFGFEAAAWYWHFVDVVWLFLFAAIYIWGS

SEQ ID NO: 104202 - protein, 162 aa, Unknown
  Bacterial polypetide isolated from the Sargasso Sea
MAYVENVWPSNGPANYGGDFVVMKAAGIPALNTIILLISGLTVTWAHHGLKEGKRNQLILGLIATVLLGFIFVGFQAYEYSHAYNDLNLKMSSGIYGSTFYMLTGFHGFHVTLGAIMLTVILFRCIRGHFTNENHFGFEAVAWYWHFVDVVWLGLFVFVYWL

SEQ ID NO: 104203 - protein, 197 aa, Unknown
  Bacterial polypetide isolated from the Sargasso Sea
VKVFNWVATMWRGSLTFEMPMMFAIAFIVLFTIGGLSGLMLAITPVDFQYHDTYFVVAHFHYVLVTGAVFSIMAAVYYWLPKWTGKMYNTTLAKWHFWCSLVSVNVLFFPMHFVGLAGMPRRIPDYALQFADFNKWISLGGFAFGLSQLIFLALLIKACKKQGEPVSAQVWDGAEGLEWEIPSPAPYHTFETPPLVK

SEQ ID NO: 104204 - protein, 190 aa, Unknown
  Bacterial polypetide isolated from the Sargasso Sea
VATMFRGSITYETPMLFAIAFVVLFTIGGFSGLMLAITPADFQYHDTYFVVAHFHYVLVPGSVFSIMAAVYYWIPKWTGNMYDERLSRLHFWLSFVGVNVTFFPQHWIGLAGMPRRYPDYALQFADWNMVSTAGAFLFGASQILFLFIVLKTVVGGKKATSQVWEGAKGLEWSVASPAPYHTFSTPPKVD

SEQ ID NO: 104205 - protein, 172 aa, Unknown
  Bacterial polypetide isolated from the Sargasso Sea
AFIVLFTMGGLSGLMLAITPVDFQYHDTYFVVAHFHYVLVTGAVFSIMAAVYYWLPKWTGKMYDTTLAKWHFWCSLVSVNVLFFPMHFVGLAGMPRRIPDYALQFADFNKWISLGGFAFGLSQLIFLALLIKACKKQGEPVSAQVWDGAEGLEWEIPSPAPYHTFETPPVVK

SEQ ID NO: 104206 - protein, 313 aa, Unknown
  Bacterial polypetide isolated from the Sargasso Sea
GSGWTLYPPQAILEGTPGSGWGIMLMCISLILFVAGFTMGGLNYLITVLQARTRGMTLMRMPLTVWGIFTATVLAMLAFPALLVGALMMSLDNVLGTSFFMPTILKAGEVLEYGGGSPILFQHLFWFFGHPEVYIVALPAFGIISDLISVHARKNIFGYRMMVWAIVGIGALSFFVWAHHMYVSGMNPWFGFFFATTTLIIAVPTAMKVYNWILTLWRGNIRLNTVMLWCLGFIVTFVNGGITGIFLGNVSVDVPLSDTYFVIAHFHMVMGIAPLMVIMGAVYHWFPLVAGRFLDEKLGKWHFWLTFLGAYSI

SEQ ID NO: 104207 - protein, 160 aa, Unknown
  Bacterial polypetide isolated from the Sargasso Sea
WAFFASSLFPVGGVWPPEGIKTFDPFDLPLINTLILLLSGCTVTWAHHALIENDRSDFLLGLLLTVILGISFTGLQALEYMHAPFGFTEGIYPSVFFMATGFHGFHVIVGTIFLFVCLIRGYLGHFTSTQHFGFEAAAWYWHFVDVVWLFLFICIYMWGA

SEQ ID NO: 104208 - protein, 190 aa, Unknown
  Bacterial polypetide isolated from the Sargasso Sea
TPVVQIHHRYGMTLFIASEVMFFVAWFWAYFDVSLFPNDFVGNVWPPKDIVTFDPWDIPLINTLVLLLSGTTVTWSHHSLLEGDRKGFIQGLVLTVILGAFFTALQAYEYHHATFTFSDHIYGSVFYMATGFHGFHVIVGTIFLAVCLWRGKLGHFTKDHHFGFEAAAWYWHFVDVVWLFLFAAIYIWGS

SEQ ID NO: 104209 - protein, 167 aa, Unknown
  Bacterial polypetide isolated from the Sargasso Sea
MSYADSASHDHHDHKPGFIKRWFFSTNHKDIGTLYIIFAILAGLVGGFFSLLMRAELAAPGLDVVADGQVWNVIITAHGLLMVFFVVMPALIGGFGNWFVPLMIGAPDMAFPRMNNFSFWILVPALVLLVVSATIGTGAGTGWTIYPPLSNKLGHAGPSVDMAIFAL

SEQ ID NO: 104210 - protein, 170 aa, Unknown
  Bacterial polypetide isolated from the Sargasso Sea
MFFVAWFWAYFDISLFPNEFVGNVWPPKDIETFDPWDIPLINTLVLLLSGTTVTWAHHSLLEDDRKGFIQGLTLTVILGFFFTLLQAYEYHHATFTYSGHIYGAVFYMATGFHGFHVIIGTIFLAVCLWRGRLGHFTKDHHFGFEAAAWYWHFVDVVWLFLFAAIYIWGS

SEQ ID NO: 104211 - protein, 298 aa, Unknown
  Bacterial polypetide isolated from the Sargasso Sea
TFVFGTAGAPEGGYLAEEVGWLGNAPNGGWFGYQPNAGFKYSPGTAMDYWAIGLQILGISSLVSAFNFIVTILNMRTQGMRLMRMPVFTWMTFAVAFLLAFSLPIIAIALFYVTFDRQFGTTFFLTEGGGDPVLWQHLFWLFGHPEVYILILPAFGIVSEILPTFSRKPLFGYPAIVFAGFGIAFIGFGVWAHHMFASAISPVAQAGFGISTMIIAVPTGVKIFNWLGTIWGGKLNLKTPMLFALGFIGMFVIGGLSGVTHSVVPADTQQTDTYYIVAHFHYVLFGGAMFGIFAGLYY

SEQ ID NO: 104212 - protein, 63 aa, Unknown
  Bacterial polypetide isolated from the Sargasso Sea
MATGFHGFHVIIGTIFLAVCLWRGKLGHFNKDHHFGFEAAAWYWHFVDVVWLFLFAAIYVWGS

SEQ ID NO: 104213 - protein, 283 aa, Unknown
  Bacterial polypetide isolated from the Sargasso Sea
MTLHKMPLFAWSILVTAFLLLLSLPVLAGAITMLLTDRNFGTAFFEAQTGGDPVLFQHLFWFFGHPEVYILILPGFGMISHIVSTFSKKPVFGYLGMAYAMVAIGVVGFVVWAHHMYTVGLDTDTKAYFLAATMIIAVPTGIKVFSWVATMWGGSISFKTPMLWAIGFIILFTLGGVTGVVLANAGVDTALHDTYYVVAHFHYVLSMGALFAIFAGFYYWFSKMSGYEYSEFLGKLHFWLTFIGVNLLFFPQHFLGLAGMPRRYADYPDAFAGWNYVSSIGSY

SEQ ID NO: 104214 - protein, 295 aa, Unknown
  Bacterial polypetide isolated from the Sargasso Sea
SIFADGPPGQTGVGGGWTIYPPLSSKAGQPGPAMDLAILSLHLAGASSILGAVNFITTILNMRTPGMTLHKMPLFAWSILVTAFLLLLSLPVLAGAITMLLTDRNFGTAFFEAQTGGDPVLFQHLFWFFGHPEVYILILPGFGMISHIVSTFSRKPVFGYLGMAYAMVAIGIVGFVVWAHHMYTVGLSTDTKAYFLAATMIIAVPTGIKIFSWIATMWGGSISFKTPMMWALGFIFMFTVGGVTGVVLANAGVDTAMHDTYYVVAHFHYVLSLGAVFAIFAGFYYWFSKMFWLRI

SEQ ID NO: 104215 - protein, 187 aa, Unknown
  Bacterial polypetide isolated from the Sargasso Sea
WGGSISFKTPMLWAIGFIVLFTLGGVTGVVLANAGVDTALHDTYYVVAHFHYVLSLGAVFAIFAGFYYWFSKMSGYEYSEFLGKLHFWLTFIGVNLIFFPQHFLGLAGMPRRYADYPDAFAGWNYVSSIGSYISLIGVGVFLLNLLYSFIKKRVAAQNPWGEGATTLEWTVSSPPPFHTFEELPKVK

SEQ ID NO: 104216 - protein, 311 aa, Unknown
  Bacterial polypetide isolated from the Sargasso Sea
AYSTNHKDIGTMYLIFAIIAGVIGTAFSVVMRMELMHPGDGILNGNYHLYNVLVTGHGLIMIFFMVMPAMIGGFGNWFVPIMIGAPDMAFPRMNNISFWLLPVSFILLIASIFMDGPPGAKGVGGGWTIYPPLSSKAGQPGPAMDFAILSLHIAGASSILGAVNFITTILNMRTPGMTLHKMPLFAWSILVTAFLLLLSLPVLAGAITMLLTDRNFGTAFFEAQTGGDPTLFQHLFWFFGHPEVYILILPGFGMISHIVSTFSKKPVFGYLGMAYAMVAIGVVGFVVWAHHMYTVGLDTDTKAYFLAATMI

SEQ ID NO: 104217 - protein, 279 aa, Unknown
  Bacterial polypetide isolated from the Sargasso Sea
LIMSIFMDGPPGQTGVGGGWTIYPPLSSTAGQPGPAMDFAILSLHLAGASSILGAVNFITTILNMRTPGMTLHKMPLFAWSILVTAFLLLLSLPVLAGAITMLLTDRNFGTAFFDAQTGGDPVLFQHLFWFFGHPEVYILILPGFGMISHIVSTFSRKPVFGYLGMAYAMVAIGIVGFVVWAHHMYTVGLSTDTKAYFLAATMIIAVPTGIKIFSWIATMWGGSISFKTPMVWALGFIFLFTVGGVTGVVLANAGVDTAMHDTYYVVAHFHYVLSLGAV

SEQ ID NO: 104218 - protein, 267 aa, Unknown
  Bacterial polypetide isolated from the Sargasso Sea
FPAFGIVSHIIETFSRKPIFGYSSMVYAMASIAILSFVVWAHHMFTVGMPLAGQLFFMYSTMLIAIPTGVKVFNWVATMFRGSISFETPMLFSIAFVALFTIGGFSGLMLAIVPADFQYHDTYFVVAHFHYVLVPGALFGIIAGAYYWLPKWTGNMYDEFLGKLHFWLTFISVNVTFFPMHFVGLAGMPRRYPDYALQFADFNALISVGAFMFGLTQLLFLFIVIKSIRTGKKAKPEVWEGAGDLGLEWTLSSPPPYHSFTVQPQVK

SEQ ID NO: 104219 - protein, 207 aa, Unknown
  Bacterial polypetide isolated from the Sargasso Sea
MSATTASHEHHHNPTGWKRWAYSTNHKDIGTMYLIFAIIAGIIGTAFSVLMRMELAHPGDGILGGNYHLYNVLVTGHGLIMIFFMVMPAMIGGFGNWFVPIMIGAPDMAFPRMNNISFWLLPVALILLIASIFVDGPPGAQGVGGGWTIYPPLSSKTGQPGPAMDLAILSLHVAGASSILGAINFITTILNMRTPGMTLHKMPLFSW

SEQ ID NO: 104220 - protein, 288 aa, Unknown
  Bacterial polypetide isolated from the Sargasso Sea
MSDHAPSFFKRYFFSTNHKDIGVLYLYFAVIAGLIGGIFSLLIRMELAEPGMQILGDDYQQYNVWITSHGLLMIFFMIMPAMVGGFGNYFVPLLIGAPDMAFPRMNNLSFWLLVPSIILLVGSGFVDGGAGPGWTLYAPLSTSGHGGPAVDMVILSMHLAGASSILGAINFITTIFNMRAPGMTLHKMPLFVWSILITAFLLLLSLPVLAGAITMMLTDRNFGTAFFNPEAGGDPVLFQHLFWFFGHPEVYILILPGFGIVSHVVSTFSKKPIFGYLGMAYAMAAIGV

SEQ ID NO: 104221 - protein, 261 aa, Unknown
  Bacterial polypetide isolated from the Sargasso Sea
MYTQTASHDHHTPTGWKRWAYSTNHKDIGTMYLIFAIVAGVIGTAFSVLMRMELMHPGDGILGGNYHLYNVLVTGHGLIMIFFMVMPAMIGGFGNWFVPIMIGAPDMAFPRMNNISFWLLPVSLTLLILSIFADGPPGQTGVGGGWTIYPPLSSKAGQPGPAMDLAILSLHLAGASSILGAVNFITTILNMRTPGMTLHKMPLFAWSILVTAFLLLLSLPVLAGAITMLLTDRNFGTAFFEARQGVIQSLSTFILVFWSSR

SEQ ID NO: 104222 - protein, 290 aa, Unknown
  Bacterial polypetide isolated from the Sargasso Sea
LFWFFGHPEVYILILPGFGMISHIVSTFSKKPVFGYLGMAYAMVAIGIVGFVVWAHHMYTVGLDTDTKAYFLAATMIIAVPTGIKIFSWIATMWGGSISFKTPMVWALGFIFLFTVGGVTGVVLANAGVDTALHDTYYVVAHFHYVLSLGAVFAIFAGFYYWFGKMSGYEYSEWMGQLHFWLTFIGVNLVFFPQHFLGLAGMPRRYADYPDAFADWNYISSIGSYISVVGLVVFFANLIYAFAKKKKAAQNPWGEGATTLEWTVPSPPNFHTFDELPKFEDYEGTEKSSS

SEQ ID NO: 104223 - protein, 103 aa, Unknown
  Bacterial polypetide isolated from the Sargasso Sea
ISHVVSTFSRKPVFGYLRMAYAMVAIGVVGFVVWAHHMYTVGLDVDTKAYFTAATMVIAVPTGIKIFSWIATMWGGSIRFTTPMLFAIGFIFLFTLGGVTGVV

SEQ ID NO: 104224 - protein, 149 aa, Unknown
  Bacterial polypetide isolated from the Sargasso Sea
MSGDQKHQFHLVEPSPWPAIGSAAGFTLALGGAMYMHDYLYSGYILIAGFLMLLTVMFFWWRDVIREAEFQGHHTPIVQIGMRYGMILFISSEVMFFVAFFWAFFDSSLYPDTGVWPPADIVTFDPFDLPLINTMILLLSGCTVTWSHH

SEQ ID NO: 104225 - protein, 119 aa, Unknown
  Bacterial polypetide isolated from the Sargasso Sea
TVTLSHHALLEDDRKSFINGLILTVILGVCFTALQAYEYHHATFAFSDHIYGSVFYMATGFHGFHVIVGTIFLAVCLWRGKLGHFNKDHHFGFEAAAWYWHFVDVVWLFLFAAIYIWGS

SEQ ID NO: 104226 - protein, 211 aa, Unknown
  Bacterial polypetide isolated from the Sargasso Sea
MSAEKPKHDYHLVDPSPWPIYVSFATLVLAFGAVYYFHSKALWLLLIGFALVVYGAFMWWRDVIEEAEHQGHHTPVVQIGHRYGMTLFIASEVMFFVAWFWAFFNASLFPPDSIGGIWPPADIKTFDPWDIPLINTLILLLSGTTVTWAHHAMLENDRKGLVNGLIATVFLGFIFSCFQAYEYHHATFTLDGGIYGSTFYMSTGFHGFHVI

SEQ ID NO: 104227 - protein, 275 aa, Unknown
  Bacterial polypetide isolated from the Sargasso Sea
TDRNFGTAFFDAQTGGDPVLFQHLFWFFGHPEVYILILPGFGMISHIVSTFSRKPVFGYLGMAYAMVAIGIVGFVVWAHHMYTVGLSTDTKAYFLAATMIIAVPTGIKIFSWIATMWGGSISFKTPMVWALGFIFLFTVGGVTGVVLANAGVDTAMHDTYYVVAHFHYVLSLGAVFAIFAGFYYWFGKMTGYEYSEWMGQLHFWLTFIGVNLVFFPQHFLGLAGMPRRYADYPDAFAGWNYISSIGSYISVIGLVVFFINLAYAFYKKKAAAQNP

SEQ ID NO: 104228 - protein, 282 aa, Unknown
  Bacterial polypetide isolated from the Sargasso Sea
NMYTKTASHDDHHTPTGWKRWAYSTNHKDIGTMYLIFAIVAGVIGTAFSVLMRMELMHPGDGILGGNYHLYNVLVTGHGLIMIFFMVMPAMIGGFGNWFVPIMIGAPDMAFPRMNNISFWLLPVSLTLLILSIFADGPPGQTGVGGGWTIYPPLSSKAGQPGPAMDLAILSLHLAGASSILGAVNFITTILNMRTPGMTLHKMPLFAWSILVTAFLLLLSLPVLAGAITMLLTDRNFGTAFFEAQTGGDPVLFQHLFWFFGHPEVYILILPGFGMISHIVST

SEQ ID NO: 104229 - protein, 283 aa, Unknown
  Bacterial polypetide isolated from the Sargasso Sea
IIGGIMSLIMRTELAAPGDGILNGDYQMYNVLTTAHGLIMIFFMIMPAMIGGFGNWFVPIMIGAPDMAFPRMNNISFWLLVPAFILLMASPFVQGGAGTGWTIYPPLSSNLGHSGPAVDMAILSLHLAGASSILGAINFITTIFNMRTPEMTLHRMPLFVWSILVTVFLLVLSLPVLAGAITMLLTDRNFGTAFFAPEGGGDPILFQHLFWFFGHPEVYILILPAFGIISHVVSTFSRKPVFGYLGMAYAMVAIGVVGFVVWAHHMYTVGLDVDTKAYFTAAT

SEQ ID NO: 104230 - protein, 305 aa, Unknown
  Bacterial polypetide isolated from the Sargasso Sea
GITRWVYTTNHKDIGTLYLWFSFLMLFLGGAMAMVIRAELFEPGSQIVSPEFYNQMLTNHGLIMVFGAVMPAFVGLANWIIPMQIGAPDMALPRMNNLSFWILPVAFGILISTFFMEGGGPNFGWTFYAPLSTTYAPPTVTFFIFAVHIMGASSIMGSINIITTILNMRAPGMTFMKMPLFTWTWLITAYLLIAVMPVLAGAVTMMLMDIHFGTSFFNAAGGGDPVLFQHIFWFFGHPEVYIMILPAFGIVSHIIETFSRKPIFGYTSMVYAIASIAILSFIVWAHHMFTVGMPIAGELFFMYTT

SEQ ID NO: 104231 - protein, 166 aa, Unknown
  Bacterial polypetide isolated from the Sargasso Sea
AWFWAFFNASLFPTEAIGKIWPPADIKTFDPWDIPLINTLILLLSGTTVTWAHHAMLENDRKGLVNGLIATVFLGFIFSCFQAYEYHHATFTISQNIYGSTFYMATGFHGFHVIIGTIFLAVCLYRSMKGHFKVEHHFGFEAAAWYWHFVDVVWLFLFAAIYIWGS

SEQ ID NO: 104232 - protein, 101 aa, Unknown
  Bacterial polypetide isolated from the Sargasso Sea
QGLTATVVLGFLFTLLQAYEYHHATFDYSGHIYGAVFYMATGFHGFHVIVGTIFLAVCLWRGKLGHFTKDHHFGFEAAAWYWHFVDVVWLFLFAAIYIWGS

SEQ ID NO: 104233 - protein, 244 aa, Unknown
  Bacterial polypetide isolated from the Sargasso Sea
MATQKKHDFHLVDPSPWPIFTSFASLILAFGAVYYFHTKTLWLLLVGSALLIYGSFMWFRDVIDEAEKQGHHTTVVQIGHRYGMTLFIASEVMFFVAWFWAFFNASLFPTEAVGKIWPPADIQTFDPWDIPLINTLILLLSGTTVTWAHHAMLENDRKGLVNGLIATVFLGFIFSCFQAYEYHHATFTISQNIYGSTFYMATGFHGFHVIIGTIFLAVCLYRSMKGHFKPDHHFGFEAAAWYWH

SEQ ID NO: 104234 - protein, 144 aa, Unknown
  Bacterial polypetide isolated from the Sargasso Sea
IKTFDPLDVPFLNTLILLMSGTTCTWAHHAVREGHRDQAIQALWMTVGLGLFFTFMQGVEYYEAALHYFSFTDGIYPSVFYMATGFHGFHVMVGTAFLAVCLFRVYKNHFTPDRHFGLEAAAWYWHFVDVVWLFLFVCVYVWGG

SEQ ID NO: 104235 - protein, 254 aa, Unknown
  Bacterial polypetide isolated from the Sargasso Sea
MHKLGGDPVLFQHLFWFFGHPEVYILILPGFGMISHIVSTFSRKPVFGYLGMAYAMVAIGIVGFVVWAHHMYTVGLSTDTKAYFLAATMIIAVPTGIKIFSWIATMWGGSISFKTPMVWALGFIFLFTVGGVTGVVLANAGVDTAMHDTYYVVAHFHYVLSLGAVFAIFAGFYYWFGKMTGYEYSEWMGQLHFWLTFIGVNLVFFPQHFLGLAGMPRRYADYPDAFAGWNYISSIGSYISVIGLVVFFINLAYA

SEQ ID NO: 104236 - protein, 102 aa, Unknown
  Bacterial polypetide isolated from the Sargasso Sea
MNDHHDHKPGFFTRWFFSTNHKDIGTLYLIYAIIAGVVGGALSVIMRMELSEPGMQFVADGQMWNVIISAHGLLMIFFVVMPALIGGFGNWFIPLMIGAPDM

SEQ ID NO: 104237 - protein, 247 aa, Unknown
  Bacterial polypetide isolated from the Sargasso Sea
PWPIYVSFSTLVLAFGAFYYFHSKALWLLLVGFALVIYGSFMWWRDVIEEAEFQGHHTQVVQIGHRYGMVLFIASEVMFFVAWFWAYFNASLFPTEAVGATWPPPDIKTFDPWDIPLINTLILLLSGTTVTWAHHAMLENDRKALVNGLVLTVFLGFIFTCFQAYEYHHATFTIDGNIYGSTFYMATGFHGFHVIVGTIFLAVCLFRSMRGHSNSEHHFGFEAAAWYWHFVDVVWLFLFAAIYIWGS

SEQ ID NO: 104238 - protein, 228 aa, Unknown
  Bacterial polypetide isolated from the Sargasso Sea
LLPVSLTLLILSIFVDGPPGQTGVGGGWTIYPPLSSKAGQPGPAMDLAILSLHLAGASSILGAVNFITTILNMRTPGMTLHKMPLFAWSILVTAFLLLLSLPVLAGAITMLLTDRNFGTAFFEAQTGGDPVLFQHLFWFFGHPEVYILILPGFGMISHIVSTFSRKPVFGYLGMAYAMVAIGIVGFVVWAHHMYTVGLSTDTKAYFLAATMIIAVPTGIKIFSWIATM

SEQ ID NO: 104239 - protein, 272 aa, Unknown
  Bacterial polypetide isolated from the Sargasso Sea
EVYILILPGFGMISHIVSTFSRKPVFGYLGMAYAMVAIGVVGFVVWAHHMYTVGLDTDTKAYFLAATMIIAVPTGIKIFSWIATMWGGSISFQTPMLWAIGFIFLFTLGGVTGVVLANAGVDTALHDTYYVVAHFHYVLSMGAVYAIFAGFYYWFSKMTGYEYSEFLGKLHFWLTFIGVNLIFFPQHFLGLAGMPRRYADYPDAFAGWNYISSIGSYISIIGLAVFLLNLLYAFMKKKKAEPNPWGEGATTLEWTVSSPPPFHTFEELPKVK

SEQ ID NO: 104240 - protein, 307 aa, Unknown
  Bacterial polypetide isolated from the Sargasso Sea
FPRMNNISFWLLPVALILLLVSIFVDGPPGAKGVGGGWTIYPPLSSKTGQPGPAMDLAILSLHVAGASSILGAINFITTILNMRTPGMTLHKMPLFSWSILVTAFLLLLSLPVLAGAITMLLTDRNFGTAFFEAQTGGDPVLFQHLFWFFGHPEVYILILPGFGMISHIVSTFSRKPVFGYLGMAYAMVAIGVVGFVVWAHHMYTVGLDTDTKAYFLAATMIIAVPTGIKIFSWIATMWGGSISFQTPMLWAIGFIFLFTLGGVTGVVLANAGVDTALHDTYYVVAHFHYVLSMGAVYAIFAGFYYW

SEQ ID NO: 104241 - protein, 170 aa, Unknown
  Bacterial polypetide isolated from the Sargasso Sea
MSTGATHHDHHTPTGWKRWAYSTNHKDIGTMYLIFAIIAGLIGTAFSVLMRMELMHPGDGILGGDYHLYNVLVTGHGLIMIFFMVMPAMIGGFGNWFVPIMIGAPDMAFPRMNNISFWLLPVAFILLLSSIFVDGPPGAQGVGGGWTIYPPLSSQNRSARSCNGFSNFKL

SEQ ID NO: 104242 - protein, 215 aa, Unknown
  Bacterial polypetide isolated from the Sargasso Sea
LALLIYAAYMWFRDVVIEAEHQGHHTPVVQIHHRYGMTLFIASEVMFFVAWFWAYFDVSLFPNEFVGNVWPPQDIETFDPWDIPLINTLVLLLSGTTVTWAHHSLLEDDRKGFIQGLTATVVLGFFFTLLQAYEYHHATFDYSGHIYGAVFYMATGFHGFHVIVGTIFLAVCLWRGRLGHFTKEHHFGFEAAAWYWHFVDVVWLFLFAAIYVWGS

SEQ ID NO: 104243 - protein, 237 aa, Unknown
  Bacterial polypetide isolated from the Sargasso Sea
MAAIGVVGFAVWAHHMYTTGLDVDTRAYFLAATMVIAVPTGIKIFSWIATMWGGSIEFKTPMLFAIAMIFLFTLGGVTGVVLANTGIDVALHDTYYVVAHFHYVMSMGALFSIYSGFYYWFSKMSGIEYSEILGKIHFWLTFIGVNITFFPMHFSGLAGMPRRIPDYPDAFAGWNYVSSIGAYISVFAAFFFVFVILEAYMRSRKAQKNPWGKGATTFEWQLSSPPPFHSFDDLPKV

SEQ ID NO: 104244 - protein, 315 aa, Unknown
  Bacterial polypetide isolated from the Sargasso Sea
MAFPYVNMLSYWAFVVAVLVLLASFFVPGGPTGAGWTLYPPQAITAGTPGYNGGIILMLISLILFVAGFTMGGLNYIITVLQLRARGMTLMRMPLTIWGIFTATVLAMFAFPALLVGCLMMTLDSLLGTSFFMPAMVSLGEKLTHEGGSPILFQHLFWFFGHPEVYIVALPAFGIVSDLLSVHSRKTIFGYRMMVWAIVGIGALSFFVWAHHMYVSGMNPWFGFFFATTTLIIAVPTAIKVYNWILTLWRGNIQLSLPMLFSLGFIVTFLNGGLTGLFLGNVTVDVPLSDTYFVVAHFHMVMGIAPNTCYLRSYL

SEQ ID NO: 104245 - protein, 312 aa, Unknown
  Bacterial polypetide isolated from the Sargasso Sea
MADITADQIDSHDHHPTGWRRYLYSTNHKDIGTLYLIFAVIAGLVGTGMSVLMRMELMYPGDGILGGDHNLYNVLVTSHGLLMIFFMVMPAMIGGFGNWIVPLMIGAPDMAFPRMNNISFWLLPASLILLIASLFVEGTSGGPGVGGGWTIYPPLSANLGSPGPAVDLAIFSLHLAGASSILGAINFITTIFNMRAPGMTLHKMPLFVWSILVTAVLLLLSLPVLAGAITMLLTDRNFGTAFFSAAEGGDPVLFQHLFWFFGHPEVYILILPGFGIVSHVVATFSKKPVFGYLGMAYAMVSIGFLGFPLFGH

SEQ ID NO: 104246 - protein, 246 aa, Unknown
  Bacterial polypetide isolated from the Sargasso Sea
GFVMLFGAVLWMSPQVENNQPWIFLIGFVGVLYVMFGWWSDVVNEGETGDHTPVVRIGLRYGFIMFIMSEVMFFAAWFWSFFKHAMYPMGPQSPAVDGVWPPAGIETFDPWHLPLINTLILLCSGAAATWAHHALVHENNREDMKWGLIIAIALGAIFTVFQAYEYSHAAFGFSGNIYGANFFMATGFHGAHVIIGTIFLFVCLMRVMRGHFTPEQHIGFEAAAWYWHFVDVVWLFLFAAVYIWGG

SEQ ID NO: 104247 - protein, 255 aa, Unknown
  Bacterial polypetide isolated from the Sargasso Sea
ILPAFGIVSQVISTFSRKPIFGYLGMVYAMVSIGFIGFIVWAHHMFTVGMSADLRAYFMLATIIIAVPTGIKIFSWIATMWGGSLTFETPMLFSIGFVFLFTLGGVTGVILANAGIDTVMHDTYYVVAHFHYVLSMGAMFGIFAGIYYWFGKMTGRQYNEFFGKLHFWLFFIGVNITFFPQHFLGLAGMPRRIPDYPDAYAGWNLVSSYGSYLSFGATLIFFFAIVYALFFGKKAEANPWGEGADTLEWTLSSPP

SEQ ID NO: 104248 - protein, 300 aa, Unknown
  Bacterial polypetide isolated from the Sargasso Sea
MITAFLLIAVMPVLAGAVTMVLTDKFFGTSFFEAAGGGDPVMFQHIFWFFGHPEVYIMILPSFGIISAIVPAFSRKKLFGYSSMVYATASIAILSFLVWAHHMFTTGMPVFAELFFMYCTMLIAVPTGVKVFNWVATMWRGSLSFETPMLFAVAFIILFTIGGFSGLMLAITPADFQYHDTYFVVAHFHYVLVTGAIFSIMAAAYYWLPKWTGHMYSEKLGQWHFWCSVISVNVLFFPMHFLGLAGMPRRIPDYSIQFADVNQIVSIGGFAFGLSQLIFLVLVIKCIRGGEKAPAKPWEG

SEQ ID NO: 104249 - protein, 98 aa, Unknown
  Bacterial polypetide isolated from the Sargasso Sea
TFIGVNLIFFPQHFLGLAGMPRRYADYPDAFAGWNYISSIGSYISIIGVGVFLINLLYSFIKKPSASKNPWGEGATTLEWTVSSPPPFHTFEELPKIK

SEQ ID NO: 104250 - protein, 210 aa, Unknown
  Bacterial polypetide isolated from the Sargasso Sea
MSSNNHSYHLVEPSPWPAVGAAAGFVLALGGAMYMHEYEYGGITSLVGFGLVFLTMFYWWRDIVREGEFQGHHSPIVQIGLRYGMMLFIASEVMFFVAFFWAFFASSLFPVGGVWPPEGIKTFDPFDLPLINTLILLLSGCTVTWAHHALIENDRSDFLLGLLLTVILGISFTGLQALEYMHAPFGFTEGIYPSVFFMATGFHGFHVIVG

SEQ ID NO: 104251 - protein, 121 aa, Unknown
  Bacterial polypetide isolated from the Sargasso Sea
YYWFSKMTGYEYNETLGQWHFWITFVGVNLTFFPMHFLGLAGMPRRYVDYPDAFAGWNMVASIGSYISTIGVIVFFVVIFEAFRSKRSAENNPWGDGGNTIEWTVSSPPPFHTFDELPKVN

SEQ ID NO: 104252 - protein, 31 aa, Unknown
  Bacterial polypetide isolated from the Sargasso Sea
HHFGFEAAAWYWHFVDVVWLFLFAAIYIWGS

SEQ ID NO: 104253 - protein, 141 aa, Unknown
  Bacterial polypetide isolated from the Sargasso Sea
FDPLDVPFLNTLILLMSGTTCTWAHHAVREGHRDQAIQALWCTVGLGIFFSFMQGVEYYEAAHHYFSFTDGIYPSVFYLATGFHGFHVIVGTAFLSVCLYRVYKNHFTPDRHFGLEAAAWYWHFVDVVWLFLFVCVYVWGA

SEQ ID NO: 104254 - protein, 290 aa, Unknown
  Bacterial polypetide isolated from the Sargasso Sea
CREILSVISIKSLYIVLKMQKTFFILSTLILLPSKVFADQPRDWQLGFQDAASQSMYEIVSFHNSILLPIIIAISVFVLFLMAYACFRFRESRNPNPSKTTHNVAVEVLWTLIPCLILIVMAVPSFKILYSQDTIPKADVTIKAIGYQWYWGYEYPDENIIFDSYMIEDKDLLPGQPRLLAVDNEVIVPVNKVVKVLITANDVLHAWALPAFGVKRDAMPGRVNETWFKADRVGTFYGQCSELCGIKHAFMPITVKVVTDEEYQEWLVEAKIKFAKKEIANQNNNLMASK

SEQ ID NO: 104255 - protein, 182 aa, Unknown
  Bacterial polypetide isolated from the Sargasso Sea
GFIFLFTVGGVTGVVLANAGVDTAMHDTYYVVAHFHYVLSLGAVFAIFAGFYYWFGKMTGYEYSEWMGQLHFWLTFIGVNLVFFPQHFLGLAGMPRRYADYPDAFAGWNYISSIGSYISVIGLVVFFINLAYAFYKKKAAAQNPWGEGATTLEWTVPSPPNFHTFEELPKFEDEEGVEKSTS

SEQ ID NO: 104256 - protein, 285 aa, Unknown
  Bacterial polypetide isolated from the Sargasso Sea
HLFWFFGHPEVYIMILPAFGIVSQVISTFSRKPIFGYLGMVYAMVSIGFIGFIVWAHHMFTVGLSADLRAYFMLATIIIAVPTGIKIFSWIATMWGGSLTFETPMLFSIGFVFLFTLGGVTGVILANAGIDTVMHDTYYVVAHFHYVLSMGAMFGIFAGIYYWFGKMTGRQYNEFFGKLHFWLFFIGVNVTFFPQHFLGLAGMPRRIPDYPDAYAGWNLVSSYGSYLSFGATLIFFFAIVYALFFGKKAEANPWGEGADTLEWTLSSPPPFHQLKLYQNLKNKFG

SEQ ID NO: 104257 - protein, 243 aa, Unknown
  Bacterial polypetide isolated from the Sargasso Sea
MANTVEAHHDDHDHHMPGFFTRWFCSTNHKDIGTLYILLSFIAAIIGGAMSWYIRLELAAPGIQYIDDFQFYNVLVTAHGFLMVFFVVMPAMIGGFGNWFVPLMIGAPDMAFPRMNNISLWLLVAAFILLLLSAVIGDGPGTGWTVYPPLSSQDYQSGPSVDLGILSLHLAGASSILGAINFIVTIFNMRAPGMTIHRMPLFVWAILITAFLLLLALPVLAGALTMLLTDRNFGTAFFVPGQG

SEQ ID NO: 104258 - protein, 262 aa, Unknown
  Bacterial polypetide isolated from the Sargasso Sea
MSAEKKHDYHLVDPSPWPIYTSFACLVLAIGAIFYMHNGISWGMYLGLALLIYGAYMWFRDVVIEAEHQGHHTPVVQIHHRYGMTLFIASEVMFFVAWFWAYFDISLFPNEFVGNVWPPKDIETFDPWDIPLINTLVLLLSGTTVTWAHHSLLEDDRKGFIQGLTLTVILGFFFTLLQAYEYHHATFTYSGHIYGAVFYMATGFHGFHVIIGTIFLAVCLWRGRLGHFTKDHHFGFEAAAWYWHFVDVVWLFLFAAIYIWGS

SEQ ID NO: 104259 - protein, 243 aa, Unknown
  Bacterial polypetide isolated from the Sargasso Sea
FGGCSFFSSENPWMFIAGFVGVLFVMYVWWSDTVKENQVGDHTPVVLIGLRYGFILFIMSEVMFFLAWFWSFFKHAMYPMGDMSPLQDGQFPPAGIEVFDPWHLPLINTLILLCSGAAATWAHHAIAHEEDRKSMVQGLVIAVGLGVLFTIFQAYEYQHAAFGFSGNIYGANFFMATGFHGFHVIVGTIFLAICMLRAMRGHFTKDQHLGFEAAAWYWHFVDVVWLFLFAAIYVWGSVGATIH

SEQ ID NO: 104260 - protein, 285 aa, Unknown
  Bacterial polypetide isolated from the Sargasso Sea
YSTNHKDIGTMYIIFSILAALIGGGFSIFMRMELMHPGVQYMADGHVWNVFATAHGLIMVFFVVMPGLIGGFGNWFVPIMIGAPDMAFPRMNNISFWLLPPAFILLLLSAVMDGGAGVGWTIYPPMSNSAGTPGMSMDLAILSLHLAGASSILGAANFITTILNMRAPGLTMHKMALFAWAMLITAFLLLLSLPVLAGAITMLLTDRNFGTTFFIPEGGGDPILFLHLFWFFGHPEVYIMILPAFGIVSHIISTFSKKPIFGYLGMAYAMVAIGVIGFVVWAHHM

SEQ ID NO: 104261 - protein, 250 aa, Unknown
  Bacterial polypetide isolated from the Sargasso Sea
YAMVAIGIVGFVVWAHHMYTVGLSTDTKAYFLAATMIIAVPTGIKIFSWIATMWGGSISFKTPMMWALGFIFMFTVGGVTGVVLANAGVDTAMHDTYYVVAHFHYVLSLGAVFAIFAGFYYWFSKMSGYEYSEWMGQLHFWLTFIGVNLIFFPQHFLGLAGMPRRYADYPDAFAGWNYISSIGSYVAVAGLAVFFANLIYAFAKKRAAAQNPWGEGATTLEWTVPSPPNFHTFEELPKFVDDQETEKSHS

SEQ ID NO: 104262 - protein, 301 aa, Unknown
  Bacterial polypetide isolated from the Sargasso Sea
AYSPITKIFGTMYLIFAIIAGVIGTAFSVLMRMELMHPGDGILGGNYHLYNVLVTGHGLIMIFFMVMPAMIGGFGNWFVPIMIGAPDMAFPRMNNISFWLLPTSFILLIMSIFMEGPPGQTGVGGGWTIYPPLSSSAGQPGPAMDFAILSLHLAGASSILGAVNFITTILNMRTPGMTLHKMPLFAWSILVTAFLLLLSLPVLAGAITMLLTDRNFGTAFFDAQTGGDPVLFQHLFWFFGHPEVYILILPGFGMISHIVSTFSKKPVFGYLGMAYAMVAIGIVGFVVWAHHMYTVGFKHRY

SEQ ID NO: 104263 - protein, 272 aa, Unknown
  Bacterial polypetide isolated from the Sargasso Sea
MYTQTSSPDDHHTPTGWKRWAYSTNHKDIGTMYLIFAIVAGVIGTAFSVLMRMELMHPGDGILGGNYHLYNVLVTGHGLIMIFFMVMPAMIGGFGNWFVPIMIGAPDMAFPRMNNISFWLLPVSLTLLILSIFADGPPGAQGVGGGWTIYPPLSSKAGQPGPAMDLAILSLHLAGASSILGAVNFITTILNMRTPGMTLHKMPLFAWSILVTAFLLLLSLPVLAGAITMLLTDRNFGTAFFEAQTGGDPVLFQHLFWFFGHPEVYILILPGF

SEQ ID NO: 104264 - protein, 270 aa, Unknown
  Bacterial polypetide isolated from the Sargasso Sea
MYTQTASHDDHHTPTGWKRWAYSTNHKDIGTMYLIFAIVAGVIGTAFSVLMRMELMHPGDGILGGNYHLYNVLVTGHGLIMIFFMVMPAMIGGFGNWFVPIMIGAPDMAFPRMNNISFWLLPVSLTLLILSIFADGPPGAQGVGGGWTIYPPLSSKAGQPGPAMDLAILSLHLAGASSILGAVNFITTILNMRTPGMTLHKMPLFAWSILVTAFLLLLSLPVLAGAITMLLTDRNFGTAFFEAQTGGDPVLFQHLFWFFGHPEVYILILP

SEQ ID NO: 104265 - protein, 140 aa, Unknown
  Bacterial polypetide isolated from the Sargasso Sea
MKAAGIPALNTIILLISGLTVTWAHHGLKEGKRNQLILGLIATVLLGFIFVGFQAYEYSHAYNDLNLKMSSGIYGSTFYMLTGFHGFHVTLGAIMLTVILFRCIKGHFTNQNHFGFEAVAWYWHFVDVVWLGLFVFVYWL

SEQ ID NO: 104266 - protein, 282 aa, Unknown
  Bacterial polypetide isolated from the Sargasso Sea
NISFWLLPVSLTLLILSIFVDGPPGQTGVGGGWTIYPPLSSKAGQPGPAMDLAILSLHLAGASSILGAVNFITTILNMRTPGMTLHKMPLFAWSILVTAFLLLLSLPVLAGAITMLLTDRNFGTAFFEAQTGGDPVLFQHLFWFFGHPEVYILILPGFGMISHIVSTFSRKPVFGYLGMAYAMVAIGIVGFVVWAHHMYTVGLSTDTKAYFLAATMIIAVPTGIKIFSWIATMWGGSISFKTPMMWALGFIFMFTVGGVTGVVLANAGVDTAMHDTYLCVAH

SEQ ID NO: 104267 - protein, 213 aa, Unknown
  Bacterial polypetide isolated from the Sargasso Sea
MSSKEKKHGFHLVDPSPWPIYVSFATLILAFGAVYYFHSKALWLLLVGFALVIYGAFMWWRDVVEEAEFQGHHTPVVQIGHRYGMVLFIASEVMFFVAWFWAYFNASLFPTEAVGATWPPPDIQTFDPWDIPLINTLILLLSGTTVTWAHHAMLENDRKGLVNGLVLTVFLGFIFTCFQAYEYHHASFTIDGNIYGSTFYMATGFHGFHVIVG

SEQ ID NO: 104268 - protein, 293 aa, Unknown
  Bacterial polypetide isolated from the Sargasso Sea
ALLVSSIMMTLDKLLGTSFFMPTILKAGEVLEYGGGSPILFQHLFWFFGHPEVYIVALPAFGIVSDLISVHARKNIFGYRMMVWAIVGIGALSFFVWAHHMYVSGMNPWFGFFFASTTLIIAVPTAMKVYNWILTLWRGNIRINTVMLWCLGFIVTFVNGGITGIFLGNVSVDVPLSDTYFVVAHFHMVMGIAPLMVIMGAIYHWFPLVAGKMLDEKLGKWHFWTTFLGAYSIYFPMHYLGFIGVPRRYYEMYDSPYMTSGVGLNEFISTAAFIVGAAQLILVFNIVKTRKQA

SEQ ID NO: 104269 - protein, 262 aa, Unknown
  Bacterial polypetide isolated from the Sargasso Sea
SVYILYSGFACLFLTMFFWFRQVINEHLAGLDSNQLKQSYVYGMAWFIFSEVMFFAAFFGALFYVRTLAVPWLAGEGSKGAAITAIELWPAFESSWPVMTTPDQGNEYDLADKSMAWPGWSKALLWLPLWNTIVLLSSSWTVHLAHLGLKKGNRKKFNVYLGVTVLLALIFVGLQALEYYEAYAHYGLKLNSGIYGSTFFMLTGFHGFHVMMGGFMLAIMLARSVFAGHFEQHDHFGFEAASWYWHFVDVVWLMLFIFVYIL

SEQ ID NO: 104270 - protein, 257 aa, Unknown
  Bacterial polypetide isolated from the Sargasso Sea
LILYTGLACFLATLFFWFRQVVKENNAGLESAQLSQSFVYGMAWFIFSEVMFFAAFFGALFYVRSFAVPWLGGEGEKGLANMLWQDFEATWPLINTPDGGKAFVIAAKSMSFPGWENISHWLPLYNTIVLLSSSVTVHFAHLGLKKGNKKTFNIWLGITVLLALIFVGLQAAEYYEAYEHFGLTLNSGIYGSTFFMLTGFHGFHVMLGGLMLAVMLIRSVFYGHFNEHKHFGFEAASWYWHFVDVVWVMLFLFVYIL

SEQ ID NO: 104271 - protein, 45 aa, Unknown
  Bacterial polypetide isolated from the Sargasso Sea
CLLRLNANQFSTHQHFGFEAAAWYWHFVDVVWLFLFVAIYWWGGL

SEQ ID NO: 104272 - protein, 261 aa, Unknown
  Bacterial polypetide isolated from the Sargasso Sea
TLLILSIFADGPPGQTGVGGGWTIYPPLSSKAGQPGPAMDLAILSLHLAGASSILGAVNFITTILNMRTPGMTLHKMPLFAWSILVTAFLLLLSLPVLAGAITMLLTDRNFGTAFFEAQTGGDPVLFQHLFWFFGHPEVYILILPGFGMISHIVSTFSRKPVFGYLGMAYAMVAIGIVGFVVWAHHMYTVGLSTDTKAYFLAATMIIAVPTGIKIFSWIATMWGGSISFKTPMMWALGFIFMFTVGGVTGVVLANAGVDTA

SEQ ID NO: 104273 - protein, 232 aa, Unknown
  Bacterial polypetide isolated from the Sargasso Sea
MYTQTASHDDHTPTGWKRWAYSTNHKDIGTMYLIFAIIAGVIGTAFSVLMRMELMHPGDGILGGNYHLYNVLVTGHGLIMIFFMVMPAMIGGFGNWFVPIMIGAPDMAFPRMNNISFWLLPTSFILLIMSIFMDGPPGQTGVGGGWTIYPPLSSSAGQPGPAMDFAILSLHLAGASSILGAVNFITTILNMRTPGMTLHKMPLFAWSILVTAFLLLLSLPVLAGAITMLLTD

SEQ ID NO: 104274 - protein, 112 aa, Unknown
  Bacterial polypetide isolated from the Sargasso Sea
ALLEDDRKSFIQGLTLTVILGVCFTALQAYEYHHATFTFSDHIYGSVFYMATGFHGFHVIVGTIFLAVCLWRGKLGHFNKDHHFGFEAAAWYWHFVDVVWLFLFAAIYIWGS

SEQ ID NO: 104275 - protein, 284 aa, Unknown
  Bacterial polypetide isolated from the Sargasso Sea
PPSGLMLVASYFVEGAAQAGWTAYPPLSITTPQSGQIIWILSVLLLGGSSIFGGINFIATIIKLRRPGLKLMQLPMYCWAMLGTSLLVVLSTPVLAGTLILLSFDIIANTGFFNPVLGGNVVVYQHLFWFYSHPAVYIMVLPAFGLVSEILPVHARKPLFGYTTMVFSIMGIVVLGLVVWAHHMFTSGTPPWMRLFFTIATAFIAVPTGIKFFNWVATLWGGKISINSAMLFSCGFIINFVFGGITGVALAQVPFDIHVHDTYFVVAHFHYIVYGGTVFIISLQ

SEQ ID NO: 104276 - protein, 256 aa, Unknown
  Bacterial polypetide isolated from the Sargasso Sea
LMEPGVQYMIMDGEPNGHMWNVLVTGHGILMMFFVVIPALFGGFGNYFMPLMIGAPDMAFPRLNNLSYWLYVMGSTLAVCSLIAPGGNGQLGSGVGWVLYAPLSTNEQGMSMDLAIFAIHVSGASSILGAINMITTFLNMRAPGMTLHKTPLFPWSILVTAFLILFSLPVLAGAITMLLTDRNFGTTFFDPAGGGDPVLYQHLLWFFGHPEVYMIVVPGFGIVSHVIATFSRKPIFGYLPMIYAMIAIGALGFVVW

SEQ ID NO: 104277 - protein, 217 aa, Unknown
  Bacterial polypetide isolated from the Sargasso Sea
MSVKIFSWILTMYKGQVSFTPPMFYALAFLFLFTIGGLTGIFLGAVALDIHLHDTYFVVAHFHYVMQGGTIVAFLGGLHHWWPKSFGVMYNQTIANIAALGVFIGFNGTFFPQFLLGLRGMPRRYATYDEQFVELHSYSTFWSGILGISIFIAVMNLFWSFIKKNKVDPGSNPWGGMTLEWTHTSSPPHPHNFEEEPVLQHGPYDYDKIIVEKTYKK

SEQ ID NO: 104278 - protein, 144 aa, Unknown
  Bacterial polypetide isolated from the Sargasso Sea
YYVVAHFHYVLSMGAVYAIFAGFYYWFSKMTGYEYSEFLGKLHFWLTFIGVNLIFFPQHFLGLAGMPRRYADYPDAFAGWNYISSIGSYISIIGLAVFLLNLLYAFMKKKKAEQNPWGEGATTLEWTVSSPPPFHTFEELPKVK

SEQ ID NO: 104279 - protein, 134 aa, Unknown
  Bacterial polypetide isolated from the Sargasso Sea
MSYADSASHDHHDHKPGFIKRWFFSTNHKDIGTLYIIFAILAGLVGGFFSLLMRAELAAPGLDVVADGQVWNVIITAHGLLMVFFVVMPALIGGFGNWFVPLMIGAPDMAFPRMNNFSFWILVPALVLLVVSAT

SEQ ID NO: 104280 - protein, 242 aa, Unknown
  Bacterial polypetide isolated from the Sargasso Sea
GPGVGGGWTIYPPLSANLGSPGPAVDLAIFSLHLAGASSILGAINFITTIFNMRAPGMTLHKMPLFVWSILVTAVLLLLSLPVLAGAITMLLTDRNFGTAFFSAAEGGDPVLFQHLFWFFGHPEVYILILPGFGIVSHVVATFSKKPVFGYLGMAYAMVSIGFLGFIVWAHHMYTVGMDADVKAYYIFATMVIAVPTGIKVFSWIATMWGGSVELKTPMLWAIGFIFLFTVGGVTGVVLANA

SEQ ID NO: 104281 - protein, 295 aa, Unknown
  Bacterial polypetide isolated from the Sargasso Sea
FGNYLIPLMVGARDMVFPYLNMVSFWSFFVAVVVLLASFFVPGGPTGAGWTLYPPQTILEGTPGHGMGILLMCVSLILFVAGFTMGGLNYLITVLQARTRGMTLMRMPLTVWGIFTATVLAMLAFPALLVGALMMTLDNVLGTSFFMPTILKAGEVLEYGGGSPILFQHLFWFFGHPEVYIVALPAFGIVSDLISVHSRKNIFGYRMMVWAIVIIGALSFFVWAHHMYVSGMNPWFGFFFATTTLIIAIPTAMKVYNWILTLWRGNIRLNVVMLWCLGFIVTFVNGGITGIFLGN

SEQ ID NO: 104282 - protein, 255 aa, Unknown
  Bacterial polypetide isolated from the Sargasso Sea
MSSENTKRTHEYHLVDPSPWPLLASIGALIACVGAVVYFRTDDMWTMLIGLAIVIYVSYMWFRDVIIEGEHQGHHTPVVQIGLRYGMTLFIASEVMFFVAWFWAYFNASLFPTEQIGAIWPPPDIHLMDPWHIPLINTLILLLSGTTVTWAHHALLEGNRKELIQGLWCTVGLGVVFTGFQVYEYMHADFSFSGHIYGATFYMATGFHGFHVLIGTIFLIVCLARSIAGHFKSDHHFWVRGCCMVLAFLWMCLGI

SEQ ID NO: 104283 - protein, 218 aa, Unknown
  Bacterial polypetide isolated from the Sargasso Sea
ESETGKYGDRVDASFRWSMSWFIFSEVMFFAAFFGALFYARTIAMPWLGDLNNKLLWPDFNALWPNAGPAGTVAPFTTMGPWPIPTINTALLLTSGVTLTWAHHALREGKRAQVIQGLLLTILLGFTFMGFQAFEYIHAYHELNLKLTSGIYGSTFFLLTGFHGFHVTMGAIMLSVVLGRVIKGHFTPEHHFAFEGAAWYWHFVDVVWLGLYVVVYWL

SEQ ID NO: 104284 - protein, 263 aa, Unknown
  Bacterial polypetide isolated from the Sargasso Sea
MIFFMVMPAMIGGFGNWFVPIMIGAPDMAFPRMNNISFWLLPVSLTLLILSIFADGPPGQTGVGGGWTIYPPLSSKAGQPGPAMDLAILSLHLAGASSILGAVNFITTILNMRTPGMTLHKMPLFAWSILVTAFLLLLSLPVLAGAITMLLTDRNFGTAFFEAQTGGDPVLFQHLFWFFGHPEVYILILPGFGMISHIVSTFSRKPVFGYLGMAYAMVAIGIVGFVVWAHHMYTVGLSTDTKAYFLAATMIIAVPTGIKIFSW

SEQ ID NO: 104285 - protein, 182 aa, Unknown
  Bacterial polypetide isolated from the Sargasso Sea
CRISALGLWEGFESSWPVITTPDKGAEYALAEKSMAWPGWGHALEWLPLWNTIVLLSSSVTVHFAHIGLKNGDRKKFNRFLGITVGLALIFVGLQAAEYYEAYAHYGLTLNSGIYGSTFFMLTGFHGFHVMMGGFMLAVMLARSVFAGHFEDHDHFGFEAASWYWHFVDVVWVMLFLFVYIL

SEQ ID NO: 104286 - protein, 163 aa, Unknown
  Bacterial polypetide isolated from the Sargasso Sea
MSADKKKHDFHLVDPSPWPIYVSFATLVLAVGAVYYFHSKALWLLLVGFALVIYGAFMWWRDVIEEAEHQGHHTPVVQIGHRYGMTLFIASEVMFFVAWFWAYFNASLFPTESIGGTWPPPDIKTFDPWDIPLINTLILLLSGTTVTWAHHAMLENDRKGLVK

SEQ ID NO: 104287 - protein, 262 aa, Unknown
  Bacterial polypetide isolated from the Sargasso Sea
MSAEKKHDYHLVDPSPWPIYVSFSCLVLALGAVYYMHSDISWGMYLGFALLIYGAYMWFRDVVIEAEHQGHHTPVVQIHHRYGMTLFIASEVMFFVAWFWAYFDISLFPNDFVGNVWPPKDIKTFDPWDIPLINTLVLLLSGTTVTWSHHALLEGDRKSFINGLILTVILGVCFTALQAYEYHHATFSFSDHIYGSVFYMATGFHGFHVIVGTIFLAVCLWRGKLGHFNKEHHFGFEAAAWYWHFVDVVWLFLFAAIYIWGS

SEQ ID NO: 104288 - protein, 191 aa, Unknown
  Bacterial polypetide isolated from the Sargasso Sea
TPMLFAVGFIFLFTVGGLTGVMLANAGIDIALHDTYYVVAHFHYVLSMGAVFALFAGFYYWIGKISGYQYPEVYGQIHFWLFFIGVNLTFFPMHFLGLAGMPRRIPDYPDAFAGWNAVCSYGSYLSILASVFFFYVVYITLTSEDKCPTNPWNFDDNEKSVPTLEWTVTSPPAFHTFAEIPAIKSPQQLTK

SEQ ID NO: 104289 - protein, 260 aa, Unknown
  Bacterial polypetide isolated from the Sargasso Sea
SHIIETFSRKPIFGYSSMVYALTSIAVLSFVVWAHHMFTVGMPLAGELFFMYSTMLIAIPTGVKVFNWVATMFKGSISFETPMLFAIAFVSLFTIGGFSGLMLAIVPADFQYHDTYFVVAHFHYVLVPGSLFGIIAGVYYWLPKWTGNMYDETLGKLHFWLSFFSVNLTFFPMHFVGLAGMPRRYPDYALQFADFNAIVSVGAFIFGFTQLLLLFIVIKAIRTGKKATDEVWEDTKDWGLEWTLDSPPPYHSFTVQPEVK

SEQ ID NO: 104290 - protein, 278 aa, Unknown
  Bacterial polypetide isolated from the Sargasso Sea
VGWLGSAPNGGWFGYQPNAGMKYSPGTAMDYWAIGLQILGIASLISAFNFITTIINMRTEGMRFMRMPVFTWMTFAVSFLLAFSLPIIAIALFYVTFDRKFGTTFFLTEGGGDPILWQHLFWLFGHPEVYILILPAFGIVSEVLPTFARKPLFGYAAIVFAGFGIAFIGFGVWAHHMFASAISPVAQAGFGLSTMVIAVPTGVKIFNWLGTIWGGKLKLNTPMLFSLGFIGMFVIGGLSGVTHSIVPADTQQTDTYYVVAHFHYVLFGGALFGIFSGL

SEQ ID NO: 104291 - protein, 305 aa, Unknown
  Bacterial polypetide isolated from the Sargasso Sea
ILVTAFLLLLSLPVLAGAITMLLTDRNFGTAFFEAQTGGDPVLFQHLFWFFGHPEVYILILPGFGMISHIVSTFSKKPVFGYLGMAYAMVAIGVVGFVVWAHHMYTVGLDTDTKAYFLAATMIIAVPTGIKIFSWIATMWGGSISFQTPMLWAIGFIFLFTLGGVTGVVLANAGVDTALHDTYYVVAHFHYVLSMGAVYAIFAGFYYWFSKMTGYEYSEFLGKLHFWLTFIGVNLIFFPQHFLGLAGMPRRYADYPDAFAGWNYISSIGSYISIIGLAVFLLNLLYAFMKKKKAEPNPWGEGATT

SEQ ID NO: 104292 - protein, 273 aa, Unknown
  Bacterial polypetide isolated from the Sargasso Sea
WPFLATISLVVFFIGLANYMNGYSSGMVIMLTGFALLFIITYGWFSNVISESESGTYNAQVDISFRWGMVWFIFSEVMFFSAFFGALYYARELSLPWLGGDGAKVSTNLFLWPQFETVWPSNGPTNAGGDFTLMKASGIPALNTLILLTSGLTVTWAHHGLKEQNRKQLIIGLALTVFLGFIFVGFQAYEYMHAYSDLNLTLSTGIYGSTFYMLTGFHGFHVTLGAIMLTVIMIRCINGHFAGDNHFGFEAVAWYWHFVDVVWLGLFVFVYWL

SEQ ID NO: 104293 - protein, 253 aa, Unknown
  Bacterial polypetide isolated from the Sargasso Sea
MAYAMVAIGVVGFVVWAHHMYTVGLDTDTKAYFLAATMIIAVPTGIKIFSWIATMWGGSISFKTPMVWALGFIFLFTVGGVTGIVLANAGVDTALHDTYYVVAHFHYVLSLGAVFAIFAGFYYWFSKMSGYEYSEWLGQLHFWLTFIGVNLVFFPQHFLGLAGMPRRYADYPDAFADWNYISSIGSYISVVGLGVFFVNIIYAFIKKEKAAQNPWGEGATTLEWTVPSPPNFHTFEELPKFEEEYETAEKSGS

SEQ ID NO: 104294 - protein, 192 aa, Unknown
  Bacterial polypetide isolated from the Sargasso Sea
WIATMWGGSISFQTPMLWAIGFIFLFTLGGVTGVVLANAGVDTALHDTYYVVAHFHYVLSMGAVYAIFAGFYYWFSKMTGYEYSEFLGKLHFWLTFIGVNLIFFPQHFLGLAGMPRRYADYPDAFAGWNYISSIGSYISIIGLAVFLLNLLYAFMKKKKAEQNPWGEGATTLEWTVSSPPPFHTFEELPKVK

SEQ ID NO: 104295 - protein, 299 aa, Unknown
  Bacterial polypetide isolated from the Sargasso Sea
TDRNFGTTFFSAAEGGDPVLFQHLFWFFGHPEVYILILPGFGIVSHVVATFSKKPVFGYLGMAYAMVSIGFLGFIVWAHHMYTVGMDADVKAYYVFATMVIAVPTGIKVFSWIATMWGGSVDLKTPMLWAIGFIFLFTVGGVTGVVLANAGIDHSLHDTYYVVAHFHYVLSMGAVFAIFAGFYYWFGKMFGRNYSEFLGKLHFWLTFIGVNIIFFPQHFLGLAGMPRRYVDYPDAYAGWNYISSIGSFISVLGLAVFFVMLVHALMKVRDCADNPWGEGATTLEWTLPSPSTFTSLRSY

SEQ ID NO: 104296 - protein, 85 aa, Unknown
  Bacterial polypetide isolated from the Sargasso Sea
SAYEYHHATFAFSDHIYGSVFYMATGFHGFHVIVGTIFLAVCLWRGKLGHFTKDHHFGFEAAAWYWHFVDVVWLFLFAAIYIWGS

SEQ ID NO: 104297 - protein, 325 aa, Unknown
  Bacterial polypetide isolated from the Sargasso Sea
SPMSDFMPRDVYNQVLTLHGTIMIFLWIVPVVNGAFGNYLIPFYVGARDMAFPRLNAVAFWLIPPSGLMLVASYFVEGAAQAGWTAYPPLSITTPQSGQIIWILSVLLLGGSSIFGGINFIATIIKLRRPGLKLMQLPMYCWAMLGTSLLVVLSTPVLAGTLILLSFDIIANTGFFNPVLGGNVVVYQHLFWFYSHPAVYIMVLPAFGLVSEILPVHARKPLFGYTTMVFSIMGIVVLGLVVWAHHMFTSGTPPWMRLFFTIATAFIAVPTGIKFFNWVATLWGGKISINSAMLFSCGFIINFVFGGMTGVALAQVPFDIHVHDT

SEQ ID NO: 104298 - protein, 47 aa, Unknown
  Bacterial polypetide isolated from the Sargasso Sea
LAVCLFRSMRGHSTPQHHFGFEAAAWYWHFVDVVWLFLFAAIYIWGS

SEQ ID NO: 104299 - protein, 307 aa, Unknown
  Bacterial polypetide isolated from the Sargasso Sea
NVLIVGAMAMIIRAELFQPGMQIVEPEFYNQMITLHGLIMIFGGVMPAFVGLANWLVPMMIGAPDMALPRMNNLSFWILPFAFLILLSSLFMEGGAPNFGWTFYAPLSTTYAPPSVTFFIFSVHIMGASSIMGAINVVVTIMNMRAPGVGLMKMPLFVWSWLITAYLLIAVMPVLAGAVTMMLMDIHFGTSFFNAAGGGDPVLFQHIFWFFGHPEVYIMILPAFGIVSHIIETFSRKQLFGYSSMVWAMLSIAILSFVVWAHHMFTVGLPLAAEIFFMWATMLIAVPTGVKVFNWVATMFRGSLTFE

SEQ ID NO: 104300 - protein, 242 aa, Unknown
  Bacterial polypetide isolated from the Sargasso Sea
PWPLVGAFSALFLVSGAILFMHYEMLWPMLAGLVLILFTMFMWWRDIIKESTFLKVHNSITEIGLRWGMALFITSEVMFFVAFFWAFFDASLLPKTFLAEYKEVFTGTLGIGVWPPKGIETFDPLDIPYLNTLILLLSGTTCTWAHHELREGNNKEALKGLYYTVFLGFIFSLLQIYEYQHATFGFTEGIYPSTFFMATGFHGFHVLIGTLFLLVCLLRIRKGHLTPKRHFGFEAAAWYWHF

SEQ ID NO: 104301 - protein, 249 aa, Unknown
  Bacterial polypetide isolated from the Sargasso Sea
AMVAIGIVGFVVWAHHMYTVGLSTDTKAYFLAATMIIAVPTGIKIFSWIATMWGGSISFKTPMVWALGFIFLFTVGGVTGVVLANAGVDTAMHDTYYVVAHFHYVLSLGAVFAIFAGFYYWFGKMTGYEYSEWMGQLHFWLTFIGVNLVFFPQHFLGLAGMPRRYADYPDAFAGWNYISSIGSYISVIGLVVFFINLAYAFYKKKAAAQNPWGEGATTLEWTVPSPPNFHTFEELPKFEDEEGVEKSTS

SEQ ID NO: 104302 - protein, 306 aa, Unknown
  Bacterial polypetide isolated from the Sargasso Sea
IMIFLWIVPVVNGAFGNYLIPFYVGARDMAFPRLNAVAFWLIPPSGLMLVASYFVEGAAQAGWTAYPPLSITTPQSGQIIWILSVLLLGGSSIFGGINFIATIIKLRRPGLKLMQLPMYCWAMLGTSLLVVLSTPVLAGTLILLSFDIIANTGFFNPVLGGNVVVYQHLFWFYSHPAVYIMVLPAFGLVSEILPVHARKPLFGYTTMVFSIMGIVVLGLVVWAHHMFTSGTPPWMRLFFTIATAFIAVPTGIKFFNWVATLWGGKISINSAMLFSCGFIINFVFGGITGVALAQVPFDIHVHMILI

SEQ ID NO: 104303 - protein, 243 aa, Unknown
  Bacterial polypetide isolated from the Sargasso Sea
ATSIATLVTAVGSVYYFHSKVMWAMVLGFLLIIYCAFMWFRDVVIEAEHKGHHTPVVQIHHRYGMTLFIASEVMFFVAWFWAYFDASLFPNEFMGNVWPPKDIETFDPWDIPLINTLVLLLSGTTVTWAHHSLLEDDRKGFINGLICTVILGAFFTLLQIYEYQHATFSFSGHIYGATFYMATGFHGFHVLVGTIFLAVCLWRGKLGHFTKEHHFGFEAAAWYWHFVDVVWLFLFAAIYIWGS

SEQ ID NO: 104304 - protein, 219 aa, Unknown
  Bacterial polypetide isolated from the Sargasso Sea
MSAGEKKHDYHLVDPSPWPIYTSFATLVLAIGSIYYFHSKVMWAMILGLALVCYGAFMWFRDVVIEAEHQGHHTPVVQIHHRYGMTLFIASEVMFFVAWFWAYFDASLFPGEFVGNVWPPKDIEVFDPWDIPLINTLVLLLSGTTVTWAHHSLLEDDRKGFIQGLSWTVFLGVCFTALQAYEYQHATFEFSNHIYGATFYMATGFHGFHVIIGTIFLAV

SEQ ID NO: 104305 - protein, 231 aa, Unknown
  Bacterial polypetide isolated from the Sargasso Sea
MADGHSRDHSYHLVDPSPWPIVGAFAALILTLGMILWFHDVTVWVFIIGAVITAYVFLVWFRDIVKEGEHQGFHTPVVQLGLRYGMVLFIASEVMFFAAWFWAYYNAALFPTESMGGTWPPEGILTFNPWDLPFLNTLILLLSSTTVTIAHHALRNGNYAGLKIWLWITILLGISFTGCQILEYVEAPFPFGQGAYGSTFFMATGFHGAHVIIGTICLIVCLIRAYAGHFK

SEQ ID NO: 104306 - protein, 262 aa, Unknown
  Bacterial polypetide isolated from the Sargasso Sea
MAHEKNHDYHILNPSIWPFLSAVGAFVLLLGSVLLFHDYTSVVFFIGLLLVIYCMYGWWSDVITESHIGDHTPVVKIALKYGVIMFIVSEVMFFSAWFWSFFKHALYPMEAIGSTWPPAGIETFDPWHLPLINTLILLCSGAAATWAHHAIAHENNRKDLVNGLIISIMLGILFTIFQAYEYTHAAFSFSGNIYGANFFMATGFHGFHVIVGTIFLAVCLFRALKGHFTPESHIGFEAAAWYWHFVDVVWLFLFAAIYIWGS

SEQ ID NO: 104307 - protein, 163 aa, Unknown
  Bacterial polypetide isolated from the Sargasso Sea
EYTETFDTNGAVGVWPPEGIKTFDPLDVPFLNTLILLMSGTTCTWAHHAVREGHRDQAIQALWITVGLGLFFTFMQGVEYYEAALHYFSFTDGIYPSVFYMATGFHGFHVMVGTAFLAVCLYRVYKNHFTPDQHFGLEAAAWYWHFVDVVWLFLFVCVYVWGG

SEQ ID NO: 104308 - protein, 223 aa, Unknown
  Bacterial polypetide isolated from the Sargasso Sea
LFTMFMWWRDIIKESTFLKVHNSITEIGLRWGMALFITSEVMFFVAFFWAFFDASLLPKTFLAEYKEVFTGTLGIGVWPPKGIETFDPLDIPYLNTLILLLSGTTCTWAHHELREGNNKEALKGLYYTVFLGFIFSLLQIYEYQHATFGFTEGIYPSTFYMATGFHGFHVLIGTLFLLVCLLRIRKGHLTTERHFGFEAAAWYWHFVDVVWLFLYISIYWWGK

SEQ ID NO: 104309 - protein, 156 aa, Unknown
  Bacterial polypetide isolated from the Sargasso Sea
MSGDQKHQYHLVEPSPWPAVGSAAGFTLVLGLTMFMHEYAYSIYILGAGVLMVLATMFFWWRDVVREAEHQGHHTPIVQIGMRYGMMLFISSEVMFFVAFFWAFFDASLYPDTGIWPPADITTFDPFDLPLINTMILLLSGCTVTWAHHALQHDNR

SEQ ID NO: 104310 - protein, 260 aa, Unknown
  Bacterial polypetide isolated from the Sargasso Sea
SGQKHDYHLVDPSPWPLATSIATLVTAVGSVYYFHSKVMWAMVLGFLLIFYCAFMWFRDVVIEAEHKGHHTPVVQIHHRYGMTLFIASEVMFFVAWFWAYFDASLFPNEFMGNVWPPKDIETFDPWDIPLINTLVLLLSGTTVTWAHHSLLEDDRKGFINGLICTVILGAFFTLLQIYEYQHATFSFSGHIYGATFYMATGFHGFHVLVGTIFLAVCLWRGKLGHFTKEHHFGFEAAAWYWHFVDVVWLFLFAAIYIWGS

SEQ ID NO: 104311 - protein, 274 aa, Unknown
  Bacterial polypetide isolated from the Sargasso Sea
MSATTADHEHHHNPTGWKRWAYSTNHKDIGTMYLIFAIIAGIIGSAFSVLMRMELMHPGDGILGGDYHLYNVLVTGHGLIMIFFMVMPAMIGGFGNWFVPIMIGAPDMAFPRMNNISFWLLPVALILLLVSIFVDGPPGAKGVGGGWTIYPPLSSKTGQPGPAMDLAILSLHVAGASSILGAINFITTILNMRTPGMTLHKMPLFSWSILVTAFLLLLSLPVLAGAITMLLTDRNFGTAFFEAQTGGDPVLFQHLFWFFGHPEGIHFNFAQALE

SEQ ID NO: 104312 - protein, 206 aa, Unknown
  Bacterial polypetide isolated from the Sargasso Sea
WFRDIIKEGEHDGHHSEVVQLGLRYGMTLFIASEVMFFVAWFWAYFNASLFPTEQIGSAWPPADIHLMDPWHIPLINTLILLLSGTTLTWAHHALQEGHRKEVIQGLILTIILGVIFTGFQVYEYMHAEFEFSGHIYGATFYMATGFHGAHVLIGTLFIVVCLGRMLAGHFKSDHHFGFEACAWYWHFVDVVWLFLFAAIYVWGYY

SEQ ID NO: 104313 - protein, 285 aa, Unknown
  Bacterial polypetide isolated from the Sargasso Sea
MSSITADSHCHTPTGWKRWAYSTNHKDIGTMYLIFAIIAGLIGSAFSVLMRMELMYPGDGILGGNHHLYNVLVTGHGLIMIFFMVMPAMIGGFGNWFVPIMIGAPDMAFPRMNNISFWLLPVSLILLLASIFVDGPPGQTGVGGGWTIYPPLSSKTGQPGPAMDLAILSLHIAGASSILGAINFITTILNMRTPGMTLHKMPLFAWSILVTAFLLLLSLPVLAGAITMLLTDRNFGTAFFEAQTGGDPVLFQHLFWFFGHPEVYILILPGFGMISHIVSTFSKKP

SEQ ID NO: 104314 - protein, 303 aa, Unknown
  Bacterial polypetide isolated from the Sargasso Sea
MYTQTASHDDHHTPTGWKRWAYSTNHKDIGTMYLIFAIVAGVIGTAFSVLMRMELMHPGDGILGGNYHLYNVLVTGHGLIMIFFMVMPAMIGGFGNWFVPIMIGAPDMAFPRMNNISFWLLPVSLTLLILSIFADGPPGQTGVGGGWTIYPPLSSKAGQPGPAMDLAILSLHLAGASSILGAVNFITTILNMRTPGMTLHKMPLFAWSILVTAFLLLLSLPVLAGAITMLLTDRNFGTAFFEAQTGGDPVLFQHLFWFFGHPEVYILILPGFGMISHIVSTFSKKPVFGYLGMAYAMVAIGIV

SEQ ID NO: 104315 - protein, 289 aa, Unknown
  Bacterial polypetide isolated from the Sargasso Sea
KTPLFPWSIVVTAFLILLSLPVLAGAITMLLTDRNFGTTFFDPAGGGDPVLYQHLLWFFGHPEVYMIVIPGFGIVSHVISTFSKKPVFGYLPMVYAMIAIGALGFVVWAHHMYTVGMSVTQQAYFMLATMVIAVPTGIKIFSWIATMWGGSVEFKTPMLWSIGFLFLFTVGGVTGIVLSQAGIDRAYHDTYYVVAHFHYVMSLGAVFCIFAGIYYWIGKMSGRQYPEWAGKLHFWTMFIGSNITFFPQHFLGRQGMPRRYIDYPEQFALWNYVSSIGAFISFGSFIFFF

SEQ ID NO: 104316 - protein, 84 aa, Unknown
  Bacterial polypetide isolated from the Sargasso Sea
VTGVVLANAGIDHSLHDTYYVVAHFHYVLSMGAVFSIFAAFYYWFGKMTGYNYSELLGKIHFWISFIGVNLIFFPQHFLGLACM

SEQ ID NO: 104317 - protein, 251 aa, Unknown
  Bacterial polypetide isolated from the Sargasso Sea
DIGTLYIIFALIAGLIGGFFSLLMRAELAAPGLDIVADGQVWNVIITAHGLLMVFFVVMPALIGGFGNWFVPIMIGAPDMAFPRMNNFSFWVLVPALVLLVVSATIGTGAGTGWTIYPPLSNKLGHAGPSVDMAIFALHLAGASSILGAVNFITTILNMRTPGMTLHKMPLFVWAMLITAFLLLLAVPVLAGAITMLLTDRNFGTTFFNPAGGGDPVLFQHLFWFFGHPEVYIMILPAFGIVSQVISTFSR

SEQ ID NO: 104318 - protein, 275 aa, Unknown
  Bacterial polypetide isolated from the Sargasso Sea
MYTQTASHDDHHTPTGWKRWAYSTNHKDIGTMYLIFAIVAGVIGTAFSVLMRMELMHPGDGILGGNYHLYNVLVTGHGLIMIFFMVMPAMIGGFGNWFVPIMIGAPDMAFPRMNNISFWLLPVSLTLLILSIFADGPPGQTGVGGGWTIYPPLSSKAGQPGPAMDLAILSLHLAGASSILGAVNFITTILNMRTPGMTLHKMPLFAWSILVTAFLLLLSLPVLAGAITMLLTDRNFGTAFFEAQTGGDPVLFQHLFWFFGHPEVCILILPGFGMI

SEQ ID NO: 104319 - protein, 195 aa, Unknown
  Bacterial polypetide isolated from the Sargasso Sea
LAVPWLAGEGSKVAAIAAIELWPAFESSWPVMTTPDQGNEYDLADKNMAWPGWSKALQWLPLWNTIVLLSSSWTVHLAHLGLKKGNRKKFNVYLGITVFLALIFVGLQALEYYEAYAHYGLKLNSGIYGSTFFMLTGFHGFHVMMGGFMLGIMLARSVFAGHFEQHDHFGFEAASWYWHFVDVVWLMLFLFVYIL

SEQ ID NO: 104320 - protein, 295 aa, Unknown
  Bacterial polypetide isolated from the Sargasso Sea
FGTSFFNAAGGGDPVLFQHVFWFFGHPEVYIMILPAFGIVSHIIETFSRKPIFGYSSMVYAMASIAILSFVVWAHHMFTVGMPLAGQLFFMYSTMLIAIPTGVKVFNWVATMFKGSISFETPMLFSIAFVALFTIGGFSGLMLAIVPADFQYHDTYFVVAHFHYVLVPGALFGIIAGAYYWLPKWTGNMYDEFLGKLHFWLTFISVNVTFFPMHFVGLAGMPRRYPDYALQFADFNALISVGAFMFGLTQLLFLFIVIKSIRTGKKAKPEVWEGAGDLGLEWTLSSPPPYHSFTI

SEQ ID NO: 104321 - protein, 221 aa, Unknown
  Bacterial polypetide isolated from the Sargasso Sea
YFLAATMIIAVPTGIKIFSWIATMWGGSISFKTPMMWALGFIFMFTVGGVTGVVLANAGVDTAMHDTYYVVAHFHYVLSLGAVFAIFAGFYYWFSKMSGYEYSEWMGHLHFWLTFIGVNLIFFPQHFLGLAGMPRRYADYPDAFAGWNYISSIGSYVAVAGLAVFFINLIYAFAKKKSASKNPWGEGATTLEWTVPSPPNFHTFEELPKFEDDQETQKSHS

SEQ ID NO: 104322 - protein, 155 aa, Unknown
  Bacterial polypetide isolated from the Sargasso Sea
MSTVTTHTHDHHTPTGWKRWAYSTNHKDIGTMYLIFAIIAGVIGTAFSVVMRMELMHPGDGILNGNYHLYNVLVTGHGLIMIFFMVMPAMIGGFGNWFVPIMIGAPDMAFPRMNNISFWLLPVSFILLIASIFMDGPPRCQRSRRWMDYISSFII

SEQ ID NO: 104323 - protein, 136 aa, Unknown
  Bacterial polypetide isolated from the Sargasso Sea
MYTQTISNDHHTPTGWKRWAYSTNHKDIGTMYLIFAIIAGVIGTAFSVLMRMELMHPGDGILGGNYHLYNVLVTGHGLIMIFFMVMPAMIGGFGNWFVPIMIGAPDMAFPRMNNISFWLLPVSLTLLILSIFVDGP

SEQ ID NO: 104324 - protein, 279 aa, Unknown
  Bacterial polypetide isolated from the Sargasso Sea
LHAAGGGDPVLFQHVFWFFGHPEVYIMILPAFGIVSHIIETFSRKPIFGYSSMVYAMASIAILSFVVWAHHMFTVGMPLAGELFFMYSTMLIAIPTGVKVFNWVATMFRGSITFETPMLFSIAFVALFTIGGFSGLMLAIVPADFQYHDTYFVVAHFHYVLVPGALFGIIAAAYYWLPKWTGNMYDETLGKLHFWLTFISVNVTFFPMHFVGLAGMPRRYPDYALQFADFNALISVGAFMFGITQLLFLFIVIKTIRSGKQAKPEVWEGAGDLGLEWTL

SEQ ID NO: 104325 - protein, 258 aa, Unknown
  Bacterial polypetide isolated from the Sargasso Sea
VFGYLGMAYAMVAIGIVGFVVWAHHMYTVGLSTDTKAYFLAATMIIAVPTGIKIFSWIATMWGGSISFKTPMVWALGFIFLFTVGGVTGVVLANAGVDTAMHDTYYVVAHFHYVLSLGAVFAIFAGFYYWFGKMTGYEYSEWMGQLHFWLTFIGVNLVFFPQHFLGLAGMPRRYADYPDAFAGWNYISSIGSYISVIGLVVFFINLAYAFYKKKAAAQNPWGEGATTLEWTVPSPPNFHTFEELPKFEDEEGVEKSTS

SEQ ID NO: 104326 - protein, 276 aa, Unknown
  Bacterial polypetide isolated from the Sargasso Sea
LIFAIIAGVIVTAFSVLMRMELMHPGDGILGGNYHLYNVLVTGHGLIMIFFMVMPAMIGGFGNWFVPIMIGAPDMAFPRMNNISFWLLPTSFILLIMSIFMDGPPGQTGVGGGWTIYPPLSSTAGQPGPAMDFAILSLHLAGASSILGAVNFITTILNMRTPGMTLHKMPLFAWSILVTAFLLLLSLPVLAGAITMLLTDRNFGTAFFDAQTGGDPVLFQHLFWFFGHPEVYILILPGFGMISHIVSTFSRKPVFGYLGMAYAMVAIGIVGFVVWA

SEQ ID NO: 104327 - protein, 305 aa, Unknown
  Bacterial polypetide isolated from the Sargasso Sea
IMIGAPDMAFPRMNNISFWLLPVSLTLLILSIFVDGPPGQTGVGGGWTIYPPLSSKAGQPGPAMDLAILSLHLAGASSILGAVNFITTILNMRTPGMTLHKMPLFAWSILVTAFLLLLSLPVLAGAITMLLTDRNFGTAFFEAQTGGDPVLFQHLFWFFGHPEVYILILPGFGMISHIVSTFSKKPVFGYLGMAYAMVAIGIVGFVVWAHHMYTVGLSTDTKAYFLAATMIIAVPTGIKIFSWIATMWGGSISFKTPMMWALGFIFMFTVGGVTGVVLANAGVDTAMHDTYYVVAHFHYVLSLGA

SEQ ID NO: 104328 - protein, 276 aa, Unknown
  Bacterial polypetide isolated from the Sargasso Sea
MSTVVESHDHGHHGPAKGLSRWLFTTNHKDIGTLYLWFSFIMLFIGGAMAMVIRAELFQPGLQIVQPEFFNQMTTNHGLIMVFGVIMPAFVGLANWMLPMQIGAPDMALPRLNNLSFWLLPMAFGILISTLFMPEGGPNFGWTFYAPLSTTYAPSTVNFFIFSVHVMGVSSILGSINIITTIFNMRAPGMTLMKMPLFVWSWLITAYLLIAVMPVLAGVVTMMLMDINFGTSFFNAAGGGDPVLFQHVFWFFGHPEVYIMILPAFGIVSHIIETFS

SEQ ID NO: 104329 - protein, 226 aa, Unknown
  Bacterial polypetide isolated from the Sargasso Sea
YVTMVYSIMAIVLLGLIVWAHHMFTSGTPPWMRLFFTIATAFIAVPTGIKFFNWLATLWGGRISLNSAMLFSCGFIVNFVLGGITGVALAQVPFDIHVHDTYFVVAHFHYIVFGGSVFVIFASIYHWYPKFTGRMLNEDLGRLHCALTFIGFNLCFGPQHWLGLNGMPRRVAEYDPQFTLINQISSIGALLMAISTLPFLWNVIHTRPAAVPSQATTPGKHSRPNG

SEQ ID NO: 104330 - protein, 186 aa, Unknown
  Bacterial polypetide isolated from the Sargasso Sea
VWALGFIFLFTVGGVTGVVLANAGVDTALHDTYYVVAHFHYVLSLGAVFAIFAGFYYWFGKMSGYEYSEWMGQLHFWLTFIGVNLVFFPQHFLGLAGMPRRYADYPDAFADWNYISSIGSYISVVGLVVFFANLIYAFAKKKKAAQNPWGEGATTLEWTVPSPPNFHTFDELPKFEDYEGTEKSSS

SEQ ID NO: 104331 - protein, 126 aa, Unknown
  Bacterial polypetide isolated from the Sargasso Sea
MQPGAHHAIAHDEDRKSMVQGLVIAVGLGVLFTIFQAYEYQHAAFGFSGNIYGANFFMATGFHGFHVIVGTIFLAICMLRAMRGHFTKDQHLGFEAAAWYWHFVDVVWLFLFAAIYVWGSVGATIH

SEQ ID NO: 104332 - protein, 249 aa, Unknown
  Bacterial polypetide isolated from the Sargasso Sea
PSPWPIYNSIACLVLAFGAVYYFHTKTLWLLLIGTALLIYGAFMWWRDVIQEAEFDGHHTEVVQIGHRYGMTLFIASEVMFFVAWFWAYFNASLFPTESIGGIWPPADIKTFDPWDIPLINTLILLLSGTTVTWAHHAMLENDRKSLVNGLVLTVFLGFIFTCFQAYEYHHATFTIDGNIYGSTFFMATGFHGFHVIIGTIFLAVCLFRSMKGHSNSKHHFGFEAAAWYWHFVDVVWLFLFAAIYIWGS

SEQ ID NO: 104333 - protein, 126 aa, Unknown
  Bacterial polypetide isolated from the Sargasso Sea
MADITADQIDSHDHHPTGWRRYLYSTNHKDIGTLYLIFAVIAGLVGTGMSVLMRMELMYPGDGILGGDHNLYNVLVTSHGLLMIFFMVMPAMIGGFGNWIVPLMIGAPDMAFPRMNNISFWLLQHH

SEQ ID NO: 104334 - protein, 205 aa, Unknown
  Bacterial polypetide isolated from the Sargasso Sea
VGDHTPVVLIGLRYGFILFIMSEVMFFLAWFWSFFKHAMYPMGDMSPLQDGQFPPAGIEVFDPWHLPLINTLILLCSGAAATWAHHAIAHDEDRKSMIQGLAVAVGLGVLFTVFQAYEYQHAAFGFSGNIYGANFFMATGFHGFHVIVGTIFLAICMLRAMRGHFTKDQHLGFEAAAWYWHFVDVVWLFLFAAIYVWGSVGATIH

SEQ ID NO: 104335 - protein, 225 aa, Unknown
  Bacterial polypetide isolated from the Sargasso Sea
MSAEKKHDYHLVDPSPWPIYTSFACLVLAIGAIFYMHNGISWGMYLGLALLIYGAYMWFRDVVIEAEHQGHHTPVVQIHHRYGMTLFIASEVMFFVAWFWAYFDISLFPNEFVGNVWPPKDIETFDPWDIPLINTLVLLLSGTTVTWAHHALLEDDRKGFIQGLTLTVILGFFFTLLQAYEYHHATFTYSGHIYGAVFYMATGFHGFHVIIGTIFLASMFVERKT

SEQ ID NO: 104336 - protein, 275 aa, Unknown
  Bacterial polypetide isolated from the Sargasso Sea
MYTQTASHDDHHTPTGWKRWAYSTNHKDIGTMYLIFAIVAGVIGTTFSVLMRMELMHPGDGILGGNYHLYNVLVTGHGLIMIFFMVMPAMIGGFGNWFVPIMIGAPDMAFPRMNNISFWLLPTSFILLIMSIFMDGPPGQTGVGGGWTIYPPLSSTAGQPGPAMDFAILSLHLAGASSILGAVNFITTILNMRTPGMTLHKMPLFAWSILVTAFLLLLSLPVLAGAITMLLTDRNFGTAFFDAQTGGDPVLFQHLFWFFGHPEVYILILPGFGMI

SEQ ID NO: 104337 - protein, 303 aa, Unknown
  Bacterial polypetide isolated from the Sargasso Sea
MPLMIGAPDMAFPPLNNLSYWLYVTGSTLAICSILAPGGNGQFGSGVGWVLYAPLSTSEQGMSMDLAIFAIHVSGASSILGAINMITTFLNMRAPGMTLHKTPLFPWSIVITAFLILLSLPVLAGAITMLLTDRNFGTTFFDPAGGGDPVLYQHLLWFFGHPEVYMLIVPGFGIVSHVISTFSKKPIFGYLPMVYAMIAIGALGFVVWAHHMYTVGMSVTQQAYFMLATMVIAVPTGIKIFSWIATMWGGSVEFRTPMLFAIGFLFLFTVGGVTGIVLSQAGVDRAYHDTYYVVAHFHYVMSL

SEQ ID NO: 104338 - protein, 104 aa, Unknown
  Bacterial polypetide isolated from the Sargasso Sea
MVGLDTDTKAYFLAATMIIAVPTGIKIFSWIATMWGWFNKFSNSYVMGYRFYFSFHFRGSNRSCFSECRCRYRTSRYLLCCSTFPLRIINGCCVCNICRILLLV

SEQ ID NO: 104339 - protein, 259 aa, Unknown
  Bacterial polypetide isolated from the Sargasso Sea
WGIFTATVLAMFAFPALLVSAIMMILDKTLMTSFFMPALVEMGEQLSYGGGSPILFQHLFWFFGHPEVYIVALPAFGIVSDVLSVHSRKNIFGYRMMVWAIVAIGALSFIVWAHHMYVSGMHPYFGFFFATTTLIIAVPTAIKVYNWVLTLWKGNISLTVPMLFCISFIITFLNGGLTGLFLGNVIVDVPLSDTYFVVAHFHMVMGIAPVQVVFAAIYHWFPLMTGRMYNETLGRLHFWFTFLGSYLIYFPMHYLGLIG

SEQ ID NO: 104340 - protein, 220 aa, Unknown
  Bacterial polypetide isolated from the Sargasso Sea
VGLDVDTKAYFTAATMVIAVPTGVKIFSWIATMWGGSITFRIPMLWAIGFIFLFTVGGVTGVVLANAGVDIMLHNTYYVIAHFHYVLSLGAVFGIFCGFYYWFAKMTGYNYNSTLASLHFWLTFIGVNVTFFPQHFLGLAGMPRRYIDYPEALHGWNMVSSYGAYVAGLGTLVFVVLIIEAFIKKRAAENNPWGEGATTLEWTLSSPPPFHTYEDLPRVN

SEQ ID NO: 104341 - protein, 191 aa, Unknown
  Bacterial polypetide isolated from the Sargasso Sea
WRDIVRESTLEGHHTNIVQLGLRYGMILFIVSEIMFFFAFFWAFFAAALAPVIEIGSIWPPKGIDVFDPIEVPLLNTLILLCSGATVTYSHHAITCGNKIEAVLGLVLTVVLAAIFTGFQGFEYVSASFTISDGIYGSTFYMATGFHGFHVLIGTIFLTVCLIRLIRDHYTIQHHFGFEAAAFYWHFVDVV

SEQ ID NO: 104342 - protein, 275 aa, Unknown
  Bacterial polypetide isolated from the Sargasso Sea
MLLTDRNFGTAFFDAQTGGDPTLFQHLFWFFGHPEVYILILPGFGMISHIVSTFSKKPVFGYLGMAYAMVAIGIVGFVVWAHHMYTVGLDTDTKAYFLAATMIIAVPTGIKIFSWIATMWGGSISFKTPMVWALGFIFLFTVGGVTGVVLANAGVDTALHDTYYVVAHFHYVLSLGAVFAIFAGFYYWFGKMSGYEYSEWMGQLHFWLTFIGVNLVFFPQHFLGLAGMPRRYADYPDAFADWNYISSIGSYISVVGLVVFFANLIYAFAKKKKAA

SEQ ID NO: 104343 - protein, 204 aa, Unknown
  Bacterial polypetide isolated from the Sargasso Sea
MYTQTASHDDHHTPTGWKRWAYSTNHKDIGTMYLIFAIIAGVIGTAFSVLMRMELMHPGDGILGGNYHLYNVLVTGHGLIMIFFMVMPAMIGGFGNWFVPIMIGAPDMAFPRMNNISFWLLPTSFILLIMSIFMDGPPGQTGVGGGWTIYPPLSSTAGQPGPAMDFAILSLHLAGASSILGAVNFITTILNMRTPGMTLHKMPL

SEQ ID NO: 104344 - protein, 307 aa, Unknown
  Bacterial polypetide isolated from the Sargasso Sea
ILPVFSRKPLFGYSVMVYSMCAIGFLGFAVWAHHMFTTGLGAWATAFFATATMLIAIPTGVKIFNWISTLWGGHIKFTTASLFGISFICMFTLGGLSGVMHASPPIDYHHQDTYFVVAHFHYVLYGGAVMALFGGLFYWWPKVFGKMLSEPMGKIQFWLYMIGFNMTFFPMHFLGLQGMPRRNYTYAPDQGWEFWNLVCTLGSYITALGALVFVVNVVWTYFKGEKAPHDPWDGRTLEWSLSSPPPEYNFAVDPEVKATDDWWRIKYVNGQKIDNVPYQPEIDPATKHLQNPSFWPLILAAGITGIA

SEQ ID NO: 104345 - protein, 284 aa, Unknown
  Bacterial polypetide isolated from the Sargasso Sea
MGQLFLMHKLGGDPVLFQHLFWFFGHPEVYILILPGFGMISHIVSTFSRKPVFGYLGMAYAMVAIGIVGFVVWAHHMYTVGLSTDTKAYFLAATMIIAVPTGIKIFSWIATMWGGSISFKTPMVWALGFIFLFTVGGVTGVVLANAGVDTAMHDTYYVVAHFHYVLSLGAVFAIFAGFYYWFGKMTGYEYSEWMGQLHFWLTFIGVNLVFFPQHFLGLAGMPRRYADYPDAFAGWNYISSIGSYISVIGLVVFFINLAYAFYKKKAAAQNPWGEGATTLEWTVP

SEQ ID NO: 104346 - protein, 157 aa, Unknown
  Bacterial polypetide isolated from the Sargasso Sea
SNAGIDTVMHDTYYVVAHFHYVLSMGAMFGIFAGIYYWFGKMSGRKYNEFFGKVHFWLFFIGVNVTFFPQHFLGLAGMPRRIPDYPDAYAGWNLVSTYGSYISFAATLIFFFAILYAFFFGKKEVANPWGEGADTLEWTLSSPPPFHQFETLPKFKD

SEQ ID NO: 104347 - protein, 262 aa, Unknown
  Bacterial polypetide isolated from the Sargasso Sea
MSAEKKHDYHLVDPSLWPIYTSFACLVLALGAVYYMHSDVSWGMYLGFALLIYGAYMWFRDVVIEAEHQGHHTPVVQIHHRYGMTLFIASEVMFFVAWFWAYFDVSLFPNEFVGNVWPPKDIETFDPWDIPLINTLVLLLSGTTVTWSHHALLEDDRKGFVNGLIFTVILGVCFTALQAYEYHHATFAFSDHIYGSVFYMATGFHGFHVIVGTIFLAVCLWRGKLGHFNKDHHFGFEAAAWYWHFVDVVWLFLFAAIYIWGS

SEQ ID NO: 104348 - protein, 223 aa, Unknown
  Bacterial polypetide isolated from the Sargasso Sea
MYTVVLSVDTRAYFTAATMVIAVPTGIKIFSWIATMWGGSIVFKIPMYWAIGFIFLFTVGGVTGVVLANAGLDVVLHNTYYVIAHFHYVLSLGAVYGLFAAFYYWFSKMTGYEYSEGLAKLHFWVTFIGVNLTFFPMHFLGLAGMPRRYVDYPDAFAGWNMVASIGSYIGALGAIIFLVVIIEAFVKKRKAVKNPWGSTDNTLEWTVSSPPAFHTFAEIPKVK

SEQ ID NO: 104349 - protein, 339 aa, Unknown
  Bacterial polypetide isolated from the Sargasso Sea
MRAPGMTLMKMPMFVWTWLFTAFLLIAAMPVLAGAITMLLTDRFFGTSFFTASGGGDPVMFQHIFWFFGHPEVYILILPAFGIVSTIIPAFSRKKLFGYDSMVYATASIAILSFIVWAHHMFTVGMPLAGEIFFMLTTMLIAVPTGVKVFNWVATMWKGSMTFETPMLFALAFIILFTIGGFSGLMLAMTPADFQYHDTYFVVAHFHYVLVPGAVFAIIAAVYYWLPKWTGKMYSESLGKLHFWLTTIFVNLTFFPMHFVGLAGMPRRIPDYPVQFADFNAIASVGAFGFGLSQLLFVYILYNTLKKDVTVDDKAWDGAEGLEWTISSPPPYHSLRKHP

SEQ ID NO: 104350 - protein, 226 aa, Unknown
  Bacterial polypetide isolated from the Sargasso Sea
MSGKQNHQYHLVEPSPWPAVGSASGFTLVLGTAMYMHEYPYSIYIVIVGFLMLFATMFFWWRDVVREAEFQGHHTPIVQIGMRYGMMLFISSEVMFFVAFFWAFFDSSLYPDTGVWPPADINVFDPFDLPLINTMILLLSGCTVTWAHHALQHDNRKDFLTGLFLTILLGVSFTALQAYEYSHAAFGFTDGIYASTFYMATGFHGAHVIIGTIFLIVCYFRALKGH

SEQ ID NO: 104351 - protein, 243 aa, Unknown
  Bacterial polypetide isolated from the Sargasso Sea
MVNKSTTGQKHPYHLVDPSPLPFLSSIAGLAMAAGLVFYMHYGTSWLLILGTIGLLTIMFLWWRDVIKESTFQKVHTPVVELGLRYGMALFIASEVMFFVAFFWAFFDASLTPKLPIEEFSETFDSNGAVGIWPPEGIKTFDPLDVPFLNTLILLMSGTTCTWAHHAVREGHRDQAIQALWCTVGLGIFFSFMQGVEYYEAAHHYFSFTDGIYPSVFYMATGFHEISCNGWDSISSCLFVSCL

SEQ ID NO: 104352 - protein, 59 aa, Unknown
  Bacterial polypetide isolated from the Sargasso Sea
FHGFHVIIGTIFLAVCWWRAKNDKYKKGEFFGFEAAAWYWHFVDVVWLFLFAAIYIWGS

SEQ ID NO: 104353 - protein, 190 aa, Unknown
  Bacterial polypetide isolated from the Sargasso Sea
ATMWGGSISFKTPMLWAIGFIVLFTLGGVTGVVLANAGVDTALHDTYYVVAHFHYVLSLGAVFAIFAGFYYWFSKMSGYEYSEFLGKLHFWLTFIGVNLIFFPQHFLGLAGMPRRYADYPDAFAGWNYVSSIGSYISLIGVAVFLLNLLYSFIKKRAAAQNPWGEGATTLEWTVSSPPPFHTFEELPKVK

SEQ ID NO: 104354 - protein, 263 aa, Unknown
  Bacterial polypetide isolated from the Sargasso Sea
FGMISHIVSTFSKKPVFGYLGMAYAMVAIGVVGFVVWAHHMYTVGLDTDTKAYFLAATMIIAVPTGIKIFSWIATMWGGSISFKTPMLWAIGFIFLFTLGGVTGVVLANAGVDTALHDTYYVVAHFHYVLSLGAVFAIFAGWYYWFSKMSGYEYSEFLGKLHFWLTFIGVNLIFFPQHFLGLAGMPRRYVDYPDAFAGWNYISSIGSYISLVGLLVFLLNLLYSFLKKRKAEQNPWGEGATTLEWTVTSPPPFHTFEELPKVK

SEQ ID NO: 104355 - protein, 114 aa, Unknown
  Bacterial polypetide isolated from the Sargasso Sea
QLHFWLTFIGVNLVFFPQHFLGLAGMPRRYADYPDAFAGWNYISSIGSYISVIGLVVFFINLAYAFYKKKAAAQNPWGEGATTLEWTVPSPPNFHTFEELPKFEDEEGVEKSTS

SEQ ID NO: 104356 - protein, 252 aa, Unknown
  Bacterial polypetide isolated from the Sargasso Sea
MSATTASHEHHHNPTGWKRWAYSTNHKDIGTMYLIFAIIAGIIGTAFSVLMRMELMHPGDGILGGNYHLYNVLVTGHGLIMIFFMVMPAMIGGFGNWFVPIMIGAPDMAFPRMNNISFWLLPVALILLIASIFVDGPPGAQGVGGGWTIYPPLSSKTGQPGPAMDLAILSLHVAGASSILGAINFITTILNMRTPGMTLHKMPLFSWSILVTAFLLLLSLPVLAGAITMLLTDRNFGTAFFEASTGGDPVLF

SEQ ID NO: 104357 - protein, 263 aa, Unknown
  Bacterial polypetide isolated from the Sargasso Sea
MASTIYNWSSRWLFSTNHKDIGTLYLIFGGVSGVMGTTLSMLIRVELSQPGNQILAGNGQLYNVIVTAHALVMIFFMVMPILIGGFGNWMVPLMLGAPDMAFPRMNNISFWLLPPAVLLLLVSSLVESGAGTGWTVYPPLSSVQAHSGPSVDLAIFSLHLAGASSIMGAVNFITTILNMRAPGITMHRLPLFVWAIFITVILLLLSLPVLAAAITMLLTDRNFNTTFFDPAGGGDPVLYQHLFWFFGHPEVYILILPGFGMVS

SEQ ID NO: 104358 - protein, 287 aa, Unknown
  Bacterial polypetide isolated from the Sargasso Sea
DHGTPTGFLRWLYSTNHKDIGTMYLIFSIVAGLIGGGISMYMRMELQDPGVQYMENGHVWNVYVTAHGLIMVFFVVMPALIGGFGNWFVPLMIGAPDMAFPRMNNISFWLLIPAFLLLFLSMFADGGAGVGWTIYPPMSGKEGTPGMSMDMAILSLHLAGASSILGAANFITTIFNMRAPGMTLHRMPLFAWSILITAFLLLLALPVLAGAITMLLTDRNFGTTFFIPSGGGDPILFLHLFWFFGHPEVYIMILPAFGIVSHVISTFSRKPVFGYLGMAYAMVSIGF

SEQ ID NO: 104359 - protein, 162 aa, Unknown
  Bacterial polypetide isolated from the Sargasso Sea
MYTQTASHDHHTPTGWKRWAYSTNHKDIGTMYLIFAIVAGVIGTAFSVLMRMELMHPGDGILGGNYHLYNVLVTGHGLIMIFFMVMPAMIGGFGNWFVPIMIGAPDMAFPRMNNISFWLLPVSLTLLILSIFADGPPGQTGVGGGWTIYPPFPQKLDNLDQL

SEQ ID NO: 104360 - protein, 270 aa, Unknown
  Bacterial polypetide isolated from the Sargasso Sea
ISHIVSTFSRKPVFGYLGMAYAMVAIGIVGFVVWAHHMYTVGLSTDTKAYFLAATMIIAVPTGIKIFSWIATMWGGSISFKTPMVWALGFIFLFTVGGVTGVVLANAGVDTAMHDTYYVVAHFHYVLSLGAVFAIFAGFYYWFGKMSGYEYSEWMGQLHFWLTFIGVNLVFFPQHFLGLAGMPRRYADYPDAFAGWNYISSIGSYISVIGLVVFFINLAYAFYKKKAAAQNPWGEGATTLEWTVPSPPNFHTFEELPKFEDEEGVEKSTS

SEQ ID NO: 104361 - protein, 229 aa, Unknown
  Bacterial polypetide isolated from the Sargasso Sea
VWAHHMYTVGFSANVRAYFMLATIVIAVPTGVKIFSWIATMWGGSITFTTPMLFALGFIFLFTLGGVTGVILANAGIDVVLHDTYYVVAHFHYVLSMGAVFGIFAGIYYWFSKMSGKNYSEFFGKLHFWLFFLGVNLTFFPQHFLGLAGMPRRIPDYPDAYAGWNVISSIGSYISFASFILFIFIIIYALLKGKKAEANPWGEGAKTLEWTLPSPPPYHQFDTLPEVKN

SEQ ID NO: 104362 - protein, 221 aa, Unknown
  Bacterial polypetide isolated from the Sargasso Sea
SFVFGMGWFIFSEVMFFAAFFGALFYVRNFSVPWLGGDGEKGLANILWEGFEASWPVMSTPDAGSAFVLADKSMSWPGWGNALKWLPLWNTIVLLSSSVTVHFAHLALKNDNKKSFNTWLGITVTLALIFVGLQAAEYYEAYAHYGLTLNSGIYGSTFFMLTGFHGFHVMMGGFMLAVMLSRSVFYNHFDPHNHFGFEAASWYWHFVDVVWVMLFLFVYIL

SEQ ID NO: 104363 - protein, 176 aa, Unknown
  Bacterial polypetide isolated from the Sargasso Sea
MYTQTSSHDDHHTPTGWKRWAYSTNHKDIGTMYLIFAIIAGVIGTAFSVLMRMELMHPGDGILGGNYHLYNVLVTGHGLIMIFFMVMPAMIGGFGNWFVPIMIGAPDMAFPRMNNISFWLLPTSFILLIMSIFMDGPPGQTGVGGGWTIYPPLSSTAGQPGPAMDFAILSLHLAGA

SEQ ID NO: 104364 - protein, 148 aa, Unknown
  Bacterial polypetide isolated from the Sargasso Sea
MAWPGWDHALEWLPLWNTIVLLSSSVTVHFAHLGLKNGDRKKFNRFLGITVTLALIFVGLQAAEYYEAYAHYGLTLNSGIYGSTFFMLTGFHGFHVMMGGIMLAIMLARSVFAGHFEEHDHFGFEAASWYWHFVDVVWVMLFLFVYII

SEQ ID NO: 104365 - protein, 90 aa, Unknown
  Bacterial polypetide isolated from the Sargasso Sea
TSNDVLHSWAVPSLGVKKDAVPGRLNETWFKADRVGIFYGQCSELCGLRHGYMPIEVHAVSEEDFLAWIEEAKEKYAKVGEDLNLAEVKE

SEQ ID NO: 104366 - protein, 195 aa, Unknown
  Bacterial polypetide isolated from the Sargasso Sea
MATTTDSHDHTPTGFRRWAYSTNHKDIGSMYIIFAVIAGVVGGIMSMIMRTELAYPGDGILLENFDAQMYNVLTTAHGLIMIFFMIMPAMIGGFGNWFVPIMIGAPDMAFPRMNNISFWLLVPAFILLLSSPYVGGGAGTGWTIYPPLSSSLGHSSPAVDMAILSLHLAGASSILGAINFITTIFNMRAPGMTLH

SEQ ID NO: 104367 - protein, 128 aa, Unknown
  Bacterial polypetide isolated from the Sargasso Sea
TLILLLSGTTVTWAHHAMLENDRKGLINGLIATVFLGFIFSCFQAYEYHHATFTIDGGIYGSTFYMATGFHGFHVIIGTIFLAVCLFRSMKGHSTPTHHFGFEAAAWYWHFVDVVWLFLFAAIYIWGS

SEQ ID NO: 104368 - protein, 286 aa, Unknown
  Bacterial polypetide isolated from the Sargasso Sea
GIMSSHAPSFFTRYFYSTNHKDIGVLYLVFAIVAGLIGGIFSLLIRMELAEPGMQIVGDDYQTYNVWITSHGLLMIFFMIMPAMVGGFGNYFVPLLIGAPDMAFPRMNNLSFWLLVPSLILLVGSGFVEGGAGPGWTLYAPLSTSGHGGPAVDMVILSMHLAGASSILGAINFITTIFNMRAPGMTLHKMPLFAWSILITAFLLLLSLPVLAGAITMMLTDRNFGTAFFNPEAGGDPVLFQHLFWFFGHPEVYILILPGFGIVSHVVSTFSKKPIFGYLGMAYAMA

SEQ ID NO: 104369 - protein, 225 aa, Unknown
  Bacterial polypetide isolated from the Sargasso Sea
MATTTDTHDHTPTGFRRWAYSTNHKDIGSMYIIFAVIAGVIGGVMSMIMRTELAYPGDSILGGDYQMYNVLTTAHGLIMIFFMIMPAMIGGFGNWFVPIMIGAPDMAFPRMNNISFWLLVPAFILLLASPYVGGGAGTGWTIYPPLSSTVGHASPAVDMAILSLHLAGASSILGAINFITTIFNMRAPGMTLHKMPLFVWSILVTVFLLVLSLPVLAGAITMLLT

SEQ ID NO: 104370 - protein, 179 aa, Unknown
  Bacterial polypetide isolated from the Sargasso Sea
FLFTVGGVTGVVLANAGVDTALHDTYYVVAHFHYVLSLGAVFAIFAGFYYWFGKMSGYEYSEWMGQLHFWLTFIGVNLVFFPQHFLGLAGMPRRYADYPDAFADWNYISSIGSYISVVGLVVFFANLIYAFAKKKKAAQNPWGEGATTLEWTVPSPPNFHTFDELPKFEDYEGTEKSSS

SEQ ID NO: 104371 - protein, 243 aa, Unknown
  Bacterial polypetide isolated from the Sargasso Sea
MSTAATHHDHHTPTGWKRWAYSTNHKDIGTMYLIFAIIAGLIGTAFSVLMRMELMHPGDGILGGDYHLYNVLVTGHGLIMIFFMVMPAMIGGFGNWFVPIMIGAPDMAFPRMNNISFWLLPVAFILLLSSIFVDGPPGAQGVGGGWTIYPPLSSKTGQPGPAMDLAILSLHVAGASSILGAVNFITTILNMRTPGMTLHKMPLFAWSILVTAFLLLLSLPVLAGAITMLLTDRNFGTAFFDAQ

SEQ ID NO: 104372 - protein, 160 aa, Unknown
  Bacterial polypetide isolated from the Sargasso Sea
MYTQTASHDDHTPTGWKRWAYSTNHKDIGTMYLIFAIIAGVIGTAFSVLMRMELMHPGDGILGGNYHLYNVLVTGHGLIMIFFMVMPAMIGGFGNWFVPIMIGAPDMAFPRMNNISFWLLPTSFILLIMSIFMDGPPGQTGVGGGWTIYPPLSSSAGQPG

SEQ ID NO: 104373 - protein, 243 aa, Unknown
  Bacterial polypetide isolated from the Sargasso Sea
LPGFGIVSHVVATFSKKPVFGYLGMAYAMVSIGFLGFIVWAHHMYTVGMDADVKAYYIFATMVIAVPTGIKVFSWIATMWGGSVELKTPMLWAIGFIFLFTVGGVTGVVLANAGIDHSLHDTYYVVAHFHYVLSMGAVFAIFSGFYYWFGKMFGSDYSELLGKLHFWLTFVGVNLIFFPQHFLGLAGMPRRYVDYPDAYAGWNYISSIGSFVTLIGLAVFFIMLVHAFVRQKQTADNPWGEGA

SEQ ID NO: 104374 - protein, 286 aa, Unknown
  Bacterial polypetide isolated from the Sargasso Sea
NWFVPIMIGAPDMAFPRMNNISFWLLPVSFILLLSSIFVDGPPGAQGVGGGWTIYPPLSSKTGQPGPAMDLAILSLHIAGASSILGAVNFITTILNMRTPGMTLHKMPLFAWSILVTAFLLLLSLPVLAGAITMLLTDRNFGTAFFDAQTGGDPLLFQHLFWFFGHPEVYILILPGFGMISHIVSTFSKKPVFGYLGMAYAMVAIGIVGFVVWAHHMYTVGLNTDTKAYFLAATMIIAVPTGIKIFSWIATMWGGSISFKTPMMWALGFIFLFTVGGVTGVVLANA

SEQ ID NO: 104375 - protein, 177 aa, Unknown
  Bacterial polypetide isolated from the Sargasso Sea
MSAEKPKHDYHLVDPSPWPIYVSFATLVLAFGAVYYFHSKALWLLLIGFALVVYGAFMWWRDVIEEAEHQGHHTPVVQIGHRYGMTLFIASEVMFFVAWFWAFFNASLFPPDSIGGIWPPSDIKTFDPWDIPLINTLILLLSGTTVTWAHHAMLENDRKGLVNGLIATVFLGFIFSC

SEQ ID NO: 104376 - protein, 300 aa, Unknown
  Bacterial polypetide isolated from the Sargasso Sea
MFNLSIFADGPPGAQGVGGGWTIYPPLSSKAGQPGPAMDLAILSLHLAGASSILGAVNFITTILNMRTPGMTLHKMPLFAWSILVTAFLLLLSLPVLAGAITMLLTDRNFGTAFFEAQTGGDPVLFQHLFWFFGHPEVYILILPGFGMISHIVSTFSRKPVFGYLGMAYAMVAIGVVGFVVWAHHMYTVGLSTDTKAYFLAATMIIAVPTGIKIFSWIATMWGGSISFKTPMMWALGFIFMFTVGGVTGVVLANAGVDTAMHDTYYVVAHFHYVLSLGAVFAIFAGFYYWFSKMSGYEYS

SEQ ID NO: 104377 - protein, 252 aa, Unknown
  Bacterial polypetide isolated from the Sargasso Sea
MPLFVWSWLITAYLLIAVMPVLAGAVTMMLMDIHFGTSFFNAAGGGDPVLFQHIFWFFGHPEVYIMILPAFGIVSHIIETFSRKPLFGYASMVWAMLSIAILSFVVWAHHMFTVGMPLAAEIFFMWATMLIAVPTGVKVFNWVATMFRGSITFETPMLFACAFVVLFTIGGLSGLMLAIVPADFQYHDTYFVVAHFHYVLVPGAIFSIMAAVYYWIPKWSGNMYDERLGKLHFWLSFIGVNVTFFPQHFIGL

SEQ ID NO: 104378 - protein, 275 aa, Unknown
  Bacterial polypetide isolated from the Sargasso Sea
FGHPEVYILILPAFGIVSEVLPTFSRKPLFGYPAIVFAGFGIAFIGFGVWAHHMFASAISPVAQAGFGLSTMIIAVPTGVKIFNWLGTIWGGKLTLNTPMLFALGFIGMFVIGGLSGVTHSVVPADTQQTDTYYIVAHFHYVLFGGALFGIFSGLYFWFPKVWGRMYNETMGKIHFWLMLIGFNVTFGPMHWLGLQGQVRRTWVYAEETNLGFWNLIVTIGAFILAVAILVFMANWIYSRRKGEKAPFDPWDARTIEWSIPSPTPVWNFSKSTLK

SEQ ID NO: 104379 - protein, 250 aa, Unknown
  Bacterial polypetide isolated from the Sargasso Sea
KPIFGYLGMAYAMVAIGVVGFVVWAHHMYTVGLDTDTKAYFLAATMIIAVPTGIKVFSWVATMWGGSISFKTPMLWAIGFIVLFTLGGVTGVVLANAGVDTALHDTYYVVAHFHYVLSLGAVFAIFAGFYYWFSKMSGYEYSEFLGKIHFWLTFIGVNLIFFPQHFLGLAGMPRRYADYPDAFAGWNYVSSIGSYISLIGVAVFLVNILYAFIKKQSAEKNPWGEGATTLEWTVASPPPFHTFEELPKIK

SEQ ID NO: 104380 - protein, 292 aa, Unknown
  Bacterial polypetide isolated from the Sargasso Sea
AGLIGGIFSLLIRMELAEPGMQILGDDYQQYNVWITAHGLLMIFFMIMPAMVGGFGNYFVPLLIGAPDMAFPRMNNLSFWLLPPSIILLIGSAFVGDGAGPGWTLYAPLSTSGHGGPAVDMAILSMHLAGASSILGAINFITTIFNMRAPGMTMHKMPLFAWSILITAFLLLLSLPVLAGAITMMLTDRNFGTAFFNAEMGGDPVLFQHLFWFFGHPEVYILILPGFGIISHVVSTFSKKPIFGYLGMAYAMAAIGVVGFVVWAHHMYTTGLDVDTRAYFLAATMVIAVPTG

SEQ ID NO: 104381 - protein, 276 aa, Unknown
  Bacterial polypetide isolated from the Sargasso Sea
MSNTKANHPYHLVDPSPWPLVGAISALVLAVGAIMYMHEIDGGLVLGVGLLMSLATMAVWWRDVIKEAEHDGHHTTTVQLGLRYGMVLFIASEVMFFVAWFWAFFDASFYAGEAIQEARVAHTGGVWPPQGVEVFDPWHLPLLNTVILLTSGTTVTWAHHALKEGKRGGLIWGLVLTVLLGLLFTAVQAYEYGHAAFGFTDGIYSSTFYMATGFHGAHVIIGSIFLIVCLGRALAGHFKPDHHFGFEAAAWYWHFVDVVWLFLFFAIYWWGGLGGT

SEQ ID NO: 104382 - protein, 32 aa, Unknown
  Bacterial polypetide isolated from the Sargasso Sea
AAAWYWHFVDVVWLFLFVCIYWWGGSGYVPAS

SEQ ID NO: 104383 - protein, 69 aa, Unknown
  Bacterial polypetide isolated from the Sargasso Sea
YGAVFYMATGFHGFHVIIGTIFLAVCLWRGKLGHFTKDHHFGFEAAAWYWHFVDVVWLFLFAAIYIWGS

SEQ ID NO: 104384 - protein, 284 aa, Unknown
  Bacterial polypetide isolated from the Sargasso Sea
LIPFYVGARDMAFPRLNAVAFWLIPPSGLMLVASYFVEGAAQAGWTAYPPLSITTPQSGQIIWILSVLLLGGSSIFGGINFIATIIKLRRPGLKLMQLPMYCWAMLGTSLLVVLSTPVLAGTLILLSFDIIANTGFFNPVLGGNVVVYQHLFWFYSHPAVYIMVLPAFGLVSEILPIHARKPLFGYTTMVFSIMGIVVLGLVVWAHHMFTSGTPPWMRLFFTIATAFIAVPTGIKFFNWVATLWGGKISINSAMLFSCGFIINFVFGGITGVALAPGTFRYSRS

SEQ ID NO: 104385 - protein, 321 aa, Unknown
  Bacterial polypetide isolated from the Sargasso Sea
MITLHGLIMIFGGVMPAFVGLANWLVPMMIGAPDMALPRMNNLSFWILPFAFFILLSSLFMEGGAPNFGWTFYAPLSTTYAPPSVTFFIFSVHIMGASSIMGAINVVVTIMNMRAPGVTLMKMPLFVWSWLITAYLLIAVMPVLAGAVTMMLMDIHFGTSFFNAAGGGDPVLFQHIFWFFGHPEVYIMILPAFGIVSHIIETFSRKQLFGYSSMVWAMLSIAILSFVVWAHHMFTVGLPLAAEIFFMWATMLIAVPTGVKVFNWVATMFRGSLTFETPMLFAVAFVVLFTIGGLSGLMLAIVPADFQYHDTYFVVAHFSIM

SEQ ID NO: 104386 - protein, 249 aa, Unknown
  Bacterial polypetide isolated from the Sargasso Sea
MNDHHDHKPGFFTRWFFSTNHKDIGTLYLIYAIIAGVVGGALSVIMRMELSEPGMQFVADGQMWNVIISAHGLLMIFFVVMPALIGGFGNWFIPLMIGAPDMAFPRLNNISFWLLVPALFLIAGSMFVGSGAGTGWTIYPPLSSNIGHSTPAVDMAIFSLHLAGASSILGAVNFITTILNMRAPGMTIHKMPLFVWAMLVTAFLLLLAVPVLGGAITMLLTDRNFGTTFFDPAGGGDPVLFQHLFWFFG

SEQ ID NO: 104387 - protein, 272 aa, Unknown
  Bacterial polypetide isolated from the Sargasso Sea
AYFGTSFFDAAGGGDPVLFQHIFWFFGHPEVYIMILPAFGITSHIISTFSRKPLFGHASMVYAMVSIAVLSFVVWAHHMFTVGMPLAAELFFMWATMIIAIPTGVKVFNWCATMFKGSITYETPMLFAVAFVVLFTIGGFSGLMLAITPADFQYHDTYFVVAHFHYVLVPGSIFSIMAAVYYWLPKWTGNMYDEKMGRLHFWLSFVGVNVTFFPQHFVGLAGMPRRYADYSLQFAEWNAVSSVGAFLFGLSQLLFLYIVVKTVFAGKKATPQ

SEQ ID NO: 104388 - protein, 309 aa, Unknown
  Bacterial polypetide isolated from the Sargasso Sea
WGIFTATVLAMLAFPALLVSSIMMTLDKVLGTSFFMPTILKAGEVLEYGGGSPILFQHLFWFFGHPEVYIVALPAFGIVSDLISVHARKNIFGYRMMVWAIVGIGALSFFVWAHHMYVSGMNPWFGFFFASTTLIIAVPTAMKVYNWILTLWRGNIRINTVMLWCLGFIVTFVNGGITGIFLGNVTVDVPLSDTYFVVAHFHMVMGIAPLMVIMGAVYHWFPLVSGRMLSEKLGKWHFWLTFLGAYSIYFPMHYLGFIGVPRRYFEMYDSPYMTSAVGMNEFISLAAFIVGAAQFILIFNVIKTLKNEK

SEQ ID NO: 104389 - protein, 254 aa, Unknown
  Bacterial polypetide isolated from the Sargasso Sea
ATFARKPLFGYASMVYATASIALLSFLVWAHHMFTTGMPVFAELFFMYCTMLIAVPTGVKVFNWVATMWRGAMTFEVPMMFALAFIVLFTIGGFSGLMLAITPADFQYHDTYFVVAHFHYVLVTGAIFSIMAAAYYWLPKWTGHMYDETLGQWHFWCSLISVNVLFFPMHFVGLAGMPRRIPDYALQFADFNALISIGGFAFGLSQLLFVALVVKCIKGGKKATAQVWEGAEGLEWTIASPAPYHSFTTPPEIK

SEQ ID NO: 104390 - protein, 167 aa, Unknown
  Bacterial polypetide isolated from the Sargasso Sea
LFTIGGFSGLMLAITPADFQYHDTYFVVAHFHYVLVPGAIFAVIAAVYYWLPKWTGKMYNETLGKVHFWMTTVFVNITFFPMHFVGLAGMPRRIPDYAVQFTDFNMIASIGAFGFGLSQLLFVYILFQTLRQPVTAADKSWEGAEGLEWTLPSPAPYHSFDTPPKVD

SEQ ID NO: 104391 - protein, 83 aa, Unknown
  Bacterial polypetide isolated from the Sargasso Sea
YEYNHAAFSFTDGIYASTFYMATGFHGFHVLVGTIFLTVCLFRGLNGHFSPDHHFGFEAAAWYWHFVDVVWLFLFVCIYWWGG

SEQ ID NO: 104392 - protein, 149 aa, Unknown
  Bacterial polypetide isolated from the Sargasso Sea
MSATTAVHEQHHNPTGWKRWAYSTNHKDIGTMYLIFAIIAGLIGSAFSVLMRMELMHPGDGILGGDYHLYNVLVTGHGLIMIFFMVMPAMIGGFGNWFVPIMIGAPDMAFPRMNNISFWLLPVALILLLVSIFVDGPPGAQGVGGGWTI

SEQ ID NO: 104393 - protein, 215 aa, Unknown
  Bacterial polypetide isolated from the Sargasso Sea
FLAATMIIAVPTGIKIFSWIATMWGGSISFKTPMVWALGFIFLFTVGGVTGVVLANAGVDTALHDTYYVVAHFHYVLSLGAVFAIFAGFYYWFGKMSGYEYSEWMGQLHFWLTFIGVNLVFFPQHFLGLAGMPRRYADYPDAFADWNYISSIGSYISVVGLVVFFANLIYAFAKKKKAAQNPWGEGATTLEWTVPSPPNFHTFDELPKFEDYERH

SEQ ID NO: 104394 - protein, 288 aa, Unknown
  Bacterial polypetide isolated from the Sargasso Sea
SSTAGTPGMSMDLAIFSLHLAGVSSILGAANFITTIFNMRTPGMTLHKMPLFAWAMLVTAFLLLLAVPVLAGAITMLLTDRNFGTTFFIPEGGGDPILFLHLFWFFGHPEVYIMILPAFGIVSHIISTFSKKPVFGYLGMAYAMVAIGVVGFVVWAHHMYTVGLSVDTRAYFTAATMVIAVPTGVKIFSWIATMWGGSISFRVPMLWAIGFIFLFTVGGVTGVVLSNAGLDVVLHNTYYVIAHFHYVLSLGAVFGLFAGFYYWFSKMTGYEYNEGLAKLHFYVTFIGV

SEQ ID NO: 104395 - protein, 154 aa, Unknown
  Bacterial polypetide isolated from the Sargasso Sea
MYTQTASHDDHHTPTGWKRWAYSTNHKDIGTMYLIFAIVAGVIGTAFSVLMRMELMHPGDGILGGNYHLYNVLVTGHGLIMIFFMVMPAMIGGFGNWFVPIMIGAPDMAFPRMNNISFWLLPVSLTLLILSIFADGPPGQTGVGGGWTIYPPLS

SEQ ID NO: 104396 - protein, 256 aa, Unknown
  Bacterial polypetide isolated from the Sargasso Sea
MTSESATSQPWHVPEPSPWPIVGTVAALATALGLVWFMHTGSPWLLGIGGILVLWTMIGWWRQVILEANDRTSHTSPVKVGLRIGMLLFIASEVMFFFAFFWAYFHSSLPILNIVAGPWPNEGVEAIGAAGIPLLNTLLLITSSLTVTIAHHAILENEREKVIFWTGITAVLGIIFLGVQIYEYHVLSFGLKDGVYPSTFYLATGFHGFHVFVGTIFLIICYFRARAGHFTPEAHIGYEAAAWYWHFVDVVWIFLY

SEQ ID NO: 104397 - protein, 239 aa, Unknown
  Bacterial polypetide isolated from the Sargasso Sea
MSAEKKHDYHLVDPSPWPIYVSFSCLVLAIGAVYYMHSDVSWGMYLGLALLIYGAYMWFRDVVIEAEHQGHHTPVVQIHHRYGMTLFIASEVMFFVAWFWAYFDVSLFPNDFVGNVWPPKDIVTFDPWDIPLINTLVLLLSGTTVTWSHHSLLEGDRKGFIQGLVLTVILGAFFTALQAYEYHHATFAFSDHIYGSVFYMATGFHGFHVIVGTIFLAVCLWRGKLGHFTKDHHFGFEAA

SEQ ID NO: 104398 - protein, 95 aa, Unknown
  Bacterial polypetide isolated from the Sargasso Sea
VILGFFFTLLQAYEYHHATFTYSGHIYGAVFYMATGFHGFHVIIGTIFLAVCLWRGKLGHFTKDHHFGFEAAAWYWHFVDVVWLFLFAAIYIWGS

SEQ ID NO: 104399 - protein, 261 aa, Unknown
  Bacterial polypetide isolated from the Sargasso Sea
MIMIFFMVMPAMIGGFGNWFVPIMIGAPDMAFPRMNNISFWLLPTSFILLIMSIFMDGPPGQTGVGGGWTIYPPLSSTAGQPGPAMDFAILSLHLAGASSILGAVNFITTILNMRTPGMTLHKMPLFAWSILVTAFLLLLSLPVLAGAITMLLTDRNFGTAFFDAQTGGDPVLFQHLFWFFGHPEVYILILPGFGMISHIVSTFSRKPVFGYLGMAYAMVAIGIVGFVVWAHHMYTVGLSTDTKAYFLAATMIIAVPTGIK

SEQ ID NO: 104400 - protein, 247 aa, Unknown
  Bacterial polypetide isolated from the Sargasso Sea
VAIGIVGFVVWAHHMYTVGLSTDTKAYFLAATMIIAVPTGIKIFSWIATMWGGSISFKTPMVWALGFIFLFTVGGVTGVVLANAGVDTAMHDTYYVVAHFHYVLSLGAVFAIFAGFYYWFGKMTGYDYSEWMGQLHFWLTFIGVNLVFFPQHFLGLAGMPRRYADYPDAFAGWNYISSIGSYISVIGLVVFFINLAYAFYKKKAAAQNPWGEGATTLEWTVPSPPNFHTFEELPKFEVEEGVEKSNS

SEQ ID NO: 104401 - protein, 249 aa, Unknown
  Bacterial polypetide isolated from the Sargasso Sea
PSPWPIFTSFACLILAVGAVYYFHTKTLWLLLIGTALLIYGSFMWFRDVVDEAERQGHHTMVVQITHRYGMTLFIASEVMFFVAWFWAFFNASLFPTEAIGKIWPPADVKTFDPWDIPLINTLILLLSGTTVTWAHHAMIENDRKALVNGLIATVFLGFIFSCFQAYEYHHATFTIDGNIYGSTFYMATGFHGFHVIIGTIFLAVCLYRSIKGHFKPDHHFGFEAAAWYWHFVDVVWLFLFAAIYIWGS

SEQ ID NO: 104402 - protein, 273 aa, Unknown
  Bacterial polypetide isolated from the Sargasso Sea
MADAAIQGHGHEDERSFFTRWFMSTNHKDIGILYLIVSALTGFISVAFTVYMRLELMDPGVQYMCMEGFASDPCTPNGHLWNVLITGHGILMMFFVVIPALFGGFGNYFMPLQIGAPDMAFPRMNNLSFWMYVAGTALAVCSVFAPGGNNQLGSGVGWVLYPPLSVKEGGFSMDLAIFAVHVSGASSILGAINMITTFLNMRAPGMTLFKVPLFSWSIFVTSWLILLSLPVLAGAITMLLMDRNFGFTFFDPAGGGDPILYQHILWFFGHPEV

SEQ ID NO: 104403 - protein, 332 aa, Unknown
  Bacterial polypetide isolated from the Sargasso Sea
SFSALLVGALMMTLDNVLGTSFFMPTILKAGEVLEFGGGSPILFQHLFWFFGHPEVYIVALPAFGIVSDLISVHARKNIFGYRMMVWAIVGIGALSFFVWAHHMYVSGMNPWFGFFFATTTLIIAIPTAMKVYNWILTLWRGNIRLNTVMLWCLGFIVTFVNGGITGIFLGNVSVDVPLSDTYFVVAHFHMVMGIAPLMVIMGAIYHWFPLVAGRFLNEKLGKWHFWLTFLGAYSIYFPMHYLGFIGVPRRYFEMYDSPYMTSAVGMNEFISMAAFIVGAAQFLLIYNVIKTLKTGKPAGHNPWKANSLEWLTLSVPPEHGNWGEKLPTVHR

SEQ ID NO: 104404 - protein, 285 aa, Unknown
  Bacterial polypetide isolated from the Sargasso Sea
MRAELAAPGLDVVADGQAWNVIITAHGLLMVFFVVMPALIGGFGNWFVPIMIGAPDMAFPRMNNFSFWVLVPALVLLVVSATIGTGAGTGWTIYPPLSNKLGHAGPSVDMAIFALHLAGASSILGAVNFITTILNMRTPGMTIHKMPLFVWAMLITAFLLLLAVPVLAGAITMLLTDRNFGTAFFNPAGGGDPVLFQHLFWFFGHPEVYIMILPAFGIVSQVISTFSRKPIFGYLGMVYAMVSIGFIGFIVWAHHMFTVGLSADLRAYFMLATIIIAVPTGIKIF

SEQ ID NO: 104405 - protein, 226 aa, Unknown
  Bacterial polypetide isolated from the Sargasso Sea
MGYFVGECIFGLALLIYGAYMWFRDVVIEAEHQGHHTPVVQIHHRYGMTLFIASEVMFFVAWFWAYFDISLFPNEFVGNVWPPKDIETFDPWDIPLINTLVLLLSGTTVTWAHHALLEDDRKGFIQGLTLTVILGFFFTLLQAYEYHHATFTYSGHIYGAVFYMATGFHGFHVIIGTIFLAVCLWRGRLGHFTKDHHFGFEAAAWYWHFVDVVWLFLFAAIYIWGS

SEQ ID NO: 104406 - protein, 272 aa, Unknown
  Bacterial polypetide isolated from the Sargasso Sea
MAHEKNHDYHILNPSIWPFIGSIAAFVMLFGAVVFFHSDNPWMFIAGFVSVLFVMYVWWSDTVKENQVGDHTPVVLIGLRYGFILFIMSEVMFFLAWFWSFFKHAMYPMGDMSPLQDGQFPPAGIEVFDPWHLPLINTLILLCSGAAATWAHHAIAHDEDRKSMVQGLVIAVGLGVLFTVFQAYEYQHAAFGFSGNIYGANFFMATGFHGFHVIVGTIFLAICMLRAMRGHFTKDQHLGFEAAAWYWHFVDVVWLFLFAAIYVWGSVGATIH

SEQ ID NO: 104407 - protein, 105 aa, Unknown
  Bacterial polypetide isolated from the Sargasso Sea
IKALWLTVGLGVAFTLLQAFEYYEAFHHYFKFTDGIYPSVFYMATGFHGFHVMVGTAFLAVCLFRVYKNHMTPERHFGLEAAAWYWHFVDVVWLFLYVCVYIWGA

SEQ ID NO: 104408 - protein, 313 aa, Unknown
  Bacterial polypetide isolated from the Sargasso Sea
FSLFLLFPALIVSCIMMTLDNILGTSFFMPAIVEFGEQTEYSGGSPILFQHLFWFFGHPEVYIVALPAFGIVSDLISVHARKNIFGYRMMVWAIVIIGALSFVVWAHHMYVAGMNPWFGFFFATTTLIIAVPTALKVYNWVITLWRGNIHLTIPMLFALGFIVTFVNGGITGLFLGNVIVDVPLSDTYFVVAHFHMVMGIAPVLVVFGAIYHWFPLITGRFLHEGMGKFHFWVTFLGSYAIYFPMHYLGFVGVPRRYYEMYDSEFMAVSTNYLNQFITVVALIVGFTQILFLYNIIISSKLEKRLEKILESLF

SEQ ID NO: 104409 - protein, 254 aa, Unknown
  Bacterial polypetide isolated from the Sargasso Sea
MSAGKPKHDYHLVDPSPWPIYVSFATLVLAFGAVYYFHSKALWLLLIGFALVVYGAFMWWRDVIEEAEHQGHHTPVVQIGHRYGMTLFIASEVMFFVAWFWAFFNASLFPPDSIGGIWPPADIKTFDPWDIPLINTLILLLSGTTVTWAHHAMLENDRKGLVNGLIATVFLGFIFSCFQAYEYHHATFTLDGGIYGSTFYMSTGFHGFHVIVGTVFLAVCLFRSMRGHSTPQHHFGFEAAAWYWHFVDVVWLFL

SEQ ID NO: 104410 - protein, 93 aa, Unknown
  Bacterial polypetide isolated from the Sargasso Sea
CFTLLQAFEYYEAVHHYFKFTDGIYPSVFYMATGFHGFHVMVGTIFLGVCLFRVYKNHMTPDRHFGLEAAAWYWHFVDVVWLFLYVCVYIWGA

SEQ ID NO: 104411 - protein, 115 aa, Unknown
  Bacterial polypetide isolated from the Sargasso Sea
CAKNDNKKSFNIWLGVTVTLALIFVGLQAAEYYEAYAHYGLTLNSGIYGSTFFMLTGFHGFHVMMGGFMLAVMLSRSVFYNHFDPHSHFGFEAASWYWHFVDVVWVMLFLFVYIL

SEQ ID NO: 104412 - protein, 179 aa, Unknown
  Bacterial polypetide isolated from the Sargasso Sea
MYTQTATHNDHHTPTGWKRWAYSTNHKDIGTMYLIFAIVAGVIGTAFSVLMRMELMHPGDGILGGNYHLYNVLVTGHGLIMIFFMVMPAMIGGFGNWFVPIMIGAPDMAFPRMNNISFWLLPVSLTLLILSIFVDGPPGQTGVGGGWTIYPPLSSKAGQPGPAMDLAILSLHLAGASSI

SEQ ID NO: 104413 - protein, 137 aa, Unknown
  Bacterial polypetide isolated from the Sargasso Sea
MVDVTPDIIDHSHDHHPTGWRRYLYSTNHKDIGTLYLIFAIIAGVIGGVMSVIMRIELMYPGDGILGGDHNLYNVLVTNHGLIMIFFMVMPAMIGGFGNWIVPLMIGAPDMAFPRMNNISFWLLPAFFILLIASLFV

SEQ ID NO: 104414 - protein, 247 aa, Unknown
  Bacterial polypetide isolated from the Sargasso Sea
MLITAFLLLLAVPVLAGAITMLLTDRNFGTAFFNPAGGGDPVLFQHLFWFFGHPEVYIMILPAFGIVSQVISTFSRKPIFGYLGMVYAMVSIGFIGFIVWAHHMFTVGLSADLRAYFMLATIIIAVPTGIKIFSWIATMWGGSLTFETPMLFSIGFVFLFTLGGVTGVILANAGIDTVMHDTYYVVAHFHYVLSMGAMFGIFAGIYYWFGKMTGKQYNEFFGKLHFWLFFIGVNVTFFPQHFLGISG

SEQ ID NO: 104415 - protein, 217 aa, Unknown
  Bacterial polypetide isolated from the Sargasso Sea
MGLALVIYGAYMWFRDVVIEAEHQGHHTPVVQIHHRYGMTLFIASEVMFFVAWFWAYFDISLFPNEFVGNVWPPKDIETFDPWDIPLINTLVLLLSGTTVTWSHHSLLEGDRKGFIQGLTATVVLGFFFTLLQAYEYHHATFDYSGHIYGAVFYMATGFHGFHVIVGTIFLAVCLWRGKLGHFTKDHHFGFEAAAWYWHFVDVVWLFLFAAIYIWGS

SEQ ID NO: 104416 - protein, 304 aa, Unknown
  Bacterial polypetide isolated from the Sargasso Sea
AAGPDQSVYYVPAQGWYPVWLAFGFMLLVTGFASVLNMQKTGGSADWTQSLIGFAIVAFVFFRWFAKVIQENAEGYNNAQLKKSYVWGMGWFIFSEVMFFAAFFGALFYVRMWVVPWLGGEGSKGIAGDYLWPEFEATWPVVSNPNPEIFENPGQSMAPPALGSAWLTYLPFMNTVILLSSSVTVHMAHMAINTQERGKLAGWLGFTVLLGIIFLGLQVFEYYEAYAHMGLTLSSGIYGSTFFILTGFHGFHVTMGTVILLIQFFRVLKGHFKEHDCFGFESASWYWHFVDVVWVGLFIFVYVL

SEQ ID NO: 104417 - protein, 136 aa, Unknown
  Bacterial polypetide isolated from the Sargasso Sea
MADITADQVDSHDHHPTGWRRYLYSTNHKDIGTLYLIFAVIAGLVGTGMSVLMRMELMYPGDGILGGDHNLYNVLVTSHGLLMIFFMVMPAMIGGFGNWIVPLMIGAPDMAFPRMNNISFWLFAASLILLIASLFV

SEQ ID NO: 104418 - protein, 275 aa, Unknown
  Bacterial polypetide isolated from the Sargasso Sea
WFVPLMIGAPDMAFPRMNNFSFWILVPALVLLVVSATIGTGAGTGWTIYPPLSNKLGHAGPSVDMAIFALHLAGASSILGAVNFITTILNMRTPGMTLHKMPLFVWAMLITAFLLLLAVPVLAGAITMLLTDRNFGTTFFNPAGGGDPVLFQHLFWFFGHPEVYIMILPAFGIVSQVISTFSRKPVFGYLGMVYAMIAIGFIGFIVWAHHMFTVGMSADLRAYFMLATIIIAVPTGIKIFSWIATMWGGSLTFETPNVICNWICFFIYTWGSYRS

SEQ ID NO: 104419 - protein, 301 aa, Unknown
  Bacterial polypetide isolated from the Sargasso Sea
WCLGTGWTIYPPLSSITGHSSPAVDMAIFSLHLAGASSILGAVNFITTILNMRAPGMTIHKMPLFVWAMLVTAFLLLLAVPVLGGAITMLLTDRNFGTTFFDPAGGGDPVLFQHLFWFFGHPEVYIMILPAFGIVSHIVSTFSKKPVFGYLGMAYAMVAIGFIGFVVWAHHMYTVGFSANVRAYFMLATIVIAVPTGVKIFSWIATMWGGSITFTTPMLFALGFIFLFTLGGVTGVILANAGIDVVLHDTYYVVAHFHYVLSMGAVFGIFAGIYYWFGKMSGKNYSEFFGKLHFWLFFLGV

SEQ ID NO: 104420 - protein, 218 aa, Unknown
  Bacterial polypetide isolated from the Sargasso Sea
AATMIIAVPTGIKIFSWIATMWGGSISFKTPMVWALGFIFLFTVGGVTGVVLANAGVDTAMHDTYYVVAHFHYVLSLGAVFAIFAGFYYWFGKMTGYEYSEWMGQLHFWLTFIGVNLVFFPQHFLGLAGMPRRYADYPDAFAGWNYISSIGSYISVIGLVVFFINLAYAFYKKKAAAQNPWGEGATTLEWTVPSPPNFHTFEELPKFEDEEGVEKSTS

SEQ ID NO: 104421 - protein, 169 aa, Unknown
  Bacterial polypetide isolated from the Sargasso Sea
VVLANAGVDTAMHDTYYVVAHFHYVLSLGAVFAIFAGFYYWFSKMSGYEYSEWMGQLHFWLTFIGVNLIFFPQHFLGLAGMPRRYADYPDAFAGWNYISSIGSYIAVAGLVVFFANLIYAFAKKKAAAQNPWGEGATTLEWTVPSPPNFHTFEELPKFVDDQETEKSHS

SEQ ID NO: 104422 - protein, 161 aa, Unknown
  Bacterial polypetide isolated from the Sargasso Sea
MSPLQDGQFPPAGIEVFDPWHLPLINTLILLCSGAAATWAHHAIAHDEDRKSMVQGLVIAVGLGVLFTVFQAYEYQHAAFGFSGNIYGANFFMATGFHGFHVIVGTIFLAICMLRAMRGHFTKDQHLGFEAAAWYWHFVDVVWLFLFAAIYVWGSVGATIH

SEQ ID NO: 104423 - protein, 205 aa, Unknown
  Bacterial polypetide isolated from the Sargasso Sea
WFRDVVIEAEHKGHHTPVVQIHHRYGMTLFIASEVMFFVAWFWAYFDASLFPNEFMGNVWPPKDIETFDPWDIPLINTLVLLLSGTTVTWAHHSLLEDDRKGFINGLICTVILGAFFTLLQIYEYQHATFSFSGHIYGATFYMATGFHGFHVLVGTIFLAVCLWRGKLGHFTKEHHFGFEAAAWYWHFVDVVWLFLFAAIYIWGS

SEQ ID NO: 104424 - protein, 223 aa, Unknown
  Bacterial polypetide isolated from the Sargasso Sea
CLFWWRDVINESTFQNVHTPVVELGLRYGMALFIASEVMFFVAFFWAFFDASLTPKLPIEEYTEIFETNGAVGTWPPEGIKTFDPLDVPFLNTLILLMSGTTCTWAHHAVREGHRDQAIQALWITVGLGLFFTFMQGVEYYEAALHYFSFTDGIYPSVFYMATGFHGFHVMVGTAFLAVCLFRVYKNHFTPDRHFGLEAAAWYWHFVDVVWLFLFVCVYVWGA

SEQ ID NO: 104425 - protein, 185 aa, Unknown
  Bacterial polypetide isolated from the Sargasso Sea
GLRYGMTLFIASEVMFFVFWFWAYFNASLFPTEQIGSVWPPAEIHLMDPWHIPLINTLILLLSGTTVTWAHHALTEGNRKELIQGLWCTVGLGIIFTGFQVYEYMHADFAFSGHIYGATFYMATGFHGFHVLMGTVMLIVCLGRSIAGHFKADHHFGFEAAAWYWHFVDVVWLFLFAAIYVWGYY

SEQ ID NO: 104426 - protein, 208 aa, Unknown
  Bacterial polypetide isolated from the Sargasso Sea
DLASIWYHFTIISTFSRKPLFGHSSMVYAMVSIAVLSFVVWAHHMFTVGMPLVAELFFMWATMLIAIPTGVKVFNWCATIFKGSITYETPMLFSIAFVVLFTIGGFSGLMLAITPADFQYHDTYFVVAHFHYVLVPGAVFSIMAAVYYWLPKWTGNMYDEKMGRLHFWLSFAGVNITFFPQHFVGLARMPRRYADYALQFAEWNAVSS

SEQ ID NO: 104427 - protein, 275 aa, Unknown
  Bacterial polypetide isolated from the Sargasso Sea
MGAAGTINDLGKPESNSVYILYSGFAIFAITLYFWFRAVIREHIAGLDSAQLQKSFVFGMGWFIFSEVMFFAAFFGALFYVRNFSVPWLGGDGEKGLANMLWEGFEASWPVMSTPDAGSAFVLADKSMSWPGWGNALKWLPLWNTIVLLSSSVTVHFAHLALKNDNKKSFNTWLGVTVTLALIFVGLQAAEYYEAYAHYGLTLNSGIYGSTFFMLTGFHGFHVMMGGFMLAVMLSRSVFYNHFDPHNHFGFEAASWYWHFVDVVWVMLFLFVYIL

SEQ ID NO: 104428 - protein, 161 aa, Unknown
  Bacterial polypetide isolated from the Sargasso Sea
ALHDTYYVVAHFHYVLSMGAVFALFAGFYYWIGKISGYQYPEVYGQIHFWLFFIGVNLTFFPMHFLGLAGMPRRIPDYPDAFAGWNAVCSYGSYLSILASVFFFYVVYLTLTSEEKCPTNPWNFDDNEKSVPTLEWTVTSPPAFHTFEEIPAIKSPQQLTK

SEQ ID NO: 104429 - protein, 172 aa, Unknown
  Bacterial polypetide isolated from the Sargasso Sea
MSYADSASHDHHDHKPGFIKRWFFSTNHKDIGTLYIIFAILAGLVGGFFSLLMRAELAAPGLDVVADGQVWNVIITAHGLLMVFFVVMPALIGGFGNWFVPLMIGAPDMAFPRMNNFSFWILVPALVLLVVSATIGTGAGTGWTIYPPLSNKLGHAGPSVEKAIFALHLAGA

SEQ ID NO: 104430 - protein, 272 aa, Unknown
  Bacterial polypetide isolated from the Sargasso Sea
ITTILNMRTPGMTLHKMPLFAWSILVTAFLLLLSLPVLAGAITMLLTDRNFGTAFFEAQTGGDPVLFQHLFWFFGHPEVYILILPGFGMISHIVSTFSKKPVFGYLGMAYAMVAIGIVGFVVWAHHMYTVGLGTDTKAYFLAATMIIAVPTGIKIFSWIATMWGGSISFKTPMMWALGFIFMFTVGGVTGVVLANAGVDTAMHDTYYVVAHFHYVLSLGAVFAIFAGFYYWFSKMSGYEYSEWLGHLHFWLTFVGVNLIFFPQHFLGLAGMP

SEQ ID NO: 104431 - protein, 46 aa, Unknown
  Bacterial polypetide isolated from the Sargasso Sea
AVCLFRSMKGHSTPTHHFGFEAAAWYWHFVDVVWLFLFAAIYIWGS

SEQ ID NO: 104432 - protein, 245 aa, Unknown
  Bacterial polypetide isolated from the Sargasso Sea
MIGIGVIGFAVWAHHMFTVGLSANSLVYFTAATMIIAVPTGIKIFSWIATMWGGSIELKTPMLFSIGFIFLFTVGGVTGVVLANSAIDRAFHDTYYVVAHFHYTMSLGALFGLYASYYYWISKISGRQYPEFWGKVHFWTTFIGVNLVFFPQHFLGLAGMPRRIPDYPDAYAHFNKISSYGTYFSMASVGLFILIVIYTSLKGKKVGNNPWGEGATTLEWTVSSPPPFHCFEDGIPKVKGEQFRG

SEQ ID NO: 104433 - protein, 323 aa, Unknown
  Bacterial polypetide isolated from the Sargasso Sea
SINVVVTIMNMRAPGVDLMKMPLFVWSWLITAYLLIAVMPVLAGAVTMMLMDIHFGTSFFNAAGGGDPVLFQHIFWFFGHPEVYIMILPAFGIVSHIIETFSRKQLFGYSSMVWAMLSIAILSFVVWAHHMFTVGLPLAAEIFFMWATMLIAVPTGVKVFNWVATMFRGSLTFETPMLFAISFVVLFTIGGLSGLMLAIVPADFQYHDTYFVVAHFHYVLVPGAIFSIMAAVYYWIPKWCGNMYDERLGKLHFWLSFIGVNVTFFPQHFIGLAGMPRRYPDYSLIFADWNMVSSVGAFLFGFSQLLFLFIVIKTVMGGKKATD

SEQ ID NO: 104434 - protein, 96 aa, Unknown
  Bacterial polypetide isolated from the Sargasso Sea
MGVFFTFMQGVEYYEAALHYFSFTDGIYPSVFYMATGFHGFHVMVGTAFLAVCLFRVYKNHFTPDRHFGLEAAAWYWHFVDVVWLFLFICVYVWGA

SEQ ID NO: 104435 - protein, 293 aa, Unknown
  Bacterial polypetide isolated from the Sargasso Sea
FWNYLIPFYVGARDMAFPRLNAVAFWLIPPSGLMLVASYFVEGAAQAGWTAYPPLSITTPQSGQIIWILSVLLLGGSSIFGGINFIATIIKLRRPGLKLMQLPMYCWAMLGTSLLVVLSTPVLAGTLILLSFDIIANTGFFNPVLGGNVVVYQHLFWFYSHPAVYIMVLPAFGLVSEILPVHARKPLFGYTTMVFSIMGIVVLGLVVWAHHMFTSGTPPWMRLFFTIATAFIAVPTGIKFFNWVATLWGGKISINSAMLFSCGFIINFVFGGITGVALAQVPFDIHVHDTYFV

SEQ ID NO: 104436 - protein, 212 aa, Unknown
  Bacterial polypetide isolated from the Sargasso Sea
GTMYLIFAIVAGLIGSAFSVLMRMELMYPGDGILGGNHHLYNVLVTGHGLIMIFFMVMPAMIGGFGNWFVPIMIGAPDMAFPRMNNISFWLLPVSLILLLASIFVDGPPGQTGVGGGWTIYPPLSSKTGQPGPAMDLAILSLHIAGASSILGAINFITTILNMRTPGMTLHKMPLFAWSILVTAFLLLLSLPVLAGAITMLLTDRNFGTAFF

SEQ ID NO: 104437 - protein, 112 aa, Unknown
  Bacterial polypetide isolated from the Sargasso Sea
ILAGQRSQALVSLWITIVLAAVFTGLQVMEYIEAPFTITDGVYGSTFYLATGFHGFHVFVGTIFLFVCLVRSYKNHFTINHHFGFEAAAWYWHFVDVVWLFLFVAIYWWGGN

SEQ ID NO: 104438 - protein, 290 aa, Unknown
  Bacterial polypetide isolated from the Sargasso Sea
GMTIHKMPLFVWAMLITAFLLLLAVPVLAGAITMLLTDRNFGTTFFNPAGGGDPVLFQHLFWFFGHPEVYIMILPAFGIVSQVISTFSRKPIFGYLGMVYAMVSIGFIGFIVWAHHMFTVGMSADLRAYFMLATIIIAVPTGIKIFSWIATMWGGSLTFETPMLFAIGFVFLFTLGGVTGVILANAGIDTVMHDTYYVVAHFHYVLSMGAMFGIFAGIYYWFGKMTGKQYNEFFGKLHFWLFFIGVNVTFFPQHFLGLAGMPRRIPDYPDAYAGWNLISSYGSYLSFGAT

SEQ ID NO: 104439 - protein, 294 aa, Unknown
  Bacterial polypetide isolated from the Sargasso Sea
MSTNIDKLHDDHHHTPSGIMRWITTTNHKDIGTLYLWFSLLMFFIGGFMALVIRAELFQPGLQLVIPGFFNQMTTMHALIMIFGAVMPAFVGLANWQIPLMIGAPDMALPRLNNWSFWILPFAFTMMISTLFFESGGPAAGWTLYPPLSLQGGDSMPFVILSIHMLGLSSILGAINVIATILNMRAPGMTLMKMPIFVWTWLITAFLLIAAMPVLAGAITMLLTDRFFGTTFFTASGGGDPVMFQHIFWFFGHPEVYILILPAFGIISTIIPAFSRKKLFGYDSMVYATASIAL

SEQ ID NO: 104440 - protein, 285 aa, Unknown
  Bacterial polypetide isolated from the Sargasso Sea
VLFQHLFWFFGHPEVYILILPGFGIVSHVVATFSKKPVFGYLGMAYAMVSIGFLGFIVWAHHMYTVGMDADVKAYYIFATMVIAVPTGIKVFSWIATMWGGSVELKTPMLWAIGFIFLFTVGGVTGVVLANAGIDHSLHDTYYVVAHFHYVLSMGAVFAIFSGFYYWFGKMFGSDYSELLGKLHFWLTFVGVNLIFFPQHFLGLAGMPRRYVDYPDAYAGWNYISSIGSFVTLIGLAVFFIMLVHAFVRQKQTADNPWGEGATTLEWTLSSPPPFHQFEELPEVK

SEQ ID NO: 104441 - protein, 287 aa, Unknown
  Bacterial polypetide isolated from the Sargasso Sea
KMPLFAWSILVTAFLLLLSLPVLAGAITMLLTDRNFGTAFFDAQTGGDPVLFQHLFWFFGHPEVYILILPGFGMISHIVSTFSRKPVFGYLGMAYAMVAIGIVGFVVWAHHMYTVGLSTDTKAYFLAATMIIAVPTGIKIFSWIATMWGGSISFKTPMVWALGFIFLFTVGGVTGVVLANAGVDTAMHDTYYVVAHFHYVLSLGAVFAIFAGFYYWFGKMTGYEYSEWMGQLHFWLTFIGVNLVFFPQHFLGLAGMPRRYADYPDAFAGWNYISSIGSYISVIGLVV

SEQ ID NO: 104442 - protein, 226 aa, Unknown
  Bacterial polypetide isolated from the Sargasso Sea
MSAEKKHDYHLVDPSPWPIYTSFACLVLAIGAIFYMHNGISWGMYLGLALLIYGAYMWFRDVVIEAEHQGHHTPVVQIHHRYGMTLFIASEVMFFVAWFWAYFDISLFPNEFVGNVWPPKDIETFDPWDIPLINTLVLLLSGTTVTWAHHALLEDDRKGFIQGLTLTVILGFFFTLLQAYEYHHATFTYSGHIYGAVFYMATGFHGFHVIIGTIFLAVCLWRGRLG

SEQ ID NO: 104443 - protein, 294 aa, Unknown
  Bacterial polypetide isolated from the Sargasso Sea
HKDIGTMYLIFAFVAGVIGTAFSVLMRMELMHPGDGILGGNYHLYNVLVTGHGLIMIFFMVMPAMIGGFGNWFVPIMIGAPDMAFPRMNNISFWLLPVSLTLLILSIFADGPPGQTGVGGGWTIYPPLSSKAGQPGPAMDLAILSLHLAGASSILGAVNFITTILNMRTPGMTLHKMPLFAWSILVTAFLLLLSLPVLAGAITMLLTDRNFGTAFFEAQTGGDPVLFQHLFWFFGHPEVYILILPGFGMISHIVSTFSRKPVFGYLGMAYAMVAIGIVGFVVWAHHMYTVGLST

SEQ ID NO: 104444 - protein, 86 aa, Unknown
  Bacterial polypetide isolated from the Sargasso Sea
LEYYEAYAHYGLKLNSGIYGSTFFMLTGFHGFHVMMGGFMLAIMLARSVFAGHFEQHDHFGFEAASWYWHFVDVVWLMLFIFVYIL

SEQ ID NO: 104445 - protein, 131 aa, Unknown
  Bacterial polypetide isolated from the Sargasso Sea
TLILLMSGTTCTWAHHAVREGHRDQAIKALWLTVGLGVAFTLLQAFEYYEAFHHYFKFTDGIYPSVFYMATGFHGFHVMVGTAFLAVCLFRVYKNHMTPERHFGLEAAAWYWHFVDVVWLFLYVCVYIWGA

SEQ ID NO: 104446 - protein, 270 aa, Unknown
  Bacterial polypetide isolated from the Sargasso Sea
SAIMMILDHSIGTSFFMPAMISAGEQLSYNDGSPILFQHLFWFFGHPEVYIVALPAFGLVSDVLATHARKNIFGYRMMVWAILAIGGLSFIVWAHHMYVSGMNPYFGFFFATTTLIIAVPTALKVYNWVLTLWQGNLHLRTPMLFAIGFIFTFIHGGLTGLFLGNVTIDLPLSDTYFVVAHFHMVMGVSPVLVVFASIYHWFPLMSGKMYNETLGKWHFWLTFLGAYAVYLPMHYLGFQGVPRRYFSLGNTDFLPESAHALNTSITISAI

SEQ ID NO: 104447 - protein, 190 aa, Unknown
  Bacterial polypetide isolated from the Sargasso Sea
MSKTKQSHPYHLVDPSPWPLSGAISGLVIAVGAIMYMHEINYGSWVFGMGGFLVIATMFGWWRDVIREAQHEGHHNPIVVIGLRYGMALFIASEVMFFVAWFWAFFDASIFANEAIQYSRVTFTGGEWPPVGVEVFDPFHLPLLNTVILLTSGTTCTWAHHALIEGNRKGLVYGLVATIGLGVLFTFVQA

SEQ ID NO: 104448 - protein, 166 aa, Unknown
  Bacterial polypetide isolated from the Sargasso Sea
FTIGGFSGLMLAITPADFQYHDTYFVVAHFHYVLVPGSVFSIMAAVYYWLPKWCGNMYDERLGRLHFWLSFIGVNVTFFPQHFIGLAGMPRRIPDYALQFADWNMISTAGAFLFGASQILFLFIVVKTVMGGKKATPEVWEGAQGLEWTVDSPPPYHTFSTPPLVK

SEQ ID NO: 104449 - protein, 241 aa, Unknown
  Bacterial polypetide isolated from the Sargasso Sea
DAQQQDTYYVVAHFHYVLFGGALLGLWSGIYYWWPKFTGKFLNEKIGYLHFIIVLIGFNITFFPMHWLGLDGMPRRIATYPESMGWEVSNLVASLGSFILGFGVLVFLYNVIYSRKGPKIAGNDPWDGRTLEWSIPSPPPHYNFETIPEVKYRDDFWYKKYPELANESHGGGSGVEENSHSDSHEEPHMPDPSYYPLFISLGMTIMIGGFIPFTGHWIVCGIGLAIFTWAFLGWCYEPVND

SEQ ID NO: 104450 - protein, 313 aa, Unknown
  Bacterial polypetide isolated from the Sargasso Sea
FLYICSAYYWAHHQSWGSINVIVTIMNMRAPGMTLMKMPLFVWSWLITAYLLIAVMPVLAGAVTMMLMDIHFGTSFFNAAGGGDPVLFQHIFWFFGHPEVYIMILPAFGIASHIIETFSRKQLFGYASMVWAMASIAILSFVVWAHHMFTVGLPLAAELFFMWATMLIAVPTGVKVFNWVTTMFKGSISYETPMLFAIAFVVLFTIGGFSGLMLAITPADFQYHDTYFVVAHFHYVLVPGSIFSIMAAVYYWIPKWTGNMYDERLGKLHFWLSFIGVNVTFFPQHWIGLAGMPRRVPDYALSFADWNMISSVG

SEQ ID NO: 104451 - protein, 109 aa, Unknown
  Bacterial polypetide isolated from the Sargasso Sea
FWLMFVGVNLTFFPMHFLGLQGMPRRYADYPDAYAGWNAIATYGSYISGVAVIWFVIILFRTLYFGKQCPDNPWGGEPDTLEWKTSSPPPFHTYDTLPSIGKKSKKAGH

SEQ ID NO: 104452 - protein, 88 aa, Unknown
  Bacterial polypetide isolated from the Sargasso Sea
SCFQAYEYHHATFTLDGGIYGSTFYMSTGFHGFHVIVGTVFLAVCLFRSMRGHSTPQHHFGFEAAAWYWHFVDVVWLFLFAAIYIWGS

SEQ ID NO: 104453 - protein, 98 aa, Unknown
  Bacterial polypetide isolated from the Sargasso Sea
TATVVLGFFFTLLQAYEYHHATFDYSGHIYGAVFYMATGFHGFHVIVGTIFLAVCLWRGKLGHFTKDHHFGFEAAAWYWHFVDVVWLFLFAAIYIWGS

SEQ ID NO: 104454 - protein, 307 aa, Unknown
  Bacterial polypetide isolated from the Sargasso Sea
GAPDMALPRMNNLSFWILPFAFFILLSSLFMEGGAPNFGWTFYAPLSTTYAPPSVTFFIFSVHIMGASSIMGSINVVVTIMNMRAPGMSLMKMPLFVWSWLITAYLLIAVMPVLAGAVTMMLMDIHFGTSFFNAAGGGDPVLFQHIFWFFGHPEVYIMILPAFGIASHIIETFSRKQLFGYSSMVWAMASIAILSFVVWAHHMFTVGLPLAAELFFMWATMLIAVPTGVKVFNWVTTMFKGSITYETPMLFAIAFVVLFTIGGFSGLMLAITPADFQYHDTYFVVAHFHYVLVPGSIFSIMAAVYFW

SEQ ID NO: 104455 - protein, 271 aa, Unknown
  Bacterial polypetide isolated from the Sargasso Sea
MSATTADHEHHHNPTGWKRWAYSTNHKDIGTMYLIFAIVAGIIGSAFSVLMRMELMHPGDGILGGDYHLYNVLVTGHGLIMIFFMVMPAMIGGFGNWFVPIMIGAPDMAFPRMNNISFWLLPVALILLLVSIFVDGPPGAQGVGGGWTIYPPLSSKTGQPGPAMDLAILSLHVAGASSILGAINFITTILNMRTPGMTLHKMPLFSWSILVTAFLLLLSLPVLAGAITMLLTDRNFGTAFFEAQTGGDPVLFQHLFWFFGHPEVYILILPG

SEQ ID NO: 104456 - protein, 51 aa, Unknown
  Bacterial polypetide isolated from the Sargasso Sea
GTIFLAVCLWRGKLGHFTKDHHFGFEAAAWYWHFVDVVWLFLFAAIYIWGS

SEQ ID NO: 104457 - protein, 309 aa, Unknown
  Bacterial polypetide isolated from the Sargasso Sea
GQPGPAMDLAILSLHLAGASSILGAVNFITTILNMRTPGMTLHKMPLFAWSILVTAFLLLLSLPVLAGAITMLLTDRNFGTAFFEAQTGGDPVLFQHLFWFFGHPEVYILILPGFGMISHIVSTFSRKPVFGYLGMAYAMVAIGIVGFVVWAHHMYTVGLSTDTKAYFLAATMIIAVPTGIKIFSWIATMWGGSISFKTPMMWALGFIFMFTVGGVTGVVLANAGVDTAMHDTYYVVAHFHYVLSLGAVFAIFAGFYYWFSKMSGYEYSEWLGHLHFWLTFVGVNLIFFPQHFLGLAGMPRRYADYPDA

SEQ ID NO: 104458 - protein, 164 aa, Unknown
  Bacterial polypetide isolated from the Sargasso Sea
FWAYFDASLFPGEFVGNVWPPKDIETFDPWDIPLINTLVLLLSGTTVTWSHHALLEDDRKSFIQGLWLTVILGASFTALQIYEYQHASFNFSGHIYGATFYMATGFHGFHVLVGTIFLAVCLWRGKLGHFNKDHHFGFEAAAWYWHFVDVVWLFLFAAIYIWGS

SEQ ID NO: 104459 - protein, 244 aa, Unknown
  Bacterial polypetide isolated from the Sargasso Sea
GIVGFVVWAHHMYTVGLDTDTKAYFLAATMIIAVPTGIKIFSWIATMWGGSISFKTPMVWALGFIFLFTVGGVTGVVLANAGVDTALHDTYYVVAHFHYVLSLGAVFAIFAGFYYWFGKMSGYEYSEWMGQLHFWLTFIGVNLVFFPQHFLGLAGMPRRYADYPDAFADWNYISSIGSYISVVGLVVFFANLIYAFAKKKKAAQNPWGEGATTLEWTVPSPPNFHTFDELPKFEDYEGTEKSSS

SEQ ID NO: 104460 - protein, 127 aa, Unknown
  Bacterial polypetide isolated from the Sargasso Sea
TGSSHDHHGAPSGFVKRWLYSTNHKDIGTMYIIFAIVAAFIGGAMSIYMRMELMNPGVQYMEDGHVWNVFTTAHGLIMVFFVVMPGLIGGFGNWFVPIMIGAPDMAFPRMNNISFWLLPPSFVLLFF

SEQ ID NO: 104461 - protein, 135 aa, Unknown
  Bacterial polypetide isolated from the Sargasso Sea
MSATTADHEHHLNPTGWKRWAYSTNHKDIGTMYLIFAIIAGLIGSAFSVLMRMELMHPGDGILGGNYHLYNVLVTGHGLIMIFFMVMPAMIGGFGNWFVPIMIGAPDMAFPRMNNISFWLLPVALILLLVSIFVD

SEQ ID NO: 104462 - protein, 206 aa, Unknown
  Bacterial polypetide isolated from the Sargasso Sea
IIIAVPTGVKIFSWIATMWGGSLTFETPMLFAIGFVFLFTLGGVTGVILANAGIDTVMHDTYYVVAHFHYVLSMGAMFGIFAGIYYWFGKMSGRKYNEFLGKLHFWLFFIGVNVTFFPQHFLGLAGMPRRIPDYPDAYAGWNLVSTYGSYLSFAATLIFFFAIVYALFFGKKEVSNPWGEGADTLEWTLSSPPPFHQFETLPEFKE

SEQ ID NO: 104463 - protein, 236 aa, Unknown
  Bacterial polypetide isolated from the Sargasso Sea
WGHHMFTSGQSKLVNIIFSAITFGVAIPTAIKVFNWIWTMYKGSVELSAAMLHSLGFIFLFTIGGLTGLHLAALAADIHLHDTYFVVAHMHYVMVGGTLFGIFSALHFWYPKMWGVMFDEFKAKIAFVLLFIGFNVTFFPQFIMGTLGMPRRYFNYDPEFTFYHQLSTSGTWFLAIGFILMIYNFFTPISKAPANPYGSKSLEWSMPSPPPTLNFDEIPTVTASTYDYGNKIEEDA

SEQ ID NO: 104464 - protein, 219 aa, Unknown
  Bacterial polypetide isolated from the Sargasso Sea
MYLGLALLIYGAYMWFRDVVIEAEHQGHHTPVVQIHHRYGMTLFIASEVMFFVAWFWAYFDISLFPNEFVGNVWPPKDIETFDPWDIPLINTLVLLLSGTTVTWAHHSLLEDDRKGFIQGLTLTVILGFFFTLLQAYEYHHATFSYSGHIYGAVFYMATGFHGFHVIIGTIFLAVCLWRGRLGHFTKDHHFGFEAAAWYWHFVDVVWLFLFAAIYIWGS

SEQ ID NO: 104465 - protein, 80 aa, Unknown
  Bacterial polypetide isolated from the Sargasso Sea
SSCTFAFSDHIYGSVFYMATGFHGFHVIVGTIFLAVCLWRGKLGHFNKDHHFGFEAAAWYWHFVDVVWLFLFAAIYIWGS

SEQ ID NO: 104466 - protein, 157 aa, Unknown
  Bacterial polypetide isolated from the Sargasso Sea
MLAIAPADFQYHDTYFVVAHFHYVLVPGAIFGIIAGVYYWLPKWTGNMYDEVLGKTHFWMSFISVNITFFPMHFVGLAGMPRRIPDYALQFADFNMVISIGAFIFGLTQLLFLFIILKSIFAGKQATSEVWEGAKGLEWTVASPAPYHTFETPPEVK

SEQ ID NO: 104467 - protein, 258 aa, Unknown
  Bacterial polypetide isolated from the Sargasso Sea
SYADSVSHDHHDHKPGFIKRWFFSTNHKDIGTLYIIFAILAGLVGGFFSLLMRAELAAPGLDVVADGQVWNVIITAHGLLMVFFVVMPALIGGFGNWFVPLMIGAPDMAFPRMNNFSFWILVPALVLLVVSATIGTGAGTGWTIYPPLSNKLGHAGPSVDMAIFALHLAGASSILGAVNFITTILNMRTPGMTLHKMPLFVWAMLITAFLLLLAVPVLAGAITMLLTDRNFGTTFFNPAGGGDPVLFQHLFWFFGHPE

SEQ ID NO: 104468 - protein, 191 aa, Unknown
  Bacterial polypetide isolated from the Sargasso Sea
MADITADQVNSHDHHPTGWRRYLYSTNHKDIGTLYLIFAIIAGLVGTGMSVLMRMELMYPGDGILGGDHNLYNVLVTSHGLLMIFFMVMPAMIGGFGNWIVPLMIGAPDMAFPRMNNISFWLLPASLILLIASLFVDGTSGGPGVGGGWTIYPPLSANLGSPGPAVDLAIFSLHLAGASSILGAINFITTI

SEQ ID NO: 104469 - protein, 291 aa, Unknown
  Bacterial polypetide isolated from the Sargasso Sea
AFPRLNAVAFWLIPPSGFMLVASYFVEGAAQAGWTAYPPLSITTPQSGQIIWILSVLLLGGSSIFGGINFIATIIKLRRPGLKLMQLPMYCWAMLGTSLLVVLSTPVLAGTLILLSFDIIANTGFFNPVLGGNVVVYQHLFWFYSHPAVYIMVLPAFGLVSEILPVHARKPLFGYTTMVFSIMGIVVLGLVVWAHHMFTSGTPPWMRLFFTIATAFIAVPTGIKFFNWVATLWGGKISINSAMLFSCGFIINFVFGGITGVALAQVPFDIHVHDTYFVVAHFHYIVYGGTV

SEQ ID NO: 104470 - protein, 242 aa, Unknown
  Bacterial polypetide isolated from the Sargasso Sea
MSSKNSNSHQYHLVDPSPWPLLASIGALVLCFGAVIYFRSDNPWIMILGLASVIYIGYMWFRDIIKEGEHDGHHSEVVQLGLRYGMTLFIASEVMFFVAWFWAYFNASLFPTEQIGSVWPPADIHLMDPWHIPLINTLILLLSGTTLTWAHHALQEGHRKEVIQGLILTIILGVIFTGFQVYEYMHAEFEFSGHIYGATFYMATGFHGAHVLIGTLFIVVCLGRMLAGHFKSDHHFGFEACA

SEQ ID NO: 104471 - protein, 148 aa, Unknown
  Bacterial polypetide isolated from the Sargasso Sea
QYHDTYFVVAHFHYVLVPGAIFSIMAAVYYWIPKWSGNMYDERLGKLHFWLSFIGVNVTFFPQHFIGLAGMPRRYPDYALIFADWNMVSSIGAFLFGFSQLLFLFIVIKTVMGGKKATDQVWEGAKGLEWTVASPAPYHTFSTPPKVD

SEQ ID NO: 104472 - protein, 140 aa, Unknown
  Bacterial polypetide isolated from the Sargasso Sea
DPLDVPFLNTLILLMSGTTCTWAHHAVREGHRDQAIQALWCTVGLGIFFSIMQGVEYYEAAHHYFSFTDGIYPSVFYMATGFHGFHVMVGTAFLAVCLYRVYKNHFTPDRHFGLEAAAWYWHFVDVVWLFLFVCVYVWGA

SEQ ID NO: 104473 - protein, 298 aa, Unknown
  Bacterial polypetide isolated from the Sargasso Sea
MSAQAHADHGAPLSFVRRWLYSTNHKDIGTMYLVFAILAAFIGGGMSIYMRMELMNPGVQYMDSGHVWNVFTTAHGLIMVFFVVMPGLIGGFGNWFVPIMIGAPDMAFPRMNNISFWLLPPAFVLLLLSAVMDGGAGVGWTIYPPLSSTAGSPGMSMDLAIFSLHLAGVSSILGAANFITTIFNMRTPGMTLHKMPLFAWAMLITAFLLLLAVPVLAGAITMLLTDRNFGTTFFIPEGGGDPILFLHLFWFFGHPEVYIMILPAFGIVSHIISTFSKKPVFGYLGMAYAMVAIRVCRL

SEQ ID NO: 104474 - protein, 265 aa, Unknown
  Bacterial polypetide isolated from the Sargasso Sea
MYTQTASHDDHHTPTGWKRWAYSTNHKDIGTMYLIFAIVAGVIGTAFSVLMRMELMHPGDGILGGNYHLYNVLVTGHGLIMIFFMVMPAMIGGFGNWFVPIMIGAPDMAFPRMNNISFWLLPVSLTLLILSIFADGPPGQTGVGGGWTIYPPLSSKAGQPGPAMDLAILSLHLAGASSILGAVNFITTILNMRTPGMTLHKMPLFAWSILVTAFLLLLSLPVLAGAITMLLTDRNFGTAFFEAQTGGDPVLFQHLFWFFGHPEGY

SEQ ID NO: 104475 - protein, 69 aa, Unknown
  Bacterial polypetide isolated from the Sargasso Sea
YGAVFYMATGFHGFHVIIGTIFLAVCLWRGRLGHFTKDHHFGFEAAAWYWHFVDVVWLFLFAAIYIWGS

SEQ ID NO: 104476 - protein, 30 aa, Unknown
  Bacterial polypetide isolated from the Sargasso Sea
HFGFEAAAWYWHFVDVVWLFLFCCIYWWGA

SEQ ID NO: 104477 - protein, 137 aa, Unknown
  Bacterial polypetide isolated from the Sargasso Sea
DPFDLPLINTLVLLLSGCTVTWAHHAMQHDNRKDFMMGLGLTIILGALFTALQALEYSHAPFGFTDGIYPSVFYMATGFHGFHVLVGTLFLSVCWLRGRAGHFTAEQHFGFEAAAWYWHFVDVVWLFLFAAVYWWGG

SEQ ID NO: 104478 - protein, 241 aa, Unknown
  Bacterial polypetide isolated from the Sargasso Sea
VYIMILPAFGIVSHIIETFSRKQLFGYSSMVWAMLSIAILSFVVWAHHMFTVGLPLAAEIFFMWATMLIAVPTGVKVFNWVATMFRGSLTFETPMLFAISFVVLFTIGGLSGLMLAIVPADFQYHDTYFVVAHFHYVLVPGAIFSIMAAVYYWIPKWCGNMYDERLGKLHFWLSFIGVNVTFFPQHFIGLAGMPRRYPDYSLIFADWNMVSSVGAFLFGFSQLLFLFIVIKTVMGGKKATD

SEQ ID NO: 104479 - protein, 202 aa, Unknown
  Bacterial polypetide isolated from the Sargasso Sea
CELGLRYGMALFIASEVMFLFAFFWAFFDASLTPKLPIEEFSETFDSNGAVGIWPPEGIKTFDPLDVPFLNTLILLMSGTTCTWAHHAVREGHRDQAIQALWCTVGLGIFFSIMQGVEYYEAAHHYFSFTDGIYPSVFYMATGFHGFHVMVGTAFLAVCLYRVYKNHFTPDRHFGLEAAAWYWHFVDVVWLFLFVCVYVWGA

SEQ ID NO: 104480 - protein, 268 aa, Unknown
  Bacterial polypetide isolated from the Sargasso Sea
VPMMIGAPDMALPRMNNLSFWILPFAFFILLSSLFMEGGAPNFGWTFYAPLSTTYAPPSVTFFIFSVHIMGASSIMGAINVVVTIMNMRAPGVTLMKMPLFVWSWLITAYLLIAVMPVLAGAVTMMLMDIHFGTSFFNAAGGGDPVLFQHIFWFFGHPEVYIMILPAFGIVSHIIETFSRKQLFGYSSMVWAMLSIAILSFVVWAHHMFTVGLPLAAEIFFMWATMLIAVPTGVKVFNWVATMFRGSLTFETPMLFAVAFVVLFTIGG

SEQ ID NO: 104481 - protein, 204 aa, Unknown
  Bacterial polypetide isolated from the Sargasso Sea
FSWIATMWGGSISFKTPMVWALGFIFLFTVGGVTGVVLANAGVDTALHDTYYVVAHFHYVLSLGAVFAIFAGFYYWFGKMSGYEYSEWMGQLHFWLTFIGVNLVFFPQHFLGLAGMPRRYADYPDAFADWNYISSIGSYISVVGLVVFFANLIYAFAKKKKAAQNPWGEGATTLEWTVPSPPNFHTFDELPKFEDYEGTEKSSS

SEQ ID NO: 104482 - protein, 251 aa, Unknown
  Bacterial polypetide isolated from the Sargasso Sea
MSATTADHEQHHNPTGWKRWAYSTNHKDIGTMYLIFAIIAGLIGSAFSVLMRMELMHPGDGILGGDYHLYNVLVTGHGLIMIFFMVMPAMIGGFGNWFVPIMIGAPDMAFPRMNNISFWLLPVALILLLVSIFVDGPPGAKGVGGGWTIYPPLSSKTGQPGPAMDLAILSLHVAGASSILGAINFITTILNMRTPGMTLHKMPLFSWSILVTAFLLLLSLPVLAGAITMLLTDRNFGTAFFEAQTGGDPVL

SEQ ID NO: 104483 - protein, 255 aa, Unknown
  Bacterial polypetide isolated from the Sargasso Sea
MSAEKKHDYHLVDPSPWPIYTSFACLVLAIGAIFYMHNGISWGMYLGLALLIYGAYMWFRDVVIEAEHQGHHTPVVQIHHRYGMTLFIASEVMFFVAWFWAYFDISLFPNEFVGNVWPPKDIETFDPWDIPLINTLVLLLSGTTVTWAHHALLEDDRKGFIQGLTLTVILGFFFTLLQAYEYHHATFTYSGHIYGAVFYMATGFHGFHVIIGTIFLAVCLWRGRLGHFTKDHHFGFEAAAWYWHFRDVVWLFLFA

SEQ ID NO: 104484 - protein, 134 aa, Unknown
  Bacterial polypetide isolated from the Sargasso Sea
MYTQTVSHDDHHTPRGWKRWAFSTNHKDIGTMYLIFAIVAGVIGTAFSVLMRMELMHPGDGILGGNYHLYNVLVTGHGLIMIFFMVMPAMIGGFGNWVCTIMIGAPDMAFPRMNNISFWLLPVSLTLLILSIFC

SEQ ID NO: 104485 - protein, 254 aa, Unknown
  Bacterial polypetide isolated from the Sargasso Sea
YHLVDPSPWPIYVSFSCLVLALGSVYYLHTDVSWGMYLGFALLIYGAYMWFRDVVIEAEHQGHHTPVVQIHHRYGMTLFIASEVMFFVAWFWAYFDVSLFPNDFVGNVWPPKDIETFDPWDIPLINTLILLLSGTTVTWSHHALLEDDRKSFIQGLWLTVILGFCFTLLQIYEYQHASFSFSDHIYGSVFYMATGFHGFHVLVGTIFLAVCLFRGKRGHFNKDHHFGFEAAAWYWHFVDVIWLFLFAAIYIWGS

SEQ ID NO: 104486 - protein, 295 aa, Unknown
  Bacterial polypetide isolated from the Sargasso Sea
PVITVALIQLQFDRLYGTHFFNPVMGGDPVMWQHMFWLFGHPEVYILILPAMGIVSEVLPTFSKKPIFGYSFIVFSGIGIGFLGWFVWSHHMFTVGLGPAANAAFSISTMLIAVPTGVKIFNWIGTLWGGAIRVTPALLFSIAFIGMFVIGGLSGVTHAAPPSDAQQQDTYYVVAHFHYVLFGGSLLGLWSGIYYWWPKFTGKFLNEKIGYLHFAVVLIGFNITFFPMHWLGLDGMPRRIATYPESMGWEVSNLVASLGSFILGFGVLIFFYNVIYSRKGPKNAGNDPWDGRTLE

SEQ ID NO: 104487 - protein, 273 aa, Unknown
  Bacterial polypetide isolated from the Sargasso Sea
MPVFTWMTFITSILIVLALPVLGVAGIQMTADRVYGTNFFNSEAGGDPIFWQHIFWLFGHPEVYILILPAMGIVSEVLPTFSRKPLFGYTFIVFSGAIIGFMGWFVWSHHMFTVGLGPAANTAFTISTMLIAVPTGVKIFNWIATLWGGSIKFTTSMLFSIGFIAMFTIGGLSGVTHAVSPSDAQQQDTYYVVAHFHYVLFGGAIFAIFSGIYFWWPKFTGWFLDEKIGKINFVLMLIGFNLQFAPMHWVGLDGMPRRIYTYAENMGWELSNL

SEQ ID NO: 104488 - protein, 93 aa, Unknown
  Bacterial polypetide isolated from the Sargasso Sea
LGFIFTCFQAYEYHHATFTIDGNIYGSTFYMATGFHGFHVIVGTIFLAVCLFRSMKGHSNSEHHFGFEAAAWYWHFVDVVWLFLFAAIYIWGS

SEQ ID NO: 104489 - protein, 224 aa, Unknown
  Bacterial polypetide isolated from the Sargasso Sea
RWWRSSSFPHLFWFFGHPEVYIMILPAFGIVSQVISTFSRKPVFGYLGMVYAMISIGFIGFIVWAHHMFTVGMSADLRAYFMLATIIIAVPTGIKIFSWIATMWGGSLTFETPMLFAIGFVFLFTLGGVTGVILANAGIDTVMHDTYYVVAHFHYVLSMGAMFGIFAGIYYWFGKMSGRKYNEFLGKLHFWLFFIGVNVTFFPQHFLGLAGMPRRIPDYPDAYA

SEQ ID NO: 104490 - protein, 256 aa, Unknown
  Bacterial polypetide isolated from the Sargasso Sea
MSTATLHGHDHHTPTGWKRWAYSTNHKDIGTMYLIFAIIAGVIGTAFSVLMRIELMHPGDGILGGNYHLYNVLVTGHGLIMIFFMVMPAMIGGFGNWFVPIMIGAPDMAFPRMNNISFWLLPVAFILLLASIFVDGPPGAQGVGGGWTIYPPLSSKAGQPGPAMDLAILSLHVAGASSILGAVNFITTILNMRTPGMTLHKMPLFAWSILVTAFLLLLSLPVLAGAITMLLTDRNFGTAFFEAQSGGDPTLFQHLF

SEQ ID NO: 104491 - protein, 302 aa, Unknown
  Bacterial polypetide isolated from the Sargasso Sea
HDHGHPTGWKRWLFSTNHKDIGTMYIIFAIVAGLVGLAMSLTMRAELAEPGLQVLGGDHQLYNTLVSMHGLIMIFAMVMPSMIGGFGNWFVPIMIGAPDMAFPRMNNISFWLLIPGFLCLMMAYKTGMGSGWTFYPPLSSKIGHPGNSVDYLILGVHILGASSILGAINFITTIFNMRAPGMTLHKMPLFVWAILVTVFLLLLSLPVLAGAITMLLTDRNFGTSFFDPAGGGDPVLFQHLFWFFGHPEVYVLIIPGFGVISHIVATFSKKPIFGYLGMAYAMVAIGVVGFAVWAHHMYTSGM

SEQ ID NO: 104492 - protein, 237 aa, Unknown
  Bacterial polypetide isolated from the Sargasso Sea
MSENSSVGQKHPYHLVDPSPLPFLSSIAGLAMAAGLVFYMHYDTKWLLILGTIGLLTVMFLWWKDVIKESTFQQVHTPVVELGLRYGMALFIASEVMFFVAFFWAFFDASLTPKLPIEEFAETYDSNGAVGIWPPEGIKTFDPLDIPFLNTLILLMSGTTCTWAHHAVREGHRDQAIQALWLTVGLGVCFTLLQAFEYYEAVHHYFKFTDGIYPSVFYMATGFHGFHVMVGTIFLGV

SEQ ID NO: 104493 - protein, 239 aa, Unknown
  Bacterial polypetide isolated from the Sargasso Sea
AMVSIGFLGFIVWAHHMYTVGMDADVKAYYVFATMVIAVPTGIKVFSWIATMWGGSVDLKTPMLWAIGFIFLFTVGGVTGVVLANAGIDHSLHDTYYVVAHFHYVLSMGAVFAIFAGFYYWFGKMFGRNYSEFLGKLHFWLTFIGVNIIFFPQHFLGLAGMPRRYVDYPDAYAGWNYISSIGSFISVLGLAVFFVMLVHALMKVRDCADNPWGEGATTLEWTLPSPPPFHQFEELPKVK

SEQ ID NO: 104494 - protein, 461 aa, Unknown
  Bacterial polypetide isolated from the Sargasso Sea
MYTQTSSPDDHHIPTGWKRWAYSTNHKDIGTMYLIFAIVAGVIGTAFSVLMRMELMHPGDGILGGNYHLYNVLVTGHGLIMIFFMVMPAMIGGFGNWFVPIMIGAPDMAFPRMNNISFWLLPVSLTLLILSIFADGPPGAQGVGGGWTIYPPLSSKAGQPGPAMDLAILSLHLAGASSILGAVNFITTILNMRTPGMTLHKMPLFAWSILVTAFLLLLSLPVLAGAITMLLTDRNFGTAFFEAQTGGDPVLFQHLFWFFGHPEVYILILPGFGMISHIVSTFSKKPVFGYLGMAYAMVAIGVVGFVVWAHHMYTVGLGTDTKAYFLAATMIIAVPTGIKIFSWIATMWGGSISFKTPMMWALGFIFMFTVGGVTGVVLANAGVDTAMHDTYYVVAHFHYVLSLGAVFAIFAGFYYWFSKMTGYEYSEWLGQLHFWLTFIGVNLIFFPQPFFRISRYAKKIC

SEQ ID NO: 104495 - protein, 164 aa, Unknown
  Bacterial polypetide isolated from the Sargasso Sea
MGWKRWAYSTNHKDIGTMYLIFAIVAGLIGSAFSVLMRMELMYPGDGILGGNHHLYNVLVTGHGLIMIFFMVMPAMIGGFGNWFVPIMIGAPDMAFPRMNNISFWLLPVSLILLLASIFVDGPPGQTGVGGGWTIYPPLSSKTGQPGPAMDLAILSLHIAGASS

SEQ ID NO: 104496 - protein, 382 aa, Unknown
  Bacterial polypetide isolated from the Sargasso Sea
AMDFAILSLHLAGASSILGAVNFITTILNMRTPGMTLHKMPLFAWSILVTAFLLLLSLPVLAGAITMLLTDRNFGTAFFDAQTGGDPVLFQHLFWFFGHPEVYILILPGFGMISHIVSTFSRKPVFGYLGMAYAMVAIGIVGFVVWAHHMYTVGLSTDTKAYFLAATMIIAVPTGIKIFSWIATMWGGSISFKTPMVWALGFIFLFTVGGVTGVVLANAGVDTAMHDTYYVVAHFHYVLSLGAVFAIFAGFYYWFGKMTGYEYSEWMGQLHFWLTFIGVNLVFFPQHFLGLAGMPRRYADYPDAFAGWNYISSIGSYISVIGLVVFFINLAYAFYKKKAAAQNPWGEGATTLEWTVPSPPNFHTFEELPKFEDEEGVEKSTS

SEQ ID NO: 104497 - protein, 261 aa, Unknown
  Bacterial polypetide isolated from the Sargasso Sea
MSGDQKHQFHLVEPSPWPAIGSAAGFTLALGAAMYMHDYLYSGYILIAGFLMLLTVMFFWWRDVIREAEFQGHHTPIVQIGMRYGMILFISSEVMFFVAFFWAFFDSSLYPDTGVWPPEDIKTFDPFDLPLINTMILLLSGCTVTWSHHALQHDNRKDFLVGLFLTILLGISFTALQAYEYSHAAFSFTDGIYASTFYMATGFHGFHVIVGTLFLIVCYFRGLKGHYTSEHHFGFEAAAWYWHFVDVVWLFLFVCIYWWGA

SEQ ID NO: 104498 - protein, 262 aa, Unknown; identical to SEQ ID NO: 104258
  Bacterial polypetide isolated from the Sargasso Sea

SEQ ID NO: 104499 - protein, 496 aa, Unknown
  Bacterial polypetide isolated from the Sargasso Sea
FFTALFLGGFGNYLIPLMVGARDMVFPYVNMISFWMFFIAVAVLMASFFVPGGPTGAGWTLYPPQTILPGTPGAGMGILLMLVSLSLFVIGFTMGGLNYLITILQARTRGMTLMRMPLTVWGIFTATVLAMLAFPALLVSAIMMTLDKILGTSFFMPTIIQAGEVLDYGGGSPILFQHLFWFFGHPEVYIVALPAFGIVSDLISVHSRKNIFGYRMMVWAIVGIGALSFFVWAHHMYVSGMNPWFGFFFATTTLIIAVPTAMKVYNWILTLWRGNIRLNTVMLWCLGFIVTFVNGGITGIFLGNVSVDVPLSDTYFVIAHFHMVMGIAPLMVIMGAVYHWFPLVSGKFLDEKLGKWHFWLTFLGAYSIYFPMHYLGFIGVPRRYFEMYDSPYMTSAVGMNEFISMAAFIVGAAQFILIYNIVKTLKVGKKAGHNPWKANSLEWLTSTVPPEHGNFGERLPVVHRWPYDFSVPGAKEDYITQTTPPSEVVHTEVEKT

SEQ ID NO: 104500 - protein, 450 aa, Unknown
  Bacterial polypetide isolated from the Sargasso Sea
SFFVPGGPTGAGWTLYPPQAILPGTPGSEMGIVLMLVSLSLFVIGFTMGGLNYVITILQSRTRGMTLMRMPLTIWGIFTATVLALLAFPALFVACIMMTLDNLLGTSFFMPEIFTMGEKLEYGGGSPILFQHLFWFFGHPEVYIVALPAFGIVSDLISVHARKNVFGYRMMVWAIVIIGALSFIVWAHHMYVSGMNPWFGFFFATTTLIIAVPTAIKVYNWVLTLWRGNIHLTIPMLFSLGFIVTFVNGGITGLFLGNVIIDVPLSDTYFVVAHFHMVMGIAPLMVVFGAIYHWYPLITGRHLNQTLGKIHFWVTFVGAYAIYFPMHYLGFIGVPRRYFEMYDSPYMTSGVGLNQFITVAALIVGFTQFLFLYNIFTSWYKGEKSERNPWKANSLEWHTPDYPPTHGNFGKELPVVYRWPYDFSVPGSDKEFIPQDVPPSQVPTAKAEQT

SEQ ID NO: 104501 - protein, 514 aa, Unknown
  Bacterial polypetide isolated from the Sargasso Sea
MADITADHIDSHDHHPTGWRRYLYSTNHKDIGTLYLIFAIIAGVVGGVMSVVMRIELMHPGDGILGGDHNLYNVLVTNHGLIMIFFMVMPAMIGGFGNWIVPLMIGAPDMAFPRMNNISFWLLPASFILLIASLFVEGTSGGNGVGGGWTIYPPLSASLGAPGPAVDLAIFSLHIAGASSILGAINFITTIFNMRAPGMTLHKMPLFVWSILVTAFLLLLSLPVLAGAITMLLTDRNFGTAFFEPSMGGDPVLFQHLFWFFGHPEVYILILPGFGIISHVVSTFSKKPVFGYLGMAYAMVSIGFLGFIVWAHHMYTVGMSADVKAYYVFATMVIAVPTGIKVFSWIATMWGGSVELKTPMLWAIGFIFLFTVGGVTGVVLANAGIDHSLHDTYYVVAHFHYVLSMGAVFAIFAAFYYWFGKMTGRNYSEWLGKLHFWLTFIGVNIIFFPQHFLGLAGMPRRYVDYPEAYAGWNYVSSIGSYLSSIGLLVFFVMLINAFMKEKNCADNPWGEGAT

SEQ ID NO: 104502 - protein, 426 aa, Unknown
  Bacterial polypetide isolated from the Sargasso Sea
MSDEYENKTGYQAQSSETISSGSGGGSRTASDIDYVRPAEVTDQDLYHGHSFITKWVFCQDAKVIGVQYFLLATFTGVIGLILSWLMRLQLGFPGAAGFMTAEHYYQFVTMHGMIMVVYFLTALFLGGFGNYLIPLMVGARDMVFPYLNMVSFWSFFVAVGVLLASFFVPGGPTGAGWTLYPPQTILEGTPGSGWGILLMCISLILFVAGFTMGGLNYLITVLQARTRGMTLMRMPLTVWGIFTATVLAMLAFPALLVGALMMTLDNVLGTSFFMPTIIQAGEILEYSGGSPILFQHLFWFFGHPEVYIVALPAFGIVSDLISVHSRKNIFGYRMMVWAIVGIGGLSFFVWAHHMYVSGMNPWFGFFFATTTLIIAIPTAMKVYNWIITLWRGNIRLNVVMLWCLGFIVTFVNGGITGIFLGNVSV

SEQ ID NO: 104503 - protein, 527 aa, Unknown
  Bacterial polypetide isolated from the Sargasso Sea
MSAVIENHHDDHHHGPAKGITRWLYTTNHKDIGTLYLWFSFAMFLIGGAMAMVIRAELFQPGMQIVEPEFYNQMITLHGLIMIFGGVMPAFVGLANWLVPMMIGAPDMALPRMNNLSFWILPFAFFVLLSSLFMEGGAPNFGWTFYAPLSTTYAPPSVTFFIFSVHIMGASSIMGSINVVVTIMNMRAPGITLMKMPLFVWSWLITAYLLIAVMPVLAGAVTMMLMDIHFGTSFFNAAGGGDPVLFQHIFWFFGHPEVYIMILPAFGIVSHIIETFSRKQLFGYSSMVWAMLSIAILSFVVWAHHMFTVGMPLAAEIFFMWATMLIAVPTGVKVFNWVATMFRGSITFETPMLFAVSFVVLFTIGGLSGLMLAIVPADFQYHDTYFVVAHFHYVLVPGAIFSIMAAVYYWIPKWCGNMYDERLGKLHFWLSFIGVNVTFFPQHFIGLAGMPRRYPDYALQFADWNMVSSVGAFLFGFSQLLFLFIVIKTVMGGKKATSQVWEGAKGLEWTVASPAPYHTFSTPPKVD

SEQ ID NO: 104504 - protein, 481 aa, Unknown
  Bacterial polypetide isolated from the Sargasso Sea
MSDEYDHKLEAKSDYTADASSVTAPDIDAVPDAELPDQELYHSHSWWTTYVFSQDAKYIGIQYALTAVGTGLLGLVLSWLMRIQLAFPGLGWLDPASYYQFVTMHGMIMVVYLLTALFLGGFGNLLIPLMCGARDMAFPYVNMLSYWAFVVAVVVLLASFFVPGGPTGAGWTLYPPQAITAGTPGYNGGIILMLISLILFVAGFTMGGLNYIITVLQLRARGMTLMRLPLTIWGIFTATVLAMFAFPALLVGCLMMTLDSLLGTSFFMPAMVSLGETLTHEGGSPILFQHLFWFFGHPEVYIVALPAFGIVSDLLSVHSRKTIFGYRMMVWAIVGIGALSFFVWAHHMYVSGMNPWFGFFFATTTLIIAVPTAIKVYNWILTLWRGNIQLSLPMLFSLGFIVTFLNGGLTGLFLGNVTVDVPLSDTYFVVAHFHMVMGIAPILVIFGAIYHWYPLITGRMMNETLGKIHFWITFLGSYAIY

SEQ ID NO: 104505 - protein, 528 aa, Unknown
  Bacterial polypetide isolated from the Sargasso Sea
MSTVVESHDHGHHGPAKGLSRWLFTTNHKDIGTLYLWFSFIMLFIGGAMAMVIRAELFQPGLQIVQPEFFNQMTTNHGLIMVFGVIMPAFVGLANWMLPMQIGAPDMALPRLNNLSFWLLPMAFGILISTLFMPEGGPNFGWTFYAPLSTTYAPSTVNFFIFSVHVMGVSSILGSINIITTIFNMRAPGMTLMKMPLFVWSWLITAYLLIAVMPVLAGVVTMMLMDINFGTSFFNAAGGGDPVLFQHVFWFFGHPEVYIMILPAFGIVSHIIETFSRKPIFGYSSMVYAMASIAILSFVVWAHHMFTVGMPLAGELFFMYSTMLIAIPTGVKVFNWVATMFRGSITFETPMLFSIAFVALFTIGGFSGLMLAIVPADFQYHDTYFVVAHFHYVLVPGALFGIIAGAYYWLPKWTGNMYDETLGKLHFWLTFISVNVTFFPMHFVGLAGMPRRYPDYALQFADFNALISVGAFMFGLTQLLFLFIVIKTIRSGKQAKPEVWEGAGDLGLEWTLSSPPPYHSFTVQPQVK

SEQ ID NO: 104506 - protein, 387 aa, Unknown
  Bacterial polypetide isolated from the Sargasso Sea
FGWTFYAPLSTTYAPPSVTFFIFSVHIMGASSIMGSINVVVTIMNMRAPGVGLMKMPLFVWSWLITAYLLIAVMPVLAGAVTMMLMDIHFGTSFFNAAGGGDPVLFQHIFWFFGHPEVYIMILPAFGIVSHIIETFSRKPLFGYASMVWAMLSIAILSFVVWAHHMFTVGMPLAAEIFFMWATMLIAVPTGVKVFNWVATMFRGSLTFETPMLFACAFVVLFTIGGLSGLMLAIVPADFQYHDTYFVVAHFHYVLVPGAIFSIMAAVYYWIPKWCGNMYDERLGKLHFWLSFIGVNVTFFPQHFIGLAGMPRRYPDYALQFADWNMVSSVGAFLFGFSQLLFLFIVIKTVMGGKKATDQVWDGAKGLEWTVASPAPYHTFSTPPKVD

SEQ ID NO: 104507 - protein, 251 aa, Unknown
  Bacterial polypetide isolated from the Sargasso Sea
MVEPSPWPALGAMSGFVAAVGAIMFMHDKPFGIPIMSAGLVFILITMFFWWRDVIREAEHQGHHTPIVQIGMRYGMILFIASEVMFFLAFFWAFFDSSLYPDTGVWPPAGVETFDPFDIPLINTMVLLLSGCTCTWAHAALLENDRKNFILGLGVTVLLGAAFTGLQIYEYDHATFGFKDGIYSSTFYMATGFHGFHVLVGTCFLVVCWFRGRAGHFNPEHHFGFEAAAWYWHFVDVVWLFLFICIYWWGG

SEQ ID NO: 104508 - protein, 278 aa, Unknown
  Bacterial polypetide isolated from the Sargasso Sea
MSSITADSHSHTPTGWKRWAYSTNHKDIGTMYLIFAIVAGLIGSAFSVLMRMELMHPGDGILGGNHHLYNVLVTGHGLIMIFFMVMPAMIGGFGNWFVPIMIGAPDMAFPRMNNISFWLLPVALILLLASIFVDGPPGQTGVGGGWTIYPPLSSKTGQPGPAMDLAILSLHIAGASSILGAINFITTILNMRTPGMTLHKMPLFAWSILVTAFLLLLSLPVLAGAITMLLTDRNFGTAFFEAQTGGDPVLFQHLFWFFGHPEVYILILPGFGMISHIV

SEQ ID NO: 104509 - protein, 501 aa, Unknown
  Bacterial polypetide isolated from the Sargasso Sea
MEVKPQDLYHANSFITRWIFCQDAKVIGIQYSLTAIAIGLVAMVLSWMMRLQLGFPETFSFLGPAEYYQFVTMHGMIMVIYLLTALFLGGFGNFLIPLMVGARDMVFPYVNMISFWIYFLAVLILVASFFVPGGPTGAGWTLYPPQAITQGTPGSGWGIILMLISLSVFVVGFTMGGLNYVITILQARTRGMTLMRMPLTVWGIFTATVLALFAFPALIVSCIMMTLDSLLGTSFFMPTMVELGEKLEYGGGSPILFQHLFWFFGHPEVYIVALPAFGIVSDLISVHARKNIFGYRMMVWAIVFIGALSFIVWAHHMYVSGMNPWFGFFFATTTLIIAVPTAIKVYNWVLTLWRGNIRLTLPMLFALAFIVTFVNGGITGLFLGNVIVDVPLSDTYFVVAHFHMVMGIAPVLVVFGAIYHWFPLITGRYLHEGMGQFHFWVSFLGSYAIYFPMHYLGFIGVPRRYYEMYNSEFIPTSAEGLNQFITIAALTVGFAQNSIFI

SEQ ID NO: 104510 - protein, 242 aa, Unknown
  Bacterial polypetide isolated from the Sargasso Sea
MAYAMVSIGVIGFVVWAHHMYTVGLSVDTRAYFTAATMVIAVPTGIKIFSWIATMWGGSIVFRIPMYWAIGFIFLFTVGGVTGVVLANAGLDVVLHNTYYVIAHFHYVLSLGAVYGLFAAFYYWFAKMTGYEYSEGLAKLHFWVTFIGVNLTFFPMHFLGLAGMPRRYVDYPDAFAGWNMVASIGSYIGALGAVIFLVVIIEAFVKKRKADKNPWGSSDNTLEWTVPSPPAFHTFSEIPKVK

SEQ ID NO: 104511 - protein, 414 aa, Unknown
  Bacterial polypetide isolated from the Sargasso Sea
LVLLVLRGFVQGGAGTGWTAYPPLSNADYHPGPAVDFAILSLHLAGASSILGAINFITTILNMRTPGMSFHKMPLFIWASLVTAFLLLLALPVLAGALTMLLTDRNFGTTFFEASGGGDPIFWQHLFWFFGHPEVYIMILPAFGIVSEVVSTFSKKPIFGYLGMAYAMAGIGVVGFVVWAHHMFTVGFNVETRAYFVLATMVIAVPTGIKIFSWLATMWGGSIEFKTPMLYAMGFIFLFVVGGVTGITLANAGVDMAFHDTYFVIAHFHYVLSIATIFGIFCGVFYWLPKMCGNMYNETLGKWQFWITFIGVNILFFPQHFLGMAGMPRRIPDYPDAYAGWNLISSFGALISLVGALMFIYIVWVTIRSGEKAPANPWGEGATTLEWTVDSPAPFHTHEQAPELEPKSATQPAE

SEQ ID NO: 104512 - protein, 285 aa, Unknown
  Bacterial polypetide isolated from the Sargasso Sea
MSGQNQTPYYFVPHPSQHPISAAIGLLVMLGSTALWINGHDWAPFTALLGLLWLLFTLYHWFGDAIAESEGGHYGKNVDKSYRWSMSWFIFSEVMFFGAFFGALFYAREIALHQLGSLDYKLIWPDFSAVWPNEGPAALAGHFKTMGPWPIPTLNTAFLLSSGVTLTISHHALRDDHRKKAIAWLAATLVFGICFLFLQGFEYYHAYNELNLTLNSGVYGSTFFLLTGFHGFHVFLGGTMLAVVLVRMIRGHFKPDHHFAFEGAAWYWHFVDVVWLGLYVVVYWL

SEQ ID NO: 104513 - protein, 408 aa, Unknown
  Bacterial polypetide isolated from the Sargasso Sea
PPGAQGVGGGWTIYPPLSSKAGQPGPAMDLAILSLHIAGASSILGAVNFITTILNMRTPGMTLHKMPLFAWSILVTAFLLLLSLPVLAGAITMLLTDRNFGTAFFDAQTGGDPTLFQHLFWFFGHPEVYILILPGFGMISHIVSTFSKKPVFGYLGMAYAMVAIGIVGFVVWAHHMYTVGLDTDTKAYFLAATLIIAVPTGIKIFSWIATMWGGSISFKTPMVWALGFIFLFTVGGVTGIVLANAGVDTALHDTYYVVAHFHYVLSLGAVFAIFAGFYYWFSKMSGYEYSEWMGQLHFWLTFIGVNLVFFPQHFLGLAGMPRRYADYPDAFADWNYISSIGSYISVVGLLVFFANLIYSFSKKKKAAQNPWGEGATTLEWTVPSPPNFHTFDELPKFENIEGVEKSGS

SEQ ID NO: 104514 - protein, 544 aa, Unknown
  Bacterial polypetide isolated from the Sargasso Sea
MYTQTASHDDHHTPTGWKRWAYSTNHKDIGTMYLIFAIIAGVIGTAFSVLMRMELMHPGDGILGGNYHLYNVLVTGHGLIMIFFMVMPAMIGGFGNWFVPIMIGAPDMAFPRMNNISFWLLPTSFILLIMSIFMDGPPGQTGVGGGWTIYPPLSSTAGQPGPAMDFAILSLHLAGASSILGAVNFITTILNMRTPGMTLHKMPLFAWSILVTAFLLLLSLPVLAGAITMLLTDRNFGTAFFDAQTGGDPVLFQHLFWFFGHPEVYILILPGFGMISHIVSTFSRKPVFGYLGMAYAMVAIGIVGFVVWAHHMYTVGLSTDTKAYFLAATMIIAVPTGIKIFSWIATMWGGSISFKTPMVWALGFIFLFTVGGVTGVVLANAGVDTAMHDTYYVVAHFHYVLSLGAVFAIFAGFYYWFGKMTGYEYSEWMGQLHFWLTFIGVNLVFFPQHFLGLAGMPRRYADYPDAFAGWNYISSIGSYISVIGLVVFFINLAYAFYKKKAAAQNPWGEGATTLEWTVPSPPNFHTFEELPKFEDEEGVEKSTS

SEQ ID NO: 104515 - protein, 262 aa, Unknown; identical to SEQ ID NO: 104258
  Bacterial polypetide isolated from the Sargasso Sea

SEQ ID NO: 104516 - protein, 250 aa, Unknown
  Bacterial polypetide isolated from the Sargasso Sea
MADAAIHGHEHEDQRSFFTRWFMSTNHKDIGILYLVVSALVGFIAVSFTIYMRLELMNPGVQYMCMEGMRLTAAGIGECTPNGHLWNVLITGHGILMMFFVVIPALFGGFGNYFMPLQIGSPDMAFPRMNNLSFWMYVAGTTLAICSVLSPGGNDQLGSGVGWILYPPLSVNEGGMSMDLAIFAVHVSGASSILGAINMITTFLNMRAPGMTLFKVPLFSWSIFVTAWLILLALPVLAGAITMLLTDRNF

SEQ ID NO: 104517 - protein, 263 aa, Unknown
  Bacterial polypetide isolated from the Sargasso Sea
MSAEKPKHDYHLVDPSPWPIYVSFATLVLAFGAVYYFHSKALWLLLIGFALVVYGAFMWWRDVIEEAEHQGHHTHVVQIGHRYGMTLFIASEVMFFVAWFWAFFNASLFPSDSIGGIWPPADIKTFDPWDIPLINTLILLLSGTTVTWAHHAMLENDRKGLVNGLIATVFLGFIFSCFQAYEYHHATFTLDGGIYGSTFYMSTGFHGFHVIVGTVFLAVCLFRSMRGHSTPQHHFGFEAAAWYWHFVDVVWLFLFAAIYIWGS

SEQ ID NO: 104518 - protein, 304 aa, Unknown
  Bacterial polypetide isolated from the Sargasso Sea
MSGGSYYVPDQSRFPIFMAVSLFLLVMGASSTINNLDDPTSNSVYILYSGFACLFLTMFFWFRQVIKEHLAGLDSNQLKQSYVYGMAWFIFSEVMFFAAFFGALFYVRTLAVPWLAGEGSKGAAITAIELWPAFESSWPVMTTPDQGNEYDLADKSMAWPGWSKAILWLPLWNTIVLLSSSWTVHLAHLGLKKGNRKKFNVYLGVTVLLALIFVGLQALEYYEAYAHYGLKLNSGIYGSTFFMLTGFHGFHVMMGGFMLAIMLARSVFAGHFEQHDHFGFEAASWYWHFVDVVWLMLFIFVYIL

SEQ ID NO: 104519 - protein, 526 aa, Unknown
  Bacterial polypetide isolated from the Sargasso Sea
MSAVIENHHDDHDHGPAKGITRWLYTTNHKDIGTLYLWFSFAMFLIGGAMAMIIRAELFQPGMQIVEPEFYNQMITLHGLIMIFGGVMPAFVGLANWLVPMMIGAPDMALPRMNNLSFWILPFAFFILLSSLFMEGGAPNFGWTFYAPLSTTYAPPSVTFFIFSVHIMGASSIMGAINVVVTIMNMRAPGVTLMKMPLFVWSWLITAYLLIAVMPVLAGAVTMMLMDIHFGTSFFNAAGGGDPVLFQHIFWFFGHPEVYIMILPAFGIVSHIIETFSRKQLFGYSSMVWAMLSIAILSFVVWAHHMFTVGLPLAAEIFFMWATMLIAVPTGVKVFNWVATMFRGSLTFETPMLFAVAFVVLFTIGGLSGLMLAIVPADFQYHDTYFVVAHFHYVLVPGAIFSIMAAVYYWIPKWSGNMYDERLGKLHFWLSFIGVNVTFFPQHFIGLAGMPRRYPDYALIFADWNMVSSIGAFLFGFSQLLFLFIVIKTVMGGKKATDQVWEGAKGLEWTVASPAPVPYIFNTTKG

SEQ ID NO: 104520 - protein, 392 aa, Unknown
  Bacterial polypetide isolated from the Sargasso Sea
MYTQTASHDDHHTPTGWKRWAYSTNHKDIGTMYLIFAIIAGVIGTAFSVLMRMELMHPGDGILGGNYHLYNVLVTGHGLIMIFFMVMPAMIGGFGNWFVPIMIGAPDMAFPRMNNISFWLLPTSFILLIMSIFMDGPPGQTGVGGGWTIYPPLSSTAGQPGPAMDFAILSLHLAGASSILGAVNFITTILNMRTPGMTLHKMPLFAWSILVTAFLLLLSLPVLAGAITMLLTDRNFGTAFFDAQTGGDPVLFQHLFWFFGHPEVYILILPGFGMISHIVSTFSRKPVFGYLGMAYAMVAIGIVGFVVWAHHMYTVGLSTDTKAYFLAATMIIAVPTGIKIFSWIATMWGGSISFKTPMVWALGFIFLFTVGGVTGVVLANAGVDTAMHDTYY

SEQ ID NO: 104521 - protein, 365 aa, Unknown
  Bacterial polypetide isolated from the Sargasso Sea
MSTVVESHDHGHHGPAKGLSRWLFTTNHKDIGTLYLWFSFIMLFIGGAMAMVIRAELFQPGLQIVQPEFFNQMTTNHGLIMVFGVIMPAFVGLANWMLPMQIGAPDMALPRLNNLSFWLLPMAFGILISTLFMPEGGPNFGWTFYAPLSTTYAPSTVNFFIFSVHIMGVSSILGSINIITTIFNMRAPGMTLMKMPLFVWSWLITAYLLIAVMPVLAGVVTMMLMDINFGTSFFNAAGGGDPVLFQHVFWFFGHPEVYIMILPAFGIVSHIIETFSRKPIFGYSSMVYAMASIAILSFVVWAHHMFTVGMPLAGELFFMYSTMLIAIPTGVKVFNWVATMFRGSITFETPNVILKLLLWLYLQLA

SEQ ID NO: 104522 - protein, 225 aa, Unknown
  Bacterial polypetide isolated from the Sargasso Sea
HMFTVGMTADLRAYFMLATIIIAVPTGIKIFSWIATMWGGSLTFETPMLFAIGFVFLFTLGGVTGVILANAGIDTVMHDTYYVVAHFHYVLSMGAMFGIFAGIYYWFGKMSGRKYNEFLGKLHFWLFFIGVNVTFFPQHFLGLAGMPRRIPDYPDAYAGWNLVSTYGSYISFAATLIFLFAIVYALFFGKKEVANPWGEGADTLEWTLSSPPPFHQFETLPKFKG

SEQ ID NO: 104523 - protein, 281 aa, Unknown
  Bacterial polypetide isolated from the Sargasso Sea
MSENSSVGQKHPYHLVDPSPLPFLASIAGLAMAAGLVFFMHYDTKWLLILGTIGILTVMFLWWRDVIKESTFQQVHTPVVELGLRYGMALFIASEVMFFVAFFWAFFDASLTPKLPVEEFVETYDTNGAVGVWPPEGIKTFDPLDVPFLNTLILLMSGTTCTWAHHAVREGHRDQAIQALWLTVGLGVCFTLLQAFEYYEAFHHYFKFTDGIYPSVFYMATGFHGFHVIVGTAFLAVCLFRVYKSHMTPERHFGLEAAAWYWHFVDVVWLFLYVCVYIWGA

SEQ ID NO: 104524 - protein, 366 aa, Unknown
  Bacterial polypetide isolated from the Sargasso Sea
YPPLSNKLGHAGPSVDMAIFALHLAGASSILGAVNFITTILNMRTPGMTLHKMPLFVWAMLITAFLLLLAVPVLAGAITMLLTDRNFGTTFFNPAGGGDPVLFQHLFWFFGHPEVYIMILPAFGIVSQVISTFSRKPVFGYLGMVYAMIAIGFIGFIVWAHHMFTVGMSADLRAYFMLATIIIAVPTGIKIFSWIATMWGGSLTFETPMLFAIGFVFLFTLGGVTGVILANAGIDTVMHDTYYVVAHFHYVLSMGAMFGIFAGIYYWFGKMSGRKYNEFLGKLHFWLFFIGVNVTFFPQHFLGLAGMPRRIPDYPDAYAGWNLVSTYGSYISFAATLIFLFAIVYALFFGKKEVSNPWGEGADTLE

SEQ ID NO: 104525 - protein, 477 aa, Unknown
  Bacterial polypetide isolated from the Sargasso Sea
WSRDMVFPYVNMVSFWMLFVAVGVLMASFFVPGGPTGSGWTLYPPQAILEGTPGSGMGIILMLMSLSLFVIGFTMGGLNYLITVLQARTRGMTLMRLPLTVWGIFTATVLAMLAFPALLVSSIMMTLDKLLGTSFFMPTILKAGEVLEYGGGSPILFQHLFWFFGHPEVYIVALPAFGIVSDLISVHSRKNIFGYRMMVWAIVAIGALSFFVWAHHMYVSGMNPWFGFFFATTTLIIAVPTAMKVYNWILTLWRGNIRNYTVMLWCLGFIVTFVNGGITGIFLGNVTVDVPLSDTYFVIAHFHMVMGIAPLMVIMGAVYHWFPLVTGRMLSEKLGKWHFWATFLGAYSIYFPMHYLGFIGVPRRYFEMYDSPYMTSAVGMNEFISTAAFLVGAAQFILIFNIIKSLKTGKPAGHNPWKANSLEWLTPTVPPEHGNWGERLPVVHRWPYDYSVPGAKEDFIVQTTPPSEVAHTKVEKT

SEQ ID NO: 104526 - protein, 543 aa, Unknown
  Bacterial polypetide isolated from the Sargasso Sea
MYTQTASHDDHTPTGWKRWAYSTNHKDIGTMYLIFAIIAGVIGTAFSVLMRMELMHPGDGILGGNYHLYNVLVTGHGLIMIFFMVMPAMIGGFGNWFVPIMIGAPDMAFPRMNNISFWLLPTSFILLIMSIFMDGPPGQTGVGGGWTIYPPLSSSAGQPGPAMDFAILSLHLAGASSILGAVNFITTILNMRTPGMTLHKMPLFAWSILVTAFLLLLSLPVLAGAITMLLTDRNFGTAFFDAQTGGDPVLFQHLFWFFGHPEVYILILPGFGMISHIVSTFSKKPVFGYLGMAYAMVAIGIVGFVVWAHHMYTVGLSTDTKAYFLAATMIIAVPTGIKIFSWIATMWGGSISFKTPMVWALGFIFLFTVGGVTGVVLANAGVDTAMHDTYYVVAHFHYVLSLGAVFAIFAGFYYWFGKMSGYEYSEWMGQLHFWLTFIGVNLVFFPQHFLGLAGMPRRYADYPDAFAGWNYISSIGSYISVLGLVVFFANLIYAFSKKKAAAQNPWGEGATTLEWTVPSPPNFHTFEELPKFEDDESVEKSIS

SEQ ID NO: 104527 - protein, 224 aa, Unknown
  Bacterial polypetide isolated from the Sargasso Sea
MFRGECILGLALVIYGAYMWFRDVVIEAEHQGHHTPVVQIHHRYGMTLFIASEVMFFVAWFWAYFDASLFPNEFVGNVWPPKDIETFDPWDIPLINTLVLLLSGTTVTWSHHSLLEGDRKGFIQGLTATVVLGFFFTLLQAYEYHHATFDYSGHIYGAVFYMATGFHGFHVIVGTIFLAVCLWRGKLGHFTKDHHFGFEAAAWYWHFVDVVWLFLFAAIYIWGS

SEQ ID NO: 104528 - protein, 301 aa, Unknown
  Bacterial polypetide isolated from the Sargasso Sea
MEYQKYYVPESSKFPIFAAFSLFIIIIGASSTINSLDNPESNASLILYTGLACFFATLFFWFRQVVKENNAGLESAQLSQSFVYGMAWFIFSEVMFFAAFFGALFYVRSFAVPWLGGEGEKGLANMLWQDFEATWPLINTPDGGKAFVIAAKSMSFPGWENISHWLPLYNTIVLLSSSVTVHFAHLGLKKGNKKTFNIWLGITVLLALIFVGLQAAEYYEAYEHFGLTLNSGIYGSTFFMLTGFHGFHVMLGGLMLAVMFIRSVFYGHFNEHKHFGFEAASWYWHFVDVVWVMLFLFVYIL

SEQ ID NO: 104529 - protein, 433 aa, Unknown
  Bacterial polypetide isolated from the Sargasso Sea
MSDDYENKTGYQAQSSETISSGGSGRSGTASDIDYVRPAENAEQDLYHGHSFITKWVFCQDAKVIGVQYFLLATFTGVIGLILSWLMRLQLGFPGAAGFMTAEHYYQFVTMHGMIMVVYFLTALFLGGFGNYLIPLMVGARDMVFPYLNMVSFWMFFIAVGVLLASFFVPGGPTGAGWTLYPPQTILEGTPGSGWGILLMCISLILFVAGFTMGGLNYLITILQARTRGMTLMRMPLTVWGIFTATVLAMLAFPALLVGALMMTLDKVLATSFFMPTILKAGEVLEYGGGSPILFQHLFWFFGHPEVYIVALPAFGIVSDLISVHSRKNIFGYRMMVWAIVVIGALSFFVWAHHMYVSGMNPWFGFFFATTTLIIAIPTAMKVYNWILTLWRGNIRLNVVMLWCLGFIVTFVNGGITGIFLGNVTVDVPLSDT

SEQ ID NO: 104530 - protein, 540 aa, Unknown
  Bacterial polypetide isolated from the Sargasso Sea
MSENTKQNYLNHPKGIMSWLLTLDHKRIGLMYLFSGILFFFLGGLLALVMRFELAAPGNDIISNEVYNNAYTLHGAIMIFLFIIPAIPGALGNILLPLMVGAKDVAFPRLNLASFYIYSFGALFAMYTIINGGVDTGWTFYTPYSTQSTSNVVPMTLGIFIIGFSSILTGLNFIATVHKMRIPGLTWYKLPLFVWALYGTSLVQITATPVLAITMVLLMLERFLGIGIFDPALGGDPVLYQHFFWFYSHPAVYIMILPAFGIISEIIPVHSRKKIWGYKFIAYSTLSIAFIGFLVWGHHMFTSGQSVFSQIVFSFITYFVGIPTGVKIFSWILTMYKGQVSFTPPMFYALAFLFLFTIGGLTGIFLGAVALDIHLHDTYFVVAHFHYVMQGGTIVAFLGGLHHWWPKSFGVMYNQTIANIAALGVFIGFNGTFFPQFLLGLRGMPRRYATYDEQFVELHSYSTFWSGILGISIFIAVMNLFWSFIKKNKVDPGSNPWGGMTLEWTHTSSPPHPHNFEEEPVLQHGPYDYDKVIVEKTYKK

SEQ ID NO: 104531 - protein, 262 aa, Unknown
  Bacterial polypetide isolated from the Sargasso Sea
MSAEKKHDYHLVDPSPWPIYVSFSCLVLAIGTIFYMHNDVSWGMYLGLALVVYGAYMWFRDVVIEAEHQGHHTPVVQIHHRYGMTLFIASEVMFFVAWFWAYFDASLFPNEFVGNVWPPKDIETFDPWDIPLINTLVLLLSGTTVTWSHHSLLEGDRKGFIQGLTATVVLGFFFTLLQAYEYHHATFDYSGHIYGAVFYMATGFHGFHVIVGTIFLAVCLWRGKLGHFTKDHHFGFEAAAWYWHFVDVVWLFLFAAIYIWGS

SEQ ID NO: 104532 - protein, 543 aa, Unknown
  Bacterial polypetide isolated from the Sargasso Sea
MYTQTASHDDHTPTGWKRWAYSTNHKDIGTMYLIFAIIAGVIGTAFSVLMRMELMHPGDGILGGNYHLYNVLVTGHGLIMIFFMVMPAMIGGFGNWFVPIMIGAPDMAFPRMNNISFWLLPTSFILLIMSIFMEGPPGQTGVGGGWTIYPPLSSSAGQPGPAMDFAILSLHLAGASSILGAVNFITTILNMRTPGMTLHKMPLFAWSILVTAFLLLLSLPVLAGAITMLLTDRNFGTAFFDAQTGGDPVLFQHLFWFFGHPEVYILILPGFGMISHIVSTFSKKPVFGYLGMAYAMVAIGIVGFVVWAHHMYTVGLSTDTKAYFLAATMIIAVPTGIKIFSWIATMWGGSISFKTPMVWALGFIFLFTVGGVTGVVLANAGVDTAMHDTYYVVAHFHYVLSLGAVFAIFAGFYYWFGKMSGYEYSEWMGQLHFWLTFIGVNLVFFPQHFLGLAGMPRRYADYPDAFAGWNYISSIGSYISVLGLVVFFANLIYAFSKKKAAAQNPWGEGATTLEWTVPSPPNFHTFEELPKFEDDESIEKSTS

SEQ ID NO: 104533 - protein, 124 aa, Unknown
  Bacterial polypetide isolated from the Sargasso Sea
SGLTVTWAHHGLKEGKRNQLILGLIATVLLGFIFVGFQAYEYSHAYNDLNLKMSSGIYGSTFYMLTGFHGFHVTLGAIMLTVILFRCIRGHFSNEKHFGFEAVAWYWHFVDVVWLGLFVFVYWL

SEQ ID NO: 104534 - protein, 245 aa, Unknown
  Bacterial polypetide isolated from the Sargasso Sea
MSTNIDHIKEEHHHQPSGLMRWITTTNHKDIGSLYLWFSLLMFFIGGFMALIIRAELFQPGLQLVVPGFFNQMTTMHALIMIFGALMPAFVGLANWQLPMMIGAPDMALPRLNNWSFWILPFAFTMLLSTLFFESGGPAAGWTLYPPLSLQGGNSMPFVIFSLHLLGASSILGAINVIATILNMRAPGMTLMKMPIFVWTWLITAFLLIAAMPVLAGAITMLLTDRFYGTSFFTAAGGGDPGLFQ

SEQ ID NO: 104535 - protein, 531 aa, Unknown
  Bacterial polypetide isolated from the Sargasso Sea
MSYADSASHDHHDHKPGFIKRWFFSTNHKDIGTLYIIFAILAGLVGGFFSLLMRAELAAPGLDVVADGQVWNVIITAHGLLMVFFVVMPALIGGFGNWFVPLMIGAPDMAFPRMNNFSFWILVPALVLLVVSATIGTGAGTGWTIYPPLSNKLGHAGPSVDMAIFALHLAGASSILGAVNFITTILNMRTPGMTLHKMPLFVWAMLITAFLLLLAVPVLAGAITMLLTDRNFGTTFFNPAGGGDPVLFQHLFWFFGHPEVYIMILPAFGIVSQVISTFSRKPVFGYLGMVYAMISIGFIGFIVWAHHMFTVGMSADLRAYFMLATIIIAVPTGIKIFSWIATMWGGSLTFETPMLFAIGFVFLFTLGGVTGVILANAGIDTVMHDTYYVVAHFHYVLSMGAMFGIFAGIYYWFGKMSGRKYNEFLGKLHFWLFFIGVNVTFFPQHFLGLAGMPRRIPDYPDAYAGWNLVSTYGSYISFAATLIFLFAIVYALFFGKKEVANPWGEGADTLEWTLSSPPPFHQFETLPKFKG

SEQ ID NO: 104536 - protein, 362 aa, Unknown
  Bacterial polypetide isolated from the Sargasso Sea
MAGASSFLGASNFITTIFNMRAPGMTLHKMPLFVWSMLVTAFLLLLSLPVLAGAITMLLTDRNFGTAFFVPEGGGDPILFLHLFWFFGHPEVYIMILPAFGIVSQIISTFSKKPVFGYLGMAYAMVAIGVVGFVVWAHHMYTVGMDVDTRAYFTAATMVIAVPTGIKIFSWIATMWGGSIEFKTPLLWALGFIFLFTVGGVTGVVLSNAGLDVVLHNTYYVVAHFHYVLSLGAVFGLFAGFYYWFSKMTGCDYNEKLGQLHFWVTFVGVNLTFFPMHFLGLAGMPRRYVDYPDAFAGWNMVASIGSLISVVGVVIFFVVIIEAFNSRRKAANSPWGVGGTTIEWTTTSPPPFHTFDELPKVK

SEQ ID NO: 104537 - protein, 242 aa, Unknown
  Bacterial polypetide isolated from the Sargasso Sea
MSAEKKHDYHLVDPSPWPIYTSFACLVLAIGAIFYMHNGISWGMYLGLALLIYGAYMWFRDVVIEAEHQGHHTPVVQIHHRYGMTLFIASEVMFFVAWFWAYFDISLFPNEFVGNVWPPKDIETFDPWDIPLINTLVLLLSGTTVTWAHHALLEDDRKGFIQGLTLTVILGFFFTLLQAYEYHHATFTYSGHIYGAVFYMATGFHGFHVIIGTIFLAVCLWRGRLGHFTKDHHFGFEAAAWY

SEQ ID NO: 104538 - protein, 612 aa, Unknown
  Bacterial polypetide isolated from the Sargasso Sea
MSDELENKSGYQAQSSETVNEYSGSAVGDVDYVRPAEVSDQDLYHGHSFITKWVFCQDAKVIGVQYFLTAVFTGIVGLILSWLMRLQLGFPGLAGFMTAEHYYQFVTMHGMIMVVYFLTALFLGGFGNYLIPLMVGARDMVFPYVNMISFWMFFVAVAVLMASFFVPGGPTGSGWTLYPPQAILEGTPGSGAGILLMLISLSLFVIGFTMGGLNYLITVLQARTRGMTLMRMPLTVWGIFTATVLAMLAFPALLVSSIMMTLDKVLETSFFMPTIIKAGEVLGYGGGSPILFQHLFWFFGHPEVYIVALPAFGIVSDLISVHSRKNIFGYRMMVWAIVGIGALSFFVWAHHMYVSGMNPWFGFFFATTTLIIAVPTAMKVYNWILTLWRGNIRINTVMLWCLGFIVTFVNGGITGIFLGNVSVDVPLSDTYFVVAHFHMVMGIAPLMVIMGAVYHWFPLVAGRILDEGLGKWHFWITFLGAYSIYFPMHYLGFIGVPRRYFEMYDSPYMTSGVGLNEFISLAAFIVGAAQFILIYNIIKTLKTGKLAGKNPWQANSLEWQTSTVPPEHGNFGEKLPVVHRWPYDFSVPGAKDDFIPQTVPPSEVIDTEVEKT

SEQ ID NO: 104539 - protein, 442 aa, Unknown
  Bacterial polypetide isolated from the Sargasso Sea
MSSVVNEHHDDHPSGIMRWITTTNHKDIGTLYLWFSLIMFFIGGLMALVIRSELFQPGLQFVDPQFFNSMTTMHALVMIFGVVMPAFTGLANWLIPIMVGGPDMALPRMNNMSFWILPFAFSMLLSTLFMDGGAPAGGWTLYPPLSLQTGNAFPFLIFAIHFMGLSSIMGAINVVATILNMRAPGMTLMKMPLFVWTWLITAFLLIAVMPVLAGGVTMLLTDKYFGTSFFNAAGGGDPVMFQHIFWFFGHPEVYILILPSFGVVSSIIPTFSRKPLFGYSSMVYATASIAFLSFIVWAHHMFTVGMPLGGELFFMFATMLIAVPTGVKVFNWVSTMWKGAMTFETPMLFAIGFIVMFTIGGFSGLMLAITPADFQYHDTYFVVAHFHYVLVPGSIFAIMAAVYYWLPKWTGHYYSEFLGKTHFWLSTIFVNLTFFPMHFVGL

SEQ ID NO: 104540 - protein, 304 aa, Unknown
  Bacterial polypetide isolated from the Sargasso Sea
MSGGSYYVPDQSRFPIFMAFSLFVLVMGASSTINNLDNPESNSIYILYSGFACLFLTMFFWFRQVIKEHLAGLDSNQLKQSYVYGMAWFIFSEVMFFAAFFGALFYVRTFAVPWLAGDGAKGDAITAIELWQGFESTWPVITTPDQGSEYVIAEKSMAWPGWDYALKWLPLWNTIVLLSSSVTVHIAHLALKNGNRKKFNIMLGVTVGLALIFVGLQAAEYYEAYAHYGLTLNSGIYGSTFFMLTGFHGFHVMMGGFMLAVMLARSVFAGHFEEHDHFGFEAASWYWHFVDVVWVMLFLFVYIL

SEQ ID NO: 104541 - protein, 122 aa, Unknown
  Bacterial polypetide isolated from the Sargasso Sea
SGTTVTWAHHALLEDDRKGFIQGLSWTVFLGVCFTALQAYEYDHATFEFSNHIYGATFYMATGFHGFHVIIGTIFLAVCLWRGKLGHFNKDHHFGFEAAAWYWHFVDVVWLFLFAAIYVWGS

SEQ ID NO: 104542 - protein, 380 aa, Unknown
  Bacterial polypetide isolated from the Sargasso Sea
LYNVLVTSHGLLMIFFMVMPAMIGGFGNWIVPLMIGAPDMAFPRMNNISFWLLPASLILLIASLFVEGTSGGAGVGGGWTIYPPLSANLGSPGPAVDLAIFSLHLAGASSILGAINFITTIFNMRAPGMTLHKMPLFVWSILVTAVLLLLSLPVLAGAITMLLTDRNFGTTFFSAAEGGDPVLFQHLFWFFGHPEVYILILPGFGIVSHVVATFSKKPVFGYLGMAYAMVSIGFLGFIVWAHHMYTVGMDADVKAYYVFATMVIAVPTGIKVFSWIATMWGGSVDLKTPMLWAIGFIFLFTVGGVTGVVLANAGIDHSLHDTYYVVAHFHYVLSMGAVFAIFAGFYYWFGKMFGRNYSEFLGKLHFWLTFIGVNIISSHN

SEQ ID NO: 104543 - protein, 266 aa, Unknown
  Bacterial polypetide isolated from the Sargasso Sea
MSSENTKRTHEYHLVDPSPWPLLASIGALIACVGAVVYFRTDDMWTMIIGLAIVIYVSYMWFRDVIIEGEHQGHHTPVVQIGLRYGMTLFIASEVMFFVAWFWAYFNASLFPTEQIGAIWPPPDIHLMDPWHIPLINTLILLLSGTTVTWAHHALLEGNRKELIQGLWCTVGLGVVFTGFQVYEYMHADFSFSGHIYGATFYMATGFHGFHVLIGTIFLIVCLGRSIAGHFKSDHHFGFEAAAWYWHFVDVVWLFLFAAIYVWGSY

SEQ ID NO: 104544 - protein, 207 aa, Unknown
  Bacterial polypetide isolated from the Sargasso Sea
MNQQKHPFHLVDPSPWPFLASFAALLTTFGGVMYMHGYIGGDGLALTGFLMILYTMFVWWRDIIRESTYQGHHTTTVQAGLKSGMVLFIVSEIMFFLAFFWAFFHSSLAPTIEIGAVWPPKGIDVLNPWEIPFLNTVILLTSGATVTWAHHAILAGQKTQGMVSLAATIILAAIFTGFQVIEYIEAPFTITDGIYGSTFFMATGFHG

SEQ ID NO: 104545 - protein, 168 aa, Unknown
  Bacterial polypetide isolated from the Sargasso Sea
TPSFILMVIAIPSFALLYSMDEIVDPSLTLKVIGHQWYWTYEYSDYSVNEEGSIVFDSYMIPEDDLELGQLRLLEVDNRVVLPVNTHIRIIITAADVLHSWAVPALGIKCDAVPGRLNQTSLFLKREGVFYGQCSEICGANHGFMPIVVEGVQLNDYLNWVSNKLEDM

SEQ ID NO: 104546 - protein, 537 aa, Unknown
  Bacterial polypetide isolated from the Sargasso Sea
MSSIGHDVTAGHEHVHGDHAHETPHGWRRWLFATNHKDIGTLYLIFSFTMFLSGGVMALMIRAELFEPGLQIMRPEFFNQLTTMHGLIMVFGAIMPAFVGFANWMVPLQIGASDMAFARMNNFSFWLLPVAAVLLVGSFFAPGGATAAGWTLYAPLSTQMGPGMDFAIFAVHLMGASSIMGGINIVVTILNMRAPGLTLMKMPMFVWTWLITAYLLIAVMPVLAGAITMVLFDRHFGTSFFNAAGGGDPVMYQHIFWFFGHPEVYIMILPAFGIVSQVIPAFSRKPLFGYSSMVYATSSIAILSFMVWAHHMFATGMPVTGQLFFMYATMLIAVPTGVKVFNWVATMWRGSLSFETPMLFAVGFLIVFTFGGLSGLMLAMAPLDIQYHGTYFVVAHFHYVLVAGSLFALFSGWYYWAPKWTGWMYNETRGKIHFWASMFFFNLAFLPMHFVGLAGMPRRYADYPAQFTDWNQVISIGAFGFGLAQVYFLFAVALPAYRGGGELEKAGDKPWDGATGLEWTVPSPAPFHTFEHPPTVE

SEQ ID NO: 104547 - protein, 524 aa, Unknown
  Bacterial polypetide isolated from the Sargasso Sea
MSTNVENLHDHEHTPSGIMRWITTTNHKDIGTLYLWFSLLMFFVGGFMALIIRAELFEPGLQLVVPGFFNQMTTMHALIMIFGAVMPAFVGLANWQIPLMIGAPDMALPRLNNWSFWILPFAFTLLISTLFLSSGGPAAGWTLYPPLSLQGGNSMPFVVFAIHLLGISSILGAINVIATILNMRAPGMTLMKMPMFVWTWLITAFLLIAAMPVLAGAITMLLTDRFFGTSFFTASGGGDPVMFQHIFWFFGHPEVYILILPAFGIVSTIIPAFSRKKLFGYDSMVYATASIALLSFIVWAHHMFTVGMPLAGEIFFMLTTMLIAVPTGVKVFNWVATMWKGSMTFETPMLFSLAFIILFTIGGFSGLMLAMTPADFQYHDTYFVVAHFHYVLVPGAVFAIIAAVYYWLPKWTGKMYSESLGKLHFWLTTIFVNLTFFPMHFVGLAGMPRRIPDYPVQFADFNAIASVGAFGFGLSQLLFVYILYNTLKKDVTVDDKAWDGAEGLEWTISSPPPYHSFEKAPKVD

SEQ ID NO: 104548 - protein, 426 aa, Unknown
  Bacterial polypetide isolated from the Sargasso Sea
HGLIMIFFMVMPAMIGGFGNWFVPIMIGAPDMAFPRMNNISFWLLPVALILLLVSIFVDGPPGAKGVGGGWTIYPPLSSKTGQPGPAMDLAILSLHVAGASSILGAINFITTILNMRTPGMTLHKMPLFSWSILVTAFLLLLSLPVLAGAITMLLTDRNFGTAFFEAQTGGDPVLFQHLFWFFGHPEVYILILPGFGMISHIVSTFSRKPVFGYLGMAYAMVAIGVVGFVVWAHHMYTVGLDTDTKAYFLAATMIIAVPTGIKIFSWIATMWGGSISFQTPMLWAIGFIFLFTLGGVTGVVLANAGVDTALHDTYYVVAHFHYVLSMGAVYAIFAGFYYWFSKMTGYEYSEFLGKLHFWLTFIGVNLIFFPQHFLGLAGMPRRYADYPDAFAGWNYISSIGSYISIIGLAVFLLNRFVCFHEKEKS

SEQ ID NO: 104549 - protein, 422 aa, Unknown
  Bacterial polypetide isolated from the Sargasso Sea
MTETLVEVQKQEVHGHDHDHHDQGFVSKYIFSTDHKIIAMQYLFTGMLMGVIGGYMAYVFRMQLAFPGISVPGFGQVSPGEYNSLITNHGSIMIFWVAMPVLIAAFGNYLIPLMIGADDMVFPRINRLSFQVFFISSVVLLLSLFVEGGGFGGAWTSYPPLSASGDYNLTQLGASLWLTAVALEFVAFLLGGINFITTLMNSRAPGMKAYDIPMVCWMIVIASILFMLSVGPLLAGAVMLLFDQTLNTGFYDPARGGDPILWQHLFWFFGHPEVYVVLLPAIGITVDVMATFSRKKLFGYKLVLYTAVATGVLSFFVWAHHQFIAGIDPRMANVFTVTTLLISVPIAEMLFVMIATLYGGSITLTTPMLWALAFLAEFLIGGVTGIFLGASGADIYFHDTYFVLAHFHYTFFPIAIIGTFCA

SEQ ID NO: 104550 - protein, 119 aa, Unknown
  Bacterial polypetide isolated from the Sargasso Sea
MTTIASQDHSHHHPTGWKRWAYSTNHKDIGTMYLIFAIIAGIIGTAFSVLMRMELMHPGDGILGGNYHLYNVLVTGHGLIMIFFMVMPAMIGGFGNWFVPIMIGAPDMAFPRMNNISFW

SEQ ID NO: 104551 - protein, 295 aa, Unknown
  Bacterial polypetide isolated from the Sargasso Sea
MSDSHGAYYIPEPSRWPIVGTLALFTIFVGGGMMLNGYVGSGQYVLGLGFLALIYLFYGWFKDVIDESLAGNYNEQVDISFRWGMAWFIFSEVMFFAAFFGALFYIRVLSVPWLGGDSVTNTFAWPDFQAAWPLLTTPDMSVAGLETKYMAIKDVIPAWGVPAANTAILLTSGATVTFAHWALKKGSRSGLCWWLAATVALGFFFVYLQALEYGHAYHELDLTLESGVYGSTFFMLTGFHGFHVTMGATMLLIILYRSMKGHFSAHNHFAFEGVAWYWHFVDVVWLGLFVFVYWI

SEQ ID NO: 104552 - protein, 350 aa, Unknown
  Bacterial polypetide isolated from the Sargasso Sea
MSSVIESHHDDHHHGPAKGLMRWLLTTNHKDIGTLYLWFSFAMFLIGGAMAMVIRAELFQPGMQIVEPEFYNQMLTLHGLIMVFGAVMPAFVGLANWLVPMMVGAPDMALPRLNNLSFWLLPFAFGILLSSLFMEGGAPNFGWTFYAPLSTTYAPPSVTFFIFSVHIMGASSIMGSINVIVTIMNMRAPGMDLMKMPLFVWSWLITAYLLIAVMPVLAGAVTMMLMDIHFGTSFFNAAGGGDPVLFQHIFWFFGHPEVYIMILPAFGIVSHIIETFSRKPLFGYSSMVWAMLSIAILSFVVWAHHMFTVGMPLAAELFFMWATMLIAVPTGVKVFNWVATMFKGSITYET

SEQ ID NO: 104553 - protein, 301 aa, Unknown
  Bacterial polypetide isolated from the Sargasso Sea
MEYQKYYVPESSKFPIFAAISLFILIIGASSTINSLDNPESNASLILYTGLACFLATLFFWFRQVVKENNAGLESTQLSQSFVYGMAWFIFSEVMFFAAFFGALFYVRTFAVPWLGGEGEKGLANILWQDFEATWPLINTPDGGKAFVIAAKSMSFPGWENISHWLPIYNTIVLLSSSVTVHFAHLGLKKGNKKTFNAWLAITVLLALIFVGLQALEYYEAYAHFGLTLNSGIYGSTFFMLTGFHGFHVMLGGLMLAVMLIRSVFYGHFNEHKHFGFEAASWYWHFVDVVWVMLFLFVYIL

SEQ ID NO: 104554 - protein, 621 aa, Unknown
  Bacterial polypetide isolated from the Sargasso Sea
MTTISYPTFIRRPNEYVSGIWGWLTTVDHKKIGTMYGVTAFLWFIVGGIEALLIRLQLARPEGTILSPEVYNQVFTMHGTTMIFLVVMPLSAAFFNWIVPLQIGARDVAFPRLNAFSFWAFLFGGILLNLSWLTGDAPNAGWFAYAPNTEPQFNPRNGVTYWILGLQILGIASLAAGFNFLTTIINMRAPGMSFMKMPVFIWMTAVVNVLIVLAFPIITVALIQLQFDRLYGTHFFNPTMGGDPVMWQHMFWLFGHPEVYILILPAMGIVSEVLPTFSRKPIYGYSFIVFSGIAIGFLGWFVWSHHMFTVGLGPAANAAFSVSTMAIAIPTGVKIFNWIGTLWGGSIKINTALLFSVAFIGMFVIGGLSGVTHASPPSDAQQQDTYYVVAHFHYVLFGGSLLGLWSGVYYWWPKFTGRFLNEKIGLWHFGIVFFAFNLTFFPMHWLGLDGMPRRVATYPEGMGWDISNLVSTIGSLMLGVGVLVFLYNVVYSNLRMPKTASNDPWDGRTLEWSIPSPPPHYNFDAIPDVKYRDDFWYTKYPELAHNTHGGGSDLESQEDHDGDHADIHMPDPSYYPLFLGLGLAVMLGGFIPFTGHWVVCAVGLIIFIWSFLGWSYEPVNG

SEQ ID NO: 104555 - protein, 173 aa, Unknown
  Bacterial polypetide isolated from the Sargasso Sea
GVTGIVLSQAGVDRAYHDTYYVVAHFHYVMSLGAVFCIFAGIYYWIGKMSGRQYPEWAGKLHFWTMFIGSNITFFPQHFLGRQGMPRRYIDYPEQFALWNYVSSIGAFISFGSFIFFFGVIFYTLIWGRKIEENAYWGAHADTLEWTLPNPPPEHTFETLPTQDMWDKQPENH

SEQ ID NO: 104556 - protein, 541 aa, Unknown
  Bacterial polypetide isolated from the Sargasso Sea
MTISIDPQKTNNESLQPKGWLRYFSFSLDHKVIGIQYLVCGFLFYLIGGTLASAIRIELASPMSDFMPRDVYNQVLTLHGTIMIFLWIVPVVNGAFGNYLIPFYVGARDMAFPRLNAVAFWLIPPSGLMLVASYFVEGAAQAGWTAYPPLSITTPQSGQIIWILSVLLLGGSSIFGGINFIATIIKLRRPGLKLMQLPMYCWAMLGTSLLVVLSTPVLAGTLILLSFDIIANTGFFNPVLGGNVVVYQHLFWFYSHPAVYIMVLPAFGLVSEILPVHARKPLFGYTTMVFSIMGIVVLGLVVWAHHMFTSGTPPWMRLFFTIATAFIAVPTGIKFFNWVATLWGGKISINSAMLFSCGFIINFVFGGITGVALAQVPFDIHVHDTYFVVAHFHYIVYGGTVFIIFSSIYHWFPKVTGKMLNEKLGILHFIITFIGFNLCFAPQHWLGLNGMPRRVAEYDPQFQFVNQISSLGALLMAISTIPFLINVFLSVRNGKNAGDNPWNALTPEWLTSSPPPVENWEGEAPLVEEPYGYGKEISEQK

SEQ ID NO: 104557 - protein, 301 aa, Unknown
  Bacterial polypetide isolated from the Sargasso Sea
MEYQKYYVPESSKFPIFAAFSLFILIIGASSTINSLDNPESNASLILYTGLACFLATLFFWFRQVVKENNAGLESTQLSQSFVYGMAWFIFSEVMFFAAFFGALFYVRSFAVPWLGGEGEKGLANMLWQDFEATWPLINTPDGGKAFVIAAKSMSFPGWENISHWLPLYNTIVLLSSSVTVHFAHLGLKKGNKKTFNIWLGITVLLALIFVGLQAAEYYEAYEHFGLTLNSGIYGSTFFMLTGFHGFHVMLGGLMLAVMFIRSVFYGHFNEHKHFGFEAASWYWHFVDVVWVMLFLFVYIL

SEQ ID NO: 104558 - protein, 527 aa, Unknown
  Bacterial polypetide isolated from the Sargasso Sea
MSSVIESHHDDHHHGPAKGLMRWLLTTNHKDIGTLYLWFSFAMFLIGGAMAMVIRAELFQPGMQIVEPEFYNQMLTLHGLIMVFGAVMPAFVGLANWLVPMMVGAPDMALPRLNNLSFWLLPFAFGILLSSLFMEGGAPNFGWTFYAPLSTTYAPPSVTFFIFSVHIMGASSIMGSINVIVTIMNMRAPGMDLMKMPLFVWSWLITAYLLIAVMPVLAGAVTMMLMDIHFGTSFFNAAGGGDPVLFQHIFWFFGHPEVYIMILPAFGIVSHIIETFSRKQLFGYSSMVWAMLSIAILSFVVWAHHMFTVGMPLAAELFFMWATMLIAVPTGVKVFNWVATMFKGSITYETPMLFAISFVVLFTIGGFSGLMLSIVPADFQYHDTYFVVAHFHYVLVPGSIFSIMAAVYYWIPKWTGNMYDERMGRLHFWLSFVGVNVTFFPQHWIGLAGMPRRYPDYALQFADWNMVSTAGAFLFGASQILFLFIVLKTVMGGKKATPQVWEGARGLEWSVESPAPYHTFSTPPKVN

SEQ ID NO: 104559 - protein, 301 aa, Unknown
  Bacterial polypetide isolated from the Sargasso Sea
MEYQKYYVPESSKFPIFAAFSLFIIIIGASSTINSLDNPESNASLILYTGLACFLATLFFWFRQVVKENNAGLESAQLSQSFVYGMAWFIFSEVMFFAAFFGALFYVRSFAVPWLGGEGEKGLANILWQDFEATWPLINTPDGGKAFVIAAKSMSFPGWENISHWLPLYNTIVLLSSSVTVHFAHLGLKKGNKKTFNIWLGITVLLALIFVGLQAAEYYEAYEHFGLTLNSGIYGSTFFMLTGFHGFHVMLGGLMLAVMFIRSVFYGHFNEHKHFGFEAASWYWHFVDVVWVMLFLFVYIL

SEQ ID NO: 104560 - protein, 434 aa, Unknown
  Bacterial polypetide isolated from the Sargasso Sea
MAFPRLNNISFWLLPPSLILLLSSALVEVGVGTGWTVYPPLSHITSHSGGAVDLAIFSLHLSGASSILGAINFITTIFNMRGPGLSMHRLPLFVWSVLITAFLLLLSLPVLAGAITMLLTDRNFNTSFFDPAGGGDPILFQHLFWFFGHPEVYILILPGFGIVSHIISTFARKPIFGYLGMVYAMLSIGVLGFIVWAHHMFTVGLDVDTRAYFTAATMIIAVPTGIKIFSWIATAWGGSIYLRTPMLFAVGFIFLFTVGGLTGVMLANAGIDIALHDTYYVVAHFHYVLSMGAVFALFAGFYYWIGKISGYQYPEVYGQIHFWLFFIGVNLTFFPMHFLGLAGMPRRIPDYPDAFAGWNAVCSYGSYLSILASVFFFYVVYLTLTSEEKCPTNPWNFDDNEKSVPTLEWTVTSPPAFHTFEEIPAIKSPQQLTK

SEQ ID NO: 104561 - protein, 262 aa, Unknown
  Bacterial polypetide isolated from the Sargasso Sea
MSAEKKHDYHLVDPSPWPIYTSFACLVLAIGTIFYMHNDVSWGMYLGLALLIYGAYMWFRDVVIEAEHQGHHTPVVQIHHRYGMTLFIASEVMFFVAWFWAYFDISLFPNEFVGNVWPPQDIETFDPWDIPLINTLVLLLSGTTVTWAHHSLLEDDRKGFIQGLTATVALGFFFTLLQAYEYHHATFNYSGHIYGAVFYMATGFHGFHVIVGTIFLAVCLWRGRLGHFTKDHHFGFEAAAWYWHFVDVVWLFLFAAIYVWGS

SEQ ID NO: 104562 - protein, 540 aa, Unknown
  Bacterial polypetide isolated from the Sargasso Sea
MSENTKQNYLNHPKGIMSWLMTLDHKRIGLMYLFSGILFFFLGGLIALVMRFELAAPGNDIISNDVYNNAYTLHGAIMIFLFIIPAIPGALGNILLPLMVGAKDVAFPRLNLASFYIYSFGALFAMYTIINGGVDTGWTFYTPYSTQSTSNVVPMTLGIFIIGFSSILTGLNFIATIHKMRIPGLTWYKLPLFVWALYGTSLVQITATPVLAITMVLLMLERFLGIGIFDPALGGDPVLYQHFFWFYSHPAVYIMILPAFGIISEIIPVHSRKKIWGYKFIAYSTLSIAFIGFLVWGHHMFTSGQSVFSQIVFSFITYFVGIPTGVKIFSWILTMYKGQVSFTPPMMYALSFLFLFTIGGLTGIFLGAVALDIHLHDTYFVVAHFHYVMQGGTIVAFLGGLHHWWPKSFGVMYNQTVANIAALGVFIGFNGTFFPQFLLGLRGMPRRYATYDEQFVELHSYSTFWSGILGISIFIAVMNLFWSFIKKNKVDPGSNPWGGMTLEWTHTSSPPHPHNFEEDPVLQHGPYDYDKVIVEKTYKK

SEQ ID NO: 104563 - protein, 662 aa, Unknown
  Bacterial polypetide isolated from the Sargasso Sea
MTKIIEPKKQRNIFSRPSSEEGVWSWITTVDHKRIGIMYGYAAFFFLLVGGLEALLLRIQLSQPDNNFLSAAEYNAMFTMHGTTMIFLAIMPISAAFFNYLLPLQIGARDVAFPRLNALSFWIFIAGGLFLYSTFLFGTAGAPEGGYLAEEVSRLASAPNGGWFGYQPNAGLKYSPGTAMDYWAIGLQILGIASLVSAFNFITTILNMRTKGMRLMRMPVFTWMTFAVSFLLAFSLPIIAIALFFVTFDRQFGTTFFLTEGGGDPVLWQHLFWLFGHPEVYILILPAFGIVSEVLPTFSRKPLFGYPAIVFAGFGIAFIGFGVWAHHMFASAISPVAQAGFGLSTMIIAVPTGVKIFNWLGTIWGGRLTLNTPMLFALGFIGMFVIGGLSGVTHSVVPADTQQTDTYYIVAHFHYVLFGGALFGIFSGLYFWFPKVWGRMYNETMGKIHFWLMIIGFNLTFGPMHWLGLQGQVRRTWVYAEETNLGFWNLIVTIGAFILAIATLVFMANWIYSRRKGEVAPFDPWDARTIEWSIPSPTPVWNFSNAPEVKSLDDFWHQKYGEDEDGRAVRREGTDELLLQLEEEGLNPKEEIHLPSPSYFPVIMAFGLPFLGYAIIYKSIPLALIGVIMLLIGGFGWGTEPLEEEFESSEEEPESGESKNYE

SEQ ID NO: 104564 - protein, 317 aa, Unknown
  Bacterial polypetide isolated from the Sargasso Sea
MTTTNHKDIGTLYLWFSFLAFLVGGAFAMGIRAELFEPGLQLMDPIRYNQLVTMHGLIMIFGGVMPAFVGLANWLIPMQIGAPDMALPRMNNLSFWLLPTAFAILMSTAFMEGGMPGFGWTFYAPLSTNYPNVAFFVFAVHIMGISSIMGSINVIVTIMNMRAPGMTLMQMPLFTWSWLITAYLLIAVMPVLAGAVTMLLMDAYFGTSFFDAAGGGDPVLFQHIFWFFGHPEVYIMILPAFGITSHIISTFSRKPLFGHASMIYAMSSIAILSFVVWAHHMFTVGMPLAAELFFMWATMLIAIPTGVKVFNWCATNI

SEQ ID NO: 104565 - protein, 235 aa, Unknown
  Bacterial polypetide isolated from the Sargasso Sea
MANKSTTGQKHPYHLVDPSPLPFLSSIAGLAMAAGLVFYMHYGTSWLLILGTIGLLTIMFLWWRDVIKESTFQKVHTPVVELGLRYGMALFIASEVMFFVAFFWAFFDASLTPKLPIEEFSETFDSNGAVGIWPPEGIKTFDPLDVPFLNTLILLMSGTTCTWAHHAVREGHRDQAIQALWCTVGLGIFFSFMQGVEYYEAAHHYFSFTDGIYPSVFYMATGFHGFHVMVGTAIS

SEQ ID NO: 104566 - protein, 261 aa, Unknown
  Bacterial polypetide isolated from the Sargasso Sea
MSGGHSHSFHLVEPSPWPALGAMAGFVAAIGAIMYMHEKPFGAAIMGVGFVAILATMAFWWRDVIKEAEHQGHHTPIVQIGMRYGMILFICSEVMFFLAFFWAFFDASLYPDTGVWPPAGIETFSAWDIPLINTMILLLSGCTVTWAHAALLKNDRENLIKGLAYTILLGIAFTALQIYEYDHATFKFTDGIYSSTFYLATGFHGFHVFVGTCFLIVCWFRARAGHFTPEHHFGFEAAAWYWHFVDVVWLFLFICIYWWGG

SEQ ID NO: 104567 - protein, 131 aa, Unknown
  Bacterial polypetide isolated from the Sargasso Sea
LINTLVLLLSGTTVTWAHHSLLEDDRKGFIQGLTLTVILGFFFTLLQAYEYHHATFTYSGHIYGAVFYMATGFHGFHVIIGTIFLAVCLWRGRVGHFTKDHHFGFEAAAWYWHFVDVVWLFLFAAIYIWGS

SEQ ID NO: 104568 - protein, 330 aa, Unknown
  Bacterial polypetide isolated from the Sargasso Sea
MYTQAASHDSHTPTGWKRWAYSTNHKDIGTMYLIFAIVAGVIGTAFSVLMRMELMHPGDGILGGNYHLYNVLVTGHGLIMIFFMVMPAMIGGFGNWFVPIMIGAPDMAFPRMNNISFWLLPVSLTLLILSVFAEGPPGQTGVGGGWTIYPPLSSKAGQPGPAMDLAILSLHLAGASSILGAVNFITTILNMRTPGMTLHKMPLFAWSILVTAFLLLLSLPVLAGAITMLLTDRNFGTAFFDAQTGGDPVLFQHLFWFFGHPEVYILILPGFGMISHVVSTFSKKPVFGYLGMAYAMVAIGIVGFVVWAHHMYTVGLSTDTKAYFLAATMI

SEQ ID NO: 104569 - protein, 263 aa, Unknown
  Bacterial polypetide isolated from the Sargasso Sea
MSSGEKKHDYHLVDPSPWPIFTSFACLVLAIGAVYYFHTKALWLLLIGTALLIYGSFMWFRDVVDEAEKQGHHTMVVQITHRYGMTLFIASEVMFFVAWFWAFFNASLFPTEAIGKIWPPADIKTFDPWDIPLINTLILLLSGTTVTWAHHAMIENDRKALVNGLIATVFLGFVFSCFQAYEYHHASFTIDGNIYGSTFYMATGFHGFHVIIGTIFLAVCLYRSIKGHFKPDHHFGFEAAAWYWHFVDVVWLFLFAAIYIWGS

SEQ ID NO: 104570 - protein, 301 aa, Unknown
  Bacterial polypetide isolated from the Sargasso Sea
MEYQKYYVPESSKFPIFAAFSLFIVIIGASSTINSLDNPESNASLILYTGLACFLATLFFWFRQVVKENNAGLESAQLSQSFVYGMAWFIFSEVMFFAAFFGALFYVRSFAVPWLGGEGEKGLANMLWQDFEATWPLINTPDGGKAFVIAAKSMSFPGWENISHWLPLYNTIVLLSSSVTVHFAHLGLKKGNKKTFNIWLGITVLLALIFVGLQAAEYYEAYEHFGLTLNSGIYGSTFFMLTGFHGFHVMLGGLMLAVMFIRSVFYGHFNEHKHFGFEAASWYWHFVDVVWVMLFLFVYIL

SEQ ID NO: 104571 - protein, 529 aa, Unknown
  Bacterial polypetide isolated from the Sargasso Sea
MSTVVETHDHDGHHGPAKGLSRWLFTTNHKDIGTLYLWFSFIMLFIGGGMAMVIRAELFQPGLQIVQPEFFNQMTTNHGLIMVFGVIMPAFVGLANWMLPMQIGAPDMALPRLNNLSFWLLPMAFGILISTLFMPEGGPNFGWTFYAPLSTTYAPSTVNFFIFSVHIMGVSSILGSINIITTIFNMRAPGMTLMKMPLFVWSWLITAYLLIAVMPVLAGVVTMMLMDINFGTSFFNAAGGGDPVLFQHVFWFFGHPEVYIMILPAFGIVSHIIETFSRKPIFGYSSMVYAMASIAILSFVVWAHHMFTVGMPLAGELFFMYSTMLIAIPTGVKVFNWVATMFKGSITFETPMLFSIAFVALFTIGGFSGLMLAIVPADFQYHDTYFVVAHFHYVLVPGALFGIIAGAYYWLPKWTGYMYDEFLGKLHFWLTFISVNVTFFPMHFVGLAGMPRRYPDYALQFADFNALISVGAFMFGLTQLLFLFIVIKSIRTGKKAKPEVWEGAGELGLEWTLSSPPPYHSFTVQPQVK

SEQ ID NO: 104572 - protein, 151 aa, Unknown
  Bacterial polypetide isolated from the Sargasso Sea
KKSMAWPGWDNALKWLPLWNTIVLLSSSWTVHLAHLGLKKGNRKKFNGYLGLTVFLALIFVGLQALEYYEAYAHYGLTLNSGIYGSTFFMLTGFHGFHVMMGGFMLAIMLARSVFAGHFEQHDHFGFEAASWYWHFVDVVWLMLFIFVYIL

SEQ ID NO: 104573 - protein, 586 aa, Unknown
  Bacterial polypetide isolated from the Sargasso Sea
MTYAHTDHVPHSFWTRYVWSQDHKVIAVQYALTAIAIGLVGLVLSDLMRLQLGFPGKFAFIDANHYYQFVTMHGMIMVIYLLTALFLGGFGNYLIPLMLGARDMVFPFLNMLSYWVYLLAVLVLVASFFVPGGPTGAGWTLYPPQAILPGTPGVEWGIVLMLVSLAIFIVAATMGGLNYVTTTLQARTRGMTLMRMPLTVWGIFIATIMALLAFPALFVSAVMMLFDRTLGTSFFIPAVVSMGQTLKHAGGSPLLFQHLFWFFGHPEVYIVALPAFGIASDLISTHARKSIFGYRMMVWAIVIIGALSFVVWAHHMFIAGMNPYFGFFFATTTLIIAVPTALKVYNWVLTLWRGDIHLTVPMLFAIGFVSTFVLGGLTGLYLGNVSVDIPLSNTYFVVAHFHMVMAVSPILVVFGGLYHWYPKVTGRMLDDTLGRAHFWITFVGTYAIYFPMHYLGILGMPRRYYAYQGYSFIPHSAQTLNTFITIVALIVAAAQLLFLFNLAWSLGHGRRADGNPWRATTLEWQTPQTPPVHGNWGPTLPVVYRWAYEYSPPGQEEDFVPQNQPPATAPEAKAAHPTLHPGEAQE

SEQ ID NO: 104574 - protein, 466 aa, Unknown
  Bacterial polypetide isolated from the Sargasso Sea
MIMIFFMVMPAMIGGFGNWFVPIMIGAPDMAFPRMNNISFWLLPTSFILLIMSIFMDGPPGQTGVGGGWTIYPPLSSTAGQPGPAMDFAILSLHLAGASSILGAVNFITTILNMRTPGMTLHKMPLFAWSILVTAFLLLLSLPVLAGAITMLLTDRNFGTAFFDAQTGGDPVLFQHLFWFFGHPEVYILILPGFGMISHIVSTFSRKPVFGYLGMAYAMVAIGIVGFVVWAHHMYTVGLSTDTKAYFLAATMIIAVPTGIKIFSWIATMWGGSISFKTPMVWALGFIFLFTVGGVTGVVLANAGVDTAMHDTYYVVAHFHYVLSLGAVFAIFAGFYYWFGKMTGYEYSEWMGQLHFWLTFIGVNLVFFPQHFLGLAGMPRRYADYPDAFAGWNYISSIGSYISVIGLVVFFINLAYAFYKKKAAAQNPWGEGATTLEWTVPSPPNFHTFEELPKFEDEEGVEKSTS

SEQ ID NO: 104575 - protein, 437 aa, Unknown
  Bacterial polypetide isolated from the Sargasso Sea
MSANIDKLHDDHSHTPSGIMRWITTTNHKDIGTMYLWFSLIMFFIGGLMALVIRAELFQPGLQLVVPGFFNQMTTMHALVMIFGAVMPAFVGLANWQIPIMIGAPDMALPRLNNWSFWILPFAFTMMLSTLFFESGGPAAGWTLYPPLSLQGGDSMPFVILSIHLLGLSSILGAINVIATILNMRAPGMTLMKMPIFVWTWLITAFLLIASMPVLAGAITMLLTDRFFGTSFFTASGGGDPVLFQHIFWFFGHPEVYILILPAFGIVSTIIPAFSRKKLFGYDSMVYATASIALLSFIVWAHHMFTVGMPLAGELFFMFTTMLIAVPTGVKVFNWVATMWRGSMTFETPMLFAIAFIVLFTVGGFSGLMLAMVPADFQYHDTYFVVAHFHYVLVPGAVFAIIAAVYYWLPKWTGKMYNESLGKLHFWLTTFFVNLTF

SEQ ID NO: 104576 - protein, 261 aa, Unknown
  Bacterial polypetide isolated from the Sargasso Sea
MYTQTASHDDHHTPTGWKRWAYSTNHKDIGTMYLIFAIIAGVIGTAFSVLMRMELMHPGDGILGGNYHLYNVLVTGHGLIMIFFMVMPAMIGGFGNWFVPIMIGAPDMAFPRMNNISFWLLPTSFILLIMSIFMDGPPGQTGVGGGWTIYPPLSSTAGQPGPAMDFAILSLHLAGASSILGAVNFITTILNMRTPGMTLHKMPLFAWSILVTAFLLLLSLPVLAGAITMLLTDRNFGTAFFDAQTGGDPVLFQHLFWFFGH

SEQ ID NO: 104577 - protein, 532 aa, Unknown
  Bacterial polypetide isolated from the Sargasso Sea
FSFSVDHKVIGLQYLVCGFLFYLIGGALAGAIRTELASPVSDFMARDVYNQVLTLHGTVMIFLWIVPVVNGAFGNYLIPFYVGARDMAFPRLNAVAFWLIPPAGLMLITSYFLTGAAQSGWTAYPPLSITTPATGQIIWILSVLLLGGSSIFGGINFIATILKLRRPGLKLMQLPMYCWAMLGTSILVVLSTPVLAGTLVLLSFDIVAHTGFFNPTLGGNVVVYQHLFWFYSHPAVYIMVLPAFGLVSEILPVHARKPLFGYVTMVYSIMAIVVLGLVVWAHHMFTSGTPPWMRLFFTIATAFIAVPTGIKFFNWLATLWGGRITLNSAMLFSCGFIVNFVLGGITGVALAQVPFDIHVHDTYFVVAHFHYIVFGGSVFVIFASVYHWYPKFTGRMLNEDLGRLHCALTFIGFNLCFGPQHWLGLNGMPRRVAEYDPQFTLINQISSVGALLMAISTLPFLWNVVQSALSGKPAGDNPWNALTPEWLTSSPPPVENWIGEAPLVEEPYGYGVPMDQLDLTATSGRDLWSSGK

SEQ ID NO: 104578 - protein, 450 aa, Unknown
  Bacterial polypetide isolated from the Sargasso Sea
NYHLYNVLVTGHGLIMIFFMVMPAMIGGFGNWFVPIMIGAPDMAFPRMNNISFWLLPVALILLIASIFVDGPPGAQGVGGGWTIYPPLSSKTGQPGPAMDLAILSLHVAGASSILGAINFITTILNMRTPGMTLHKMPLFSWSILVTAFLLLLSLPVLAGAITMLLTDRNFGTAFFEAQTGGDPVLFQHLFWFFGHPEVYILILPGFGMISHIVSTFSKKPVFGYLGMAYAMVAIGVVGFVVWAHHMYTVGLDTDTKAYFLAATMIIAVPTGIKVFSWIATMWGGSISFKTPMLWAIGFIFLFTLGGVTGVVLANAGVDTALHDTYYVVAHFHYVLSMGAVFAIFAGFYYWFSKMSGYQYSEFLGKLHFWLTLVGVNLIFFPQHFLGLAGMPRRYADYPDAFAGWNYISSIGSYISVVGLAVFLINLLYAFAKKKKAEQNPWGEGATTLE

SEQ ID NO: 104579 - protein, 457 aa, Unknown
  Bacterial polypetide isolated from the Sargasso Sea
PDQDLYHGHSFITKWVFCQDAKVIGVQYFLLATFTGIVGLILSWLMRLQLGFPGLAGFMTAEHYYQFVTMHGMIMVVYFLTALFLGGFGNYLIPLMVGARDMVFPYVNMISFWMFFVAVAVLMASFFVPGGPTGSGWTLYPPQAILEGTPGSGMGILLMLISLSLFVIGFTMGGLNYLITVLQARTRGMTLMRMPLTVWGIFTATVLAMLAFPALLVSSIMMTLDKVLGTSFFMPTILKAGEVLEYGGGSPILFQHLFWFFGHPEVYIVALPAFGIVSDLISVHSRKNIFGYRMMVWAIVAIGALSFFVWAHHMYVSGMNPWFGFFFATTTLIIAVPTAMKVYNWILTLWRGNIRINTVMLWCLGFIVTFVNGGITGIFLGNVSVDVPLSDTYFVIAHFHMVMGIAPLMVIMGAVYHWFPLVAGRMLSEKLGKWHFWTTFIGAYSIYFPMHYLGFIG

SEQ ID NO: 104580 - protein, 262 aa, Unknown
  Bacterial polypetide isolated from the Sargasso Sea
MSANKKHDYHLVDPSPWPIYCSFSSLILALGAVYYFHTKTLWLLLVGTALLIYGSFMWFRDVIDEAEKQGHHTLVVQIGHRYGMTLFIASEVMFFIAWFWAFFNASLFPTEAVGKVWPPADIKTFDPWDIPLINTLILLLSGTTATWAHHAMLENDRKGLVNGLITTVFLGFIFTCFQAYEYHHAAFTISQNIYGSTFYMATGFHGFHVIIGTIFLAVCLYRSIKGHFKPDHHFGFEAAAWYWHFVDVVWLFLFAAIYIWGS

SEQ ID NO: 104581 - protein, 544 aa, Unknown
  Bacterial polypetide isolated from the Sargasso Sea
MYTQTASHDDHHTPTGWKRWAYSTNHKDIGTMYLIFAIVAGVIGTAFSVLMRMELMHPGDGILGGNYHLYNVLVTGHGLIMIFFMVMPAMIGGFGNWFVPIMIGAPDMAFPRMNNISFWLLPVSLTLLILSIFVDGPPGQTGVGGGWTIYPPLSSKAGQPGPAMDLAILSLHLAGASSILGAVNFITTILNMRTPGMTLHKMPLFAWSILVTAFLLLLSLPVLAGAITMLLTDRNFGTAFFEAQTGGDPVLFQHLFWFFGHPEVYILILPGFGMISHIVSTFSRKPVFGYLGMAYAMVAIGIVGFVVWAHHMYTVGLSTDTKAYFLAATMIIAVPTGIKIFSWIATMWGGSISFKTPMMWALGFIFMFTVGGVTGVVLANAGVDTAMHDTYYVVAHFHYVLSLGAVFAIFAGFYYWFSKMSGYEYSEWLGHLHFWLTFVGVNLIFFPQHFLGLAGMPRRYADYPDAFAGWNYISSVGSYVAVAGLAVFFVNLIYSFAKKKAAAQNPWGVGATTLEWTVPSPPNFHTFDELPKFEDDQEAQKTHS

SEQ ID NO: 104582 - protein, 232 aa, Unknown
  Bacterial polypetide isolated from the Sargasso Sea
GAVYYFHSKALWLLLVGFALVIYGAFMWWRDVIEEAEHQGHHTPVVQIGHRYGMTLFIASEVMFFVAWFWAYFNASLFPTESIGGTWPPPDIKTFDPWDIPLINTLILLLSGTTVTWAHHAMLENDRKGLVNGLIATVFLGFIFSCFQAYEYHHATFTLDGNIYGSTFYMATGFHGFHVIVGTIFLAVCLFRSMKGHSTPTHHFGFEAAAWYWHFVDVVWLFLFAAIYIWGS

SEQ ID NO: 104583 - protein, 238 aa, Unknown
  Bacterial polypetide isolated from the Sargasso Sea
MYTQSASHDDHHTPTGWKRWAYSTNHKDIGTMYLIFAIVAGVIGTAFSVLMRMELMHPGDGILGGNYHLYNVLVTGHGLIMIFFMVMPAMIGGFGNWFVPIMIGAPDMAFPRMNNISFWLLPTSFILLIISIFVDGPPGQTGVGGGWTIYPPLSSKAGQPGPAMDFAILSLHLAGASSILGAVNFITTILNMRTPGMTLHKMPLFAWSILVTAFLLLLSLPVLAGAITMLLTDRNFGT

SEQ ID NO: 104584 - protein, 609 aa, Unknown
  Bacterial polypetide isolated from the Sargasso Sea
MSDEYEHKLEAKSDIVSDASSVGTPGIDAVPEAEIPDQELYHSHSWWTTYVFSQDAKYIGVQYALTAVGTGLLGLVLSWLMRIQLAWPGLGWLEPAAYYQFVTMHGMIMVIYLLTALFLGGFGNLLIPLMCGSRDMAFPYVNMLSYWAFVVAVLVLLASFFVPGGPTGAGWTLYPPQAITAGTPGSNMGIILMLVSLILFVAGFTMGGLNYIITVLQLRARGMTLMRMPLTIWGIFTATVLALLAFPALLVGCLMMTLDSMLGTSFFMPAMVSLGEKLSYDGGSPILFQHLFWFFGHPEVYIVALPAFGIVSDLLSVHARKNIFGYRMMVWAIVGIGALSFFVWAHHMYVSGMNPWFGFFFATTTLIIAVPTAIKVYNWIITLWRGNIQLSLPMLFSLAFIVTFLNGGLTGLFLGNVTVDVPLSDTYFVVAHFHMVMGIAPILVVFGAIYHWYPLITGRMLNETLGKIHFWITFVGSYAIYFPMHYQGFVGVPRRYFEIYESPYIETSTLLLNQFITIAALIVGAAQLLFLYNIIVSARLGKKAEKNPWKACSLEWQTPQMPPEHGNWGKETPKVYRWAYDFSVPGAKEDYIPQNVPPSEVMGAKVEKT

SEQ ID NO: 104585 - protein, 497 aa, Unknown
  Bacterial polypetide isolated from the Sargasso Sea
YLIYAIVAGVVGGALSVIMRMELSEPGMQFVADGQMWNVIISAHGLLMIFFVVMPALIGGFGNWFIPLMIGAPDMAFPRLNNISFWLLVPALFLIAGSMFVGSGAGTGWTIYPPLSSITGHSSPAVDMAIFSLHLAGASSILGAVNFITTILNMRAPGMTIHKMPLFVWAMLVTAFLLLLAVPVLGGAITMLLTDRNFGTTFFDPAGGGDPVLFQHLFWFFGHPEVYIMILPAFGIVSHIVSTFSKKPVFGYLGMAYAMVAIGFIGFVVWAHHMYTVGFSANVRAYFMLATIVIAVPTGVKIFSWIATMWGGSITFTTPMLFALGFIFLFTLGGVTGVILANAGIDVVLHDTYYVVAHFHYVLSMGAVFGIFAGIYYWFGKMSGKNYSEFFGKLHFWLFFLGVNLTFFPQHFLGLAGMPRRIPDYPDAYAGWNIISSIGSYISFASFILFIFIIVYALFKGKKAEANPWGEGAKTLEWTLPSPPPYHQFDTLPEVKN

SEQ ID NO: 104586 - protein, 223 aa, Unknown
  Bacterial polypetide isolated from the Sargasso Sea
MYTVGLDTDTKAYFLAATMIIAVPTGIKVFSWIATMWGGSISFKTPMLWAIGFIFLFTLGGVTGVVLANAGVDTALHDTYYVVAHFHYVLSMGAVFAIFAGFYYWFSKMSGYEYSEFLGKLHFWLTLVGVNLIFFPQHFLGLAGMPRRYADYPDAFAGWNYISSIGSYISVVGLAVFLINLLYAFAKKKKAEQNPWGEGATTLEWTVSSPPPFHTFEELPKVK

SEQ ID NO: 104587 - protein, 536 aa, Unknown
  Bacterial polypetide isolated from the Sargasso Sea
MKQNYLNHPKGIMSWLLTLDHKRIGLMYLVSGILFFFLGGLLALVMRFELAAPGNDIISNEIYNNAYTLHGAIMIFLFIIPAIPGALGNILLPLMVGAKDVAFPRLNLASFYIYSFGALFALYTIINGGVDTGWTFYTPYSTQSSSNVVPMTLGIFIIGFSSILTGLNFIATVHKMRIPGLTWYKLPLFVWALYGTSLVQITATPVLAITMVLLMLERFLGIGIFDPALGGDPVLYQHFFWFYSHPAVYIMILPAFGIISEIIPVHSRKKIWGYKFIAYSTLSIAFIGFLVWGHHMFTSGQSVFSQIVFSFITYFVGIPTGVKIFSWILTMYKGQVSFTPPMFYALAFLFLFTIGGLTGIFLGAVALDIHLHDTYFVVAHFHYVMQGGTIVAFLGGLHHWWPKSFGVMYNQTVANIAALGVFIGFNGTFFPQFLLGLRGMPRRYATYDEQFVELHSYSTFWSGILGISIFIAVMNLFWSFIKRNKVDPGSNPWGGMTLEWTHTSSPPHPHNFEEEPVLQHGPYDYDKVIVQKTYKK

SEQ ID NO: 104588 - protein, 258 aa, Unknown
  Bacterial polypetide isolated from the Sargasso Sea
SHIIETFSRKHFFGYSSMVWAMLSIAILSFVVWAHHMFTVGMPLAAEIFFMWATMLIAVPTGVKVFNWVATMFRGSITFETPMLFAVSFVVLFTIGGLSGLMLAIVPADFQYHDTYFVVAHFHYVLVPGAIFSIMAAVYYWIPKWCGNMYDERLGKLHFWLSFIGVNVTFFPQHFIGLAGMPRRYPDYALQFADWNMVSSVGAFLFGFSQLLFLFIVIKTVMGGKKATPQVWEGAKGLEWTVASPAPYHTFSTPPKVD

SEQ ID NO: 104589 - protein, 401 aa, Unknown
  Bacterial polypetide isolated from the Sargasso Sea
NNHLYNVLVTGHGLIMIFFMVMPAMIGGFGNWFVPIMIGAPDMAFPRMNNISFWLLPVSLTLLILSIFVDGPPGQTGVGGGWTIYPPLSSKAGQPGPAMDLAILSLHLAGASSILGAVNFITTILNMRTPGMTLHKMPLFAWSILVTAFLLLLSLPVLAGAITMLLTDRNFGTAFFEAQTGGDPVLFQHLFWFFGHPEVYILILPGFGMISHIVSTFSRKPVFGYLGMAYAMVAIGIVGFVVWAHHMYTVGLSTDTKAYFLAATMIIAVPTGIKIFSWIATMWGGSISFKTPMMWALGFIFMFTVGGVTGVVLANAGVDTAMHDTYYVVAHFHYVLSLGAVFAIFAGFYYWFSKMSGYEYSEWMGHLHFWLTFIGVNLIFFPQHFLGLAGMPRRYADYPDA

SEQ ID NO: 104590 - protein, 74 aa, Unknown
  Bacterial polypetide isolated from the Sargasso Sea
FTDGIYPSVFYMATGFHGFHVMVGTAFLAVCLYRVYKNHFTPDRHFGLEAAAWYWHFVDVVWLFLFVCVYVWGA

SEQ ID NO: 104591 - protein, 296 aa, Unknown
  Bacterial polypetide isolated from the Sargasso Sea
MYTQTATHDDHHTPTGWKRWAYSTNHKDIGTMYLIFAIVAGVIGTAFSVLMRMELMHPGDGILGGNYHLYNVLVTGHGLIMIFFMVMPAMIGGFGNWFVPIMIGAPDMAFPRMNNISFWLLPVSLTLLILSIFADGPPGQTGVGGGWTIYPPLSSKAGQPGPAMDLAILSLHLAGASSILGAVNFITTILNMRTPGMTLHKMPLFAWSILVTAFLLLLSLPVLAGAITMLLTDRNFGTAFFEAQTGGDPVLFQHLFWFFGHPEVYILILPGFGMISHIVSTFSRKPVFGYLGMAYA

SEQ ID NO: 104592 - protein, 209 aa, Unknown
  Bacterial polypetide isolated from the Sargasso Sea
MSATTADHAHHHNPTGWKRWAYSTNHKDIGTMYLIFAIIAGLIGSAFSVLMRMELMHPGDGILGGDYHLYNVLVTGHGLIMIFFMVMPAMIGGFGNWFVPIMIGAPDMAFPRMNNISFWLLPVALILLLVSIFVDGPPGAKGVGGGWTIYPPLSSKTGQPGPAMDLAILSLHVAGASSILGAINFITTILNMRTPGMTLHKMPLSLGQF

SEQ ID NO: 104593 - protein, 259 aa, Unknown
  Bacterial polypetide isolated from the Sargasso Sea
MSTVIENHHDHHHGPASGLMRWVTTTNHKDIGTLYLWFSFAMFLIGGAMAMVIRAELFQPGMQIVQPEFYNQMLTLHGLIMVFGAVMPAFVGLANWLVPMMIGAPDMALPRLNNLSFWLLPFAFGILLSSLFMEGGAPNFGWTFYAPLSTTYAPPSVTFFIFSVHIMGASSIMGSINVIVTIMNMRAPGMDLMKMPLFVWSWLITAYLLIAVMPVLAGAVTMMLMDIHFGTSFFNAAGGGDPVLFQHIFWFFGHPEVYI

SEQ ID NO: 104594 - protein, 544 aa, Unknown
  Bacterial polypetide isolated from the Sargasso Sea
MSTATLHGHDHHTPTGWKRWAYSTNHKDIGTMYLIFAIIAGVIGTAFSVLMRIELMHPGDGILGGNYHLYNVLVTGHGLIMIFFMVMPAMIGGFGNWFVPIMIGAPDMAFPRMNNISFWLLPVAFILLLASIFVDGPPGAQGVGGGWTIYPPLSSKAGQPGPAMDLAILSLHVAGASSILGAVNFITTILNMRTPGMTLHKMPLFAWSILVTAFLLLLSLPVLAGAITMLLTDRNFGTAFFEAQSGGDPTLFQHLFWFFGHPEVYILILPGFGMISHIVSTFSKKPVFGYLGMAYAMVAIGIVGFVVWAHHMYTVGLDTDTKAYFLAATMIIAVPTGIKIFSWIATMWGGSISFKTPMVWALGFIFLFTVGGVTGVVLANAGVDTALHDTYYVVAHFHYVLSLGAVFAIFAGFYYWFGKMSGYEYSEWMGQLHFWLTFIGVNIVFFPQHFLGLAGMPRRYADYPDAFADWNYISSIGSYISIVGLAVFFANLIYAFAKKKKAAQNPWGEGATTLEWTVPSPPNFHTFEELPKFENVEGAEKSSS

SEQ ID NO: 104595 - protein, 263 aa, Unknown
  Bacterial polypetide isolated from the Sargasso Sea
MSSKDQKHDYHLVDPSPWPIYTSFATLITAVGSVYYFHSKVMWAMLLGFALLIYGAYMWFRDVVNEAEHQGHHTPVVQIHHRYGMTLFIASEVMFFVAWFWAYFDASLYPSAFVGGVWPPKDIEVFNPWDIPLINTLVLLLSGTTVTWAHHSLLEDDRKGFIQGLWATVLLGFFFTLLQIYEYQHASFDFSGHIYGATFYMATGFHGFHVVIGTIFLAVCLWRGKLGHFNKDHHFGFEAAAWYWHFVDVVWLFLFAAIYVWGS

SEQ ID NO: 104596 - protein, 477 aa, Unknown
  Bacterial polypetide isolated from the Sargasso Sea
MAMGIRAELFEPGLQLMDPIRYNQLVTMHGLIMIFGAVMPAFVGLANWLIPMQIGAPDMALPRMNNLSFWLLPSAFIILLSTAFMEGGMPGFGWTFYAPLSTNYPNIAYFVFAVHIMGVSSIMGSINVIVTIMNMRAPGMTLMQMPLFVWSWLITAYLLIAVMPVLAGAVTMLLMDAYFGTSFFDAAGGGDPVLFQHVFWFFGHPEVYIMILPAFGITSHIISTFSRKPLFGHSSMVYAMVSIAVLSFVVWAHHMFTVGMPLAAELFFMWATMIIAIPTGVKVFNWVATIFKGSITYETPMLFAIAFVVLFTIGGLSGLMLAITPADFQYHDTYFVVAHFHYVLVPGAIFSIMAAVYYWLPKWTGNMYDEKMGKLHFWLSFIGVNVTFFPQHFVGLAGMPRRYADYALQFAEWNAVSSIGAFLFGLSQLLFLYIVIKAVFAGKKATAQVWDGAEGLEWTVDSPAPYHTFETPPKVNG

SEQ ID NO: 104597 - protein, 265 aa, Unknown
  Bacterial polypetide isolated from the Sargasso Sea
MSSRNPNSHEYHLVEPSPWPLLASIGALILCIGAVIYFRTDDLWLMLIGLAIVIYVTYMWFRDIIIEGEHQGHHTPVVQIGLRYGMTLFIASEVMFFVAWFWAYFNASLFPTEQIGSVWPPAEIHLMDPWHIPLINTLILLLSGTTVTWAHHALTEGNRKELIQGLWCTVGLGIIFTGFQVYEYMHADFAFSGHIYGATFYMATGFHGFHVLMGTVMLIVCLGRSIAGHFKADHHFGFEAAAWYWHFVDVVWLFLFAAIYVWGYY

SEQ ID NO: 104598 - protein, 596 aa, Unknown
  Bacterial polypetide isolated from the Sargasso Sea
MAADSYDDVAKNKDSIPELEVAPQDLYHAKSFWTKYIFCQDAKVIGIQYALTAAAIGMVGLVSSWLMRMQIAFPGVIPMDPAAYYQLVTMHGMIMVVYLLTALFLGGFGNYLIPLMVGARDMVFPYVNMISFWVFFLAVVILAASYFVPGGPTGAGWTLYPPQAITSGTPGGDGLGIVLMLVSLAVFVIGFTMGGLNYVITILQARTRGMTLMRLPLTVWGIFTATVLALFAFPALFVAGIMMTLDNMLGTSFFMPAIVEFGERLSYDGGSPILFQHLFWFFGHPEVYIVALPAFGIVSDLISVHARKNIFGYRMMVWAIVIIGALSFVVWAHHMYVAGMNPWFGFFFATTTLIIAIPTAIKVYNWVLTLWRGNIKLTIPMLFSIAFIITFVNGGLTGLFLGNVAVDVPLSDTYFVVAHFHMVMGIAPVLVILGSIYHWFPLITGRFLNEKLGRIHFWVTFIGSYSIYFPMHYLGFMGVTRRYFEVFEGDNFTYSITGINQFITVAALITGAAQFVFFYNIITSSKFGKKAGKNPWKACSLEWQTADVPPTHGNFGKELPVVYRWAYDYSVPGADQDYITQDTPPSAVANARAEQT

SEQ ID NO: 104599 - protein, 313 aa, Unknown
  Bacterial polypetide isolated from the Sargasso Sea
MSAVVENNDHHDDHHGPRKGIWRWMTTTNHKDIGTLYLWFSFLAFLVGGAFAMGIRAELFEPGLQLMDPIRYNQLVTMHGLIMIFGGVMPAFVGLANWLIPMQIGAPDMALPRMNNLSFWLLPTAFAILMSTAFMEGGMPGFGWTFYAPLSTNYPNVAFFVFAVHIMGISSIMGSINVIVTIMNMRAPGMTLMQMPLFTWSWLITAYLLIAVMPVLAGAVTMLLMDAYFGTSFFDAAGGGDPVLFQHIFWFFGHPEVYIMILPAFGITSHIISTFSRKPLFGHASMIYAMSSIAILSFVVWAHHMFTVGMPLA

SEQ ID NO: 104600 - protein, 300 aa, Unknown
  Bacterial polypetide isolated from the Sargasso Sea
IFWTSFFDAAGGGDPVLFQHVFWFFGHPEVYIMILPAFGITSHIISTFSRKPLFGHSSMVYAMVSIAVLSFVVWAHHMFTVGMPLAAELFFMWATMIIAIPTGVKVFNWVATIFKGSITYETPMLFAIAFVVLFTIGGLSGLMLAITPADFQYHDTYFVVAHFHYVLVPGAIFSIMAAVYYWLPKWTGNMYDEKMGKLHFWLSFIGVNVTFFPQHFVGLAGMPRRYADYALQFAEWNAVSSIGAFLFGLSQLLFLYIVIKAVFAGKKATAQVWDGAEGLEWTVDSPAPYHTFETPPKVNG

SEQ ID NO: 104601 - protein, 366 aa, Unknown
  Bacterial polypetide isolated from the Sargasso Sea
MSANIDHLKEEHHQPSGLMRWITTTNHKDIGSLYLWFSLLMFFVGGLMALIIRAELFQPGLQFVVPGFFNQMTTMHALIMIFGAVMPAFVGLANWQLPMMIGAPDMALPRLNNWSFWILPFAFTMLLSTLFFESGGPAAGWTLYPPLSLQGGNSMPFVIFSLHLLGASSILGAINVIATILNMRAPGMTLMKMPIFVWTWLITAFLLIASMPVLAGAITMLLTDRFYGTSFFTAAGGGDPVLFQHIFWFFGHPEVYILILPAFGIVSTIIPAFSRKKLFGYDSMVYATASIALLSFIVWAHHMFTVGMPLAGEIFFMFTTMLIAVPTGVKVFNWVATMWKGSMTFETPMLFALAFIILFTIGDLRV

SEQ ID NO: 104602 - protein, 323 aa, Unknown
  Bacterial polypetide isolated from the Sargasso Sea
MHFLLLLSLPVLAGAITMLLTDRNFGTAFFEAQTGGDPVLFQHLFWFFGHPEVYILILPGFGMISHIVSTFSKKPVFGYLGMAYAMVAIGVVGFVVWAHHMYTVGLDTDTKAYFLAATMIIAVPTGIKIFSWIATMWGGSISFKTPMLWAIGFIFLFTLGGVTGVVLANAGVDTALHDTYYVVAHFHYVLSLGAVFAIFAGWYYWFSKMTGYEYSEFLGKLHFWLTFIGVNLIFFPQHFLGLAGMPRRYADYPDAFAGWNYVSSIGSYISIIGLAVFLLNLLYSFLKKRKAEQNPWGEGATTLEWTVTSPPPFHTFEELPKVK

SEQ ID NO: 104603 - protein, 340 aa, Unknown
  Bacterial polypetide isolated from the Sargasso Sea
MYTQTISHDDHHTPTGWKRWAYSTNHKDIGTMYLIFAIVAGVIGTAFSVLMRMELMHPGDGILGGNYHLYNVLVTGHGLIMIFFMVMPAMIGGFGNWFVPIMIGAPDMAFPRMNNISFWLLPVSLTLLILSIFADGPPGQTGVGGGWTIYPPLSSKAGQPGPAMDLAILSLHLAGASSILGAVNFITTILNMRTPGMTLHKMPLFAWSILVTAFLLLLSLPVLAGAITMLLTDRNFGTAFFEAQTGGDPVLFQHLFWFFGHPEVYILILPGFGMISHIVSTFSRKPVFGYLGMAYAMVAIGIVGFVVWAHHMYTVGLSTDTKAYFLAATMIIAVPTRYKN

SEQ ID NO: 104604 - protein, 506 aa, Unknown
  Bacterial polypetide isolated from the Sargasso Sea
MYTQTASHEDHHTPTGWKRWAYSTNHKDIGTMYLIFAIIAGVIGTAFSVLMRMELMHPGDGILGGNYHLYNVLVTGHGLIMIFFMVMPAMIGGFGNWFVPIMIGAPDMAFPRMNNISFWLLPTSFILLIMSIFMDGPPGQTGVGGGWTIYPPLSSTAGQPGPAMDFAILSLHLAGASSILGAVNFITTILNMRTPGMTLHKMPLFAWSILVTAFLLLLSLPVLAGAITMLLTDRNFGTAFFDAQTGGDPVLFQHLFWFFGHPEVYILILPGFGMISHIVSTFSRKPVFGYLGMAYAMVAIGIVGFVVWAHHMYTVGLSTDTKAYFLAATMIIAVPTGIKIFSWIATMWGGSISFKTPMVWALGFIFLFTVGGVTGVVLANAGVDTAMHDTYYVVAHFHYVLSLGAVFAIFAGFYYWFGKMTGYEYSEWMGQLHFWLTFIGVNLVFFPQHFLGLAGMPRRYADYPDAFAGWNYISSIGSYISVIGLVVFFINLAYAFYKKKAAAQNP

SEQ ID NO: 104605 - protein, 177 aa, Unknown
  Bacterial polypetide isolated from the Sargasso Sea
MLWAVGFIFLFTVGGVTGVVLANAGIDHSLHDTYYVVAHFHYVLSMGAVFSIFAAFYYWFGKMTGYNYSELLGKLHFWLSFIGVNLVFFPQHFLGLAGMPRRYVDYPEAYAGWNYISSVGSFISLAGLAVFFIMLVHAFTRKESCADNPWGEGATTLEWTVSSPPPFHTFEDLPEVK

SEQ ID NO: 104606 - protein, 612 aa, Unknown
  Bacterial polypetide isolated from the Sargasso Sea
MSEEFNDNKTIHAQSSETISGGGSGVAPDIDYVRPAEVPEQDLYHGHSFITKWVFCQDAKVIGVQYFLLATFTGIVGLILSWLMRLQLGFPGAAGFMTAEHYYQFVTMHGMIMVVYFLTALFLGGFGNYLIPLMVGARDMVFPYLNMVSFWMFFIAVLVLLASFFVPGGPTGAGWTLYPPQTILEGTPGSGAGILLMCLSLILFVAGFTMGGLNYLITVLQARTRGMTLMRMPLTVWGIFTATVLAMLAFPALLVGALMMSLDKVLGTSFFMPTILKAGEVLEYGGGSPILFQHLFWFFGHPEVYIVALPAFGIISDLISVHSRKNIFGYRMMVWAIVGIGGLSFFVWAHHMYVSGMNPWFGFFFATTTLIIAVPTAMKVYNWILTLWRGNIRMNTVMLWCLGFIVTFVNGGITGIFLGNVSVDVPLSDTYFVIAHFHMVMGIAPLMVIMGAVYHWFPLVAGKFLDEKLGKWHFWLTFLGAYSIYFPMHYLGFIGVPRRYFEMYDSPYMTSAVGMNEFISLAAFLVGAAQFILIYNIIKTLKVGKPAGHNPWQACSLEWLTPTVPPEHGNWGDRLPVVHRWAYDYSVPGAKEDFITQTTAPSEVVNTGVEKT

SEQ ID NO: 104607 - protein, 415 aa, Unknown
  Bacterial polypetide isolated from the Sargasso Sea
NLSFWLLPMAFGILISTLFMPEGGPNFGWTFYAPLSTTYAPSTVNYFIFSVHVMGVSSILGSINIITTILNMRAPGMTLMKMPLFVWSWLITAYLLIAVMPVLAGVVTMMLMDINFGTSFFDAAGGGDPVLFQHVFWFFGHPEVYIMILPAFGIVSHIIETFSRKPIFGYSSMVYALASIAILSFVVWAHHMFTVGMPLAGELFFMYSTMLIAIPTGVKVFNWVATMFRGSMTFETPMLFSIGFVTLFTIGGFSGLMLAIVPADFQYHDTYFVVAHFHYVLVPGALFGIIAGAYYWLPKWTGYMYDETLGKLHFWLTFISVNITFFPMHFVGLAGMPRRYPDYALQFADFNAMISMGAFMFGITQLLFLFIVVKCIKSGKQAKPEVWEGAGELGLEWTLSSPPPYHSFTVQPEVK

SEQ ID NO: 104608 - protein, 319 aa, Unknown
  Bacterial polypetide isolated from the Sargasso Sea
MSSVIESHHDDHHHGPAKGLMRWLLTTNHKDIGTLYLWFSFAMFLIGGAMAMVIRAELFQPGMQIVEPEFYNQMLTLHGLIMVFGAVMPAFVGLANWLVPMMVGAPDMALPRLNNLSFWLLPFAFGILLSSLFMEGGAPNFGWTFYAPLSTTYAPPSVTFFIFSVHIMGASSIMGSINVIVTIMNMRAPGMDLMKMPLFVWSWLITAYLLIAVMPVLAGAVTMMLMDIHFGTSFFNAAGGGDPVLFQHIFWFFGHPEVYIMILPAFGIVSHIIETFSRKPLFGYSSMVWAMLSIAILSFVVWAHHMFTVGMPLAAELSS

SEQ ID NO: 104609 - protein, 301 aa, Unknown
  Bacterial polypetide isolated from the Sargasso Sea
MSYQKYYVPEDSKYPIYIATALFLLVMGAAGTINDLGKPESNSVYILYSGFAIFAITLFFWFRAVIREHIAGLDSAQLQKSFVFGMGWFIFSEVMFFAAFFGALFYVRNFSVPWLGGDGEKGLANMLWEGFEASWPVMSTPDAGSAFVLADKSMSWPGWGNALKWLPLWNTIVLLSSSVTVHFAHLALKNDNKKSFNTWLGVTVTLALIFVGLQAAEYYEAYAHYGLTLNSGIYGSTFFMLTGFHGFHVMMGGFMLAVMLSRSVFYNHFDPHNHFGFEAASWYWHFVDVVWVMLFLFVYIL

SEQ ID NO: 104610 - protein, 568 aa, Unknown
  Bacterial polypetide isolated from the Sargasso Sea
VFSQDAKIIGIQYFCTATAMRLIGLVLSWFMRMQIGFPGLSIISEGFYYQAITMHGMIMVVYFLTALFLGGFGNYLIPLMVGARDMVFPYLNMISYWTFLLACLVLVASFFTPGGPTGAGWTLYPPQAILGGTPGQESGIILMLVSLSIFIVGFTMGGLNYIVTILQARTRGMTLMRMPLAVWGIFTATVLAMFAFPALLVSAIMMILDKTLMTSFFMPALVEMGEQLSYGGGSPILFQHLFWFFGHPEVYIVALPAFGIVSDVLSVHSRKNIFGYRMMVWAIVAIGALSFIVWAHHMYVSGMHPYFGFFFATTTLIIAVPTAIKVYNWVLTLWKGNISLTVPMLFCISFIITFLNGGLTGLFLGNVIVDVPLSDTYFVVAHFHMVMGIAPVQVVFAAIYHWFPLMTGRMYNETLGRLHFWFTFLGSYLIYFPMHYLGLIGVPRRYYEMGQTEALYTQSAADLNIFITLTALVTGFAQIFFFINIFWSRKYGVPAEKNPWQANSLEWRTPTMPPGHGNFGKELPVVYRWPYDFNVPGAKDDFVPQDVPNSDVELAEGFEGTEIKAEKT

SEQ ID NO: 104611 - protein, 304 aa, Unknown
  Bacterial polypetide isolated from the Sargasso Sea
MSGGSYYVPDQSRFPIFMAFSLFLLVMGASSTINNLDDPTNNSVYILYTGFGCLFLTMFFWFRQVIKEHLAGLDSNQLKQSYVFGMAWFIFSEVMFFAAFFGALFYVRTFAVPWLAGEGAKGGAIEAIELWQGFESTWPVMSTPDQGNEFVLADKSMAWPGWDHALEWLPLWNTIVLLSSSVTVHIAHLGLKNGNRRKFNIFLGITVTLALIFVGLQAAEYYEAYAHYGLTLNSGIYGSTFFMLTGFHGFHVMMGGFMLAVMLARSVFAGHFEDHDHFGFEAASWYWHFVDVVWVMLFLFVYIL

SEQ ID NO: 104612 - protein, 527 aa, Unknown
  Bacterial polypetide isolated from the Sargasso Sea
MSAVIENHHDDHHHGPAKGITRWLYTTNHKDIGTLYLWFSFAMFLIGGAMAMVIRAELFSPGMQIVEPEFYNQMITLHGLIMIFGGVMPAFVGLANWLVPMMIGAPDMALPRMNNLSFWILPFAFFILLSSLFMEGGAPNFGWTFYAPLSTTYAPPSVTFFIFSVHIMGASSIMGSINVVVTIMNMRAPGVGLMKMPLFVWSWLITAYLLIAVMPVLAGAVTMMLMDIHFGTSFFNAAGGGDPVLFQHIFWFFGHPEVYIMILPAFGIVSHIIETFSRKPLFGYASMVWAMLSIAILSFVVWAHHMFTVGMPLAAEIFFMWATMLIAVPTGVKVFNWVATMFRGSITFETPMLFACAFVVLFTIGGLSGLMLAIVPADFQYHDTYFVVAHFHYVLVPGAIFSIMAAVYYWIPKWSGNMYDERLGKLHFWLSFIGVNVTFFPQHFIGLAGMPRRYPDYALQFADWNMVSSVGAFLFGFSQLLFLFIVVKTVMGGKKATDQVWEGAKGLEWTVASPAPYHTFSTPPKVD

SEQ ID NO: 104613 - protein, 157 aa, Unknown
  Bacterial polypetide isolated from the Sargasso Sea
DSNGAVGIWPPEGIKTFDPLDVPFLNTLILLMSGTTCTWAHHAVREGHRDQAIQALWCTVGLGIFFSFMQGVEYYEAAHHYFSFTDGIYPSVFYMATGFHGFHVMVGTAFLAVCLYRVYKNHFTPDRHFGLEAAAWYWHFVDVVWLFLFVCVYVWGA

SEQ ID NO: 104614 - protein, 334 aa, Unknown
  Bacterial polypetide isolated from the Sargasso Sea
MKMPLFVWSWLITAYLLIAVMPVLAGAVTMMLMDIHFGTSFFNAAGGGDPVLFQHIFWFFGHPEVYIMILPAFGIISHIIETFARKQLFGYESMVWAMLSIAILSFVVWAHHMFTVGMPLAAELFFMWATMLIAVPTGVKVFNWVATMFKGSISFETPMLFAIAFVVLFTIGGFSGLMLSIVPADFQYHDTYFVVAHFHYVLVPGSIFSIMAAVYYWIPKWTGNMYDERMGRLHFWLSFVGVNVTFFPQHWIGLAGMPRRYPDYALQFADWNMVSTAGAFLFGASQILFLFIVLKTVLGGKKATPQVWEGARGLEWSVESPAPYHTFSTPPKVN

SEQ ID NO: 104615 - protein, 471 aa, Unknown
  Bacterial polypetide isolated from the Sargasso Sea
FPYVNMISFWMFFIAVAVLMASFFVPGGPTGAGWTLYPPQTILEGTPGHGMGILLMLVSLSLFVIGFTMGGLNYLITVLQARTRGMTLMRMPLTVWGIFTATVLAMLAFPALLVSAIMMTLDKILGTSFFMPTILKAGEVLEYGGGSPILFQHLFWFFGHPEVYIVALPAFGIVSDLISVHSRKNIFGYRMMVWAIVGIGALSFFVWAHHMYVSGMNPWFGFFFATTTLIIAVPTAMKVYNWILTLWRGNIRLNTVMLWCLGFIVTFVNGGITGIFLGNVSVDVPLSDTYFVIAHFHMVMGIAPLMVIMGAVYHWFPLVAGKLLDEGLGKWHFWITFLGAYSIYFPMHYLGFIGVPRRYFEMYDSPYMTSAVGMNEFISMAAFIVGAAQFILIYNIIKTLKTGKKAGQNPWKANSLEWYTSTVPPEHGNFGERLPVVHRWPYDFSVPGAKDDFIPQTTPPSEVIHTKVEKT

SEQ ID NO: 104616 - protein, 443 aa, Unknown
  Bacterial polypetide isolated from the Sargasso Sea
MTKIIEPDKQTNIFRRPSSEYGIWSWITTVDHKKIGIMYGYAAFFFLLIGGLEALVLRIQLAQPDNNFLSAAEYNAMFTMHGTTMVFLAIMPISAAFFNYLLPLQIGARDVAFPRLNALSFWIWVFGGLFLYSTFVFGTAGAPEGGYLAEEVGWLGNAPNGGWFGYQPNAGFKYSPGTAMDYWAIGLQILGISSLVSAFNFIVTILNMRTQGMRLMRMPVFTWMTFAVAFLLAFSLPIIAIALFYVTFDRQFGTTFFLTEGGGDPVLWQHLFWLFGHPEVYILILPAFGIVSEILPTFSRKPLFGYPAIVFAGFGIAFIGFGVWAHHMFASAISPVAQAGFGISTMIIAVPTGVKIFNWLGTIWGGKLNLKTPMLFALGFIGMFVIGGLSGVTHSVVPADTQQTDTYYIVAHFHYVLFGGAMFGIFAGLYYWFPKSLGKKCIT

SEQ ID NO: 104617 - protein, 304 aa, Unknown
  Bacterial polypetide isolated from the Sargasso Sea
MSGGSYYVPDQSRFPIFMAFSLFVLVMGASSTINNLDNPESNSVYILYSGFACLFLTMFFWFRQVIKEHLAGLDSNQLKQSYVYGMAWFIFSEVMFFAAFFGALFYVRTFAVPWLAGDGAKGDAITAIELWQGFESTWPVITTPDQGSEYVLAEKSMAWPGWDHALKWLPLWNTIVLLSSSVTVHIAHLALKNGNRKKFNTMLGVTVGLALIFVGLQAAEYYEAYAHYGLTLNSGIYGSTFFMLTGFHGFHVMMGGFMLAVMLARSVFAGHFEEHDHFGFEAASWYWHFVDVVWVMLFLFVYIL

SEQ ID NO: 104618 - protein, 295 aa, Unknown
  Bacterial polypetide isolated from the Sargasso Sea
QLLYAAGGGDPVLFQHIFWFFGHPEVYIMILPAFGIVSHIIETFSRKQLFGYSSMVWAMLSIAILSFVVWAHHMFTVGMPLAAEIFFMWATMLIAVPTGVKVFNWVATMFRGSITFETPMLFAVSFVVLFTIGGLSGLMLAIVPADFQYHDTYFVVAHFHYVLVPGAIFSIMAAVYYWIPKWCGNMYDERLGKLHFWLSFIGVNVTFFPQHFIGLAGMPRRYPDYALQFADWNMVSSVGAFLFGFSQLLFLFIVIKTVMGGKKATSKVWEGAKGLEWTVASPAPYHTFSTPPRVD

SEQ ID NO: 104619 - protein, 61 aa, Unknown
  Bacterial polypetide isolated from the Sargasso Sea
TGFHGFHVIVGTIFLAVCLWRGKLGHFTKDHHFGFEAAAWYWHFVDVVWLFLFAAIYIWGS

SEQ ID NO: 104620 - protein, 335 aa, Unknown
  Bacterial polypetide isolated from the Sargasso Sea
MTKIIEPNKQSNIFKRPSSETGIWSWITTVDHKRIGIMYGYAAFFFLLIGGLEALILRIQLSQPDNNFLTAAEYNAMFTMHGTTMIFLAIMPISAAFFNYLLPLQIGARDVAFPRLNALSFWIFIFGGAFLYSTFIFGTAGAPEGGYLAEEVGWLGSAPNGGWFGYQPNAGLKYSPGTAMDYWAIGLQILGIASLISAFNFITTIINMRTKGMRFMRMPVFTWMTFAVSFLLAFSLPIIAIALFYVTFDRKFGTTFFLTEGGGDPVLWQHLFWLFGHPEVYILILPAFGIVSEVLPTFARKPLFGYAAIVFAGFGIAFIGFGVWAHHMFASAISP

SEQ ID NO: 104621 - protein, 481 aa, Unknown
  Bacterial polypetide isolated from the Sargasso Sea
MSEDFNDNKTIQAQSSETISGGGSGLSPDIDYVRPAEIPEQDLYHGHSFITKWVFCQDAKVIGVQYFLLATFTGIIGLILSWLMRLQLGFPGLAGFMTAEHYYQFVTMHGMIMVVYFLTALFLGGFGNYLIPLMVGARDMVFPYLNMVSFWSFFVAVGVLLASFFVPGGPTGAGWTLYPPQTILDGTPGSGWGILLMCASLILFVAGFTMGGLNYLITVLQARTRGMTLMRMPLTVWGIFTATVLAMLAFPALLVGALMMTLDNVLGTSFFMPTILKAGEVLEYSGGSPILFQHLFWFFGHPEVYIVALPAFGIISDLISVHARKNIFGYRMMVWAIVGIGALSFFVWAHHMYVSGMNPWFGFFFATTTLIIAVPTAMKVYNWILTLWRGNIRLNTVMLWCLGFIVTFVNGGITGIFLGNVSVDVPLSDTYFVIAHFHMVMGIAPLMVIMGAVYHWFPLVAGKFLDEKLGKWHFWLTFLGA

SEQ ID NO: 104622 - protein, 292 aa, Unknown
  Bacterial polypetide isolated from the Sargasso Sea
FNWLGTLWGGSIRFNTAMLFSLGFIAMFTIGGLSGVMHASPPTDAQQQDTYFVVAHFHYVLFGGALLGIFSGIYFWWPKFTGYFLNEKIGKLNFIFMLVGFNIQFGPMHWLGMDGMPRRIYTYAENMGWEGSNLAATIGGFILGIGVLLFIYNVIYSMIHKEVAGADPWDGRTLEWSTSSPPPEHDFDEIPQVKFRDDFWFKKYPETIKEYYEHGEIEEDTEDKLSEKSNHEDEIHLPDMSYYPFILGVGIAILGAGFLSNIYVIAISVPIMIWGMLGWSMEPVNDPHPDNH

SEQ ID NO: 104623 - protein, 98 aa, Unknown
  Bacterial polypetide isolated from the Sargasso Sea
GVTILLGAAFTGLQIYEYDHATFGFKDGIYSSTFYMATGFHGFHVLVGTCFLVVCWFRARAGHFTPEHHFGFEAAAWYWHFVDVVWLFLFICIYWWGG

SEQ ID NO: 104624 - protein, 662 aa, Unknown
  Bacterial polypetide isolated from the Sargasso Sea
MTKIIEPKKQRNIFSRPSSETGIWSWITTVDHKRIGIMYGYAAFFFLLVGGLEALLLRIQLSQPDNNFLSAAEYNAMFTMHGTTMIFLAIMPISAAFFNYLLPLQIGARDVAFPRLNALSFWIFIAGGIFLYSTFLFGTAGAPEGGYLDEEVSRLASAPNGGWFGYQPNAGLKYSPGTAMDYWAIGLQILGIASLVSAFNFITTILNMRTKGMRLMRMPVFTWMTFAVSFLLAFSLPIIAIALFFVTFDRQFGTTFFLTEGGGDPVLWQHLFWLFGHPEVYILILPAFGIVSEVLPTFSRKPLFGYPAIVFAGFGIAFIGFGVWAHHMFASAISPVAQAGFGLSTMIIAVPTGVKIFNWLGTIWGGKLTLNTPMLFALGFIGMFVIGGLSGVTHSVVPADTQQTDTYYIVAHFHYVLFGGALFGIFSGLYFWFPKVWGRMYNETMGKIHFWLMLIGFNVTFGPMHWLGLQGQVRRTWVYAEETNLGFWNLIVTIGAFILAVAILVFMANWIYSRRKGEKAPFDPWDARTIEWSIPSPTPVWNFSKAPEIKSLDDFWHQKYGEDEDGRAVRREGTDELLLKLEEEGLNPDEEIHLPSPSYFPLILAFGLPFLGYAIIYKSVPLALVGVILLLIGGFGWGTEPLEEEFETSEENPDAKESSTYE

SEQ ID NO: 104625 - protein, 59 aa, Unknown
  Bacterial polypetide isolated from the Sargasso Sea
HGFHVLIGTIFLIVCLARSIAGHFKSDHHFGFEAAAWYWHFVDVVWLFLFAAIYVWGSY

SEQ ID NO: 104626 - protein, 136 aa, Unknown
  Bacterial polypetide isolated from the Sargasso Sea
MYTQTASHDDHHTPTGWKRWAYSTNHKDIGTMYLIFAIVAGVIGTAFSVLMRMELMHPGDGILGGNYHLYNVLVTGHGLIMIFFMVMPAMIGGFGNWFVPIMIGAPDMAFPRMNNISFWLLPVSLTLLILSIFADG

SEQ ID NO: 104627 - protein, 527 aa, Unknown
  Bacterial polypetide isolated from the Sargasso Sea
MSAVIENHHDDHHHGPAKGITRWLYTTNHKDIGTLYLWFSFAMFLIGGAMAMVIRAELFQPGMQIVEPEFYNQMITLHGLIMIFGGVMPAFVGLANWLVPMMIGAPDMALPRMNNLSFWILPFAFFILLSSLFMEGGAPNFGWTFYAPLSTTYAPPSVTFFIFSVHIMGASSIMGAINVVVTIMNMRAPGVSLMKMPLFVWSWLITAYLLIAVMPVLAGAVTMMLMDIHFGTSFFNAAGGGDPVLFQHIFWFFGHPEVYIMILPAFGIVSHIIETFSRKQLFGYSSMVWAMLSIAILSFVVWAHHMFTVGLPLAAEIFFMWATMLIAVPTGVKVFNWVATMFRGSLTFETPMLFAIAFVVLFTIGGLSGLMLAIVPADFQYHDTYFVVAHFHYVLVPGAIFSIMAAVYYWIPKWSGNMYDERLGKLHFWLSFIGVNVTFFPQHFIGLAGMPRRYPDYALVFADWNMVSSVGAFLFGFSQLLFLFIVIKTVMGGKKATDQVWDGAKGLEWTVASPAPYHTFSTPPKVD

SEQ ID NO: 104628 - protein, 304 aa, Unknown
  Bacterial polypetide isolated from the Sargasso Sea
MSGGSYYVPDQSRFPIFMAFSLFLLVMGASSTINNLDDPTSNSVYILYTGFACLFLTLFFWFRQVIKEHLAGLDSNQLKQSYVYGMAWFIFSEVMFFAAFFGALFYVRTFAVPWLAGDGAKGGAITAIELWPAFESAWPVMTTPDQGNEYDLAKKSMAWPGWNHALQWLPLWNTIVLLSSSWTVHLAHLGLKKGNRKKFNAYLGVTVLLALIFVGLQALEYYEAYAHYGLTLNSGIYGSTFFMLTGFHGFHVMMGGIMLAVMLARSVFAGHFEQHDHFGFEAASWYWHFVDVVWLMLFLFVYIL

SEQ ID NO: 104629 - protein, 263 aa, Unknown
  Bacterial polypetide isolated from the Sargasso Sea
MSSKDQKHDYHLVDPSPWPIYTSFATLITAVGSVYYFHSKVMWAMILGFVLLIYGAYMWFRDVVIEAEHQGHHTPVVQIHHRYGMTLFIASEVMFFVAWFWAYFDASLFPSEFVGNVWPPKDIEVFDPWDIPLINTLVLLLSGTTVTWAHHALLEDDRKSFIQGLSLTVFLGLCFTALQAYEYHHATFSFSGHIYGATFYMATGFHGFHVVVGTIFLAVCLWRGKLGHFNKDHHFGFEAAAWYWHFVDVVWLFLFAAIYIWGS

SEQ ID NO: 104630 - protein, 386 aa, Unknown
  Bacterial polypetide isolated from the Sargasso Sea
ISSIVNKIGHAGPSVDLAIFALHLAGASSILGAVNFITTILNMRTPGMTLHKMPLFVWAMLITAFLLLLAVPVLAGAITMLLTDRNFGTTFFNPAGGGDPVLFQHLFWFFGHPEVYIMILPAFGIVSQVISTFSRKPVFGYLGMVYAMVAIGFIGFIVWAHHMFTVGMSADLRAYFMLATIIIAVPTGVKIFSWIATMWGGSLTFETPMLFAIGFVFLFTLGGVTGVILANAGIDTVMHDTYYVVAHFHYVLSMGAMFGIFAGIYYWFGKMSGRKYNEFFGKLHFWLFFIGVNVTFFPQHFLGLAGMPRRIPDYPDAYAGWNLVSTYGSYISFASTLIFFFAIVYALFFGKKEVSNPWGEGADTLEWTLSSPPPFHQFETLPKFKE

SEQ ID NO: 104631 - protein, 282 aa, Unknown
  Bacterial polypetide isolated from the Sargasso Sea
MSDNSSSTGQKHPYHLVDPSPLPFLSSIAALAMAAGLVFYMHYETTWLLILGTIGLLTIMFIWWRDIINESTFQKVHTPVVELGLRYGMALFIASEVMFFVAFFWAFFDASLTPKLPIEEYTEIFDTDGAVGVWPPEGIKTFDPLDVPFLNTLILLMSGTTCTWAHHAVREGHRDQAIQALWITVGLGVFFTFMQGVEYYEAALHYFSFTDGIYPSVFYMATGFHGFHVMVGTAFLAVCLFRVYKNHFTPDRHFGLEAAAWYWHFVDVVWLFLFICVYVWGA

SEQ ID NO: 104632 - protein, 612 aa, Unknown
  Bacterial polypetide isolated from the Sargasso Sea
MSDELNINKKRNNQIKTKSSTASGRGETDIDYVRPSEIPEQDLYHGHSFITKWIFCQDAKVIGVQYTLTAVFTGVVGLILSWMMRMQLGFPELFPFLTAETYYQMVTMHGMIMVVYLLTALFLGGFGNYLIPLMVGARDMVFPYVNMISFWMFFVAVVVLMASFFVPGGPTGSGWTLYPPQAILEGTPGSGYGILLMLISLSLFVIGFTMGGLNYVITILQARTRGMSLMRMPLTIWGIFTATVLALLAFPALLVSSIMMTLDKVLETSFFMPTIIKAGEALSYDGGSPILFQHLFWFFGHPEVYIVALPAFGIVSDLISVHSRKNIFGYRMMVWAIVGIGALSFFVWAHHMYVSGMSPWFGFFFATTTLIIAVPTALKVYNWILTLWRGNIRINTVMLFCLGFIVTFVNGGITGIFLGNVAVDVPLSDTYFVIAHFHMVMGIAPLMVIFGAIYHWFPLVTGRLMDEKLGKWHFWVTFLGAYSIYFPMHYLGFIGVPRRYFEMYDSPYMTSAIGMNEFISVAAFIVGAAQFIFFYNLVKSLRLGKPAGKNPWKANSLEWLTPDVPPTHGNWGEKLPVVHRWAYDYGVPGAKEDYIPQTTAPSEVKDAEVEKT

SEQ ID NO: 104633 - protein, 250 aa, Unknown
  Bacterial polypetide isolated from the Sargasso Sea
MANKSTTGQKHPYHLVDPSPLPFLSSIAGLAMAAGLVFYMHYGTSWLLILGTIGLLTIMFLWWRDVIKESTFQKVHTPVVELGLRYGMALFIASEVMFFVAFFWAFFDASLTPKLPIEEFSETFDSNGAVGIWPPEGIKTFDPLDVPFLNTLILLMSGTTCTWAHHAVREGHRDQAIQALWCTVGLGIFFSFMQGVEYYEAAHHYFSFTDGIYPSVFYMATGFHGFHVMVGTAFLGCLFVSCLQKSFYSR

SEQ ID NO: 104634 - protein, 360 aa, Unknown
  Bacterial polypetide isolated from the Sargasso Sea
MHKMPLFVWSVLVTAFLLLLSLPVLAGAITMLLTDRNFGTTFFDPAGGGDPILFQHLFWFFGHPEVYILILPGFGMVSHIISTFSKKPVFGYLGMAYAMVAIGLIGFIVWAHHMYTVGLSVNTQAYFVAATMIIAVPTGIKIFSWIATMWGGSIEFKTPMLWAIGFIFLFTIGGVTGVVLANAGVDRSFHDTYYVVAHFHYVLSMGAVFAIFGAWYYWFPKISGYMISEFVGKTHFWLTFIGVNLIFFPQHFLGLAGMPRRYVDYPDAFAGWNFVSSMGSYISSFAVLVFLFGVYLAFARKVPAGDNPWGEGVSTLEWTLSSPPPFHQFEDLPEPVDFGSFMAPDSPLQKASAITRDADH

SEQ ID NO: 104635 - protein, 402 aa, Unknown
  Bacterial polypetide isolated from the Sargasso Sea
FLFRRTPGSGWTLYPPQAILEGTPGSGAGILLMLISLSLFVIGFTMGGLNYLITVLQARTRGMTLMRMPLTVWGIFTATVLAMLAFPALLVSSIMMTLDKVLGTSFFMPTILKAGEVLEYGGGSPILFQHLFWFFGHPEVYIVALPAFGIVSDLISVHSRKNIFGYRMMVWAIVGIGALSFFVWAHHMYVSGMNPWFGFFFATTTLIIAVPTAMKVYNWILTLWRGNIRINTVMLWCLGFIVTFVNGGITGIFLGNVTVDVPLSDTYFVIAHFHMVMGIAPLMVIMGAVYHWFPLVAGRMLSEKLGKWHFWVTFLGAYSIYFPMHYLGFIGVPRRYFEMYDSPYMTSAVGMNEFISLAAFLVGAAQFILIYNIIVSLKMGKPAGKNPWKANSLEWHTSTVPH

SEQ ID NO: 104636 - protein, 542 aa, Unknown
  Bacterial polypetide isolated from the Sargasso Sea
MSKATEVISPDTSAPHDGHLHDDHEHHDHIPKGITRWLFTTNHKDIGTLYLWFAFIMFLVGGAMAMVIRAELFQPGLQIVEPNFFNQMTTVHGLIMVFGAVMPAFTGLANWLIPMMIGAPDMALPRMNNWSFWILPGAFLILLSSLFMEGGGPAFGWTFYAPLSTTYSGDSTALFVFSVHIMGISSIMGAINVIVTIFNMRAPGMTWMKMPLFVWTWLITAFLLIAVMPVLAGAVTMVLTDKFFGTSFFDAAGGGDPVMFQHIFWFFGHPEVYIMILPAFGIISQIVPTFSRKQLFGYASMVYATASIALLSFVVWAHHMFTTGMPVYMEMFFMFATMLISVPTGVKVFNWVATMWRGSLSFEMPMMFAIAFIVLFTIGGLSGLMLAITPVDFQYHDTYFVVAHFHYVLVTGAVFSIMAAVYYWLPKWTGKMYDTTLAKWHFWCSLVSVNVLFFPMHFVGLAGMPRRIPDYALQFADFNKWISLGGFAFGLSQLIFLALLIKACKKQGEPVSAQVWDGAEGLEWEIPSPAPYHTFETPPVVK

SEQ ID NO: 104637 - protein, 214 aa, Unknown
  Bacterial polypetide isolated from the Sargasso Sea
WFIFSEVMFFAAFFGALFYVRSFAVPWLGGEGEKGLANMLWQDFEATWPLINTPDGGKAFVIAAKSMSFPGWENISHWLPLYNTIVLLSSSVTVHFAHLGLKKGNKKTFNIWLGITVLLALIFVGLQAAEYYEAYEHFGLTLNSGIYGSTFFMLTGFHGFHVMLGGLMLAVMFIRSVFYGHFNEHKHFGFEAASWYWHFVDVVWVMLFLFVYIL

SEQ ID NO: 104638 - protein, 366 aa, Unknown
  Bacterial polypetide isolated from the Sargasso Sea
MLAFPALLVSSIMMTLDKVLGTSFFMPTILKAGEVLEYGGGSPILFQHLFWFFGHPEVYIVALPAFGIVSDLISVHARKNIFGYRMMVWAIVGIGALSFFVWAHHMYVSGMNPWFGFFFASTTLIIAVPTAMKVYNWILTLWRGNIRINTVMLWCLGFIVTFVNGGITGIFLGNVTVDVPLSDTYFVVAHFHMVMGIAPLMVIMGAVYHWFPLVSGRLLSEKLGKWHFWLTFLGAYSIYFPMHYLGFIGVPRRYFEMYDSPYMTSAVGMNEFISLAAFIVGAAQFILIFNVIKTLKNGKKAGKNPWQANSLEWHTSTVPPEHGNFGDRLPVVHRWAYDYSVPGAKEDYIPQTTPPSEVAHTEVEKT

SEQ ID NO: 104639 - protein, 499 aa, Unknown
  Bacterial polypetide isolated from the Sargasso Sea
MYSQTAAHDHHTPTGWKRWAYSTNHKDIGTMYLIFAIIAGLIGTAFSVLMRMELMHPGDGILGGDYHLYNVLVTGHGLIMIFFMVMPAMIGGFGNWFVPIMIGAPDMAFPRMNNISFWLLPVSFILLLSSIFVDGPPGAQGVGGGWTIYPPLSSKTGQPGPAMDLAILSLHIAGASSILGAVNFITTILNMRTPGMTLHKMPLFAWSILVTAFLLLLSLPVLAGAITMLLTDRNFGTAFFEAQSGGDPMLFQHLFWFFGHPEVYILILPGFGMISHIVSTFSRKPVFGYLGMAYAMVAIGIVGFVVWAHHMYTVGLNTDTKAYFLAATMIIAVPTGIKIFSWIATMWGGSISFKTPMVWALGFIFLFTVGGVTGVVLANAGVDTALHDTYYVVAHFHYVLSLGAVFAIFAGFYYWFGKMSGYEYSEWLGQLHFWLTFIGVNLIFFPQHFLGLAGMPRRYADYPDAFADWNYISSVGSYISIVGLGVFLINLIYAFAKKK

SEQ ID NO: 104640 - protein, 420 aa, Unknown
  Bacterial polypetide isolated from the Sargasso Sea
MSTIVETHDHGHHGPAKGLTRWLFTTNHKDIGTLYLWFSFIMLFIGGGMAMVIRAELFQPGLQIVQPEFFNQMTTNHGLIMVFGVIMPAFVGLANWMLPMQIGAPDMALPRLNNLSFWLLPMAFGILISTLFMPEGGPNFGWTFYAPLSTTYAPSTVNFFIFSVHIMGVSSILGSINIITTIFNMRAPGMTLMKMPLFVWSWLITAYLLIAVMPVLAGVVTMMLMDINFGTSFFNAAGGGDPVLFQHVFWFFGHPEVYIMILPAFGIVSHIIETFSRKPIFGYSSMVYAMASIAILSFVVWAHHMFTVGMPLAGQLFFMYSTMLIAIPTGVKVFNWVATMFRGSISFETPMLFSIAFVALFTIGGFSGLMLAIVPADFQYHDTYFVVAHFHYVLVPGALFGIIAGAYYWLPKWTGNMYDE

SEQ ID NO: 104641 - protein, 670 aa, Unknown
  Bacterial polypetide isolated from the Sargasso Sea
MAAPTVSPAQADPLRLSRTLRVGRIEAGSAEEKRLRELWEARPGWRGWFSTVDHKTIGLRYLVTAFLFLLAGGIEALLMRLQLARPNATLLTPEQYDQLFTMHGVTMIFLYALPVLSGFSNYLWPLILGARDMAFPRLNAFSYWVFVFAGLFLYASFPLGEAPNAGWFNYVPLSGLEYNTGPNIDVYALGMVLLGISTTVGSINFVVTLLRMRAPGMSLDRLPVLVWGTLTASGANLLAVPSVSLAFFLLWLDRRVGTHFFDVLNGGRPLLWQHLFWIFAHPWVYAVVLPAMGIVSDALPVFCRRPLVGYGPVAISTVATMLVGFVVWIHHMFATGIPPLALSFFGSASMVIAVPSAVATFAWIATIWTGRPVMRVPFLFFAGFVLLFVVGGVSGVMTAAVPFDWQLTDTYFVVAHLHYVLLGINVFPVIGGIYFWFPKFTGRMMSERLGKIGFWVMFVGFNVAFFPMHIAGLLGMPRRIYTYPPDMGWNTVNMVTSLGSFVFAFGVLIFLVDLLYSIRHGAIAGDNPWDAPTLEWSVSSPPPPYNFAVLPFVASRHPLWEGRMEEGTAGEAPRQRSKLDEGFLLGEGREALGTTALEGRPDVILKMPDDSYAPFWLGLFATLVFAGLALRAGIFTAAALLACAVTIVVWLWPERALIQREPQTVIDAGD

SEQ ID NO: 104642 - protein, 263 aa, Unknown
  Bacterial polypetide isolated from the Sargasso Sea
MSAEKPKHDYHLVDPSPWPIYVSFATLVLAFGAVYYFHSKALWLLLIGFALVVYGAFMWWRDVIEEAEHQGHHTPVVQIGHRYGMTLFIASEVMFFVAWFWAFFNASLFPPDSIGGIWPPADIKTFDPWDIPLINTLILLLSGTTVTWAHHAMLENDRKGLVNGLIATVFLGFIFSCFQAYEYHHATFTLDGGIYGSTFYMSTGFHGFHVIVGTVFLAVCLFRSMRGHSTPQHHFGFEAAAWYWHFVDVVWLFLFAAIYIWGS

SEQ ID NO: 104643 - protein, 534 aa, Unknown
  Bacterial polypetide isolated from the Sargasso Sea
MSATTADHEHHQNPTGWKRWAYSTNHKDIGTMYLIFAIIAGIIGSAFSVLMRMELMHPGDGILGGDYHLYNVLVTGHGLIMIFFMVMPAMIGGFGNWFVPIMIGAPDMAFPRMNNISFWLLPVALILLLVSIFVDGPPGAKGVGGGWTIYPPLSSKTGQPGPAMDLAILSLHVAGASSILGAINFITTILNMRTPGMTLHKMPLFSWSILVTAFLLLLSLPVLAGAITMLLTDRNFGTAFFEAQTGGDPVLFQHLFWFFGHPEVYILILPGFGMISHIVSTFSRKPVFGYLGMAYAMVAIGVVGFVVWAHHMYTVGLDTDTKAYFLAATMIIAVPTGIKIFSWIATMWGGSISFQTPMLWAIGFIFLFTLGGVTGVVLANAGVDTALHDTYYVVAHFHYVLSMGAVYAIFAGFYYWFSKMTGYEYSEFLGKLHFWLTFIGVNLIFFPQHFLGLAGMPRRYADYPDAFAGWNYISSIGSYISIIGLAVFLLNLLYAFMKKKKAEPNPWGEGATTLEWTVSSPPPFHTFEELPKVK

SEQ ID NO: 104644 - protein, 266 aa, Unknown
  Bacterial polypetide isolated from the Sargasso Sea
ILPAFGIISTIIPAFSRKKLFGYDSMVYATASIALLSFIVWAHHMFTVGMPLAGEIFFMFTTMLIAVPTGVKVFNWVATMWRGSMTFETPMLFSLAFIILFTIGGFSGLMLAITPADFQYHDTYFVVAHFHYVLVPGAIFAVIAAVYYWIPKWTGKMYNETLGKVHFWMTTIFVNITFFPMHFVGLAGMPRRIPDYAVQFTDFNMIASIGAFGFGLSQLLFVYILFQTLRQPVSAADKSWEGAEGLEWTLPSPAPYHSFDTPPKVD

SEQ ID NO: 104645 - protein, 381 aa, Unknown
  Bacterial polypetide isolated from the Sargasso Sea
CHLRFWAIFIATILALLAFPALLVSAIMMLLDRLLETSFFMPAIISAGGQTDYDGGSPVLFQHLFWFFGHPEVYIVALPAFGLVSEILSVHARKAIFGYRMMVWAIVAIGALSFIVWAHHMYVSGMNPYFGFFFATTTLIIAVPTAIKVYNWVLTLWRGNIKLTVPMLFAIGFIFTFINGGLTGLFLGNVTIDLPLSDTYFVVAHFHMVMAVSPVLVVFGAIYHWYPKITGRMFNDKLGRIHFWFTFVGSYAIYYPMHYLGLEGMPRRYFSYGDTEFISASSADLNVAISIAAIFVAASQIFFFWNMIHSLFKGEKADPNPWGATTLEWRTPQTPPGHGNFDELPLVYRWAYDYSVPGYEQDFIPQDVSPAEAEKMAKRVE

SEQ ID NO: 104646 - protein, 594 aa, Unknown
  Bacterial polypetide isolated from the Sargasso Sea
MSDAIIPEREVEEQELYHAKSWWTEKVFSQDAKIIGIQYFCTATAIALIGLVLSWFMRMQIGFPGLSIVSESFYYQAITMHGMIMVVYFLTALFLGGFGNYLIPLMVGARDMVFPYLNMISYWTFLLACLVLVASFFTPGGPTGAGWTLYPPQAILGGTPGQESGIILMLISLSIFIVGFTMGGLNYIVTILQARTRGMTLMRMPLAVWGIFTATVLAMFAFPALLVSAIMMILDKTLMTSFFMPSLVEMGEQLSYGGGSPILFQHLFWFFGHPEVYIVALPAFGLVSDILSVHARKNIFGYRMMVWAIVAIGALSFIVWAHHMYVSGMHPYFGFFFATTTLIIAVPTAIKVYNWVLTLWKGNITLTVPMLFCISFIITFLNGGLTGLFLGNVIVDVPLSDTYFVVAHFHMVMGIAPVQVVFAAIYHWFPLMTGRMYNETLGRLHFWFTFLGSYLIYFPMHYLGLIGVPRRYYEMGQTEALYTQSAADLNIFITLTALVTGFAQIFFFINMFWSRKYGVPAEKNPWQANSLEWRTPSMPPGHGNFGKELPVVYRWPYDFNVPGAKDDFVPQDVPNSEVELAEGYEGTEIKAEKT

SEQ ID NO: 104647 - protein, 352 aa, Unknown
  Bacterial polypetide isolated from the Sargasso Sea
RTPGMTLHKMPLFAWSILVTAFLLLLSLPVLAGAITMLLTDRNFGTAFFDAQTGGDPVLFQHLFWFFGHPEVYILILPGFGMISHIVSTFSKKPVFGYLGMAYAMVAIGIVGFVVWAHHMYTVGLSTDTKAYFLAATMIIAVPTGIKIFSWIATMWGGSISFKTPMVWALGFIFLFTVGGVTGVVLANAGVDTAMHDTYYVVAHFHYVLSLGAVFAIFAGFYYWFGKMSGYEYSEWMGQLHFWLTFIGVNLVFFPQHFLGLAGMPRRYADYPDAFAGWNYISSIGSYISVLGLVVFFANLIYAFYKKKAASQNPWGEGATTLEWTVPSPPNFHTFEELPKFEDDESVEKSTS

SEQ ID NO: 104648 - protein, 75 aa, Unknown
  Bacterial polypetide isolated from the Sargasso Sea
SFSGHIYGATFYLATGFHGFHVLVGTIFLAVCLWRGKLGHFTKEHHFGFEAAAWYWHFVDVVWLFLFAAIYIWGS

SEQ ID NO: 104649 - protein, 528 aa, Unknown
  Bacterial polypetide isolated from the Sargasso Sea
MSAVVENNDHHDDHHHGPRKGIWRWMTTTNHKDIGTLYLWFSFLAFLVGGAFAMGIRAELFEPGLQLMDPIRYNQLVTMHGLIMIFGGVMPAFVGLANWLIPMQIGAPDMALPRMNNLSFWLLPTAFAILMSTAFMEGGMPGFGWTFYAPLSTNYPNVAFFVFAVHIMGVSSIMGSINVIVTIMNMRAPGMTLMQMPLFTWSWLITAYLLIAVMPVLAGAVTMLLMDAYFGTSFFDAAGGGDPVLFQHVFWFFGHPEVYIMILPAFGITSHIISTFSRKPLFGHASMIYAMSSIAILSFVVWAHHMFTVGMPLAAELFFMWATMLIAIPTGVKVFNWCATIFKGSITYETPMLFAIAFVVLFTIGGFSGLMLAITPADFQYHDTYFVVAHFHYVLVPGSVFSIMAAVYFWLPKWTGNMYDEKLGKLHFWLSFIGVNVTFFPQHFVGLAGMPRRYADYALQFAEWNAVSSVGAFLFGFSQLLFLYIVLKTIFVGKKATPQVWEGADGLEWTVDSPAPYHTFETPPKING

SEQ ID NO: 104650 - protein, 612 aa, Unknown
  Bacterial polypetide isolated from the Sargasso Sea
MSEDFNDNKTIQAQSSEAISGGGSGIGADADYVRPAEVADQDLYHGHSFITKWIFCQDAKVIGVQYFLLATFTGIIGLILSWLMRLQLGFPGLAPFMTAEHYYQFVTMHGMIMVVYFLTALFLGGFGNYLIPLMVGARDMVFPYLNMVSFWSFFVAVAVLLASFFVPGGPTGSGWTLYPPQAILEGTPGSGWGIMLMCISLILFVAGFTMGGLNYLITVLQARTRGMTLMRMPLTVWGIFTATVLAMLAFPALLVGALMMSLDNVLGTSFFMPTILKAGEVLEYGGGSPILFQHLFWFFGHPEVYIVALPAFGIISDLISVHARKNIFGYRMMVWAIVGIGALSFFVWAHHMYVSGMNPWFGFFFATTTLIIAVPTAMKVYNWILTLWRGNIRLNTVMLWCLGFIVTFVNGGITGIFLGNVSVDVPLSDTYFVIAHFHMVMGIAPLMVIMGAVYHWFPLVAGRFLDEKLGKWHFWLTFLGAYSIYFPMHYLGFIGVPRRYFEMYDSPYVTSAVGMNEFISLAAFIVGAAQFILIYNIIKTLKTGKPAGHNPWQACSLEWLTPSVPPEHGNWGDRLPTVHRWAYDYSVPGAKEDFITQTTPPSEVAHTEVEKT

SEQ ID NO: 104651 - protein, 117 aa, Unknown
  Bacterial polypetide isolated from the Sargasso Sea
MYTQTASHEDHHTPTGWKRWAYSTNHKDIGTMYLIFAIIAGVIGTAFSVLMRMELMHPGDGILGGNYHLYNVLVTGHGLIMIFFMVMPAMIGGFGNWFVPIMIGAPDMAFPRMNNIS

SEQ ID NO: 104652 - protein, 466 aa, Unknown
  Bacterial polypetide isolated from the Sargasso Sea
LQILGISSLVSAFNFIVTILNMRTQGMRLMRMPVFTWMTFAVAFLLAFSLPIIAIALFYVTFDRQFGTTFFLTEGGGDPVLWQHLFWLFGHPEVYILILPAFGIVSEILPTFSRKPLFGYPAIVFAGFGIAFIGFGVWAHHMFASAISPVAQAGFGISTMIIAVPTGVKIFNWLGTIWGGKLNLKTPMLFALGFIGMFVIGGLSGVTHSVVPADTQQTDTYYIVAHFHYVLFGGAMFGIFAGLYYWFPKVWGKMYNETLGQIHFWTMLIGFNLTFGPMHWLGLQGQVRRTWVYAEETNLGFWNLIVSIGAFIIALSILIFMANWMYSKRKGEKAPFDPWDARTIEWTIPSPTPVWNFSKAPHVKALDDFWHAKYDEDEEGRAVRRDSADALLTQLEEEGLNPEEEIELPNPSYYPFVLSSGLPFLGYAVIYKSIPLALIGVVLILVGSFGWATEPLEEEFRSEEEE

SEQ ID NO: 104653 - protein, 531 aa, Unknown
  Bacterial polypetide isolated from the Sargasso Sea
MSYGKAVSHEDHDHRPGFIKRWFFSTNHKDIGTLYIIFAILAGLVGGYFSLIMRAELAAPGLDVVADGQAWNVIITAHGLLMVFFVVMPALIGGFGNWFVPLMIGAPDMAFPRMNNFSFWILVPAVILLVVSATIGTGAGTGWTIYPPLSNKLGHPGPSVDMAIFALHLAGASSILGAVNFITTILNMRTPGMTLHKMPLFVWSMLITAFLLLLAVPVLAGAITMLLTDRNFGTTFFNPAGGGDPVLFQHLFWFFGHPEVYIMILPAFGIVSQVISTFSRKPVFGYLGMVYAMISIGFIGFIVWAHHMFTVGLSADLRAYFMLATIIIAVPTGIKIFSWIATMWGGSLTFETPMLFAIGFVFLFTLGGVTGVILANAGIDTVMHDTYYVVAHFHYVLSMGAMFGIFAGIYYWFGKMSGRKYNEYLGKLHFWLFFIGVNVTFFPQHFLGLAGMPRRIPDYPDAYAGWNLVSTYGSYISFAATLVFLFAIIYSLFFGKKEASNPWGEGADTLEWTLSSPPPFHQFETLPKFKG

SEQ ID NO: 104654 - protein, 266 aa, Unknown
  Bacterial polypetide isolated from the Sargasso Sea
MAHVKNHDYHILNPSLWPFIGAVAAFIMLFGAVLFFHDNGPWLLLIGFVGVLYVMFGWWADTVTENKEGDHTPVVLIGLRYGFILFIMSEVMFFAAWFWSFFKHAMYPMSEQSPMVDGVWPPVGIETFDPWHLPLINTLILLCSGAAATWAHHALVHENNRKDIKNGLIIAILLGAIFTVFQAYEYSHAAFGFSGNIYGANFFMATGFHGFHVIVGTIFLFICLLRTMRGHFSPESHLGFEAAAWYWHFVDVVWLFLFAAVYVWGG

SEQ ID NO: 104655 - protein, 326 aa, Unknown
  Bacterial polypetide isolated from the Sargasso Sea
SLPVLAGAITMLLTDRNFGTTFFDPAGGGDPVLYQHLLWFFGHPEVYMIVIPGFGIVSHVISTFSKKPVFGYLPMVYAMIAIGALGFVVWAHHMYTVGMSVTQQAYFMLATMVIAVPTGIKIFSWIATMWGGSVEFKTPMLWSIGFLFLFTVGGVTGIVLSQAGIDRAYHDTYYVVAHFHYVMSLGAVFCIFAGIYYWIGKMSGRQYPEWAGKLHFWAMFIGSNITFFPQHFLGRQGMPRRYIDYPEQFALWNYVSSIGAFISFGSFIFFFGIIFYTLMWGRRVTEEAYWGKHADTLEWTLPNPPPEHTFETLPTRDMWESKSTSH

SEQ ID NO: 104656 - protein, 323 aa, Unknown
  Bacterial polypetide isolated from the Sargasso Sea
MDSSNPALGGNVVVYQHLFWFYSHPAVYIMVLPAFGLVSEILPVHARKPLFGYVTMVYSIMAIVVLGLVVWAHHMFTSGTPPWMRLFFTIATAFIAVPTGIKFFNWLATLWGGRITLNSAMLFSCGFIVNFVLGGITGVALAQVPFDIHVHDTYFVVAHFHYIVFGGSVFVIFASVYHWYPKFTGRMLNEDLGRLHCALTFIGFNLCFGPQHWLGLNGMPRRVAEYDPQFTLINQISSVGALLMAISTLPFLWNVVQSALSGKPAGDNPWNALTPEWLTSSPPPVENWIGEAPLVEEPYGYGVPVDQLDLTATSGRDLWSSGK

SEQ ID NO: 104657 - protein, 412 aa, Unknown
  Bacterial polypetide isolated from the Sargasso Sea
MSFWILPFAFFILLSSLFMEGGAPNFGWTFYAPLSTTYAPPSVTFFIFSVHIMGASSIMGAINVVVTIMNMRAPGVTLMKMPLFVWSWLITAYLLIAVMPVLAGAVTMMLMDIHFGTSFFNAAGGGDPVLFQHIFWFFGHPEVYIMILPAFGIVSHIIETFSRKQLFGYSSMVWAMLSIAILSFVVWAHHMFTVGLPLAAEIFFMWATMLIAVPTGVKVFNWVATMFRGSLTFETPMLFAVAFVVLFTIGGLSGLMLAIVPADFQYHDTYFVVAHFHYVLVPGAIFSIMAAVYYWIPKWSGNMYDERLGKLHFWLSFIGVNVTFFPQHFIGLAGMPRRYPDYALIFADWNMVSSIGAFLFGFSQLLFLFIVIKTVMGGKKATDQVWEGAKGLEWTVASPAPYHTFSTPPKVD

SEQ ID NO: 104658 - protein, 237 aa, Unknown
  Bacterial polypetide isolated from the Sargasso Sea
MTTIASQDHSHHHPTGWKRWAYSTNHKDIGTMYLIFAIIAGIIGTAFSVLMRMELMHPGDGILGGNYHLYNVLVTGHGLIMIFFMVMPAMIGGFGNWFVPIMIGAPDMAFPRMNNISFWLLPVSFILLLSSIFVDGPPGAQGVGGGWTIYPPLSSKTGQPGPAMDLAILSLHIAGASSILGAVNFITTILNMRTPGMTLHKMPLFAWSILVTAFLLLLSLPVLAGAITMLLTDRNFG

SEQ ID NO: 104659 - protein, 383 aa, Unknown
  Bacterial polypetide isolated from the Sargasso Sea
IQLSQPDNNFLTAAEYNAMFTMHGTTMIFLAIMPISAAFFNYLLPLQIGARDVAFPRLNALSFWIFIFGGAFLYSTFIFGTAGAPEGGYLAEEVGWLGSAPNGGWFGYQPNAGMKYSPGTAMDYWAIGLQILGIASLISAFNFITTIINMRTEGMRFMRMPVFTWMTFAVSFLLAFSLPIIAIALFYVTFDRKFGTTFFLTEGGGDPILWQHLFWLFGHPEVYILILPAFGIVSEVLPTFSRKPLFGYAAIVFAGFGIAFIGFGVWAHHMFASAISPVAQAGFGLSTMVIAVPTGVKIFNWLGTIWGGKLKLNTPMLFSLGFIGMFVIGGLSGVTHSIVPADTQQTDTYYVVAHFHYVLFGGALFGIFSGLYYWFPKVWGNNV

SEQ ID NO: 104660 - protein, 534 aa, Unknown
  Bacterial polypetide isolated from the Sargasso Sea
MSATTADHEHHHNPTGWKRWAYSTNHKDIGTMYLIFAIIAGLIGSAFSVLMRMELMHPGDGILGGDYHLYNVLVTGHGLIMIFFMVMPAMIGGFGNWFVPIMIGAPDMAFPRMNNISFWLLPVALILLLVSIFVDGPPGAKGVGGGWTIYPPLSSKTGQPGPAMDLAILSLHVAGASSILGAINFITTILNMRTPGMTLHKMPLFAWSILVTAFLLLLSLPVLAGAITMLLTDRNFGTAFFEAQTGGDPVLFQHLFWFFGHPEVYILILPGFGMISHIVSTFSRKPVFGYLGMAYAMVAIGVVGFVVWAHHMYTVGLDTDTKAYFLAATMIIAVPTGIKIFSWIATMWGGSISFQTPMLWAIGFIFLFTLGGVTGVVLANAGVDTALHDTYYVVAHFHYVLSMGAVYAIFAGFYYWFSKMTGYEYSEFLGKLHFWLTFIGVNLIFFPQHFLGLAGMPRRYADYPDAFAGWNYISSIGSYISIIGLAVFLLNLLYAFMKKKKAEQNPWGEGATTLEWTVSSPPPFHTFEELPKVK

SEQ ID NO: 104661 - protein, 339 aa, Unknown
  Bacterial polypetide isolated from the Sargasso Sea
SILVVLSTPVLAGTLILLSFDIVAHTGFFNPSLGGNVIVYQHLFWFYSHPAVYIMVLPAFGLVSEILPIHSRKPLFGYTTMVFSIMGIVVLGLVVWAHHMFTSGTPPWMRLFFTIATAFIAVPTGIKFFNWVATLWGGKISLNAAMLFSCGFIINFVLGGITGVALAQVPFDVHVHDTYFVVAHFHYIVYGGSVFVIFSSIYHWFPKFTGKMLNENLGRFHFIITFIGFNLCFAPQHWLGLNGMPRRVAEYDPQFQLINQISSVGALLMALSTLPFLWNILQSILFGEEAGDNPWNALTPEWLTSSPPPVENWDGEAPLVLEPYGYGKKDSNETQEAIR

SEQ ID NO: 104662 - protein, 612 aa, Unknown
  Bacterial polypetide isolated from the Sargasso Sea
MSHYGIWSWLGTVDHKKIGTMYGIVSFFWFIMGGIEALLIRVQLSHAEAEIISPELYNQLFTMHGTTMVFLVVMPLSAAFFNWLVPLQIGARDVAFPRLNALSLWVFIFGSILMNISWFTGGAPNGGWFGYPPNSTVQFNPGHGMTYWVMGLNVLGVASIAAGLNFIVTIINMRATGMSLMKMPVFTWMTFITSILIVLALPVLGVAGIQMTADRVYGTNFFNSEAGGDPIFWQHIFWLFGHPEVYILILPAMGIVSEVLPTFSRKPLFGYSFIVFSGAGIGFMGWFVWSHHMFTVGLGPAANTAFTISTMFIAVPTGVKIFNWMATLWGGSIRFTTSMLFSIGFIAMFTIGGLSGVTHAVSPSDAQQQDTYYIVAHFHYVLFGGAIFAIFSGLYFWWPKFFGYFLNDKIGKVNFILMMIGFNLQFAPMHWVGLDGMPRRIYTYADNMGWEASNLAATLGGFIIAVSVSLFIFNVIYSMKKRVVASGDPWDGRTLEWSISSPPPHYNFAKLPEVTHIDDWWYKKYPSLLEGSPKGSLEPKAKVEDTSKVNEDDIHLPDLSYYPLFIGIGLSIAALGVMYTYALVTIGLILVFWGSIGWSTEPVNEPHDKSHH

SEQ ID NO: 104663 - protein, 240 aa, Unknown
  Bacterial polypetide isolated from the Sargasso Sea
MSAEKKHDYHLVDPSPWPIYVSLSCLVLALGSVYYLHTDVSWGMYLGFALLIYGAYMWFRDVVIEAEHQGHHTPVVQIHHRYGMTLFIASEVMFFVAWFWAYFDVSLFPNEFVGNVWPPKDIKTFDPWDIPLINTLILLLSGTTVTWSHHALLEDDRKSFIQGLWLTVILGFCFTLLQIYEYQHASFSFSDHIYGSVFYMATGFHGFHVLVGTIFLAVCLFRGKRGHFNKDHHFGFEAAA

SEQ ID NO: 104664 - protein, 192 aa, Unknown
  Bacterial polypetide isolated from the Sargasso Sea
MSYGESVSHDHDHHDHKPGFIKRWFFSTNHKDIGTLYIIFALIAGLIGGFFSLLMRAELAAPGLDVVADGQAWNVIITAHGLLMVFFVVMPALIGGFGNWFVPIMIGAPDMAFPRMNNFSFWVLVPALVLLVVSATIGTGAGTGWTIYPPLSNKLGHAGPSVDMAIFALHLAGASSILGAVNFITTILNMRT

SEQ ID NO: 104665 - protein, 187 aa, Unknown
  Bacterial polypetide isolated from the Sargasso Sea
RGSMTFETPMLFSIGFVTLFTIGGFSGLMLAIVPADFQYHDTYFVVAHFHYVLVPGALFGIIAGAYYWLPKWTGYMYDETLGKLHFWLTFISVNITFFPMHFVGLAGMPRRYPDYALQFADFNAMISVGAFMFGITQLLFLFIVIKTIRSGKQAKPEVWEGAGELGLEWTLSSPPPYHSFTVQPEVK

SEQ ID NO: 104666 - protein, 170 aa, Unknown
  Bacterial polypetide isolated from the Sargasso Sea
MSAQAHADHGAPISFVRRWLYSTNHKDIGTMYLVFAILAAFIGGGMSIYMRMELMNPGVQYMDSGHVWNVFTTAHGLIMVFFVVMPGLIGGFGNWFVPIMIGAPDMAFPRMNNISFWLLPPAFVLLLLSAVMDGGAGVGWTIYPPLSSTAGSPGMSMDLAIFSLHLAGVS

SEQ ID NO: 104667 - protein, 210 aa, Unknown
  Bacterial polypetide isolated from the Sargasso Sea
MSSKDQKHDYHLVDPSPWPIYTSFATLITAIGSVYYFHSKVMWAMLLGFALLIYGAYMWFRDVVNEAEHQGHHTPVVQIHHRYGMTLFIASEVMFFVAWFWAYFDASLYPSAFVGGVWPPKDIEVFNPWDIPLINTLVLLLSGTTVTWAHHSLLEDDRKGFIQGLWATVLLGFFFTLLQIYEYQHASFDFSGHIYGATFYMATGFHGFHV

SEQ ID NO: 104668 - protein, 543 aa, Unknown
  Bacterial polypetide isolated from the Sargasso Sea
MSTAATHHDHHTPTGWKRWAYSTNHKDIGTMYLIFAIIAGLIGTAFSVLMRMELMHPGDGILGGDYHLYNVLVTGHGLIMIFFMVMPAMIGGFGNWFVPIMIGAPDMAFPRMNNISFWLLPVAFILLLSSIFVDGPPGAQGVGGGWTIYPPLSSKTGQPGPAMDLAILSLHVAGASSILGAVNFITTILNMRTPGMTLHKMPLFAWSILVTAFLLLLSLPVLAGAITMLLTDRNFGTAFFDAQTGGDPTLFQHLFWFFGHPEVYILILPGFGMISHIVSTFSKKPVFGYLGMAYAMVAIGFVGFVVWAHHMYTVGLDTDTKAYFLAATMIIAVPTGIKIFSWIATMWGGSISFKTPMLWALGFIFLFTVGGVTGVVLANAGVDTALHDTYYVVAHFHYVLSLGAVFAIFAGWYYWFGKMSGYQYSEWMGKLHFWLTFIGVNLIFFPQHFLGLAGMPRRYADYPDAFADWNYISSVGSYISVAGVVVFLINLLYSFITKKASSSNPWGEGATTLEWTVPSPPNFHTFDELPKLDVYEGAEKSKS

SEQ ID NO: 104669 - protein, 263 aa, Unknown
  Bacterial polypetide isolated from the Sargasso Sea
MSAKDQKHDYHLVDPSPWPIYTSFATLITAIGTVYYFHSKVMWAMLFGFALLIYGAFMWFRDVVNEAEHQGHHTPVVQIHHRYGMTLFIASEVMFFVAWFWAYFDASLFPGEFVGNVWPPKDIETFDPWDIPLINTLVLLLSGTTVTWSHHALLEDDRKSFIQGLWLTVILGACFTALQIYEYQHASFNFSGHIYGATFYMATGFHGFHVLVGTIFLAVCLWRGKLGHFNKDHHFGFEAAAWYWHFVDVVWLFLFAAIYIWGS

SEQ ID NO: 104670 - protein, 529 aa, Unknown
  Bacterial polypetide isolated from the Sargasso Sea
MRLQLGFPGLAPFMTAEHYYQFVTMHGMIMVVYFLTALFLGGFGNYLIPLMVGARDMVFPYLNMVSFWSFFVAVGVLLASFFVPGGPTGSGWTLYPPQAILEGTPGSGYGIMLMCISLILFVAGFTMGGLNYLITVLQARTRGMTLMRMPLTVWGIFTATVLAMLAFPALLVGALMMSLDNVLGTSFFMPTILKAGEVLEYGGGSPILFQHLFWFFGHPEVYIVALPAFGIISDLISVHARKNIFGYRMMVWAIVGIGALSFFVWAHHMYVSGMNPWFGFFFATTTLIIAVPTAMKVYNWILTLWRGNIRLNTVMLWCLGFIVTFVNGGITGIFLGNVSVDVPLSDTYFVIAHFHMVMGIAPLMVIMGAVYHWFPLVAGRFLDEKLGKWHFWLTFLGAYSIYFPMHYLGFIGVPRRYFEMYDSPYVTSAVGMNEFISLAAFIVGAAQFILIYNIIKTLKTGKPAGHNPWQACSLEWLTPKVPPEHGNWGDRLPVVHRWAYDFSVPGAKEDFITQTTPPSEVTHTKVEKT

SEQ ID NO: 104671 - protein, 262 aa, Unknown
  Bacterial polypetide isolated from the Sargasso Sea
MSAQKKHDYHLVDPSPWPIYTSFSCLVLALGSVYYFHYDVSWGMYLGLALVIYGAYMWFRDVVIEAEHQGHHTPVVQIHHRYGMTLFIASEVMFFVAWFWAYFDVSLFPNEFVGNVWPPKDIETFDPWDIPLINTLILLLSGTTVTWSHHALLEDDRKSFIQGLWLTVILGFCFTLLQIYEYQHASFSFSDHIYGSVFYMATGFHGFHVLVGTIFLAVCLFRGKRGHFNKDHHFGFEAAAWYWHFVDVVWLFLFAAIYIWGS

SEQ ID NO: 104672 - protein, 407 aa, Unknown
  Bacterial polypetide isolated from the Sargasso Sea
MSSVIESHHDDHHHGPAKGLMRWLLTTNHKDIGTLYLWFSFAMFLIGGAMAMVIRAELFQPGMQIVEPEFYNQMLTLHGLIMVFGAVMPAFVGLANWLVPMMVGAPDMALPRLNNLSFWLLPFAFGILLSSLFMEGGAPNFGWTFYAPLSTTYAPPSVTFFIFSVHIMGASSIMGSINVIVTIMNMRAPGMDLMKMPLFVWSWLITAYLLIAVMPVLAGAVTMMLMDIHFGTSFFNAAGGGDPVLFQHIFWFFGHPEVYIMILPAFGIVSHIIETFSRKQLFGYSSMVWAMLSIAILSFVVWAHHMFTVGMPLAAELFFMWATMLIAVPTGVKVFNWVATMFKGSITYETPMLFAISFVVLFTIGGFSGLMLSIVPADFQYHDTYFVVAHFHYVLVPGSIFSIMAAV

SEQ ID NO: 104673 - protein, 401 aa, Unknown
  Bacterial polypetide isolated from the Sargasso Sea
MSAFGAGNPSAPNFGWTFYAPLSTKYGPASTDLFILSVHMMGISSIMGAINVVVTVFNMRAPGMTLMKMPLFVWTWLITAFLLIAVIPVLAGAVTMMLTDRHFGTSFFDAAGGGDPVLFQHVFWFFGHPEVYIMILPSFGIVSAIIPAFARKPLFGYASMVYATASIALLSFVVWAHHMFTVGMPLAGTLFFMYMTMLISVPTGVKVFNWVATMWRGSMTFELPMKWAIAFVVLFTCGGLSGLMLAITPVDFQYHDTYFVVAHFHYVLVTGAIFSIYAAAYYWLPKWSGIMPNKTLGELHFWNSLISANLLFFPMHFVGLAGMPRRYADYALQFADYNFWISIGGFWFGLSQLFFLAVAVLCALKKGEKAPAKPWEGAEGLEWEVPSPAPFHTFETPPVVK

SEQ ID NO: 104674 - protein, 544 aa, Unknown
  Bacterial polypetide isolated from the Sargasso Sea
MTTVASQDHSHHHPTGWKRWAYSTNHKDIGTMYLIFAIIAGIIGTAFSVLMRMELMHPGDGILGGNYHLYNVLVTGHGLIMIFFMVMPAMIGGFGNWFVPIMIGAPDMAFPRMNNISFWLLPVSFILLLSSIFVDGPPGAQGVGGGWTIYPPLSSKTGQPGPAMDLAILSLHIAGASSILGAVNFITTILNMRTPGMTLHKMPLFAWSILVTAFLLLLSLPVLAGAITMLLTDRNFGTAFFDAQTGGDPLLFQHLFWFFGHPEVYILILPGFGMISHIVSTFSKKPVFGYLGMAYAMVAIGIVGFVVWAHHMYTVGLNTDTKAYFLAATMIIAVPTGIKIFSWIATMWGGSISFKTPMMWALGFIFLFTVGGVTGVVLANAGVDTALHDTYYVVAHFHYVLSLGAVFAIFAGFYYWFGKMSGYEYSEWLGQLHFWLTFIGVNLIFFPQHFLGLAGMPRRYADYPDAFADWNYISSIGSYISVVGLAVFLINLAYAFMKKKAAAQNPWGEGATTLEWTVPSPPNFHTFEELPKVNEYGEAEKTST

SEQ ID NO: 104675 - protein, 262 aa, Unknown
  Bacterial polypetide isolated from the Sargasso Sea
MSAEKKHDYHLVDPSPWPIYVSFSCLVLALGSVYYLHTDVSWGMYLGFALLIYGAYMWFRDVVIEAEHQGHHTPVVQIHHRYGMTLFIASEVMFFVAWFWAYFDVSLFPNEFVGNVWPPKDIETFDPWDIPLINTLILLLSGTTVTWSHHALLEDDRKSFIQGLWLTVILGFCFTLLQIYEYQHASFSFSDHIYGSVFYMATGFHGFHVLVGTIFLAVCLFRGKRGHFNKDHHFGFEAAAWYWHFVDVVWLFLFAAIYIWGS

SEQ ID NO: 104676 - protein, 338 aa, Unknown
  Bacterial polypetide isolated from the Sargasso Sea
MYTQTESHDDHHTPTGWKRWAYSTNHKDIGTMYLIFAIIAGVIGTAFSVLMRMELMHPGDGILGGNYHLYNVLVTGHGLIMIFFMVMPAMIGGFGNWFVPIMIGAPDMAFPRMNNISFWLLPTSFILLIMSIFMDGPPGQTGVGGGWTIYPPLSSTAGQPGPAMDFAILSLHLAGASSILGAVNFITTILNMRTPGMTLHKMPLFAWSILVTAFLLLLSLPVLAGAITMLLTDRNFGTAFFDAQTGGDPVLFQHLFWFFGHPEVYILILPGFGMISHIVSTFSRKPVFGYLGMAYAMVAIGIVGFVVWAHHMYTVGLSTDTKAYFLAATMIIAVPTGI

SEQ ID NO: 104677 - protein, 527 aa, Unknown; identical to SEQ ID NO: 104558
  Bacterial polypetide isolated from the Sargasso Sea

SEQ ID NO: 104678 - protein, 398 aa, Unknown
  Bacterial polypetide isolated from the Sargasso Sea
MSSITANSHHTPTGWKRWAYSTNHKDIGTMYLVFAIIAGLIGSAFSVVMRMELMHPGDGILGGNYHLYNVLVTGHGLIMIFFMVMPAMIGGFGNWFVPIMIGAPDMAFPRMNNISFWLLPVAFILLLSSIFVDGPPGQTGVGGGWTIYPPLSSKTGQPGPAMDLAILSLHIAGASSILGAINFITTILNMRTPGMTLHKMPLFAWSILVTAFLLLLSLPVLAGAITMLLTDRNFGTAFFEAQTGGDPVLFQHLFWFFGHPEVYILILPGFGMISHIVSTFSKKPVFGYLGMAYAMVAIGVVGFVVWAHHMYTVGLDTDTKAYFLAATMIIAVPTGIKVFSWIATMWGGSISFKTPMLWAIGFIVLFTLGGVTGVVLANAGVDTALHDTYYVVAHFHYV

SEQ ID NO: 104679 - protein, 30 aa, Unknown
  Bacterial polypetide isolated from the Sargasso Sea
HFGFEAAAWYWHFVDVVWLFLFAAIYIWGS

SEQ ID NO: 104680 - protein, 353 aa, Unknown
  Bacterial polypetide isolated from the Sargasso Sea
MSTIVETHDHGHHGPAKGLTRWLFTTNHKDIGTLYLWFSFIMLFIGGGMAMVIRAELFQPGLQIVQPEFFNQMTTNHGLIMVFGVIMPAFVGLANWMLPMQIGAPDMALPRLNNLSFWLLPMAFGILISTLFMPEGGPNFGWTFYAPLSTTYAPSTVNFFIFSVHIMGVSSILGSINIITTIFNMRAPGMTLMKMPLFVWSWLITAYLLIAVMPVLAGVVTMMLMDINFGTSFFNAAGGGDPVLFQHVFWFFGHPEVYIMILPAFGIVSHIIETFSRKPIFGYSSMVYAMASIAILSFVVWAHHMFTVGMPLAGELFFMYSTMLIAIPTGVKVFNWVATMFKGSITFETPMLF

SEQ ID NO: 104681 - protein, 262 aa, Unknown
  Bacterial polypetide isolated from the Sargasso Sea
MSAEKKHDYHLVDPSPWPIYVSFSCLVLAVGAVYYMHYEVSWGMYLGFALLIYGAYMWFRDVVIEAEHQGHHTPVVQIHHRYGMTLFIASEVMFFVAWFWAYFDVSLFPNDFVGNVWPPKDIETFDPWDIPLINTLVLLLSGTTVTWSHHALLEDDRKGFIQGLVLTVILGVCFTALQAYEYHHATFAFSDHIYGSVFYMATGFHGFHVIVGTIFLAVCLWRGKLGHFNKDHHFGFEAAAWYWHFVDVVWLFLFAAIYIWGS

SEQ ID NO: 104682 - protein, 262 aa, Unknown; identical to SEQ ID NO: 104258
  Bacterial polypetide isolated from the Sargasso Sea

SEQ ID NO: 104683 - protein, 527 aa, Unknown
  Bacterial polypetide isolated from the Sargasso Sea
MSSVIESHHDDHHHGPAKGLMRWLLTTNHKDIGTLYLWFSFAMFLIGGAMAMVIRAELFQPGMQIVEPEFYNQMLTLHGLIMVFGAVMPAFVGLANWLVPMMVGAPDMALPRLNNLSFWLLPFAFGILLSSLFMEGGAPNFGWTFYAPLSTTYAPPSVTFFIFSVHIMGASSIMGSINVIVTIMNMRAPGMDLMKMPLFVWSWLITAYLLIAVMPVLAGAVTMMLMDIHFGTSFFNAAGGGDPVLFQHIFWFFGHPEVYIMILPAFGIVSHIIETFSRKQLFGYSSMVWAMLSIAILSFVVWAHHMFTVGMPLAAELFFMWATMLIAVPTGVKVFNWVATMFKGSITYETPMLFAISFVVLFTIGGFSGLMLAIVPADFQYHDTYFVVAHFHYVLVPGSIFSIMAAVYYWIPKWTGNMYDERLGRLHFWLSFVGVNVTFFPQHWIGLAGMPRRYPDYALQFADWNMVSTAGAFLFGASQILFLFIVLKTVMGGKKASPQVWEGARGLEWSVESPAPYHTFSTPPKVN

SEQ ID NO: 104684 - protein, 301 aa, Unknown
  Bacterial polypetide isolated from the Sargasso Sea
MSYQKYYVPEDSKYPIYIAIALFLLVMGAASTINDLGKPNSNSVYILYSGFTIFAITLYFWFRAVIREHIAGLDSAQLQKSFVFGMGWFIFSEVMFFAAFFGALFYVRNFSVPWLGGDGEKGLANMLWEGFEASWPVMSTPDAGSAYVLADKNMSWPGWGNALKWLPLWNTIVLLSSSVTVHFAHLALKNDNKKSFNTWLGVTVTLALIFVGLQAAEYYEAYAHYGLTLNSGIYGSTFFMLTGFHGFHVMMGGFMLAVMLSRSVFYNHFDPHNHFGFEAASWYWHFVDVVWVMLFLFVYIL

SEQ ID NO: 104685 - protein, 178 aa, Unknown
  Bacterial polypetide isolated from the Sargasso Sea
LFTVGGVTGVVLANAGVDTALHDTYYVVAHFHYVLSLGAVFAIFAGFYYWFGKMSGYEYSEWMGQLHFWLTFIGVNLVFFPQHFLGLAGMPRRYADYPDAFADWNYISSIGSYISVVGLVVFFANLIYAFAKKKKAAQNPWGEGATTLEWTVPSPPNFHTFDELPKFEDYEGTEKSSS

SEQ ID NO: 104686 - protein, 594 aa, Unknown
  Bacterial polypetide isolated from the Sargasso Sea
MSDAIIPEREVEEQELYHAKSWWTEKVFSQDAKIIGIQYFCTATAIALIGLVLSWFMRMQIGFPGLSIISESFYYQAITMHGMIMVVYFLTALFLGGFGNYLIPLMVGARDMVFPYLNMISYWTFLLACLVLVASFFTPGGPTGAGWTLYPPQAILGGTPGQESGIILMLISLSIFIVGFTMGGLNYIVTILQARTRGMTLMRMPLAVWGIFTATVLAMFAFPALLVSAIMMILDKTLMTSFFMPALVEMGEQLSYGGGSPILFQHLFWFFGHPEVYIVALPAFGIVSDVLSVHSRKNIFGYRMMVWAIVAIGALSFIVWAHHMYVSGMHPYFGFFFATTTLIIAVPTAIKVYNWVLTLWRGNISLTVPMLFCISFIITFLNGGLTGLFLGNVIVDVPLSDTYFVVAHFHMVMGIAPVQVVFAAIYHWFPLMTGRMYNETLGRLHFWFTFLGSYLIYFPMHYLGLIGVPRRYYEMGQTEALYTQSAADLNVFITLTALVTGFAQIFFFINVFWSRKYGVPAEKNPWQANSLEWRTPSMPPGHGNFGKELPVVYRWPYDFNVPGAKDDFVPQDVPNSDVELAEGFEGTEIKAEKT

SEQ ID NO: 104687 - protein, 262 aa, Unknown; identical to SEQ ID NO: 104121
  Bacterial polypetide isolated from the Sargasso Sea

SEQ ID NO: 104688 - protein, 306 aa, Unknown
  Bacterial polypetide isolated from the Sargasso Sea
MSAVIENHHDDHHHGPAKGITRWLYTTNHKDIGTLYLWFSFAMFLIGGAMAMVIRAELFQPGMQIVEPEFYNQMITLHGLIMIFGGVMPAFVGLANWLVPMMIGAPDMALPRMNNLSFWILPFAFFILLSSLFMEGGAPNFGWTFYAPLSTTYAPPSVTFFIFSVHIMGASSIMGSINVVVTIMNMRAPGVDLMKMPLFVWSWLITAYLLIAVMPVLAGAVTMMLMDIHFGTSFFNAAGGGDPVLFQHIFWFFGHPEVYIMILPAFGIVSHIIETFSRKQLFGYSSMVWAMLSIAILSFVVWAHHM

SEQ ID NO: 104689 - protein, 530 aa, Unknown
  Bacterial polypetide isolated from the Sargasso Sea
MSTLTQDQIAAHDEHHHGAPKGIMRWLLTTNHKDIGTLYLWFSFIMFLTGGAMAMVIRAELFQPGLQLVEPNFFNQMTTVHGLIMVFGAVMPAFTGLANWLIPMMIGAPDMALPRMNNWSFWILPFAFAILLSSLFMEGGGPNFGWTFYAPLSTTYSPDSTALFVFSIHIMGISSIMGAINVIVTIVNLRAPGMTWMKLPLFVWTWLITAFLLIAVMPVLAGAVTMVLTDKFFGTSFFEAAGGGDPVMFQHIFWFFGHPEVYIMILPSFGIISAIVPAFSRKPLFGYASMVYATASIAILSFLVWAHHMFTTGMPVFAELFFMYCTMLIAVPTGVKVFNWVATMWRGSLSFETPMLFAVAFIILFTIGGFSGLMLAITPADFQYHDTYFVVAHFHYVLVTGAIFSIMAAAYYWLPKWTGHMYSEKLGQWHFWCSVISVNVLFFPMHFLGLAGMPRRIPDYSIQFADVNQIVSIGGFAFGLSQLIFLVLVIKCIRGGEKAPAKPWEGSEGLEWTLPSPAPYHSFTTPPEVK

SEQ ID NO: 104690 - protein, 344 aa, Unknown
  Bacterial polypetide isolated from the Sargasso Sea
HKDIGTMYLIFAIIAGVIGTAFSVLMRMELMHPGDGILGGNYHLYNVLVTGHGLIMIFFMVMPAMIGGFGNWFVPIMIGAPDMAFPRMNNISFWLLPTSFILLIMSIFMDGPPGQTGVGGGWTIYPPLSSTAGQPGPAMDFAILSLHLAGASSILGAVNFITTILNMRTPGMTLHKMPLFAWSILVTAFLLLLSLPVLAGAITMLLTDRNFGTAFFDAQTGGDPVLFQHLFWFFGHPEVYILILPGFGMISHIVSTFSRKPVFGYLGMAYAMVAIGIVGFVVWAHHMYTVGLSTDTKAYFLAATMIIAVPTGIKYFLGSQPCGVDLFRLNTNGLGIRIYIFIYR

SEQ ID NO: 104691 - protein, 520 aa, Unknown
  Bacterial polypetide isolated from the Sargasso Sea
HDHNPGFIKRWFFSTNHKDIGTLYIIFAILAGLVGGFFSLLMRAELAAPGLDVVADGQVWNVIITAHGLLMVFFVVMPALIGGFGNWFVPLMIGAPDMAFPRMNNFSFWILVPALVLLVVSATIGTGAGTGWTIYPPLSNKLGHAGPSVDMAIFALHLAGASSILGAVNFITTILNMRTPGMTLHKMPLFVWAMLITAFLLLLAVPVLAGAITMLLTDRNFGTTFFNPAGGGDPVLFQHLFWFFGHPEVYIMILPAFGIVSQVISTFSRKPVFGYLGMVYAMISIGFIGFIVWAHHMFTVGMSADLRAYFMLATIIIAVPTGIKIFSWIATMWGGSLTFETPMLFAIGFVFLFTLGGVTGVILANAGIDTVMHDTYYVVAHFHYVLSMGAMFGIFAGIYYWFGKMSGRKYNEFLGKLHFWLFFIGVNVTFFPQHFLGLAGMPRRIPDYPDAYAGWNLVSTYGSYISFAATLIFLFAIVYALLYGKKEVANPWGEGADTLEWTLSSPPPFHQFETLPKFKG

SEQ ID NO: 104692 - protein, 35 aa, Unknown
  Bacterial polypetide isolated from the Sargasso Sea
FNKDHHFGFEAAAWYWHFVDVVWLFLFAAIYVWGS

SEQ ID NO: 104693 - protein, 538 aa, Unknown
  Bacterial polypetide isolated from the Sargasso Sea
MTISIDPQKNNNESLQPVGWLRYFSFSLDHKVIGIQYLVCGFLFYLIGGTLASAIRIELASPMSDFMPRDVYNQVLTLHGTIMIFLWIVPVVNGAFGNYLIPFYVGARDMAFPRLNAVAFWLIPPSGLMLVASYFVEGAAQAGWTAYPPLSITTPQSGQIIWILSVLLLGGSSIFGGINFIATIIKLRRPGLKLMQLPMYCWAMLGTSLLVVLSTPVLAGTLILLSFDIIANTGFFNPVLGGNVVVYQHLFWFYSHPAVYIMVLPAFGLVSEILPVHARKPLFGYTTMVFSIMGIVVLGLVVWAHHMFTSGTPPWMRLFFTIATAFIAVPTGIKFFNWVATLWGGKISINSAMLFSCGFIINFVFGGITGVALAQVPFDIHVHDTYFVVAHFHYIVYGGTVFIIFSSIYHWFPKVTGKMLNEKLGILHFIITFIGFNLCFAPQHWLGLNGMPRRVAEYDPQFQFVNQISSLGALLMAISTIPFLINVFLSVRNGKDAGDNPWNALTPEWLTSSPPPVENWEGEAPLVEEPYGYGKEIS

SEQ ID NO: 104694 - protein, 122 aa, Unknown
  Bacterial polypetide isolated from the Sargasso Sea
MINFINRWIFSTNHKDIGTLYLIFGAFSGVLGSCFSVLIRMELAQPGNQILAGNHQLYNVLITAHAFLMIFFMVMPALIGGYGNWFVPIMIGAPDHGIPTTKQHQFLVVATFTNSSIKQRTR

SEQ ID NO: 104695 - protein, 344 aa, Unknown
  Bacterial polypetide isolated from the Sargasso Sea
MNMRAPGVTLMKMPLFVWSWLITAYLLIAVMPVLAGAVTMMLMDIHFGTSFFNAAGGGDPVLFQHIFWFFGHPEVYIMILPAFGIVSHIIETFSRKQLFGYSSMVWAMLSIAILSFVVWAHHMFTVGLPLAAEIFFMWATMLIAVPTGVKVFNWVATMFRGSLTFETPMLFAVAFVVLFTIGGLSGLMLAIVPADFQYHDTYFVVAHFHYVLVPGAIFSIMAAVYYWIPKWSGNMYDERLGKLHFWLSFIGVNVTFFPQHFIGLAGMPRRYPDYALIFADWNMVSSIGAFLFGFSQLLFLFIVIKTVMGGKKATDQVWEGAKGLEWTVASPAPYHTFSTPPKVD

SEQ ID NO: 104696 - protein, 176 aa, Unknown
  Bacterial polypetide isolated from the Sargasso Sea
FSIGFVFLFTLGGVTGVILANAGIDTVMHDTYYVVAHFHYVLSMGAMFGIFAGIYYWFGKMTGRQYNEFFGKLHFWLFFIGVNITFFPQHFLGLAGMPRRIPDYPDAYAGWNLVSSYGSYLSFGATLIFFFAIVYALFFGKKAEANPWGEGADTLEWTLSSPPPFHQFETLPEFKE

SEQ ID NO: 104697 - protein, 52 aa, Unknown
  Bacterial polypetide isolated from the Sargasso Sea
YWTIFLAVCLWRGKLGHFNQDHHFGFEAAAWYWHFVDVVWLFLFAAIYVWGS

SEQ ID NO: 104698 - protein, 377 aa, Unknown
  Bacterial polypetide isolated from the Sargasso Sea
FIYKLSNVAYFVFAIHIMGASSIMGSINVIVTIMNMRAPGMTLMKMPLFVWSWLITAYLLIAVMPVLAGAVTMLLMDAYFGTSFFDAAGGGDPVLFQHVFWFFGHPEVYIMILPAFGITSHIISTFSRKPLFGHSSMVYAMVSIAVLSFVVWAHHMFTVGMPLVAELFFMWATMLIAIPTGVKVFNWCATLFKGSITYETPMLFAIAFVVLFTIGGFSGLMLAITPADFQYHDTYFVVAHFHYVLVPGSVFSIMAAVYYWLPKWTGNMYDEKMGRLHFWLSFIGVNITFFPQHFVGLAGMPRRYADYALQFAEWNAVSSVGAFLFGLSQLLFLYIVVKTVFAGKKATPQVWDGADGLEWTVDSPAPYHTFDVPPKVK

SEQ ID NO: 104699 - protein, 304 aa, Unknown
  Bacterial polypetide isolated from the Sargasso Sea
MSGGSYYVPDQSRFPIFMAVSLFLLVMGASSTINNLDDPSSNSVYILYFGFGCLFLTMFFWFRQVIKEHLAGLDSNQLKQSYVYGMAWFIFSEVMFFAAFFGALFYVRTLAVPWLAGEGSKGAYISAIELWPAFESSWPVMTTPDQGTEYDLADKSMAWPGWDHALKWLPLWNTIVLLSSSVTVHIAHLGLKKGNRKRFNTFLGITVFLALIFVGLQAAEYYEAYAHYGLTLNSGIYGSTFFMLTGFHGFHVMMGGFMLAIMLGRSVFAGHFEEHDHFGFEAASWYWHFVDVVWVMLFLFVYIL

SEQ ID NO: 104700 - protein, 530 aa, Unknown
  Bacterial polypetide isolated from the Sargasso Sea
MSTLTQDQIAAHDDHHHGAPKGIMRWLLTTNHKDIGTLYLWFSFIMFLTGGAMAMVIRAELFQPGLQLVEPNFFNQMTTVHGLIMVFGAVMPAFTGLANWLIPMMIGAPDMALPRMNNWSFWILPFAFAILLSSLFMEGGGPNFGWTFYAPLSTTYSPDSTALFVFSIHIMGISSIMGAINVIVTIVNLRAPGMTWMKLPLFVWTWLITAFLLIAVMPVLAGAVTMVLTDKFFGTSFFEAAGGGDPVMFQHIFWFFGHPEVYIMILPSFGIISAIVPAFSRKPLFGYSSMVYATASIAILSFLVWAHHMFTTGMPVFAELFFMYCTMLIAVPTGVKVFNWVATMWRGSLSFETPMLFAVAFIILFTIGGFSGLMLAITPADFQYHDTYFVVAHFHYVLVTGAIFSIMAAAYYWLPKWTGHMYSEKLGQWHFWCSVISVNVLFFPMHFLGLAGMPRRIPDYSIQFADVNQIVSIGGFAFGLSQLIFLVLVIKCIRGGEKAPAKPWEGSEGLEWTLPSPAPYHSFTTPPEVK

SEQ ID NO: 104701 - protein, 617 aa, Unknown
  Bacterial polypetide isolated from the Sargasso Sea
MWSKLTITLGGPVEVLEAADPFVVLGVLIIVSATLLAFTLVFVFYRKDPEAFDWDNFAPWLADWLTSTDHKKIGTLYFVAGLFFLGVGGIMAMIIRIQLSVPGNDFLTQEQYNQFFTLHGTTMIFLAAMPMINGFANWMIPLQLGAADLALPRINAMSFWLQPFAALLIFTGVFSGHGADTGWTGYAPYVVSEGAHYGTTMWAAGQIMLVASSTLTGINFLTTMAVMRAPGMGWMQMPLFSWSVLVANVMLFLSIPAFGVGLIQVYLDRVIGTAFYDIAAGGDPLLWSHLFWYFGHPEVYVVIVPSFGIISEVIATSSRRSVFGYRSMVYALAGIGVVAFIVYGHHMFTSGMSPTLRFVTMLTTMLVAVPTGIKIFNWLMTMHGGSLVYRTHTLWALGFLVTFTLGGISGMFFPSIAMDTHLHESYFVVAHFHYVLVGGTVFGFFAGIYYWWPKATGKMLSEKLGVLHFLTAFVSYNALFWPMHRLGVWGMTRRHHTYFVTTEEALGSLPMEAAGWNMFITVSGFIFFFSNFIMVFNMIVSSVRGEDAPDDPWGGWSFEWMTSSPPPNHTLYKLDDGSWGLPTLKDANEHIANEPGWLSSWFQRLMVEDEETGEASH

SEQ ID NO: 104702 - protein, 434 aa, Unknown
  Bacterial polypetide isolated from the Sargasso Sea
PPQAILEGTPGSGAGILFMLISLSLFVIGFTMGGLNYLITVLQARTRGMTLMRLPLTIWGIFTATVLAMLAFPALLVSSIMMTLDKVLGTSFFMPTIIKAGEVLEYGGGSPILFQHLFWFFGHPEVYIVALPAFGIVSDLISVHARKNIFGYRMMVWAIVGIGALSFFVWAHHMYVSGMNPWFGFFFATTTLIIAVPTAMKVYNWILTLWRGNIRINTVMLWCLGFIVTFVNGGITGIFLGNVSVDVPLSDTYFVVAHFHMVMGIAPLMVIMGAIYHWFPLVSGRLLDEKLGKWHFWATFLGAYSIYFPMHYLGFIGVPRRYFEMYDSPYMTSGVGLNEFISTAAFLVGAAQFILIYNIIKTLKTGKPAGKNPWQANSLEWFTSTVPPEHGNFGDRLPVVHRWAYDYSVPGAKEDYIPQTTPPSEVADTEVEKT

SEQ ID NO: 104703 - protein, 472 aa, Unknown
  Bacterial polypetide isolated from the Sargasso Sea
YRAELFEPGLQLMDPIRYNQLVTMHGLIMIFGGVMPAFVGLANWLIPLQIGAPDMAMPRMNNLSFWLLPTAFAILLSTAFMEGGMPGFGWTFYAPLSTNYPNVAYFVFAIHIMGASSIMGSINVIVTIMNMRAPGMTLMKMPLFVWSWLITAYLLIAVMPVLAGAVTMLLMDAYFGTSFFDAAGGGDPVLFQHVFWFFGHPEVYIMILPAFGITSHIISTFSRKPLFGHSSMVYAMVSIAVLSFVVWAHHMFTVGMPLVAELFFMWATMLIAIPTGVKVFNWCATIFKGSITYETPMLFSIAFVVLFTIGGFSGLMLAITPADFQYHDTYFVVAHFHYVLVPGAVFSIMAAVYYWLPKWTGNMYDEKMGRLHFWLSFAGVNITFFPQHFVGLAGMPRRYADYALQFAEWNAVSSVGAFLFGLSQLLFLYIVVKTVFAGKKATPQVWDGADGLEWTVDSPAPYHTFDVPPKVK

SEQ ID NO: 104704 - protein, 155 aa, Unknown
  Bacterial polypetide isolated from the Sargasso Sea
AITPADFQYHDTYFVVAHFHYVLVTGAVFSIMAGAYYWLPKWTGNMFNITLAKWHFWLSLVSVNVLFFPMHFVGLAGMPRRIPDYALQFADFNAIISIGGFAFGLSQLLFVVVVFKCARGGEKVPAKVWDGAEGLEWEVESPAPYHTFSTPPEIK

SEQ ID NO: 104705 - protein, 187 aa, Unknown
  Bacterial polypetide isolated from the Sargasso Sea
MMWALGFIFMFTVGGVTGVVLANAGVDTAMHDTYYVVAHFHYVLSLGAVFAIFAGFYYWFSKMSGYEYSEWLGQLHFWLTFIGVNLIFFPQHFLGLAGMPRRYADYPDAFAGWNYISSIGSYIAVAGLAVFFVNLIYAFAKKKAAAQNPWGEGATTLEWTVPSPPNFHTFEELPKFVDDQETRKSHS

SEQ ID NO: 104706 - protein, 235 aa, Unknown
  Bacterial polypetide isolated from the Sargasso Sea
MYTQTASHNDHHTPTGWKRWAYSTNHKDIGTMYLIFAIVAGVIGTAFSVLMRMELMHPGDGILGGNYHLYNVLVTGHGLIMIFFMVMPAMIGGFGNWFVPIMIGAPDMAFPRMNNISFWLLPVSLTLLILSIFADGPPGQTGVGGGWTIYPPLSSKAGQPGPAMDLAILSLHLAGASSILGAVNFITTILNMRTPGMTLHKMPLFAWSILVTAFLLLLSLPVLAGANNMLLTDRN

SEQ ID NO: 104707 - protein, 475 aa, Unknown
  Bacterial polypetide isolated from the Sargasso Sea
LYNVLITAHAFLMIFFMVMPALIGGYGNWFVPIMIGAPDMAFPRLNNISFWLLPPSLLLLLSSALVEVGAGTGWTVYPPLSHITSHSGGSVDLAIFSLHVSGASSILGAINFITTIFNMRGPGLLMHRLPLFVWSVLITAFLLLLSLPVLAGAITMLLTDRNFSTSFFDPSGGGDPILYQHLFWFFGHPEVYILILPAMGIVSHVIMTFSRKSIFGQIGMIYAMLSIGLLGFIVWAHHMYTVGLDVDTRAYFTAATMIIAVPTGIKIFSWIATMWGGSIHLRTPMLFAIGFIFLFTVGGLTGVILANAGIDIALHDTYYVVAHFHYVLSMGAVFGLFAGFYYWIGKISGYQYPETLGQIHFWLFFIGVNLTFFPMHFLGLAGMPRRIPDYPDAFAQWNVVCSYGSYLSILASVFFFYVVFKTLTGNDVVDENPWQFEEEESSVMSLEWTVASPPPFHTFEEIPAVKETQFPQLQK

SEQ ID NO: 104708 - protein, 224 aa, Unknown
  Bacterial polypetide isolated from the Sargasso Sea
SYVYGMAWFIFSEVMFFAAFFGALFYVRTFAVPWLAGEGEKGIGIAATELWQGFESTWPVITTPDQGEAYELAKKSMAWPGWDHALKWLPLWNTIVLLSSSVTVHFAHLALKNGNRKNFNILLGVTVFLALIFVGLQAAEYYEAYAHYGLTLNSGIYGSTFFMLTGFHGFHVMMGGLMLTIMLARSVFAGHFEDHDHFGFEAASWYWHFVDVVWVMLFLFVYIL

SEQ ID NO: 104709 - protein, 415 aa, Unknown
  Bacterial polypetide isolated from the Sargasso Sea
LNNLSFWLLPFAFGILLSSLFMEGGAPNFGWTFYAPLSTTYAPPSVTFFIFSVHIMGASSIMGSINVIVTIMNMRAPGMDLMKMPLFVWSWLITAYLLIAVMPVLAGAVTMMLMDIHFGTSFFNAAGGGDPVLFQHIFWFFGHPEVYIMILPAFGIVSHIIETFSRKPLFGYSSMVWAMLSIAILSFVVWAHHMFTVGMPLAAELFFMWATMLIAVPTGVKVFNWVATMFKGSITYETPMLFAISFVVLFTIGGFSGLMLAIVPADFQYHDTYFVVAHFHYVLVPGSIFSIMAAVYYWIPKWTGNMYDERMGRLHFWLSFVGVNVTFFPQHWIGLAGMPRRYPDYALQFADWNMVSTAGAFLFGASQILFLFIVLKTVMGGKKATRQVWEGAKGLEWSVESPAPYHTFSTPPKVN

SEQ ID NO: 104710 - protein, 491 aa, Unknown
  Bacterial polypetide isolated from the Sargasso Sea
LWFSFAMFLIGGAMAMVIRAELFQPGMQIVEPEFYNQMITLHGLIMIFGGVMPAFVGLANWLVPMMIGAPDMALPRMNNLSFWILPFAFFVLLSSLFMEGGAPNFGWTFYAPLSTTYAPPSVTFFIFSVHIMGASSIMGSINVVVTIMNMRAPGITLMKMPLFVWSWLITAYLLIAVMPVLAGAVTMMLMDIHFGTSFFNAAGGGDPVLFQHIFWFFGHPEVYIMILPAFGIVSHIIETFSRKQLFGYSSMVWAMLSIAILSFVVWAHHMFTVGMPLAAEIFFMWATMLIAVPTGVKVFNWVATMFRGSITFETPMLFAVSFVVLFTIGGLSGLMLAIVPADFQYHDTYFVVAHFHYVLVPGAIFSIMAAVYYWIPKWCGNMYDERLGKLHFWLSFIGVNVTFFPQHFIGLAGMPRRYPDYALQFADWNMVSSVGAFLFGFSQLLFLFIVVKTVMGGKKATPQVWEGAKGLEWTVASPAPYHTFSTPPKVD

SEQ ID NO: 104711 - protein, 187 aa, Unknown; identical to SEQ ID NO: 104176
  Bacterial polypetide isolated from the Sargasso Sea

SEQ ID NO: 104712 - protein, 374 aa, Unknown
  Bacterial polypetide isolated from the Sargasso Sea
IPNVAFFVFAVHIMGISSIMGSINVIVTIMNMRAPGMTLMQMPLFTWSWLITAYLLIAVMPVLAGAVTMLLMDAYFGTSFFDAAGGGDPVLFQHIFWFFGHPEVYIMILPAFGITSHIISTFSRKPLFGHASMIYAMSSIAILSFVVWAHHMFTVGMPLAAELFFMWATMLIAIPTGVKVFNWCATIFKGSITYETPMLFAIAFVVLFTIGGFSGLMLAITPADFQYHDTYFVVAHFHYVLVPGSVFSIMAAVYFWLPKWTGNMYDEKLGKLHFWLSFIGVNVTFFPQHFVGLAGMPRRYADYALQFAEWNAISSVGAFLFGFSQLLFLYIVLKTIFVGKKATPRVWDGAEGLEWTVDSPAPYHTFETPPKING

SEQ ID NO: 104713 - protein, 612 aa, Unknown
  Bacterial polypetide isolated from the Sargasso Sea
MSEDFNDNKTIQAQSSETISGGGAGITPDMDYVRPAEVGDQDLYHGHSFITKWIFCQDAKVIGVQYFLLATFTGIIGLILSWLMRLQLGFPGLAPFMTAEHYYQFVTMHGMIMVVYFLTALFLGGFGNYLIPLMVGARDMVFPYLNMVSFWSFFVAVAVLLASFFVPGGPTGSGWTLYPPQAILEGTPGSGYGIMLMCISLILFVAGFTMGGLNYLITVLQARTRGMTLMRMPLTVWGIFTATVLAMLAFPALLVGALMMSLDNVLGTSFFMPTILKAGEVLEYGGGSPILFQHLFWFFGHPEVYIVALPAFGIISDLISVHARKNIFGYRMMVWAIVGIGALSFFVWAHHMYVSGMNPWFGFFFATTTLIIAVPTAMKVYNWILTLWRGNIRLNTVMLWCLGFIVTFVNGGITGIFLGNVSVDVPLSDTYFVIAHFHMVMGIAPLMVIMGAVYHWFPLVAGRFLDEKLGKWHFWLTFLGAYSIYFPMHYLGFIGVPRRYFEMYDSPYVTSAIGMNEFISLAAFIVGAAQFILIYNIIKTLKTGKPAGHNPWQACSLEWLTPSVPPEHGNWGDRLPTVHRWAYDYSVPGAKEDFITQTTPPSEVTHTKVEKT

SEQ ID NO: 104714 - protein, 483 aa, Unknown
  Bacterial polypetide isolated from the Sargasso Sea
MSEDFNNNKTIQAQSSETISGGGAGVTPDMDYVRPAEIPDQDLYHGHSFITKWVFCQDAKVIGVQYFLTAVFTGIIGLILSWLMRLQLGFPGLAGFMTAEHYYQFVTMHGMIMVVYFLTALFLGGFGNYLIPLMVGARDMVFPYVNMVSYWMFFVAVGVLMASFFVPGGPTGSGWTLYPPQAILEGTPGSGMGILLMLISLSLFVIGFTMGGLNYLITVLQARTRGMTLMRMPLTVWGIFTATVLAMLAFPALLVSSIMMTLDKVLGTSFFMPTILKAGEVLEYGGGSPILFQHLFWFFGHPEVYIVALPAFGIVSDLISVHSRKNIFGYRMMVWAIVGIGALSFFVWAHHMYVSGMNPWFGFFFATTTLIIAVPTAMKVYNWILTLWRGNIRLNTVMLWCLGFIVTFVNGGITGIFLGNVTVDVPLSDTYFVIAHFHMVMGIAPLMVIMGAVYHWFPLVAGRMLDEGLGKWHFWLTFLGAYS

SEQ ID NO: 104715 - protein, 480 aa, Unknown
  Bacterial polypetide isolated from the Sargasso Sea
MSDEYENKSGYQAQSSETISGGGSGITPDMDYVRPAENPEQDLYHAHSFLEKWVFCQDAKVIGVQYFLTAVFTGIVGLILSWLMRLQLGFPGLAGFITAEHYYQFVTMHGMIMVVYFLTALFLGGFGNYLIPLMVGARDMVFPYVNMLSFWMFFVAVMVLMASFFVPGGPTGSGWTLYPPQAILEGTPGSGMGILLMLISLSLFVIGFTMGGLNYMITILQARTRGMTLMRMPLTVWGIFTATVLAMLAFPALLVSSIMMTLDKVIGTSFFMPTILKAGEVLEYGGGSPILFQHLFWFFGHPEVYIVALPAFGIVSDLISVHARKNIFGYRMMVWAIVGIGALSFFVWAHHMYVSGMNPWFGFFFASTTLIIAVPTAMKVYNWILTLWRGNIRINTVMLWCLGFIVTFVNGGITGIFLGNVSVDVPLSDTYFVVAHFHMVMGIAPLMVIMGAVYHWFPLVAGKMLNEKKGKWHFWTTFLG

SEQ ID NO: 104716 - protein, 612 aa, Unknown
  Bacterial polypetide isolated from the Sargasso Sea
MSDEYDNNKSYQAQSSEVLDGSAGSINPDMDYVRPAEIPEQDLYHAHSFIEKWIFCQDAKVIGVQYFLTAVFTGIVGLILSWLMRLQLGFPELAGFMTAEHYYQFVTMHGMIMVVYFLTALFLGGFGNYLIPLMVGARDMVFPYVNMLSFWMFFVAVAVLMASFFVPGGPTGAGWTLYPPQTILEGTPGSGTGILLMLISLSLFVIGFTMGGLNYMITILQARTRGMTLMRMPLTVWGIFTATVLAMLAFPALLVSAIMMTLDKVLQTSFFMPTILKAGEVLEYGGGSPILFQHLFWFFGHPEVYIVALPAFGIVSDLISVHARKNIFGYRMMVWAIVGIGGLSFFVWAHHMYVSGMNPWFGFFFATTTLIIAVPTAMKVYNWILTLWRGNIRINTVMLWCLGFIVTFVNGGITGIFLGNVSVDVPLSDTYFVVAHFHMVMGIAPLMVIMGAVYHWFPLVAGKMLSETLGKWHFWITFLGAYSIYFPMHYLGFIGVPRRYFEMYDSPYMTSTVGMNEFISVAAFIVGAAQFILVFNIIKTLKTGKKAEQNPWKANSLEWYTSTVPPEHGNFGERLPVVHRWPYDFSVPGAKDDFIPQTTAPSEVANTEVEKT

SEQ ID NO: 104717 - protein, 232 aa, Unknown
  Bacterial polypetide isolated from the Sargasso Sea
HSFESCGTVDGPGIRFITFFQGCLMRCLYCHNRDTWDTHGGKEVTVDELMKEVVTYRHFMNASGGGVTASGGEAILQAEFVRDWFRACKKEGIHTCLDTNGFVRRYDPVIDELLEVTDLVMLDLKQMNDEIHQNLVGVSNHRTLEFARYLSNKDIKVWIRYVVVPGWSDDDDSAHRLGEFTRDMGNVEKIELLPYHELGKHKWVAMGEEYKLDGVKPPKKETMERVKGILEQ

SEQ ID NO: 104718 - protein, 232 aa, Unknown
  Bacterial polypetide isolated from the Sargasso Sea
TVDGPGIRFITFMQGCLMRCQYCHNRDTWDLDGGKEVQVDELMSQIISYRPFLDASNGGVTASGGEAILQAEFVAELFKACKKEGIHTCLDTNGFVRKYTPVIDELLDNTDLVLLDIKQMNDDKHIELTKVSNHRTLQFAEYLAKRNQPTWIRYVVVGGFTDDEASALQLAEFIKPMKNIEKVELLPYHELGKHKWEAMGETYQLDGVAPPSRDTMEKIKAVFSSQGINAVY

SEQ ID NO: 104719 - protein, 241 aa, Unknown
  Bacterial polypetide isolated from the Sargasso Sea
MAVTGRIHSVESFGTVDGPGIRFITFMQGCLMRCQYCHNRDTWDLDGGKEVQVDELMSQIISYRPFLDASNGGVTASGGEAILQAEFVAELFKACKKEGIHTCLDTNGFVRKYTPVIDELLDNTDLVLLDIKQMNDDKHIELTKVSNHRTLQFAEYLAKRNQPTWIRYVVVGGFTDDEASALQLAEFIKPMKNIEKVELLPYHELGKHKWEAMGETYQLDGVAPPSRDTMEKIKAVFSSQG

SEQ ID NO: 104720 - protein, 272 aa, Unknown
  Bacterial polypetide isolated from the Sargasso Sea
MSVINRIPAVEVSATAAETSVTADASGVIGRIHSVETCGTVDGPGIRFIVFMQGCLMRCKYCHNRDTWDTQGGREVTVPELMSDITSYRHFMNASGGGVTASGGEAMLQQNFIAELFAACKEKGIHTCLDTNGFVRHYDEQLDKVLDNTDLVLLDIKQINDDKHIPLTHVSNKYTLEFARYLAAKGKTMWIRYVVVPTWSDDDESAEGLGQFIAELGECVEKVELLPYHELGKHKWDVLGDTYDLNGIKPPSKETMDRVQGILAKYHNNVKY

SEQ ID NO: 104721 - protein, 246 aa, Unknown
  Bacterial polypetide isolated from the Sargasso Sea
MAVTGRIHSVESFGTVDGPGIRFITFMQGCLMRCQYCHNRDTWDLDGGKEVQVDELMSQIISYRPFLDASNGGVTASGGEAILQAEFVAELFKACKKEGIHTCLDTNGFVRKYTPVIDELLDNTDLVLLDIKQMNDDKHIELTKVSNHRTLQFAEYLAKRNQPTWIRYVVVGGFTDDEASALQLAEFIKPMKNIEKVELLPYHELGKHKWEAMGETYQLDGVAPPSRDTMEKIKAVFSSQGINAVY

SEQ ID NO: 104722 - protein, 246 aa, Unknown
  Bacterial polypetide isolated from the Sargasso Sea
MAVTGRIHSVESFGTVDGPGIRFITFMQGCLMRCQYCHNRDTWDLDGGKEVQVDELMSQIISYRPFLDASNGGVTASGGEAILQAEFVAELFKACKKEGIHTCLDTNGFVRKYTPVIDELLDNTDLVLLDIKQMNDDKHIELTKVSNHRTLQFAEYLAKRNQPTWIRYVVVGGFTDDEASALQLAEFIKPMKNIEKVELLPYHELGKHKWEAMGESYQLDGVAPPSRETMEKIKAVFSSQGINAAY

SEQ ID NO: 104723 - protein, 234 aa, Unknown
  Bacterial polypetide isolated from the Sargasso Sea
MFKFLKVFLKSFTHKKISYSYGGIDSLVLNIFKNQKNGFYLDIGCGHPIKNNNTYLLNKRGWSGINIDLDKDNIDLFNSYRKKDVNIATAVSDKEGETDLYFYHNKSALNTISKENADFQKAKVSAIKKIKTQTINKIIENSPFKDRKIDFLSVDVEGSELAILKNFDFKKYSPKVIVVEYLDLSLKKLEIKNLNINNIIKSEIYKLIFSNNYTLANILHSDLVFINNNFRDQI

SEQ ID NO: 104724 - protein, 224 aa, Unknown
  Bacterial polypetide isolated from the Sargasso Sea
MKNLKNWDDNTWLSSKKYIKDFCAFVENKKKLKKDTKILDIGCGRARIISRLAAKYNFKVRPTGIDIIKHKNLDNNIKFINISALKFLKRTRKFDLILIKQAIHLMSKKNQTILLKLCKNSLSDKGKLLIFSLKTKNNQIPVFKLFKKKLNISLKKDEKIFLNIKKILKNVKISNFNFKVSLKKSDYIKMIKKRYISCLLKMKQSEINSGADEIKLKYKNQIKF

SEQ ID NO: 104725 - protein, 239 aa, Unknown
  Bacterial polypetide isolated from the Sargasso Sea
MTTINKEEIQKFSKLADEWWDVNGKFKPLHMFNPIRIEYIVEKIKDHFNRVDKGESPLQGIEILDIGCGGGLICEPLTRLGGSVTGIDASEKNINVAKLHAEKNDLKINYLNKSPEQMDTEKKFDIVLNLEIVEHVNDVNLYIESCSNLLKTNGLMFTATLNRTISSYLKAIIGAEYLLRWLPIGTHDWNKFIKPEELEKKLSSNSLRTVDVKGLEFIPLINKWKKTDNLSVNYIICSN

SEQ ID NO: 104726 - protein, 227 aa, Unknown
  Bacterial polypetide isolated from the Sargasso Sea
MNKINSIRKDWSLIETLIAEDRKILDIGCGDGGLMEQLENNRNAITHGIELNRDLAANAIARGFNVVHGNAELDLSQYSNNSFDYVILSQTLQAMMKPKDILSELLRIGSKAIVSFPNFGHWKIRLQLLISGKMPVTESLPYTWYDTPNIHFFTIKDFLNLCNEMNIVIEKSIGLTSKGKQFDISESVTGVNFFTHEAIFLLSYKNFEPIKIKSSKKVFAKNSVIAN

SEQ ID NO: 104727 - protein, 180 aa, Unknown
  Bacterial polypetide isolated from the Sargasso Sea
MQKKLKESEQYLPAEDTFFLADQLKDLSGKYALDIGCGSGYLTDILNSNFQLVVGTDISFNTLCTQNFKTQNSICCHSADALNLQFDLIICNLPYLATDEIIDVATDGGKDGLEIPLEIISSALPHIEKNGKFLFVTSSLSDYMGLIDFVNSKKFHAKIVDKKKLFFEELIIVEVKHSLS

SEQ ID NO: 104728 - protein, 180 aa, Unknown
  Bacterial polypetide isolated from the Sargasso Sea
MQEKLENSKQYLPAEDTFFLADNIEGETGNLALDIGCGSGYLTNILKNSFNLVIGTDISYYTLRQQNYKVDNVICCNSADALRINFDFIICNLPYLATDEIADVATDGGKDGLELPLVIIASALDHLSNDGKFIFVTSSLSDYMGLIDFVKSKKFTAKIISKKKLFFEELILVKVERLSS

SEQ ID NO: 104729 - protein, 164 aa, Unknown
  Bacterial polypetide isolated from the Sargasso Sea
MKTTTINKEEIDKFSKIAEEWWDPEGKFKPLHIFNPLRIKYIKNSIIKHFKIKKKKLPLSGLKILDIGCGGGLISEPMSRLGANITGIDASEKNIKIAKAHLKKNKLKINYRCASPENLNQKENFDVILNLEIIEHVEDVELFMEKSSKLLKKDGLMFVATINK

SEQ ID NO: 104730 - protein, 241 aa, Unknown
  Bacterial polypetide isolated from the Sargasso Sea
MTTINQEEIQKFSKLADQWWDANGKFKPLHAFNPIRIKYILDKCTFHFDIKKDQKKPLNKLKILDIGCGGGLVCEPLARLGAEVTGIDASYKNIEVAKIHSKKSNLNIKYVNTSPEKKIITEKFDVVLNLEVVEHVENLDLFLKSASDLLKKNGIMFIATINRTLESYIKAIVGAEYILRWLPIGTHDWQKFLKPIEIEKKNYHFNLKKIELDGLRFSIIFNKWSLTKDCSVNYIMVFQKN

SEQ ID NO: 104731 - protein, 184 aa, Unknown
  Bacterial polypetide isolated from the Sargasso Sea
MTNIASGETLRSDLKIISDLIPPSSRVLDIGCGDGALLSFLAENKNIDARGIELSQEGVNACVAKGLSVIQGNADTDLIDYPSNAFDYVVLSQTLQATRDPKEILTTLVRIGKNAIVSFVNFGHWRTRLSLMLNGRVPVPEKNGFNWYDNPNIHLCTILDFVDLCGNLGLKINIGLSLDRNSRV

SEQ ID NO: 104732 - protein, 204 aa, Unknown
  Bacterial polypetide isolated from the Sargasso Sea
MEGFPRVLDIGCGEGQTTRAASVGSQLSVGVDASWAQVSVAGERALSEKYVRGSASDLPFRASSFDAVLACLVFEHVTDMSVAVAEVSRILVPGGRFVLMLNHPLLQTPGSGWVEDHMSDPTDQYWRVGDYLTVQETVEEVELGVHIPFVHRPLSSYVNELSENELSVTRMLEPAPPPGFLTQSPAYSSAAHIPRLLVLICEKR

SEQ ID NO: 104733 - protein, 185 aa, Unknown
  Bacterial polypetide isolated from the Sargasso Sea
MQLARFLNNVFKKDGFILVDANSKSYIIGNPKSENPIKVKILNKNLHYKLLIHPDLYFGEAYTDGEITIENGTLTDFLDLSLMNFGRGDLNFFSYLLNRLRGSYRYLTNFNFIKKSKMNVSHHYDISDDLYDLFLDPKRQYSCAYFKNETDTLETAQNNKIQHIIKKLSIKPNQKVLDIGCGWGS

SEQ ID NO: 104734 - protein, 331 aa, Unknown
  Bacterial polypetide isolated from the Sargasso Sea
MQLARFLNKVFKKNGFILTDANSKDYIIGSPGKNPIKLKILNKNLHYKLLLHPDLYFGEAYTDGEIIIENGSLTDFLDLALMNFGRGDLNFFSYLINRLRGSYRYLTNFNFIKKSKMNVSHHYDISDDLYDLFLDSKRQYSCAYFKNENDSLETAQNNKIKHIIKKLNIKPNQKILDIGCGWGSLAIDIAKSAKCEVTGITLSENQINYCTKKAKEMNLENQIKFKLMDYRELNEKFDRIVSVGMFEHVGRKFYKKFFKQIENLLKDDGISLIHTIGSVNPPRDPHPWITKYIFPGGYTPSLSEVTTPIEKAGLIVTDIEVLRLHYSHTLR

SEQ ID NO: 104735 - protein, 189 aa, Unknown
  Bacterial polypetide isolated from the Sargasso Sea
MNSKKDFDKPLLLDIGCGKNKLSRPGYKIIGIDIWENSDADLIIPANKLPFDNESVDVIHTRHFLEHFTYDETVDLFSEFFRVLKPKSKLEIIVPHVSCIAAFQDPTHKAFFTKRSFYKYQHTGFSVKNIEFFWFRNPYKGWFPFLVYPINKLLNTFHGLERFASIIGGIYELQCVMEKDQLELDFLHT

SEQ ID NO: 104736 - protein, 96 aa, Unknown
  Bacterial polypetide isolated from the Sargasso Sea
MYLDFLTSLHKSTKRDYLKRVNDKDFPKNKAARLAKKWGYHYWDGDRRINYGGYKYIAGRWAKVAKKLIEHYNIKDGDRVLDIGCGKGYLLYEIYK

SEQ ID NO: 104737 - protein, 120 aa, Unknown
  Bacterial polypetide isolated from the Sargasso Sea
MNKINSIRKDWSLIETLIAEDRKILDIGCGDGGLMEQLENNRNAITHGIELNRDLAANAIARGFNVVHGNAELDLSQYSNNSFDYVILSQTLQAMMKPKDILSELLRIGSKAIVSFPNFD

SEQ ID NO: 104738 - protein, 203 aa, Unknown
  Bacterial polypetide isolated from the Sargasso Sea
MIKRTSKTYIEKTLSENPDWKILDIGCGYGANKHATTISDILDLSNHYKDKSFVKITEKKLPFKDKEFDFVIASHVAEHVEDVSYFLNELSRVGKKGYIEVPTRLEDNLVFENKKAHIWHLVFDDVNNQINISRKQQYFEPVLTVGTIKKLNEYFRESLVIELSWEDSIKFNMVENNLKTPVKISILNLLKKYFSKKIRLLIK

SEQ ID NO: 104739 - protein, 294 aa, Unknown
  Bacterial polypetide isolated from the Sargasso Sea
MQLARFLNSVFKKDGFILIDANSKNYIIGNPKNENPIKLKILNKHLNYKLLFHPDLYFGEAYTNGEIVIENGSLTDFLDLALMNFGRGELNFFSYLINRLRGSYRYLTNFNFIKKSKMNVSHHYDISDDLYDLFLDPKRQYSCAYFNDVNDSLETAQNNKISHIIKKLNIKPNQKVLDIGCGWGSLAIDIAKSANCEVIGITLSENQFNYCKKRAKELNLENQLNFKLMDYRELDEKFDRIVSVGMFEHVGRKFYRKFFTQVEKLLKDDGVSLIHTIGSVNPPRDPHPWITKYI

SEQ ID NO: 104740 - protein, 239 aa, Unknown
  Bacterial polypetide isolated from the Sargasso Sea
MTTINQEEIQKFSKLADEWWDADGKFKPLHKFNPIRIEYILNVATSHFKLSKSQKLPLKNLKILDIGCGGGLISEPMYRLGASVTGIDASKKNINVASLHAKKNGLKIKYINTTPEKNIINDKFDLILNLEVVEHVENLELFLKSSCGLLKENGIIFVATINRTIQSYIKAIVGAEYILKWLPIGTHDWQKFPKPEEIEKIFNQNNFKKIKLDGFQFNIISNKWRLSSDNSVNYMLVAK

SEQ ID NO: 104741 - protein, 227 aa, Unknown
  Bacterial polypetide isolated from the Sargasso Sea
MTTINQEEIQKFSKLADEWWDANGKFKPLHAFNPVRIKYIIDKCKYHFKLKKKDEKPLSTLKVLDIGCGGGLVCEPLSRLGADVTGVDASSRNIEVAKIHAKKSGLKIKYFNTSPEKKEVNEKFDVILNLEVVEHVEDLDLFLKSSSDLLKKNGIMFIATINRTFESYIKAIIGAEYLLRWLPIGTHSWEKFLKPEEIEEKLIKLNFNKLNLDGLKFNIISNNWSLS

SEQ ID NO: 104742 - protein, 266 aa, Unknown
  Bacterial polypetide isolated from the Sargasso Sea
TPKSDNPIKLKILDKKLHYKLLLQPNLHFGEAYTDGDIIIENGSLTDFLDLALKNIGRGEINFYSYLINRIRGSYRYLTNFNFIKKSKMNVSHHYDISDDLYDLFLDPKRQYSCAYFKNENDTLETAQNNKIQHIIKKLNIKENQKVLDIGCGWGSLAIDIAKSANCEVTGITLSENQYNYCNKKAKELNLENQVRFKLIDYRELDEKFDRIVSVGMFEHVGRKFYKKFFQQVEKLLKDDGVSLIHTIGSVNPPRDPHPWITNIYS

SEQ ID NO: 104743 - protein, 235 aa, Unknown
  Bacterial polypetide isolated from the Sargasso Sea
MKKLKNWDNKTWLSSKSYISQFNRFLKKKINLNKNSKILDIGCGRANIISALQKKYKFKNKPIGIDVVANKDVKKNIVFKKIEALKYLKKQEKYDLILIKQTIHFFTKTKLNRLLNLAKKRLNPRGRILIFSLKTKNNKIPCFKKMRKNLEKSLKRDEVLFKIIKKNLKKISYTNFNYKVNISKQKYVRMIRERYISCLLNMSNKEIKFGISEIKSKYKDQIKFTDTLKCISYRK

SEQ ID NO: 104744 - protein, 280 aa, Unknown
  Bacterial polypetide isolated from the Sargasso Sea
LINKFRGSYRYLTNFNFIKKSKMNVSHHYDIKDELYDLFLDPKRQYSCAYFKNENDSLEIAQNNKIQHIIKKLNLKPNQKVLDIGCGWGSLAIDIAKSSKCEVTGITLSEKQLKYCNEKVKEMNLENQVKFKLMDYRELNEKFDRIVSVGMFEHVGRKFYKKFFNQIEKLLKDDGISLIHTIGSVNPPRDPHPWITKYIFPGGYTPSLSEVSVPIERAGLVVTDIEVLRLHYSHTLRHWKENCMRNKEKIIQMFDEKFFRMWEFYLVGCEMAFKWGDQVV

SEQ ID NO: 104745 - protein, 282 aa, Unknown
  Bacterial polypetide isolated from the Sargasso Sea
LINPDLNFPEAYMRGEIKIDNGSLLDFLNLTFENIGREEINIYGYMFKKLLHIWRFATNYNLPKKSKKNVERHYDIGEDLYDLFLDKKHRQYSCAYFLNENDSLEDAQQNKINHIIKKLDLRPGQKVLDIGCGWGGMAFEIARQSQCEVTGVSLSENQINYCKKKAKELKMDNQVNFELRDYREVKEKFQKIVSVGAFEHFGRKFYKTFFKKVKDIMTDDGICLLHTIGSVDAPGPVQPFIQKRIFPGGIVPSLSEVVGPIEKTGLIIADCETLIHHYDKTL

SEQ ID NO: 104746 - protein, 152 aa, Unknown
  Bacterial polypetide isolated from the Sargasso Sea
MTTINQEEIQKFSKIADEWWDAKGKFKPLHRFNPIRIKYIIDKCTAHFNLSNNNNEILSGLKFLDIGCGGGLVSEPLCRLGANVTGIDASAKNIEVAKIHAKKNNLKIKYLATSPEKKIIQDKFDVILNLEVIEHVENVDLFMMAATDLLKK

SEQ ID NO: 104747 - protein, 69 aa, Unknown
  Bacterial polypetide isolated from the Sargasso Sea
MTSVNKKEIDKFSKIADEWWDPEGKFKPLHKFNPIRIKYIKENIINNFKLKNKYRPLSGINILDIGCGG

SEQ ID NO: 104748 - protein, 287 aa, Unknown
  Bacterial polypetide isolated from the Sargasso Sea
MKLSKIVRAISNKLTTSNYISKSKRNVAHHYDLSDKLYDLFLDPDRQYSCAYFNSPNDTLEQAQINKKELISKKLLLEENQSVLDIGCGWGGMASHIYKKSNASVVGVTLSEEQIAYAQQRKVREKLDKVEYRLQDYRNVNEKYDRIVSVGMFEHVGTAHYQEFFNKVYDLLNDSGVALIHTIGRLNEPGNTDPWIDKYIFPGGYIPALSETVSRVEKSGLSLTDVQILKFHYAETLKRWRYNFYDNIDKVKEIYDEKFCRMWDFYLSSSQASFEESTLVVFQLQLS

SEQ ID NO: 104749 - protein, 126 aa, Unknown
  Bacterial polypetide isolated from the Sargasso Sea
MIKRTSKFHIEKILSENPDWKILDIGCGYGANKFATTISDIMDLSEHYKEKTFVKITEKKLPFKDKEFDFIIASHVIEHVDDISYFLNELTRIGKKGYIEVPTRLEDNLVFENKKAHLWHLVFDDV

SEQ ID NO: 104750 - protein, 91 aa, Unknown
  Bacterial polypetide isolated from the Sargasso Sea
MSLTDEGHYGPKQLNLLKVVWGEGFLSPGGTDEIDEIMTGVNAKDKTVLDIGCGCGGAAFHLLKKYNVKSVEGIDPEPLVIQTANQLAIKN

SEQ ID NO: 104751 - protein, 48 aa, Unknown
  Bacterial polypetide isolated from the Sargasso Sea
NANGKTVLDIGCGCGGAAFHLLKKYNVKSVEGIDPEPLVIKTANQLAI

SEQ ID NO: 104752 - protein, 115 aa, Unknown
  Bacterial polypetide isolated from the Sargasso Sea
MTNTVDQREIEQFSSLSNRWWDKSGPFAALHKMSNARIEFIKLNASRITNKVHESSKSLDGISCLDVGCGGGILSEPLTRLGAAVTGIDASKTAIQTAKKHALKSRLKINYKCIT

SEQ ID NO: 104753 - protein, 180 aa, Unknown
  Bacterial polypetide isolated from the Sargasso Sea
MQTKLKRSEQYLPAEDTFFLADIIEKESGNMALDIGCGSGYLTNILKNSFNLVVGTDISYNTLRVQNYKVENVVCCNSADALQLKFDLIICNLPYLATDEIIDVATDGGKDGLELPIEIISSALSHISNNGKFLFVTSSLSNYTELINFVESKNYSAKIISKKKLFYEELIIVKVENLLS

SEQ ID NO: 104754 - protein, 183 aa, Unknown
  Bacterial polypetide isolated from the Sargasso Sea
NVLDIGCGYSPHPAASTICDVQDFEKNYLDKKFVQLKEKKFPFKDKEFDFVIASHVIEHVEDVDFFIKELQRVAKKGYIEVPTKLEDNLVFENKNDHVWHMDFDDVDNKLIITKRIQIIEPILTVSSIKKFNENFRKSLVIELLWEDKINYRVESHDVTNDNKISILNLVRKYISKKIRTIFK

SEQ ID NO: 104755 - protein, 227 aa, Unknown
  Bacterial polypetide isolated from the Sargasso Sea
MNNLRSIRKDWDLIESLIKDNSRILDIGCGEGDLIQQLEKNLTAKVHGIEKSRELALKGIAKGLNVTHGDAEKDLLQYSNHSFDYVILSQTLQAMIEPKKILKELLRIGSKAIVSFPNFGHWKIRLQLLFNGKMPITEGLPYSWYDTPNIHFFTLKDFQNLCSEMNIVIENSIGLTNKGKQFSINDSLLPANIITNEAIFLLSYKDFEPIKLKSTNKIFNKNSAIVN

SEQ ID NO: 104756 - protein, 108 aa, Unknown
  Bacterial polypetide isolated from the Sargasso Sea
MTTINEREIQKFSKLADEWWDANGKFKPLHVFNPIRIKYIIDKCSSHFNLEKKGKEPLSTLKVLDIGCGGGLVCEPLSRLGASVTGIDASSKNIEVAKIHAKKNNLEI

SEQ ID NO: 104757 - protein, 82 aa, Unknown
  Bacterial polypetide isolated from the Sargasso Sea
MSEVNKNQKDFWSGKGGDIWVERQNAMDNMLSPLGEAALNKLNFNEEENVLDIGCGCGDTTLNIAKRIGPLGNVTGLDISEP

SEQ ID NO: 104758 - protein, 181 aa, Unknown
  Bacterial polypetide isolated from the Sargasso Sea
MVDANSKNYIIGNPKSENPIKLRILNKNLHYKLLFHPDLYFGEAYMNGEITIENGTLTDFLDLSLMNFGRGNLNFFSYLINKFRGSYRYLTNFNFIKKSKSNVSHHYDISEDLYNLFLDPKRQYSCAYFKNETDSLETAQNNKIQHIIKKLNIKPNQKVLDIGCGWGSLAIDIAKSANCEV

SEQ ID NO: 104759 - protein, 131 aa, Unknown
  Bacterial polypetide isolated from the Sargasso Sea
MTTINKEEIQKFSELADEWWNPEGKFKPLHMFNPIRIEYIVEKIKEHYGLKNHNDYNLKGFKILDIGCGGGLISEPMCRLGANVTGIDASDRNIKVAKLHSSKQQLKINYLIKSPEQLNEVEKYDVILNLE

SEQ ID NO: 104760 - protein, 194 aa, Unknown
  Bacterial polypetide isolated from the Sargasso Sea
EFKVIADLLPDNSKVLDIGCGDGSLMYLLKNKKNIEVRGLELDQNNVQQCIHKGLPVIQGNAETELHQFPNQSFDYVVLSQTLQAFYNPEKVLRELLRIGKSVIISIPNFGYWKVRTKLLFFGKMPVTKTLPNTWYNTPNLHMCTIKDLFNFCDEKNINIIKVVGVNENQTSLIKKGNLEIKNLFSKLGIFLIG

SEQ ID NO: 104761 - protein, 236 aa, Unknown
  Bacterial polypetide isolated from the Sargasso Sea
MASVVIKNWDNKTWLSSQNYINSFNNFLIKNTKINSNFKILDIGCGRGKILGSLKSRLKLKYKPLGIDIVNHKDRDKRINFKKANILNLSLTKNQKFDLILIKQTIHLIKLSEVKKLLKSLRKILNTKGKIMIFTLDTENNEIPTFKLMKLKLNKSLIRDKKIFKIITNLYPQRIQKKFIFNVRISKKKYLGMINNRYISTLIPLSKKQLIQGIEEIKLSYKNQLKFKDKLTCIIL

SEQ ID NO: 104762 - protein, 125 aa, Unknown
  Bacterial polypetide isolated from the Sargasso Sea
MTNLINQNLISSLINNHDKVLDIGCGSGELLYFLEKTKNIQGQGIEISHLGVKESVSKGLSVIQGDADEDLINFPDHTFDIVILSDTLQATHKPKEVLEQMLRIGKKCIICIPNFGYWKYRLQIL

SEQ ID NO: 104763 - protein, 76 aa, Unknown
  Bacterial polypetide isolated from the Sargasso Sea
MTTINKDEIQKFSNLADEWWDPNGIFKPLHMFNPTRIEYILDDISKYFSLDKNKQFMLKKFEILDIGCGGWLMSEP

SEQ ID NO: 104764 - protein, 222 aa, Unknown
  Bacterial polypetide isolated from the Sargasso Sea
MEDTNKKLILDIGCGSKKKPGSIGIDYSYSTGVDHVLNIENDALPFADESVDYIYSSHCFEHLKDEGVGNVWKEISRVAKNNATIEIWTPYPHTDQQWLLGHVAGWGPLRWDHLSSSHRDIYSNSFLDGGYWRWNEAQFVIKPETIKELDEMNIPHEFAIRHMNNICTEWGCFFSYVKEDPGIHAPKRSISLGGRYSCDEYVKFEGKRTELHAPKKKHFLRR

SEQ ID NO: 104765 - protein, 173 aa, Unknown
  Bacterial polypetide isolated from the Sargasso Sea
MVDFTQARQNMIDCQLRTNEIADEALVEAFLHVPREVFVEPKFQGVAYTDNDVSIGFGRHLIAPMIFGRLLQALNAQPEEVALDIGCGTGYSSSVLAQLVTTVVALESEKQLALTAEKNFRELAVDNAVLVEGVLEEGYATQGPYDIINFSAGIPFIPSTLKSQLSDGGRLCA

SEQ ID NO: 104766 - protein, 272 aa, Unknown
  Bacterial polypetide isolated from the Sargasso Sea
ILLAILGDNPIKLKILKKNLHYKLLFHPDLYFGEAYTDGEIIIENGTLTDFLDLALMNFGRGNLNFFSYLINRLRGSYRYLTNFNFIKKSKMNVSHHYDISDDLYDLFLDPKRQYSCAYFKNENESLETAQNNKIQHIIKKLNIKPNQKVLDIGCGWGSLAIDIAKSSSCEVTGITLSENQLNYCKKKTKEMNLENQVKFKLMDYRELNEKFDRIVSVGMFEHVGRKFYNKFFKQIENLLKDDGISLIHTIGSVEPPRDPHPWITKYIFPGG

SEQ ID NO: 104767 - protein, 245 aa, Unknown
  Bacterial polypetide isolated from the Sargasso Sea
HYCNKCYLIYKSKDSENMIINVNEGDYYSLKKIGSKVNDRYIKHFNRRAKDHYAHIESYLPKNSNKCALDIGCGAGLFIAHLKSKGWQVNGIEPDPLMYNHAKNVMGLDVEQTTFDVWKQDKKYGLIYLSHVLDDLPNINQVIEKITEHLEPNGILFIEVPNFSWSFRMNFEKKEDLYINKYFFSIASLTSLLTNNNFNILNTKTFQLVHRNTFFQKLISPIMLLMKLKPKKYRPYLRIISRKNV

SEQ ID NO: 104768 - protein, 166 aa, Unknown
  Bacterial polypetide isolated from the Sargasso Sea
MRKDSIQSVLDIGCGPGHLVVKLLEIGKDVTALDIAPNMLEITQLRVDSMNLKSNFKTILADYSEHKFDEQFDAISVMGFFDYVEDPVSVLKKLLLDAKKEIYISIPGDTGFLAWQRKVRYKQRNCPLYLYSRESLTQHLKDAGCYEHTEIVDTERGFYVVIRKQS

SEQ ID NO: 104769 - protein, 268 aa, Unknown
  Bacterial polypetide isolated from the Sargasso Sea
MSFKILKFILKKLIKSRSILIKSDNSEYIIDNGNDAVILKINNKNFLKKIYYAPSLVLTEGYMNKDYELENASFYEFSDLLIENYNKYLEKVTKSIFFRIFLIINPFFQLNFVKKSKNNIANHYDLSDKLYDLFLDETRQYSCAYFEKDTDTLSDAQNNKMNRLADKLLLNSSDNVLDIGCGWGSLSKNFVDNYKCNVKGISLSEEQIKYCNEQLENNNNREKLNYSLQDYRDENRSYSKIVSVGMFEHVGKPFYKTYFKKIHELLTR

SEQ ID NO: 104770 - protein, 117 aa, Unknown
  Bacterial polypetide isolated from the Sargasso Sea
MSLTDEGHYGPKQLNLLKVVWGEGFLSPGGTDEIDEIMTGVNAKDKTVLDIGCGCGGAAFHLLKKYNVKSVEGIDPEPLVIQTANQLAIKNNLQDVTIFKQINPGPLDYDDESFDMI

SEQ ID NO: 104771 - protein, 211 aa, Unknown
  Bacterial polypetide isolated from the Sargasso Sea
MSLTDEGHYGPKQLNLLKVVWGEGFLSPGGTDEIDEIMTGVNAKDKNVLDIGCGCGGAAFHLLKKYNVKSVEGIDPEPLVIQTANQLAIKNNLQDVVTFKQVNPGPLNYDDESFDMIFSKEAFLHIPNKEALLKNVHRILKPGGLIVVSDWMRMDDNPPSKQMQEYIDAEGLDMLMCSLEKYKELLQENNFTDIVIKDRHDWYLKKAKKEL

SEQ ID NO: 104772 - protein, 69 aa, Unknown
  Bacterial polypetide isolated from the Sargasso Sea
MNNIISIRKDWNLIESLIRENARILDIGCGEGDLIQQLEKNLSAKVHGIEKKPKTSLERNCQGTKCNPR

SEQ ID NO: 104773 - protein, 201 aa, Unknown
  Bacterial polypetide isolated from the Sargasso Sea
METPDQHRKFYDDWAESYDSGFAASKGYDYPRLIAEYFAGRVSPDQSPVLDIGCGTGLVGVSLREEGWSSELTGVDISQGMLEVAERKKVYQKLICADLNETLQLPQPHFGGMISAGTFTHGHLGPEVLFHLFSLARPGAHAVIGINAKHHGNQDFSGAFREWEEKGIVGKTKWTEIQIYQAPEGKEPEKKLALIADFKIL

SEQ ID NO: 104774 - protein, 172 aa, Unknown
  Bacterial polypetide isolated from the Sargasso Sea
MTTVNKEEIQKFSKIADEWWDTKGKFKPLHMFNPTRIKYIKEKCIYHFKLKENNLKPLASLEILDIGCGGGLISEPMHRLGAKVTGMDASERNIAVAKLHAKKNGLNINYIKSSPEKNTIKKNFDVILNLEIIEHVQDVNLFLKSCSKMLNKGGIMFVATLNRTFESYIKAI

SEQ ID NO: 104775 - protein, 152 aa, Unknown
  Bacterial polypetide isolated from the Sargasso Sea
MKKSFVTELHKKTKRNYKERMINNKVKCMKIAKMYSKDYWDGNRKFGYGGYRYIDGYWKKTALRIIKNYSLKGNSKVLDIGCGKGFLIFEIKKLIPSINIVGIDNSQYAILNAKNEIKKNLRVFDARKKLPFKKKSFDLVISLGTLHNFSLK

SEQ ID NO: 104776 - protein, 79 aa, Unknown
  Bacterial polypetide isolated from the Sargasso Sea
MTDLVVEGGRVLDIGCGEGQVARLLSSNSTKVFGVDPAWSQVSEATRRSTREVYGQASATALPFAAEVFDTAVACLVLS

SEQ ID NO: 104777 - protein, 240 aa, Unknown
  Bacterial polypetide isolated from the Sargasso Sea
QKDKKEHIIKKLQINEKMNVLDIGCGWGGMAIEIAKSTGAKVKGITLSENQFKTASERAQKEGLSDKVSFSLQDYRNEKNQYDRIVSVGMFEHVGVKYFRTYLKKANDILKDNGVFLLHTIGQRGIPTATSPWIRKYIFPGGYIPSLSEIMKESQKLNINVTDIEVLRLHYAYTLSHWYKNIIRNKDKIIKMFDQRFYRMWEFYLLASKYSFVNMGNVVFQIQIAKNINNLPLTRNYIYN

SEQ ID NO: 104778 - protein, 141 aa, Unknown
  Bacterial polypetide isolated from the Sargasso Sea
MTDDAIKHSSETAYRLETPDQHRKFYDDWAESYDSGFAASMGYDYPRLIAEHFVGRVNPDQSPVLDIGCGTGLVGASLRNQGWSSELTGVDISQGMLEVAERKKVYEKLICADLNETLQLPQSHFRGMISAGTFTHGHLGP

SEQ ID NO: 104779 - protein, 200 aa, Unknown
  Bacterial polypetide isolated from the Sargasso Sea
RPRTQHRKFYDDGAESYDSGFAASKGYDYPRLIAEYFIRRVSRDQSPVLDIGCGTGLVGVSLRKQGWSSELNGVDISQGMLEVAEKKKVYEQLICADLTNSLQLPQSHFGGMISAGTFTHGHLGPEVLFHLFSLARPGAHAVIGINAEHYGNQEFSGAFKEWEEKGIVGKTEWLEIQIYQAPDGKETEKKLALIVDFKIL

SEQ ID NO: 104780 - protein, 147 aa, Unknown
  Bacterial polypetide isolated from the Sargasso Sea
MSTMTTINNKEIQKFSKLADEWWDANGKFKPLHAFNPIRIKYIIDKCSSHFSIQKDSKKFLSPLNILDIGCGGGLVCEPLSRLGAKVTGIDASYKNIEVAKIHAKKNNLKINYLNTSPEKEDINEKFDVVLNLEVVEHVENLDLFLK

SEQ ID NO: 104781 - protein, 170 aa, Unknown
  Bacterial polypetide isolated from the Sargasso Sea
MIKRSSKFHIEKTLLENPNWKILDIGCGYNANNFATTLSDITDLSEYYKEKTFVRITEKKLPFKDKEFDFVIASHVVEHVKDIKYFLNELNRIGKKGYIEVPTRLEDNLVFENKKAHLWHLVYDDVKNKLIIYDKIQYFEPIFSIGTIKKFNKYFRESLVIELFWDGTIE

SEQ ID NO: 104782 - protein, 226 aa, Unknown
  Bacterial polypetide isolated from the Sargasso Sea
ILKGLNLKNKKVLDIGCGTGGAVFHMIEKYGAKEVIGIDPEPLVIETANNLALKKNLSDKAKFICTKPGEYKFEDKSFEAVFSKEAFLHIIDKKNLLKEINDILADDGILAVGDWMRNDDGEPSEQMKEYIAAEGLDMFMCSLEKYESLLKETGFKVLSLNDRNKWYLEKVKTEISDIKGPLYDDVVNLIGKEEADGALEIWEKLLGVVEKGEHRPGNFQAVKIST

SEQ ID NO: 104783 - protein, 138 aa, Unknown
  Bacterial polypetide isolated from the Sargasso Sea
MKKDISIRKDWKLIESMIDSNSRVLDIGCGDGGLIKQLEKNIAAKTSGIEINPKLVQTAIGDGSKVVLGNAEQDLEQYSNHSYDYVILSQTLQAMLKPKSVLLELLRIGRKAIVSFPNFGYWQIRLQLLLLGKMPITK

SEQ ID NO: 104784 - protein, 71 aa, Unknown
  Bacterial polypetide isolated from the Sargasso Sea
MKNNTINKKEIEKFSKIAEEWWNPNGKFKPLHKFNPIRIKYIKENIVNDFKIKKKIKPLHGLNILDIGCGG

SEQ ID NO: 104785 - protein, 171 aa, Unknown
  Bacterial polypetide isolated from the Sargasso Sea
MGSIPNKTNINSRELIWSEENALWYADQYGNHISNELTINSIPLDPNDILLDIGCGIGTAVKIAAKRCKKGKVYGVDPIETMIKIAKKDQVKNSNIEFSIGIAEDIPLQNESVNKIITINSIHHWSDYKKGLSEVKRVLISDGLFFISSDIVNNNDCGHGPGPLQANEDIG

SEQ ID NO: 104786 - protein, 177 aa, Unknown
  Bacterial polypetide isolated from the Sargasso Sea
MSEINKNQKEFWSGKGGDIWVNQQEAMDSMLSPLGKAALNKLNLDQKENILDIGCGCGQTTLEIAEMIPEGKITGLDISVPMLERAKDTAMKKNLPNVSFECKDVQTDDLGNSTFTKCFSRFGVMFFEDPVRAFKNINSSLVDGGSLSFVCWQAPSLNPWQSLSVRAVKKYLDLPSP

SEQ ID NO: 104787 - protein, 188 aa, Unknown
  Bacterial polypetide isolated from the Sargasso Sea
MTTINKEEIQKFSKLADEWWDAKGKFKPLHMFNPIRIEYITEKIKSHFNLSNDLGNNFLQGKKILDIGCGGGLISEPLARLGGAITGIDASKKNIEVAKLHSKKGNLKINYQNKSPEQLDSREEFDIILNLEIIEHVEDVNLYLKSCSDLIKKGGLMFTATLNRTAISYVKAIVGAEYILRWLPMERT

SEQ ID NO: 104788 - protein, 224 aa, Unknown
  Bacterial polypetide isolated from the Sargasso Sea
NQSVLDIGCGWGGMASHIYKKSNANVVGVTLSEEQIAYAQQRKVREKLDKVEYRLQDYRNVNEKYDRIVSVGMFEHVGTAHYQEFFNKVYDLLNDSGVALIHTIGRLNEPGNTDPWIDKYIFPGGYIPALSETVSRVEKSGLSLTDVQILKFHYAETLKRWRYNFYDNIDKVKEIYDDKFCRMWDFYLSSSQASFEESTLVVFQMQLSKNKKTVPDKRDYMLME

SEQ ID NO: 104789 - protein, 201 aa, Unknown
  Bacterial polypetide isolated from the Sargasso Sea
NSKILDIGCGRANIISALQKKYKFRNKPIGIDIVANKDVKKNIVFKRVNALKYLNKNEKYDLILIKQTIHFFSKSNLNRLLSLSKKSLNNNGKILIFSLKTNNNKLPCFKKMRKNLEKSLKRDEVLFKIIKKKFKEISYANFNFKVNISKQKYIRMIRERYISCLLNMSNKEIKLGISEIESKYKNQIKFTDTLKCISYRK

SEQ ID NO: 104790 - protein, 194 aa, Unknown
  Bacterial polypetide isolated from the Sargasso Sea
LKKKILDIGCGMGGFIEIAKKNKWISEGIEFNKYASKYLRKKGFKVYNDYLENLNLKKDYSCVSMWNLFEHLENPHQMLKNIKKVLVPGGLVFVLVPNIDGLVNRILKKDAVAFAGYTHLNFYNHKTLMKTFKKNEFRVLHFETIFTEIESIKNYLNFEDPYFGESNKNQNYFSSKFLHKNYLGSKLMMIAQNK

SEQ ID NO: 104791 - protein, 156 aa, Unknown
  Bacterial polypetide isolated from the Sargasso Sea
MKILDKSLHWKLLINPDLYLGEGYMNGSIIIENGSLTEFLDIALKNVGRKPTNELTNILARFRRIYRYLTNFNLIGKSKENVAHHYDISEKFYDLFLDEKRQYSCAYFKDEDNTLEEAQNNKIDHIIKKLNLKPNQRVLDIGCGWGTLAIDIAKKT

SEQ ID NO: 104792 - protein, 219 aa, Unknown
  Bacterial polypetide isolated from the Sargasso Sea
MLFNDGGAYETSMGTWSRLVGEVFIKWLRADGNLKWLDVGCGNGAFSGLIKTSCFPSQVDAIDPSAEQIDFARSRSDAENVNFEVGDAMSIASDDNTFDIAVMALVIFFVPDPPKGLSEMVRVVKRGGLVTSYTWDTINKGSPSSLITGHLTEMGFKPDAPPNPQVSEMSALNKLWSSGGLVDLRSDVITVERRFKDIDEYWKIASLFPKYSERIVPLF

SEQ ID NO: 104793 - protein, 282 aa, Unknown
  Bacterial polypetide isolated from the Sargasso Sea
GREDTNIFNKIINSFRGSYRALTNFNFISKSKKNVAHHYDISEKLYDLFLDKNRQYSCAYFKNKNDSIDQAQINKINHIIKKLNLKKNQKVLDIGCGWGSLAIEIAKQSQCEVVGITLSENQLNYCKENAKKNNLENQVQFKLLDYREMKEKFDRVVSVGMFEHVGRKFYKRFFNKVSELLNENGLALIHTIGSINSPRDPHPWITKYIFPGGYTPSLSEVALPIEKSGLIISDLEVLRMHYAHTLRHWKDRFLGNRDKVLELFDEKFIRMWEFYLVGCEMA

SEQ ID NO: 104794 - protein, 272 aa, Unknown
  Bacterial polypetide isolated from the Sargasso Sea
SLVLTEGYMDKDYELENTSFFEFSDLLIENYNKYLEKISNTIFFRVFLIINPLFQLNFIKNSKNNVASHYDLSDKLYDLFLDETRQYSCAYFEKDTDTLNDAQNNKMNRLADKLLLNSSDNVLDIGCGWGSLSKNFANNYKCNVKGISLSEEQIKYCNEQLENNENKEKLNYSLQDYRDENNSYTKIVSVGMFEHVGKPFYKTYFKKINELLSDEGIAVVHTIGNIRTPKLTPTFIRKYIFPGGYIPSLSEIMPAIERSGLIISDIEVLRLH

SEQ ID NO: 104795 - protein, 128 aa, Unknown
  Bacterial polypetide isolated from the Sargasso Sea
MNIKSKNEEFTLFNQLSDEWWDEKGKFRILHQIKSHRMTYILQQINKKNIKKLKILDIGCGGGIICEPLARLGAKVTGIDFAPNNIKAAKLHSKKNKLKINYIYKDIEKSKIDEKFDIILMVEVLEHL

SEQ ID NO: 104796 - protein, 221 aa, Unknown
  Bacterial polypetide isolated from the Sargasso Sea
MSKSADRFFKLSYWLRKFYVSKFSNFFFSNETIRKNVFTNIYLSNHWQNYFKINLQKSRSGPGSDLNNTSNMSKELEKFFVSKNIKKILDIGCGDFIWMNLLLNNYYKYDKYLGLDIVDELIKDNNLKYSNDKISFKTFDLVKDEIPKGFDIILIRDVFIHLKNEQIINFLNHLKNLDIKFFGVTSTPSLNKNNELKTVGRYRDINKEIEPFNLKDFLHKI

SEQ ID NO: 104797 - protein, 229 aa, Unknown
  Bacterial polypetide isolated from the Sargasso Sea
KKDICLELINFYKNLKINRDRMKFENALDIGCGSGFMTNQINRLENFSKIHLIDISKKMISKAKQNLSNEKFSFEVADFDNFKCYGIYDLVFSNMSLHWSGNFTKLFFNLLNQIPCGGSFIFSIPNSIKFDFESSEISKDFFEKLINMLPDSDDLNRMIDKDKFYFLSKKKVFSEKFKKPLDFFLNLKSIGANINLKKTKINLFFLRRMTSEIKINYHISFFFIKKIKE

SEQ ID NO: 104798 - protein, 72 aa, Unknown
  Bacterial polypetide isolated from the Sargasso Sea
MSTTINKEEIQKFSRLAEEWWDVNGKFKPLHMFNPIRIEYITEKIKIHFKLKKDRSNYLEGLNILDIGCGGG

SEQ ID NO: 104799 - protein, 206 aa, Unknown
  Bacterial polypetide isolated from the Sargasso Sea
MLKRTNLKFINSLLKENKDWKILDIGCGYSANENANVIADAKDLSLFYKEKQFVQIKDKKLPFKDKEFNFVIASHVLEHVEEIGFFISELERISIQGYIELPTILEDNLVFENKKDHVWSMKFDDTKNKLLINKRVQFIDPILSVSSIKKLNKYFRESFIIEILWREKIDYEIVETEKNLNKISRLNLLKKFFSKSIRSFFKQITE

SEQ ID NO: 104800 - protein, 77 aa, Unknown
  Bacterial polypetide isolated from the Sargasso Sea
MKNNTINKKEIEKFSKIAEEWWNPQGKFKPLHKFNPIRIRYIRDNIIDHFAIKSKTRPLRNINILDIGCGGGYYLSK

SEQ ID NO: 104801 - protein, 262 aa, Unknown
  Bacterial polypetide isolated from the Sargasso Sea
MSLTDEGHYGPKQLNMLKTVWGEGFLSPGGTEEIDQILKGLNLKNKKVLDIGCGTGGAVFHMIETYGAKEVIGIDPEPLVIETANNLALKKNLSDKAKFICTKPGEYKFEDKSFEAVFSKEAFLHIIDKKNLLKEINEILADNGILAVGDWMRNDDNEPSEQMKEYIAAEGLDMFMCSLEKYESLLKETGFEVLSLNDRNKWYLEKVKTEISDIRGPLYDDVVNLIGKEEADGALEIWEKLLGVVEKGEHRPGNFQAVKIST

SEQ ID NO: 104802 - protein, 63 aa, Unknown
  Bacterial polypetide isolated from the Sargasso Sea
MNKNKSIRKDWKLIESFIENNSKVLDIGCGEGELIKQLENNIQADTRGIEIDPNWQEMLYQLV

SEQ ID NO: 104803 - protein, 244 aa, Unknown
  Bacterial polypetide isolated from the Sargasso Sea
LEEAQENKIQHIIKKLDIKNNQRVLDIGCGWGGLCFEIAKQFNCEVTGVSLSTNQINYCKEKAKELGLENQVKFELLDYRLVKGNYDRIVSVGFGEHIGIKFYNAFFKKINSILKPSGVFLFHLIGVVDKPTAPNQFINKYIFPGGVCPSLSQLIKPIEKTGLIVADTETLIRHYDKTLEAWLDRFLAKRSQIKDLFDEKFCKMWEFYLASCAAAFRYRDLAVFQLQIVKNFNAARPTRDYIYS

SEQ ID NO: 104804 - protein, 197 aa, Unknown
  Bacterial polypetide isolated from the Sargasso Sea
MASTVIKNWDNKTWLSSNDYIKSFNKFLFKNIKLNPNSKILDIGCGRGKILGNLCSKLKLKQKPLGIDIIDHKDRDKRISFKKTSASTFFLKNKKKFDLILIKQTIHLMNIKEIKKLLNSLRKNLNQNGKIFIFTLDTNENELPTFKLMKKKLIKSLKRDKKIIKIILDLDLVKIKKKFIFKVKISKQNYLDMIKKR

SEQ ID NO: 104805 - protein, 99 aa, Unknown
  Bacterial polypetide isolated from the Sargasso Sea
MKSKHIKEISKLYSKRFNDITLSKINKIGWGSTKSQKLRFKLLTENFDFKNKTVLDIGCGFGDLYSFIENQYSIKLKKYVGIDVCDDFIVSNKKKFIKN

SEQ ID NO: 104806 - protein, 206 aa, Unknown
  Bacterial polypetide isolated from the Sargasso Sea
MTKKKFDYEEIDVGFYDHIYQKKEGVRSAWHHIKFNFVREKIDNQNHHLDIGCGSGTFLSILNNKFSAGIDISEKQINYANKKYSTDSKKFLQFDKVIPFEDNSFDSVSMIELIEHLSDDEIASIFQQIHRVLKKGGKIYITTPNYLSLWPILEFILNKVSKVSYEDQHISKFNFLNINKIINNDKFNIIKKNSFIFLSPFTAFFS

SEQ ID NO: 104807 - protein, 140 aa, Unknown
  Bacterial polypetide isolated from the Sargasso Sea
MSQWFNQFYAAIAQSPLSHWLETLPAQLKHWQLEASHGDLPQWQKVLKNLPEINTTHVDIATKVEIGSKGEMSEGQQKQTTHLLKRMMPWRKGPFSVHGIEINTEWRSDWKWDRLLPHIEPLKGRTVLDIGCGSGYHLWR

SEQ ID NO: 104808 - protein, 297 aa, Unknown
  Bacterial polypetide isolated from the Sargasso Sea
AKLFRNPGLYFGEGYINEEIIIEKGTIEQLIDIVTASYDSFVLNNSFYKNYEYFSSIIKPFQQINKLVVSKKNVAHHYDLDENLYKLFLDKDMQYSCAYFHNQNIGLDQAQSDKKKHIINKLEIKQNMNVLDIGCGWGGMAIEIAKSTGANVKGITLSENQFATASKRAQEEGLNDKVKFALQDYRDESETYDRIVSVGMFEHVGIKYFNTFLKKTYNLMNDKGVFLLHTIGQRGRPTATSPWIRKYIFPGGYIPSLSDIIIETEKLNLNITDIEILRLHYAYTLSHWYNNVIKNKE

SEQ ID NO: 104809 - protein, 256 aa, Unknown
  Bacterial polypetide isolated from the Sargasso Sea
MPCLNCNSINFKKKFKSYSGVMFKICKDCKCVYQDPLIETNYSDSYWQGGYDRDGNYRDFTKERDFKIKNWYGSIINYLNTDKRNLSVLDIGCGLGYLLSALNKNYDKYGIESSDFATNYIKKNFTDIKIENGDYKNIGVFNKKFDVISLYHVIEHLKNPPEAIELVYKFLKNDGILIIGTPNTDSFVAKVFGKNFRHFTYDHTCLYGRHSLTKLLTKNKFKVFREEKPFFSTIYNNFSNYYKLFLLNKLSPAFYG

SEQ ID NO: 104810 - protein, 187 aa, Unknown
  Bacterial polypetide isolated from the Sargasso Sea
MKTTTINKEEIDKFSKIAEEWWDPEGKFKPLHIFNPLRIKYIKDSIIKHFKIKKKKLPLSGLKILDIGCGGGLIAEPMSRLGANITGIDASEKNIKIAKAHLKKNKLKINYKCASPENLNQKENFDVILNLEIIEHVEDVELFMEKSSKLLKKDGLMFVATINKTLKSYLFAIIGAEYILRWLPIGT

SEQ ID NO: 104811 - protein, 219 aa, Unknown
  Bacterial polypetide isolated from the Sargasso Sea
MKNKQSLFLSKKKLLKEAGCDDYEDSAKRLFSKAFGMSPAQIYKDQIHERSNEKASLFSEMVSCRAVGVPTSHIVCSRSFWKNDFYVDGTVLDPRPESELIIDVTKNLLFDGMTVLDIGCGSGCIGISLYKENPNITLLLADFSKKALSLSKKNAEELQADCKFIRSDLFSNIDSKFDLIVTNLPYIAKDDFCYLQKEIILYEPHEALYGGQHGLDMIK

SEQ ID NO: 104812 - protein, 195 aa, Unknown
  Bacterial polypetide isolated from the Sargasso Sea
MIDHDGQKYICGEPKSKKPIVLKLLDKNLNWKLVLNPDLLFPEAYMDGKIIIENGSLSEFLNLIFKNIGRQEITTSGYLFKQILQIWRYLSNYNFPLKSRKDIQHHYDVGGEKGEKLYDIFLDEKHRQYSCAYWKNTSETLEQAQQNKLNHIITKLNIKPGQKVLDIGCGWGGMTFEIARQKNCEVVGISLSKNQ

SEQ ID NO: 104813 - protein, 188 aa, Unknown
  Bacterial polypetide isolated from the Sargasso Sea
MDKTSKLFDVWAKTGRSEEMEKGHGTTVNQFLDKLSLKEKFRFLDIGCGNGWVVRKMSQKPSCVKAIGIDKSKMMIKNAKSKISSTKESFFVTDLESWNTKEKFDVIFSMESLYYSVPMEPALEKVFKLLKKGGTFYCGTDFYSDNTLTTRWVKDMNIPMDLRSEKEWKKMFREIGFTTRSKHVQIQK

SEQ ID NO: 104814 - protein, 209 aa, Unknown
  Bacterial polypetide isolated from the Sargasso Sea
MKSIRKDWRLIESLIKNNSRVLDIGCGGGELIEQLEKNINAKTHGIELNSTLVLDAISKGYNVVHGNAEIDLNQYSDQSFDYVILSQTLQAMMKPKEILSDLLRIGSKAIVSFPNFGYWKIRLQLLLSGKMPVTEGLPFTWHDTPNIHFFTIKDFQNLCKDMNIIIEQSIGLTSKGKQIIINDNFNSANLLTHEAIFLLSYKTFEPIQI

SEQ ID NO: 104815 - protein, 226 aa, Unknown
  Bacterial polypetide isolated from the Sargasso Sea
MKEQNKDIDQLKVFFNNYSSRFSGIYVEDENPRSWFDSIIDKYFRQTVYQRYANTVSHLENPELNTVLDIGCGPGHYVMSALKLGKKVTALDIASKMLDLTKARVDESEFGASVDYLLADYMEHTFQNKFDATIVMGFFDYVADPVPFIKKLLADTSKEIYISVPKNDGWQAFQRKIRYWINKCPLYLFSFDQLKSILTDSECLSESEIIPMKDGWFVVIRPGATH

SEQ ID NO: 104816 - protein, 140 aa, Unknown
  Bacterial polypetide isolated from the Sargasso Sea
MKKLKNWDNKTWLSSKSYISQFNKFLKRKSNLNKNSKILDIGCGRANIISALQQKYKFRNKPIGIDIVSNKGVKKNIIFKKVEALKYLDKQEKYDLILIKQTIHFFSKKNLNRLLNLAKKRLNTKGKILILSLKTKNNKI

SEQ ID NO: 104817 - protein, 225 aa, Unknown
  Bacterial polypetide isolated from the Sargasso Sea
DEWWDVNGKFKPLHMFNPIRIEYIIEKIKNHYKIDKNKTNFLNGFDVLDIGCGGGLISEPMTRLGANLTGIDASEKNISVAKLHSKKSNLKIKYISTSPEKLQDNEKFDIILNLEIVEHVDDVDLYIRSCSKLLKKNGLMFTATLNRSFSSYVKAIIGAEYILRWLPIGTHDWNKFIKPEELEKILIANKFNTLDISGLQFNPIIKRWKRSRDLSVNYIICSLKS

SEQ ID NO: 104818 - protein, 165 aa, Unknown
  Bacterial polypetide isolated from the Sargasso Sea
EGRWEKVAMAMAAHYKLPPNPKILDIGCGKGFLLYDFIKVIPDAEIYGIDVSPYAISNSKENIRDRLQVGSATDLPWPDDYFDLVISINTLHNLHAYELNSALKEMERVGKGYKYLCVESYRSEHEKVNLLYWQVTCEAFNTPKEWLWWFEQTGYKGDYSFIYFE

SEQ ID NO: 104819 - protein, 66 aa, Unknown
  Bacterial polypetide isolated from the Sargasso Sea
MWKSKTPGIPDEEFERTESVPITKEEIRAIQISKGRLSAGQTVLDIGCGSGSVTVEAAIQLKIPEK

SEQ ID NO: 104820 - protein, 237 aa, Unknown
  Bacterial polypetide isolated from the Sargasso Sea
MRPLKNWDNKTWLSSKIYISHFHKFLRTKIKFKKHFAILDIGCGRGNITGNLQKKYKFKTKPIGIDIIKNKDINKNILFKKIDAKKFLIQNSKKYDLILIKQIMHLLDKNKRHSIIQLSKKKLKKNGVLLILSLSPFNTELPTFKKFSINLKKSLKKDKVVIKEIKRKLKNYKISYFNFKVRIKKLDYINMIRNRYISCLLNMSVLEIDNGVKEIEKKYKNNLVFTDKLLCIEYKKN

SEQ ID NO: 104821 - protein, 106 aa, Unknown
  Bacterial polypetide isolated from the Sargasso Sea
MTDDSIKHSSETAYRLETPEQHRTFYDDWAKSYDSGFATSKGYDYPKLIAEYFVGRVSPDQSSVLDIGCGTGLVGVSLRKEGWSSELTGVDISEGMLGGGGKEKGL

SEQ ID NO: 104822 - protein, 86 aa, Unknown
  Bacterial polypetide isolated from the Sargasso Sea
MVTNTEQSVADHYTRGSLLETILNGIKKAGKSVDSIQHEDLAPLDEFHLGSREATRHFLGQMGLTREMSVLDIGCGLGGAARFCAH

SEQ ID NO: 104823 - protein, 89 aa, Unknown
  Bacterial polypetide isolated from the Sargasso Sea
MKIEDNVLLNLIEAKSKVLDIGCGDGNLLLILKKNKSINGRGIEINQKKVTECLSKGLAVIEGDAEKDLINYPDNSFDFAILNQSLQQF

SEQ ID NO: 104824 - protein, 174 aa, Unknown
  Bacterial polypetide isolated from the Sargasso Sea
MKKLKNWDNKNWLSSKKYISEFNKFLKNRINLNKNSKILDIGCGRANIISALQKKYKFKNKPIGIDIVANKEVKKNIIFKKIGALKYLKKKEKYDLILIKQTIHFFSKSNLNHLLNLAQKSLNNKGKILIFSLKTNNNKIPCFKKMRKNLEKSLKRDEVLFKIIKKNLKKISYT

SEQ ID NO: 104825 - protein, 146 aa, Unknown
  Bacterial polypetide isolated from the Sargasso Sea
MASVVIKNWDNKTWLSSQNYINSFNNFLIKNTKINSNFKILDIGCGRGKILGSLKSRLKLKYKPLGIDIVNHKDRDKRIKFKKANILNLSLRKSQKFDLIMIKQTIHLIKLSKVKKLLKSLEKILNTKGKIIIFTLDTENNEIQLL

SEQ ID NO: 104826 - protein, 300 aa, Unknown
  Bacterial polypetide isolated from the Sargasso Sea
MHLASFLNKVFKKGGFILTDANLKDYIIGSPESNPIRIKILNKNLHYKLLFHPDLYFGEAYTNGEIKIENGTLSDFLDLALMNFGRGELNFFSYLINRIRGSFRYLTNFNFIKKSKMNVSHHYDISDDLYDLFLDPKRQYSCAYFKNEKDSLTTAQNNKIQHIIKKLNIQSNQKVLDIGCGWGSLAIDIAKSAKCEVTGITLSENQFNYCKLKAKEMNLENQVKFRLIDYRELDEKFDRIVSVGMFEHVGRKFYKKFFNQIENLLKEDGISLIHTIGSVNPPRDPHPWITKYIFPRWLYS

SEQ ID NO: 104827 - protein, 193 aa, Unknown
  Bacterial polypetide isolated from the Sargasso Sea
MNKKKILDYWNLRAGKKILKCTNDINLEKNEIGIFLSIIKNKKNVLDIGCGDGELLRNLKKKNKCNCYGIDFSQNLIKIAKRKSRNINYYCIDMNKIKDEFKIKIKFDYIITKRSIQNLTSWKDQKKFIDQLKFFSGPKTKILLMESSNNGLRKINEMRNKLKLKKIIKPWHNLYLEDSKINKTNFNGLKLVN

SEQ ID NO: 104828 - protein, 191 aa, Unknown
  Bacterial polypetide isolated from the Sargasso Sea
MGNNFNLNKNKYGFYQINPTPSSEEITKFYADEFYTGEYKNFNDSSLEVQLNDKEFFFGKWQDMYDTFIEINPNLKKKCSILDIGCGWAQALLFFKNKGFDCYGFDPAPEAVDYGKKKGLNLKHAGLDGMDVFDGKQFDVVCLLNVLEHVADPEKTILQIKKILKNDGILLIDVPNEFNDFQIAGRDLHSL

SEQ ID NO: 104829 - protein, 94 aa, Unknown
  Bacterial polypetide isolated from the Sargasso Sea
MTTVNKEEIQKFSKIADEWWDTKGKFKPLHMFNPIRIKYIKEKCISHFKLKEDNPKPLTNLELLDIGCGGGLISEPMCRLGAKVTGIDASNKNI

SEQ ID NO: 104830 - protein, 245 aa, Unknown
  Bacterial polypetide isolated from the Sargasso Sea
MYLLNFLRRLIKEDGFELVDANNKSYLIGKPKKENPIRLKLLDKSLHWKLLINPDLYLGEGYMDGSIVIENGTLTEFLDIALKNVGRQPTNKITNLLGRCRRVYRYITNFNLIPKSKKNVSHHYDISEKFYDLFLDKKRQYSCAYFKNENDTLESAQNNKIDHIIKKLNLKPNQKVLDIGCGWGTLALDIAKKTQCEVVGITLSENQLEYANQKAKEMNLENQVEFRLADYRQLDEKFDRVVSVG

SEQ ID NO: 104831 - protein, 183 aa, Unknown
  Bacterial polypetide isolated from the Sargasso Sea
MLYSVLKKVNFKGKILIVDSSDKTHEFGSGSDNLKIKLTTKSIEKKLFRNPGLYFGEGYMNKEILIKEGTIEQLVDLITSCYDDFIQNNFIYRIYENFSGYIKIFQQLNEAVKSKQNVAHHYDLKEDLYKLFLDQDMQYSCAYFHNENISLDQAQIDKKNHIINKLNITENMNVLDIGCGWGG

SEQ ID NO: 104832 - protein, 81 aa, Unknown
  Bacterial polypetide isolated from the Sargasso Sea
MNVSHHYHISDDLYDLFLDPKRQYSCAYFKKKTDSLEVAQNNKIQHIIKKLNIKKNQKVLDIGCGWGSLTFDIAKSASCEV

SEQ ID NO: 104833 - protein, 121 aa, Unknown
  Bacterial polypetide isolated from the Sargasso Sea
IIKKLNLKPNQKILDIGCGWGILAIDIAKKTQCEVVGITFSENQLAYAKQKAKELNLENQVEFRLADYRQLNEKFDRVVSVGMFEHVGRKFYSKYFKKVFEFLNDDGVAIIHTIGSINPPR

SEQ ID NO: 104834 - protein, 157 aa, Unknown
  Bacterial polypetide isolated from the Sargasso Sea
MYKNFKIDKALYKNGKYDVFKYINKIEASTNGFFYQKKKNKNVSIPNIDLKTANNRDLLLDIGCGWGRWCFSASKKNYLPVGVDTLFSYLLAAKRYSEENNINAYFIYADALNLPFKKNIFDAIFSFSVFQHFPKKDFFSMLKKTKKILKKNGLFKF

SEQ ID NO: 104835 - protein, 292 aa, Unknown
  Bacterial polypetide isolated from the Sargasso Sea
VDYSGQKIICGEPRKENPITVKLLKKNLNWKLVINPDLSFPEAYMNGEIIIENATLSEFLDLAFKNVGRSEITTSAYIIKKILQLWRFMSNYNFPLKSKKDIQHHYDVGGEKGEKLYDIFLDKKHRQYSCAYFKTPNDTLEQAQQNKIDHIIKKLNIKPGQKLLDIGCGWGGLAFEIARQKQCEVLGISLSENQIKYCKEKAKEHNLDNQVRFELIDYRHAKGKFDRIVSVGMAEHLGKKFYKTYFKKINELLKNDGIGLIHTIGSIDHPQPPAPFIQKYIFPGGVVPSLSD

SEQ ID NO: 104836 - protein, 185 aa, Unknown
  Bacterial polypetide isolated from the Sargasso Sea
MKLSNLQKKLKKSEQYLPAEDTFFLADRLKDLCGKSALDIGCGSGYLTDILNSNFQLVVGTDISFNTLCTQNYKTQNAICCHSADALNLQFDLIICNLPYLATDEIIDVATDGGKDGLEIPLEIITSALPHLDKNGKFLFVTSSLSDYMGLVNFVNSKGFQAKIIDKKKLFFEELIIVEVKHSLS

SEQ ID NO: 104837 - protein, 225 aa, Unknown
  Bacterial polypetide isolated from the Sargasso Sea
MVDANSKSYIIGKSKKVNPIKLKILDKTLHWKLLINPDLYLGEGYMNGSIVIENGTLTEFLDIVLKNVGRQPTNEITGILARFRRVYRYITNFNLIGKSKENVAHHYDISEKFYDLFLDEKRQYSCAYFKSEDNTLEEAQNNKIDHIIKKLNLKPNQRVLDIGCGWGTLAIDIAKKTQCEVVGITLSENQLEYAKQKAQEMNLENQVEFRLADYRQLNEKFDRVV

SEQ ID NO: 104838 - protein, 256 aa, Unknown
  Bacterial polypetide isolated from the Sargasso Sea
MCQQVIANRFLPIPPEEDVFVGDGDYRAIGAEFLDHFVRMGGLKTTEDVLDIGCGIGRIAVPLTQFLNREKAIYRGMDPVRGGIDWCKRAITPAYPNFRFECSDIRNELYNPEGEISGRSMRLPFQDGTFDFTAMISVATHLPPDEIEAYCSEVFRVLRPGGRLFLTAFVIREDDDPSHPDRDARLKGFEKAEGQPCWHLRGENPMAAVGIEDAFLGGALTTAGFDIHAKSFGAWRGVASAHYQDFLIAQKPRRSA

SEQ ID NO: 104839 - protein, 84 aa, Unknown
  Bacterial polypetide isolated from the Sargasso Sea
MKVLEKSTRDVYERNARLFDSERSKRLEEKGWLDRFSDLLPKRAKVLDIGCGAGEPIAQYLISQGFEVEGIDFSEAMLGIVRGR

SEQ ID NO: 104840 - protein, 191 aa, Unknown
  Bacterial polypetide isolated from the Sargasso Sea
MLLEQTVSEHYANTGLLEKIYDGLGELGIDKDKLIQSDLSSVDEFHIGGSEGTLMLAEKLSINASSYVLDIGCGIGGPARLLSSKIGCKVSGIDLTADFVNTGNSLTEKVGLSGNVKLIEASALNIPFADNSFDVSYMIHVGMNIADKDVLFSEAFRVTKPGGLFGIYDVMLVGNCELQYPLPWAAKENGN

SEQ ID NO: 104841 - protein, 222 aa, Unknown
  Bacterial polypetide isolated from the Sargasso Sea
MTSTINKEEIQKFSDIADEWWDVKGKFKPLHMFNPVRIEYISEKIIQYFNLKNKKTKPFQGLKLLDIGCGGGLISEPMSRLGASVTGIDASEKNIKVASIHAKKNNLNINYINKSPEQMKNSEKFNIILNLEIVEHVNDIDLYIESCQNLLDKKGLMFTATLNRTMSSYFKAIIGAEYILRWLPIGTHDWNKFFKPEELEKKLENNKLKTLEIKGLEFNPLT

SEQ ID NO: 104842 - protein, 133 aa, Unknown
  Bacterial polypetide isolated from the Sargasso Sea
MTKKNKKKSSRADLQIISSLVKSDSKILDIGCGDGDLLEVLSKQNNCNCRGIEISHHAVSKALMKGLSVVQGDAEDCLDFYPDREFDYAIMSHTIQATKRPDLMLEQMLRIGDKVIVSLPNFANFKNKISSFF

SEQ ID NO: 104843 - protein, 78 aa, Unknown
  Bacterial polypetide isolated from the Sargasso Sea
MTTINKEEIQKFSNLAEEWWDVNGKFKPLHMFNPIRIEYILDQISKHFKLDRKKNFFLKDLEILDIGCGGGLISEPMA

SEQ ID NO: 104844 - protein, 240 aa, Unknown
  Bacterial polypetide isolated from the Sargasso Sea
LDIGCGWGGLGLSIYNCNPSTRITGITLSKKQHIYFNQLIKKNKLTGKVECLLKDYRELDNKYDRIVSVGMLEHVGHHNFEKFFKFIENHLKPKGVAVIHSIGRYGLPTHTNPWLEKYIFPGGYLPTFSQMTNAIEKTSLKITDIEVMRLHYAETLKKWREKFFKNKSFLPKTYDEKFSRMWEFYLLASEYFFRSGGGMVFQYQLAKDQEVVPLDRKYISSLEKKYSKLLKQKEFTYILN

SEQ ID NO: 104845 - protein, 232 aa, Unknown
  Bacterial polypetide isolated from the Sargasso Sea
KVLDIGCGGGITSFEASKIVGKYGYVLGADISKILLDLAKKNFSDIKNLEFKYCDVQNYNFKKNIFSKVISRFGVMFFENPILAFKNIYNSIQDGGSLHFVCWTNVMENEFFTAAANIIIKHLNKEFPKVTRSPGPFAFSEEKYIKQILDSSGFKNIKVDKVYTSLSTNDDAAKDGELLFKIGLAGRLLSEENLSEKELSNIKDKIIAMSKNRQVDGKITYRACLNFVSATK

SEQ ID NO: 104846 - protein, 60 aa, Unknown
  Bacterial polypetide isolated from the Sargasso Sea
MTPSKNSIRKDWSLIESFIETKSKVLDIGCGEGGLLKQLENNILADTRGIEIDPDLARKA

SEQ ID NO: 104847 - protein, 229 aa, Unknown
  Bacterial polypetide isolated from the Sargasso Sea
SNLAHEWWDVDGKFKPLHMFNPIRIEYILDQISKYYKLDRGKKHYLKGLKILDIGCGGGLISEPMARLGGEVTGIDAAEKNIKVAILHSKTSNLKINYLNKSPEQLNIKENFDIILNLEIVEHVNNLDLYLKSCYNLLKKDGLMFTATINRTFASYVKAIVGAEYILRWLPIGTHEWNKFIKPEELQNKLNNIKFITNSIKGLEFNPILRKWKKSDNLSVNYIVSSIKN

SEQ ID NO: 104848 - protein, 245 aa, Unknown
  Bacterial polypetide isolated from the Sargasso Sea
TLEEAQNNKIQHIIKKLNIKTNQKVLDIGCGWGSLAIDIAKSANCEVTGITLSENQLNYCRKKAKELNLENQLNFKLIDYRELNEKFDRIVSVGMFEHVGRKFYKKFFKQIDKLLNEDGISLIHTIGSVNPPRDPHPWITKYIFPGGYTPSLSEVTTPIEKAGLIVADVEVLRLHYSHTLRHWKENCMNNKEKIIQIFDEKFFRMWEFYLAGCEMAFKWGDQVVYQFQLTKNYTSTPVTRDYIYQ

SEQ ID NO: 104849 - protein, 45 aa, Unknown
  Bacterial polypetide isolated from the Sargasso Sea
MKIEDNVLLNLIEAKSRVLDIGCGDGNLLLILKKNKSINGRGIEI

SEQ ID NO: 104850 - protein, 197 aa, Unknown
  Bacterial polypetide isolated from the Sargasso Sea
MLLAKILNKKIKFGGFILEEANSKKHSIGVANSDNNILTLKLLKKDLNWKLVLLPELYLGEEYFKGNIEIKNGTIYDFLYLILHRENFGRGKVNSLSAILNFLRYGFSFLTKHNLIGASKRNAMHHYSRGEDIYDWMLDKEHRQYSCAYFKDLNETLEQAQTNKLELILRKLNLKPSDTVLDIGCGWGGLSRYIHKK

SEQ ID NO: 104851 - protein, 221 aa, Unknown
  Bacterial polypetide isolated from the Sargasso Sea
MNYIDFVGSTHKSTKRNYLERVNEHDKSICAEVASKFDYEYWDGERKYGFGGYRYDGRWKTVAKKYVDYYNIKPGDSVLDIGCGKGFLLYEIYNLVPNLNVAGIDISNYAVNNAKEEIKEFIKIGSISESLPWNDNSFDFVYSINTLHNLYNYEINTAIKEINRVSKNKSHITVESYRNEKEKVNLMYWQLTCRAFMTPSEWEWLFNYYSYNGDYGCIYFE

SEQ ID NO: 104852 - protein, 125 aa, Unknown
  Bacterial polypetide isolated from the Sargasso Sea
MIGVYRFFKKQSEKWFNKSYEPKARYFFVSNCPLCLSDDSNEVYKIDGFSYHECQSCNSLYTKPTLRHDVLESLYSDGTYQVYHDSLVKTSLDLRKGILEERKHSQIDALVKCVKPSLLDIGCGG

SEQ ID NO: 104853 - protein, 237 aa, Unknown
  Bacterial polypetide isolated from the Sargasso Sea
TTKDYLVSGEPFDIVECEICSLRITTPFPDKEIIGNYYSSDDYISHNDKVSGIFDSIYRFVRTYQLNKKKKLIGRYFNKTNGKILDIGCGTGDFLQHMKENHWNINGVDTSNKARKIVKKKLNINVMDPQDWINNNEKYDVITCWHSLEHVHEPWVYLDKIKKSLTLDGFLIVALPNYQSTDAKIYKEFWAAYDTPRHLYHFTIKSMNKTINPHGLNIESIYRMNFDPFYVSMLSAK

SEQ ID NO: 104854 - protein, 248 aa, Unknown
  Bacterial polypetide isolated from the Sargasso Sea
KQIPLETAQNNKIQHIIKKLNIKPNQKVLDIGCGWGSLAVDIAKSANCEVTGITLSENQFNYCKKRAKELNLENQLNFKLMDYRELNEKFDRIVSVGMFEHVGRKFYKKFFSQVEKLLKDDGVSLIHTIGSVNPPRDPHPWITKYIFPGGYTPSLSEVTTPIEKAGLIVADIEVLRLHYSHTLRHWKENCIRNKDKIIQMFDERFFRMWEFYLAGCEMAFKWGDQVVYQLQLTKNYSSTPVTRDYIYQ

SEQ ID NO: 104855 - protein, 133 aa, Unknown
  Bacterial polypetide isolated from the Sargasso Sea
MSQKKSLIYNIISRPLAYMMIQKLASGSSFQENMVLKYIKKKNEINILDIGCGPAEILDVLPKCNYYGYDVDKDSINYAKKKYKKKNINFYCKKFGVRDISKLPKFDYVFVIWDHASFKRCRVYKIVLSNLKK

SEQ ID NO: 104856 - protein, 202 aa, Unknown
  Bacterial polypetide isolated from the Sargasso Sea
MKNLKMKKEFKVIADLLPNNTRVLDIGCGDGSLMHLLRVEKNMEVRGLELNQDNVKECIYKGLPVIQGNAETELHQFPDKSFDYVVLSQTLQAFYEPEKVLKNLLRIGKSVIISIPNFGYWKVRTKLLIFGKMPVTKTLPNTWYNTPNLHMCTIKDLFNFCDEKNIIIQKVVGVNENKTSLIKKSNLEIKNLFSKVGIFLIG

SEQ ID NO: 104857 - protein, 104 aa, Unknown
  Bacterial polypetide isolated from the Sargasso Sea
AAEGSAEQQAFMRKQLEQFIPWRKGPFKLFEIDIDTEWRSNWKGDRLKDKIKPLEDKMVLDIGCGNGYYGWRMLGEKAKYVVGMDPTLLFLMQFLAVKEYMPNA

SEQ ID NO: 104858 - protein, 178 aa, Unknown
  Bacterial polypetide isolated from the Sargasso Sea
GSRSEGYGGYKYIPGYWKGLARKFINFYKLKKNAKILDIGCGKGFLLYEIIKLRPDLNVTGVDISYYALKHAIGKEKIKYKLHKAQKNFKYKNKYFDLVISIGTLHNLEIFDLKKSLNEISRISKNSYIMVESYKNNLELFNLQCWALTCESFFSQNEWKWIFKEFKYNGDYEFIFFK

SEQ ID NO: 104859 - protein, 89 aa, Unknown
  Bacterial polypetide isolated from the Sargasso Sea
MTTINKEEIQKFSNLAEEWWDVNGKFKPLHMFNPTRIEYITEKIKHHFEIRNNKENFLENLNILDIGCGGGLISEPLSRLGGSVTGIDA

SEQ ID NO: 104860 - protein, 199 aa, Unknown
  Bacterial polypetide isolated from the Sargasso Sea
MLNFLRRLIKDDGFELVDANSKSYIIGKPKKEIPIRIKILDKSLHWKLLINPDLYLGEGYMNGSIIIENGSLTEFLDIALKNVGRKPTNELTNILARFRRIYRYLTNFNLIGKSKENVAHHYDISEKFYDLFLDEKRQYSCAYFKDEDNTLEEAQNNKIDHIIKKLNLKPNQRVLDIGCGWGTLAIDKAKKTQCEVVGI

SEQ ID NO: 104861 - protein, 101 aa, Unknown
  Bacterial polypetide isolated from the Sargasso Sea
MEARDYYNKRGATCRSIYDGDSTRNTHNFIKSVLIQSYTPEKAKILDIGCGQGNDLLKLTYVNPVFYFGIDISNESIIAAIKRSKNTKISFRTKFMCLDFA

SEQ ID NO: 104862 - protein, 144 aa, Unknown
  Bacterial polypetide isolated from the Sargasso Sea
MKPLKNWDNRTWLSSKRYISQFHKFIKRKVKLNKNTEILDIGCGRANIISFLQRKYKFKKKAIGIDVLKNKNTRKNILFKKSDALKYLKKGKKFDIIIIKQTIHFFSKTKIVSLLNLAKKNLNKRGTLLIFSLKTKNNKIPCFK

SEQ ID NO: 104863 - protein, 180 aa, Unknown
  Bacterial polypetide isolated from the Sargasso Sea
MAASTAGIHRRQEVFRSLEVKTGQIILDIGCGGGHLLQDLALAVGETGKVYGLDPSEAQLKTARDRCSHLTNVELLCHPANKMTLEDNLLDIATSTQTLEYVKDIDSVLIEIARVLKRDSKFVNVSILWEHFKFHGPETHLNELIHDAFKAHCYHQMLPMELKMRLDRVGFDNIKSTGLA

SEQ ID NO: 104864 - protein, 217 aa, Unknown
  Bacterial polypetide isolated from the Sargasso Sea
LDIGCGGGHLLEELAKAVGPKGKAIGLDTSEDQLKQAKERCALYDNAFTLLGFANRINLESNSCDAVASVQTFEYIEDVDESIEEVARILKPSSIFVNISILWDYYKFYGADDNLNNLIQDTFKAHCFHQMLPTTLSGRLKKFGFKQLKHKPLPMFITKTDDNSPAKYAAEVMAQFAIQQGVSKDKVDEWQNQLKLAEDTGHFAYTNLPILTYGYLS

SEQ ID NO: 104865 - protein, 93 aa, Unknown
  Bacterial polypetide isolated from the Sargasso Sea
MSQKTDRIYSLLSNTFLYSFVQRIMSGTSFREKIVKKYIKKDKSTVLDIGCGPADILDSLPSVKYFGYDINSNYINHAKKKYKDRGNFYCKKV

SEQ ID NO: 104866 - protein, 227 aa, Unknown
  Bacterial polypetide isolated from the Sargasso Sea
MNKIQSIRKDWDLIESLIRDNSRILDIGCGEGDLIQQLEKNLSAKVHGIEKNQELALKAIAKGLSVTHGDAEKDLSQYSNQSFDYVILSQTLQAMIEPKKILNELLRVGSKAIVSFPNFGHWKIRLQLLFKGKMPITEGLPYSWYDTPNIHFFTLKDFENLCNEMNIVIENSIGLTSKGKQFPINGSLLSANIITSEAIFLLSYKDFEPIKIKSSNKIFAKNSAIAN

SEQ ID NO: 104867 - protein, 68 aa, Unknown
  Bacterial polypetide isolated from the Sargasso Sea
MSTINKEEIQKFSNLADEWWDIKGKFKPLHMFNPIRINYITEKIKYHFNLQEKENLLKGLKVLDIGCG

SEQ ID NO: 104868 - protein, 204 aa, Unknown
  Bacterial polypetide isolated from the Sargasso Sea
MKKLKNWDNKTWLSSKSYISQFSKFLKTKINLNKNSKILDIGCGRANIISALQKKYKFKDKPIGIDVVANKDVKKNIVFKKIDALKYLKKKEKYDLILIKQTIHFFSKTNLNRLLNLAKNSLNSKGKILIFSLKTKNSKIPCFKKMRKNLEKSLKRDEALLKLIKKNLNEISYTNFNFKVKITKQKYIKMIKNRIYFLFAECIE

SEQ ID NO: 104869 - protein, 91 aa, Unknown
  Bacterial polypetide isolated from the Sargasso Sea
MNKINSLRKDWSLIETLIAEDRKILDIGCGDGGLMEQLEINRNAITHGIELNRDLAANAIARGFNVVHGNAELDLSQYSNNSFDYVILSQT

SEQ ID NO: 104870 - protein, 236 aa, Unknown
  Bacterial polypetide isolated from the Sargasso Sea
NFFSYLINRLRGSYRYLTNFNFIKKSKMNVSHHYDISDDLYDLFLDSKRQYSCAYFKNETDTLETAQNNKIQHIIKKLNIKPNQKVLDIGCGWGSLAIDIAKSANCEVTGITLSENQFNYCKNRAKELNLENQLHFKLMDYRELNEKFDRIVSVGMFEHVGRKFYRKFFSQVEKLLKDDGVSLIHTIGSVNPPRDPHPWITKYIFPGGYTPSLSEVTTPIEKAGLIVADIEVLRLH

SEQ ID NO: 104871 - protein, 260 aa, Unknown
  Bacterial polypetide isolated from the Sargasso Sea
MTISLKIKHLNLPNRFLHFLNLFNKLISMVKSKENVAHHYDLNEDLYKLFLDKDMQYSCAYFHNENISLDQAQFDKKKHIIEKLQIKENMTVLDIGCGWGGMALQIAKDTGAKVKGITLSENQIATAKRRTQEEGLNEKVTFALQDYRHETNKYDRIVSVGMFEHVGVNYYPVFFSKTYEILKESGVFLLHTIGQRSAPSATSPWIRKYIFPGGYIPSLSEILNVTEKQNINVTDVEVLRLHYAYTLENWYKNTMKNKDA

SEQ ID NO: 104872 - protein, 310 aa, Unknown
  Bacterial polypetide isolated from the Sargasso Sea
PDLYFGEAYTDGEIIIENGTLTDFIDLSLMNFGRGELNFFSYLINRLRGSYRYLTNFNFIKKSKMNVSHHYDISDDLYDLFLDPKRQYSCAYFKNETDTLETAQNNKIQHIIKKLNIKPNQKVLDIGCGWGSLAIDIAKSANCEVTGITLSENQFNYCKKKAKELNLENQLNFKLMDYRELNEKFDRIVSVGMFEHVGRKFYKKFFSQVEKLLKDDGVSLIHTIGSVNPPRDPHPWITKYIFPGGYTPSLSEVTTPIEKAGLIVADIEVLRLHYSHTLRHWKENCIRNKDKIIEMFDERFFRMWEFYLAG

SEQ ID NO: 104873 - protein, 209 aa, Unknown
  Bacterial polypetide isolated from the Sargasso Sea
MLFTILNKINFKGKLVVTNYKGKTFHFGNGSDLVKIRLTNKSIENKLFRNPSLYLGEGYMNKEIVIEEGTLDDFLKIITASYNDYMSNNFVFKMYESISTFFKSFQQINKLVRSKENVAHHYDIDEKMYKLFLDKDMQYSCAYFHNQNIGIDQAQIDKKKHIIEKLQIKEGMSVLDIGCGWGGMAIQIAKDTGARVKGITLSENQFATA

SEQ ID NO: 104874 - protein, 287 aa, Unknown
  Bacterial polypetide isolated from the Sargasso Sea
VGRIRRAKRRIDQFNPVGKAQANVAHHYDLDAGLYDLFLDTDKQYSCAYFETPDMSLEAAQLAKKRHIAAKLNLSPETHVLDIGCGWGGMALYIARETGARVTGVTLSEEQHKIATERAALAGLSDRVKFRLQDYREVEETFDRIVSVGMYEHVGVHHYDEFATKLHALLKPNGIALIHTIGRLDEPGATNPWIAKYIFPGGYIPALSEVAPTLERQQLLLNDLEVLRLHYASTLRHWRNRFLARWDDAVALYDEQFARMWEFYLAGSETSFRHEGMVVFQFQLTPG

SEQ ID NO: 104875 - protein, 98 aa, Unknown
  Bacterial polypetide isolated from the Sargasso Sea
MYFPKLQRMLDIPVLYLAYRTIVGGHRATSIYVNEYVRPKCKDRILDIGCGPAETVEHFSDVEYIGFDNNPAYIELAKKRYGDQGHFFCGQIDQVALK

SEQ ID NO: 104876 - protein, 173 aa, Unknown
  Bacterial polypetide isolated from the Sargasso Sea
MTDDPIQHSSETAYRFETPDQHRKFYDDWAENYDSGFATSKGYDYPRLIAEYFVGRVSPDQSPVLDIGCGTGLVVVSLRKQGWSSELIGVDISQEMLEVAERKKVYQKLICADLNETLQLPQSHFGGMISAGTFTHGHLGPEVLFHLFSLARPGAHAVIGINAEHHENQDFSG

SEQ ID NO: 104877 - protein, 257 aa, Unknown
  Bacterial polypetide isolated from the Sargasso Sea
IFMPFQQINQLINSKKNVAHHYDINEDLYKLFLDKDMQYSCAYFHNPNISLNQAQKDKKQHIIKKLQITENMDVLDIGCGWGGMAIEIAKSTGAKVKGITLSENQFKTASERAQKEGLSDKVSFALQDYRNETEKYDRIVSVGMFEHVGVKYFKTYLSKANNILKENGVFLLHTIGQRGKPTATSPWIRKYIFPGGYIPSLSEVMKETQKLNLNVTDIEVLRLHYAHTLSRWYQNVLENKDKIIKMFDQRFFRMWEF

SEQ ID NO: 104878 - protein, 144 aa, Unknown
  Bacterial polypetide isolated from the Sargasso Sea
MTTINQEEIQKFSKLAEEWWDVSGKFKPLHMFNPIRIEYILEKISNHFKREDEDLPLKGLKLLDIGCGGGLIAEPMSRLGANVTGIDASLNNIKIAETHSKKNNLKINYLNTSPEQFPNDQEFDVILNLEIIEHVEDVNLYFKS

SEQ ID NO: 104879 - protein, 75 aa, Unknown
  Bacterial polypetide isolated from the Sargasso Sea
MKTTTINKEEIDKFSKIAEEWWDPEGKFKPLHIFNPLRIKYIKDSIIKHFKIKKKKLPLSGLKILDIGCGGGLIA

SEQ ID NO: 104880 - protein, 282 aa, Unknown
  Bacterial polypetide isolated from the Sargasso Sea
MLFSVLKKLNFDGTLEIIDSNDKIFKFGSSNPLVRIRLKNKSIEKKLFFNPNLHIGEAYMNEELIIEKGTIEEFLNLITNCYDDFISNNKFYKFYEYLSSIFMPLQQINQLINSKNNVAHHYDLNEDLYKLFLDKDMQYSCAYFHNPNISLEQAQKDKKEHIIRKLQIDKNMNVLDIGCGWGGMAIEIAKSTGAKVKGITLSENQFKTASARAQKEGLSDKVTFALQDYRNETEKYDRIVSVGMFEHVGVKYFKTYLSKANDILKENGVFLLHTIGQRGKPL

SEQ ID NO: 104881 - protein, 140 aa, Unknown
  Bacterial polypetide isolated from the Sargasso Sea
MTTINKEEIQKFSDLAEEWWDVNGKFKPLHMFNPVRIEYILDETSKHFKLDRKKNHLFKNLDILDIGCGGGLISEPMSRLGANVTGIDAAEKNIKIASVHSEKNNLKINYMNKSPEQLDNKEKFDMILNLEVVEHVDNLE

SEQ ID NO: 104882 - protein, 179 aa, Unknown
  Bacterial polypetide isolated from the Sargasso Sea
MTTINKEEIQKFSNLANEWWDVNGKFKPLHMFNPIRIEYILGEISKHFKIDGEKKLLLKNLEILDIGCGGGLMSEPMARLGGNVTGIDASEKNIKIASLHSKESNLKISYINKSPEQLKEKEKFDIILNLEIVEHVDNLDLYLKSCKNLLKKNGLMFTATINRTLSSYIKAILGAEYIL

SEQ ID NO: 104883 - protein, 199 aa, Unknown
  Bacterial polypetide isolated from the Sargasso Sea
MYLASFLNKIFKKGGFILTDADSKDYIIGNPGEQPMKIKLLNKKLHYKLLLHPDLYFGEAYTEGDLIIENGNLSDFLDLALMNFGRGPLNFFSYIINRLRGSYRYLTNFNFIKKSKMNVSHHYDISDDLYDLFLDPKRQYSCAYFKKETDSLEVAQNNKIQHIIKKLNIKKNQKVLDIGCGWGSLAFDIAKSAKVVRLP

SEQ ID NO: 104884 - protein, 187 aa, Unknown
  Bacterial polypetide isolated from the Sargasso Sea
MKNEKKNKEFEHFSELANDWWSKNGKFKILHDIQPIRIKYILEVLNKKNLNNTKVLDIGCGGGLISEGLSKIGANVTGIDFIKENINVAKTHAKNNNLKINYLVKDFEKEKITSKYDVIIIFEVLEHLSNWEEFIKKIKSSLKKNGVLIISTINRNLISKFLTLDIAENLLNLIPLNTHTFYKFIKP

SEQ ID NO: 104885 - protein, 132 aa, Unknown
  Bacterial polypetide isolated from the Sargasso Sea
MTKAGINIKNTVDLSEVERFSALSNAWWDPEGDFRPLHRFNPVRLEYIRGQICTHFDRDPLNLRTLEGLSVLDIGCGGGLVAEPMARMGASTSAIDASNKNIEVARLHANQSGLNINYRVSTAEKLASENTQ

SEQ ID NO: 104886 - protein, 227 aa, Unknown
  Bacterial polypetide isolated from the Sargasso Sea
MNKIQSIRKDWDLIESLIRDNSRILDIGCGEGDLIQQLEKNLSAKVYGIEKNQELALKAIAKGLSVTHGDAEKDLSQYSNQSFDYVILSQTLQAMVEPKKILNELLRVGSKAIVSFPNFGHWKIRLQLLFNGKMPITEGLPYSWYDTPNIHFFTLKDFENLCNEMNIVIENSIGLTSKGKQFPINGSLLSANIITSEAIFLLSYKDFEPIKIKSSNKIFAKNSAIAN

SEQ ID NO: 104887 - protein, 247 aa, Unknown
  Bacterial polypetide isolated from the Sargasso Sea
MQLARFLNNVFKKDGFILVDANSKSYIIGNPKSENPITVKILNKNLHYKLLFHPDLYFGEAYTDGEITIENGTLTDFLDLSLMNFGRGDLNFFSYLINRFRGSYRYLTNFNFIKKSKMNVSHHYDISDDLYDLFLDPKRQYSCAYFKNETDTLETAQNNKIQHIIKKLNIKPNQKVLDIGCGWGSLAIDIAKSANCEVTGITLSENQFNYCKKRAKELNLENQLNFKLMDYRELNEKFDRIVSVWDV

SEQ ID NO: 104888 - protein, 119 aa, Unknown
  Bacterial polypetide isolated from the Sargasso Sea
MENINKDQKEFWNGKKGNIWVSLEQKIDVMLDPLGDAALKVLAPKTNERVLDIGCGTATTTLKIAKLVGNNGLVTGVDVSKPILECARQKAKKKLKYNIDFVLADAQNYKFEPNSQDAI

SEQ ID NO: 104889 - protein, 246 aa, Unknown
  Bacterial polypetide isolated from the Sargasso Sea
IGLDQAQKDKKQHIINKLQINQNMNVLDIGCGWGGMAIEIAKSTGAKVKGITLSENQFNTASERAHKEGLSEKVTFALQDYRKEKESFDRIVSVGMFEHVGVKYFKTYLKKTNELLKDNGVFLLHTIGQRGKPTATSPWIRKYIFPGGYIPSLSEIIKETQKLNINVTDIEVLRLHYAHTLSHWYKNVIENKDKVIKMFDERFFRMWEFYLLISKYSFVNMGNIVFQIQISKNINNLPLTRNYIYN

SEQ ID NO: 104890 - protein, 146 aa, Unknown
  Bacterial polypetide isolated from the Sargasso Sea
MKLKIRDKKLHYKLLFHPDLYFGEAYTDGDIIIENGSLTEFLDLALMNIGRGELNVFSYLINRFRGSYRYLTNFNFIKKSKMNVSHHYDIKDDLYDLFLDPKRQYSCAYFKNENDSLETAQNNKIQHIIKKLNIKPDQKVLDIGCG

SEQ ID NO: 104891 - protein, 190 aa, Unknown
  Bacterial polypetide isolated from the Sargasso Sea
MNWAESYDSGFAASKGYDYPRLIAEHFVDRVSPDQSPVLDIGCGTGLVGVSLRKEGWSSELNGVDISEGMLEVAERKKVYEKLICADLSDTLQLPQSHFGGMISAGTFTHGHLGPEVLFHLFPLSRPGAHAVIGINAEYHGNQDFSGAFREWEEKGIVGKTKWTEIQIYQAPEGKEPEKKLALIADFRIL

SEQ ID NO: 104892 - protein, 235 aa, Unknown
  Bacterial polypetide isolated from the Sargasso Sea
MKKLKNWDNRTWLSSKSYISQFNRFLKKKINLNKNSKILDIGCGRANIISALQKKYKFRNKPIGIDIVVNKDVKKNIVFKNIGALKYLKKQEKYDLILIKQTIHFFSKSNLNLLLNLAQKSLNKKGKILIFSLKTNDNKIPCFKKMRKDLEKSLKRDEVLFKIIKKNLKKVSYTNFNFKVNISKQKYIRMIRERYISCLLNMSSREINLGISEIKLKYKNQIKFTDTLKCISYRK

SEQ ID NO: 104893 - protein, 240 aa, Unknown
  Bacterial polypetide isolated from the Sargasso Sea
MTTINQEEIQKFSKLAEEWWDVSGKFKPLHMFNPIRIEYILDKTSSHFKRNDKKLPLKGLKFLDIGCGGGLISEPMCRLGADVTGIDASLKNIKIAETHSKKNNLKINYLNTSPEKFEEYEKFDVILNLEIVEHVEDVDLYFKSCAKLLKKNGIMFTATLNRTFMSYLKAIIGAEYILRWLPIGTHDWNKFFKPSEIEEKISSLDFSVIETKGLEFNPFTQKWKTSNNLSVNYIVTSVKN

SEQ ID NO: 104894 - protein, 160 aa, Unknown
  Bacterial polypetide isolated from the Sargasso Sea
MDKEQLHYDTVHIGFLEKLWGDGFMSPGGYGEVKRLLIDTNMSGSKVLDIGCGAGGITLSLVKDFEAKMVIGVDVEADVVKKAKTKVKKASLDDQIKILLIGQGKLPFKAKTFDIVFSKDSIVHISNKEKIFNEVFRVLIPGGIFVFSDWLISHDQEPSP

SEQ ID NO: 104895 - protein, 60 aa, Unknown
  Bacterial polypetide isolated from the Sargasso Sea
MTIDNATQIEFWNGETGRNWVTQDALMEAMLQPLGEYVMDTLAPQPGEHVLDIGCGWATP

SEQ ID NO: 104896 - protein, 131 aa, Unknown
  Bacterial polypetide isolated from the Sargasso Sea
QHIIKKLNIKTNQKVLDIGCGWGSLAIDIAKSANCEVTGITLSENQLNYCRKKAKELNLENQLNFKLIDYRELNEKFDRIVSVGMFEHVGRKFYKKFFKQIDKLLNEDGISLIHTIRSVNPPRDPHPWITK

SEQ ID NO: 104897 - protein, 227 aa, Unknown
  Bacterial polypetide isolated from the Sargasso Sea
MNKIVSIRKDWKLIETLMEENRSILDIGCGDGMLLEMLEKNLNAKTHGIELNRDLASKAIAKGFNVIHGNAEIDLSQYSNNSFDYVILSQTLQAMMKPREILLELLRIGSKAIVSFPNFGHWKIRFQLLFSGRMPITESLPYNWYDTPNIHFFTIKDFLKLCNDMNIVIEKSIGLTSKGKQFDINESLTSVNFFTHEAIFLLSYKNYKPIKIKSSKKIFNKNSVIAS

SEQ ID NO: 104898 - protein, 182 aa, Unknown
  Bacterial polypetide isolated from the Sargasso Sea
MEEINKKQKDFWSGAGGDVWVDKQKEMDIMLNPLGNKAINNINFSDHLTILDIGCGCGETTLDIAKKVPNGKIIGLDISEPMLQKARLSADERSLSNIQFEVKDVQIDSMPPEYFDVAFSRFGVMFFEDPYQAFKSIHSTLKQSGQLSFVCWQNPSLNPWQSLSIAVIKEFLELPSPPPKSP

SEQ ID NO: 104899 - protein, 180 aa, Unknown
  Bacterial polypetide isolated from the Sargasso Sea
MITCEICSSKKINILFNNDRYGINQKTCVCNNCGFIFSNPRMTQKSTEYFYNSDLYRLIYDKSGKNFNKEEILKNSINLMKEHKPSLPKKPDFNNYYPNLYFDFINYQIKDFETVLDIGCGRGKKLVEFNALGKKTYGIEPSNTYHKVHSELGLNTKIGFIKDVEDKYDLVILTHVFEHL

SEQ ID NO: 104900 - protein, 146 aa, Unknown
  Bacterial polypetide isolated from the Sargasso Sea
MSRGLSYPVELINCLEVFWGPGFLSPGGSLEVFEILRGIPIRGRSVLDIGCGIAGPAIVMARDMCAQRVVGVDVEPQVIARGTLNVTNANLRSAIELKLIKPGPLPFSNEKFDVVFSKDSLIHIQDKATFFQRDFAGLETKRHIAA

SEQ ID NO: 104901 - protein, 242 aa, Unknown
  Bacterial polypetide isolated from the Sargasso Sea
MSSTINKDEIQKFSSLANEWWDVNGKFKPLHMFNPIRIEYISENIKKYFKIKGEKNNFLKGLHILDIGCGGGLISEPMARLGANVTGIDASEKNINIAKLHSKKSGLKIEYLHTSPENLKEIEKFDIILNLEIVEHVEDVNLYIKSCYNLLKKNGMMFTATLNRSFISYVKAIIGAEYILRWLPIGTHDWNKFIKPEELEKILSEEKFSTFDIKGLNFNPFLNKWKKSNNLSVNYIISSLKN

SEQ ID NO: 104902 - protein, 227 aa, Unknown
  Bacterial polypetide isolated from the Sargasso Sea
MNNIKSIRKDWDLIESLIKEKSRILDIGCGEGDLIQQLKKNLEAKVHGIEKSQELALKGIAKGLNVTHGDAEKDLSQYANHSFDYVILSQTLQAMVEPKKILKELLRVGSKAIVSFPNFGHWKIRLQLLFNGQMPITEGLPYSWYDTPNIHFFTLKDFQNLCREMNIVIENSIGLTNKGKQFAISGSLLPANIITNEAIFLLSYKDFEPIKIKSSNKIFAKKSAIVN

SEQ ID NO: 104903 - protein, 100 aa, Unknown
  Bacterial polypetide isolated from the Sargasso Sea
MTTINKEEIQKFSMLADEWWDVEGKFKPLHMFNPTRIEYILTICSSYFKVDKDLPLKNLKILDIGCGGGLISEPMCRLGAKVTGIDASSKNINVAKSHAY

SEQ ID NO: 104904 - protein, 83 aa, Unknown
  Bacterial polypetide isolated from the Sargasso Sea
MKKKNLVKYWNKFYKKKSIISESTFAKFTYKKILNKKVKLLDIGCGNGRDSYFFNKKGFHVTGIDISQKAIQKNSKNKIKNLS

SEQ ID NO: 104905 - protein, 206 aa, Unknown
  Bacterial polypetide isolated from the Sargasso Sea
MIERTSLKVINKTLEENKNWKILDIGCGYTANPNANYIADVQDFSDFYKNRKIFTRITDKILPFKDNEFDFVIASHVIEHVEDFEFFLKELERISKKGYIELPTRLGDNLVFENTSDHIWWFTFCDIEKKLLASRRNQTLEPFLSVNTGKKISDSFRESFVLELLWKDKIDYRFDEEINNERISKFSFLNIVKKYFSKKIRRLFSR

SEQ ID NO: 104906 - protein, 235 aa, Unknown
  Bacterial polypetide isolated from the Sargasso Sea
FFESRGQREYSNLLSATMYQDREPDLVESRDLAEKAAVASVLGLSGVRHVLDIGCGIGRWGWFLVEHCPQLQYLGLDFSASLIGKAQQEAQRRGATELSFQVMSATDIQGDALVLPGPFDLLLISGLLIYLNDSDCVKVLRDAARFCTAGGAIYLREPVGITERFTLDRYYSEELADEYSAIYRTVDELYAAMNEAFAGMNVTVEREGFLFPDGLEKRVETRQYFFVLRREGKQV

SEQ ID NO: 104907 - protein, 275 aa, Unknown
  Bacterial polypetide isolated from the Sargasso Sea
GRGDLNFFSYFLNRLRGSYRYLTNFNFIKKSKMNVSHHYDISDDLYDLFLDPKRQYSCAYFKNETDTLETAQNNKIQHIIKKLNIKPNQKVLDIGCGWGSLAIDIAKSANCEVTGITLSENQFNYCKKRAKEINLENQLNFKLMDYRELNEKFDRIVSVGMFEHVGRKFYKKFFSQVEKLLKDDGVSLIHTIGSVNPPRDPHPWITKYIFPGGYTPSLSEVTTPIEKAGLIVSDIEVLRMHYSHTLRHWKENCLNNKDKIINMFDERFFRMWEFY

SEQ ID NO: 104908 - protein, 151 aa, Unknown
  Bacterial polypetide isolated from the Sargasso Sea
MWKSKTPGIPDEEFERTESVPITKEEIRAIQISKGRLSVGQTVLDIGCGSGSITIEAAIQVEESGKVIGVDIDPNAIELTEKNLKKFGIKNYVLIEGNAKEKISELPQADTVFIGGTGGDTKDIVELCQNKIKSGGRIVIGVILIETLYSV

SEQ ID NO: 104909 - protein, 228 aa, Unknown
  Bacterial polypetide isolated from the Sargasso Sea
MTKSRSFQFKQFSIHQEQSAMKVGTDGVLLGAWTMPEGAQNILDIGCGTGLISLMLAQKSKAKITAIEIEPKAAEEAKLNVKESPWQNRIKVIHQSFQKYIDSNSEKAVDLIVCNPPFYRSNQAKGQRSLARENEHLPFSELIQETAKLLSDDGKFCVIVPATEGEEFLRFSKMHGLYASRITFICGNKNTAVKRHLIQLERRENTPKVNTIIIETSRNNYTPEYQNL

SEQ ID NO: 104910 - protein, 272 aa, Unknown
  Bacterial polypetide isolated from the Sargasso Sea
MRCNDCHLDYLETWDRPIDVYKFYENNNYVCEPNITKGTLKYDERKKRVERVLPYVNKKTRLLDIGCGNGTFLKDLKKHVKIIEGMELTKEHVDQLTREGIKVWDCFLEDFEPEVPYDVVVMHATLEHIADINQFMVDLKRIIHEKTKVFVEVPNMRDPLAYIFNIEPYRKFFYREYHLYYFSEISLFKIFNKFDFKQSEIWPEMVASLSNHFHWINLNIGQSDTNTMVNMVLNCDYLGTKLPNGNDFKDIMDEIDNTYRVKLQEAGVGDYC

SEQ ID NO: 104911 - protein, 183 aa, Unknown
  Bacterial polypetide isolated from the Sargasso Sea
MQLVSFLNKVFKKGGFVLIDANSKEHVIGEPSKNPIRLKILDKRLHYKLLFHPDLYFGEAYTNGDLIVENGTLSDFLNLALMNFGRGELNFFSYLLNRLRGSYRYLTNFNFIKKSKMNVSHHYDISDDLYDLFLDPKRQYSCAYFKNEKDSLETAQNNKIQHIIKKLNIKDNQKVLDIGCGWG

SEQ ID NO: 104912 - protein, 228 aa, Unknown
  Bacterial polypetide isolated from the Sargasso Sea
MKKEFKVISDLIEERSRALDIGCGDGNLMEYLLQNKTKDIRGLEISKEKVQKCLSKGLTVIEGDAENDLKQFPNKSFDYVILSQTLQAFLKPENVINELLRVGNRAIVTIPNFGHWKVRIDLLTKGTMPVTKNLPNEWFNTPNLHMCTILDFYNFCKKRDIKIFKSLSLNGEKISNIKISNLKIKNLISELGIFLIENKNENKIIKCFTDNYSYLLIDKINNSACVID

SEQ ID NO: 104913 - protein, 203 aa, Unknown
  Bacterial polypetide isolated from the Sargasso Sea
MIKRTSKTYIEKTLSENPEWKILDIGCGYGANKYATTVSDILDLSNHYKDKSFVKITEKKLPFKDKEFDFVIASHVVEHVEDISYFLNELSRVGKKGYIEVPTRLEDNLVFENKKAHIWHLVFDDVNNQINISKKQQYLEPVLTVGTIKKLNEYFRESLVIELSWEESIKFNIDEDNFKTPVKISTLNLLKKYFSKKIRLLIK

SEQ ID NO: 104914 - protein, 70 aa, Unknown
  Bacterial polypetide isolated from the Sargasso Sea
MANNTIIKEEIEKFNKMAEEWWDPNGKFKPLHKFNPIRIEYIKNNIIKEFNIKNRKKPFSGLEILDIGCG

SEQ ID NO: 104915 - protein, 106 aa, Unknown
  Bacterial polypetide isolated from the Sargasso Sea
MEKNLTSIRKDWELIQNLIEKDRKVLDIGCGSGGLMKRLKEKCMSDVKGIEIKGDFVRKALSKGLVVIQGDAEKDLNQFNDKSFDYVILSQTLQAMYNPKNYLLKC

SEQ ID NO: 104916 - protein, 184 aa, Unknown
  Bacterial polypetide isolated from the Sargasso Sea
DRRVGYGGYYYDGRWVGISERAIQLFDLSPGDRVLDIGCGKGFFVYDLVKSFQIDAYGLDISTYALKEATLEIQGRLQRHDMRAQLNFPDDFFDAVFCINTLHNLDRLEASFSVSEMIRVVKKKENIFIQVDSYKNPEDLEIFEKWVLTAKLYMPPDDWLEFLADCGYKGAYYWTVLLGDGSVE

SEQ ID NO: 104917 - protein, 148 aa, Unknown
  Bacterial polypetide isolated from the Sargasso Sea
MKEKKIITSLHIQTKRNYLQRMINQKVKCMQIAKKYGYDYWDGNRKYGYGGYKYIPDRWKKPAQNLIKTYKLNNKSKILDIGCGKGFLIYEIKKILPKIKVVGLDISSHAIKNSKKEIKKYLIKKDIRNSLRYKSKQFDLVISINTLH

SEQ ID NO: 104918 - protein, 221 aa, Unknown
  Bacterial polypetide isolated from the Sargasso Sea
IRKDWDLIESLIKRNSRILDIGCGEGDLIQQLEKNLEANVHGIEKNQDMALRGIEKGLNITHGDAEKDLTQYANQSFDYVILSQTLQAMLEPKKILTELLRVGSKAIVSFPNFGHWKIRLQLLLWGKMPITEGLPYSWYDTPNIHFFTLKDFENLCNEMNIVIETSIGLSSRGKQFIINGSLLPANLITHEAIFLLSYKNFEPIKIKSTNKVFAKNSAIIN

SEQ ID NO: 104919 - protein, 136 aa, Unknown
  Bacterial polypetide isolated from the Sargasso Sea
MTTINKEEIQKFSRLADEWWDANGKFKPLHAFNPVRIKYIIDKCKSHFKLEKKDEKTLSVLKILDIGCGGGLVCEPLSRLGANVTGIDASYKNIEVAKIHAKKSGLKIKYFNTSPEKKEINEKFDVVLNLEVVEHV

SEQ ID NO: 104920 - protein, 119 aa, Unknown
  Bacterial polypetide isolated from the Sargasso Sea
MKTTTINKEEIDKFSKIADEWWDPDGKFKPLHAFNPIRIKYIKDNIIKHFKIEKKILPLSKLKILDIGCGGGLIAEPMTRLGASVTGIDASEKNIKIAKAHLRKNKLKINYKCASPENF

SEQ ID NO: 104921 - protein, 198 aa, Unknown
  Bacterial polypetide isolated from the Sargasso Sea
IKKYYKIKSNKSNSLEGLKILDIGCGGGLISEPMARLGAKVTGIDASEKNIEVAKLHSKKSNLQINYLSCSPENLNDLNEYDVILNLEIVEHVENVNLYINSCYKLLKNKGLMFTATLNRTLTSYIKAIIGAEYILRWLPIGTHDWNKFIKPEELEKTLSQQKFLTVDIRGMKFNPFSKKWRISSDLSVNYIISSFKS

SEQ ID NO: 104922 - protein, 92 aa, Unknown
  Bacterial polypetide isolated from the Sargasso Sea
MANEEQFELWNEGIGKKWVEEDDSMNERLSILTKELFLRLNINRGDKILDIGCGGGQTSFEASEIVGENGYVVGADISKILLDLAKSKYANT

SEQ ID NO: 104923 - protein, 230 aa, Unknown
  Bacterial polypetide isolated from the Sargasso Sea
MNFLRKLIKEDGFEFVDVNSKSYTIGKPKKEYPIKIKILDKTLHWKLLINPDLYLGEGYMNGSIVIENGTLTDFLDIVLKNVGRQPTNTMTNILGRFRRIYRYITNFNLIGKSKENVAHHYDISEKFYDLFLDEKRQYSCAYFKSEDNTLEEAQNNKIDHIIKKLNLKPNQRVLDIGCGWGTLALDIAKKTQCEVVGITLSENQLEYAKQKAKEMNLENQVEFRLADYRQ

SEQ ID NO: 104924 - protein, 280 aa, Unknown
  Bacterial polypetide isolated from the Sargasso Sea
MLIQKVTFIGNPKSENPIKLKILNKNLHYKLLFHPDLYFGEAYTDGEIIIENGTLTDFLDLSLMNFGRGNLNFFSYLINRLRGSYRYLTNFNFIKKSKMNVSHHYDISDDLYDLFLDPKRQYSCAYFKNETDTLETAQNNKIQHIIKKLNIKPNQKVLDIGCGWGSLAIDIAKSANCEVTGITLSENQFNYCKKRAKELNLENQLNFKLMDYRELNEKFDRIVSVGMFEHVGRKFYKKFFSQVEKLLKDDGVSLIHTIGSVNPPRDPHPWITKYIFPGGY

SEQ ID NO: 104925 - protein, 167 aa, Unknown
  Bacterial polypetide isolated from the Sargasso Sea
MLFEKLNSAPFQDHEKTINNLINVNNRVVLDIGCGAGRIARILAKNGGRVIGIDPSVTQLDRAKVLSASNTVKYVRGLGERLPVRNSSIDFCIFFNSLHHVPSDYLERAIHEAGLSLKKNGILYVAEPIAYGPLFELSKSFNDETIVREKAYSALLNIKQSEMIMDS

SEQ ID NO: 104926 - protein, 162 aa, Unknown
  Bacterial polypetide isolated from the Sargasso Sea
MTTINKEEIQKFSNLADEWWDVNGKFKPLHMFNPIRIEYILEEISKHFKLDRNKKSLLKNLKILDIGCGGGLISEPMARLGGRVTGIDASEKNIKVASIHSKKNNLEINYLNKSPEQLKVKEEFDIILNLEIVEHVDNLDLYLESCNKLLKRNGLMFTATIK

SEQ ID NO: 104927 - protein, 161 aa, Unknown
  Bacterial polypetide isolated from the Sargasso Sea
NPVAEGLIKEYSLTEESQVLDIGCGKAFLLHELKLLLPGIKVCGIDISEHGLKHATEEIRPYLLRQRAQDPLPFEDNEFDLVISLGMFHNLKLFELQSSIQEMQRVGQQGYLMLESYRNEQELFNLQCWALTAESFLEMSEWIWLYNHFGYKGDYEFIYFQ

SEQ ID NO: 104928 - protein, 258 aa, Unknown
  Bacterial polypetide isolated from the Sargasso Sea
MQLARFLNSVFKKDGFILVDANSKNYIIGNPKSNNPIKVKILNKNLHYKLLFHPDLYFGEAYTDGEIVFENGTLTDFLNLSLMNFGRGDLNFFSYLINRLRGSYRYLTNFNFIKKSKMNVSHHYDISDNLYELFLDPKRQYSCAYFKSETDGLETAQNNKIQHIIKKLNIKPNQKVLDIGCGWGSLAIDIAKSVNCEVTGITLSENQFNYCKKKAKELNLENQLNFKLMDYRELNEKFDRIVSVGMFEHVGRKFYGKF

SEQ ID NO: 104929 - protein, 198 aa, Unknown
  Bacterial polypetide isolated from the Sargasso Sea
MWKSKTPGIPDEEFERTESVPITKEEIRAIQISKGRLSAGQTVLDIGCGSGSVTVEAAIQIEDSGKVVGVDIDPNAIELTEKNLKKFGISNYTLIEGNAKEKIIELPNADTVFIGGTGGDTKDIVELCQEKIKTGGRIVIGVILIETLYSVLQTIEKLDFESIDITQITIGKSRKTKTGTMMLARNPVTVISATKKII

SEQ ID NO: 104930 - protein, 119 aa, Unknown
  Bacterial polypetide isolated from the Sargasso Sea
MFDFSKARQEMVDCQIRTADVTNYSILQALSRVAREKFVPDEYVSIAYGETNINLGSGRYLLEPRIFAKMLELLSVNSNDLVLDIGCGLGYSSAILSQLAEVVIALENEFFFKNAQKLL

SEQ ID NO: 104931 - protein, 292 aa, Unknown
  Bacterial polypetide isolated from the Sargasso Sea
MPFQQLNQLVNSKKNVAHHYDIDENLYKLFLDKDMQYSCAYFHNQNIDLDQAQKDKKIHIINKLQINEQMNVLDIGCGWGGMAIEIAKVTGAKVKGITLSENQYKTASERAQKEGLNDKVSFFLQDYRNEKEKYDRIVSVGMFEHVGVKYFKTYLKKANDLLKDNGIFLLHTIGQRGKPTATSPWIRKYIFPGGYIPSLSEIMNETQKLNINVTDIEILRLHYAHTLSHWYKNIKENKEKIIKMFDKRFFRMWEFYLLASKYSFVNMGNVVFQIQISKNINSLPLTRNYIYN

SEQ ID NO: 104932 - protein, 290 aa, Unknown
  Bacterial polypetide isolated from the Sargasso Sea
LTNFNFIKKSKMNVSHHYDISDDLYDLFLDPKRQYSCAYFKNKNDSLETAQNNKIQHIIKKLNIKTNQKVLDIGCGWGSLAFDIAKSASCEVTGITLSQNQFNYCNQKAKDLNLENQVKFKLMDYRELNEKFDRIVSVGMFEHVGRKFYKKFFNQIERLLKDDGISLIHTIGSVNPPRDPHPWITKYIFPGGYTPSLSEVTTPIERAGLIVTDIEVLRLHYSYTLRHWKENCMKNKAKIIKMFDERFFRMWEFYLTGCEMAFKYGEQVVYQFQLSKNYYSTPVTRDYIYQ

SEQ ID NO: 104933 - protein, 83 aa, Unknown
  Bacterial polypetide isolated from the Sargasso Sea
MTTVNKEEIQKFSKIADEWWDTKGKFKPLHMFNPIRIKYIKEKCISHFKLKEDHPKPLTNIELLDIGCGGGLISEPMCKLGAK

SEQ ID NO: 104934 - protein, 92 aa, Unknown
  Bacterial polypetide isolated from the Sargasso Sea
MTTINQDEIQKFTKLADEWWDVSGKFKPLHMFNPIRIEYILDKTIEHFNIKGVKLPLKGLKILDIGCGGGLISEPMSRLGASVTGIDASLKN

SEQ ID NO: 104935 - protein, 204 aa, Unknown
  Bacterial polypetide isolated from the Sargasso Sea
MINRTSLKKIEKKLNENKNWKVLDIGCGYTANKFATTIADVLDLQDFYKDKNFVKIENKKLPFKDNAFDFVIASHVIEHIEDITFFLKEIQRISNKGYIELPTRLGDNLVFENQKEHLWWFTFDDQNKILIAEKKKQILEPFMSVATAKQVSDNFRESFVLELYWENNIEYNIKSEEDKKYEQLTFFTIIKKFFSKKLRRLIKG

SEQ ID NO: 104936 - protein, 221 aa, Unknown
  Bacterial polypetide isolated from the Sargasso Sea
MYVAKLLSQIYKKNGVILIDSEGQKYICGKPDLQKPLTIKLLKKDLNWKLLLNPDLNFPEAYARGEIEFENGTLLDFLNMTFENLGRKEINLFGSSLKKILHIWRFFTNFNLPTKSKKDIEHHYDKGEELYDLFLDKKHRQYSCAYFSSDTESLEDAQQNKINHIIKKLDLRSNQKVLDIGCGWGGMVFEIARQSQCEVKGISLSENQINYCNKKAKELKL

SEQ ID NO: 104937 - protein, 105 aa, Unknown
  Bacterial polypetide isolated from the Sargasso Sea
MWKSKTPGIPDEEFERTESVPITKEEIRAIQISKGRLSAGQTVLDIGCGSGSVTVEAAIQIEDSGKVVGVDIDPNAIELTEKNLKKFGISNYTLIEGNAKEKIIE

SEQ ID NO: 104938 - protein, 158 aa, Unknown
  Bacterial polypetide isolated from the Sargasso Sea
MKQDIVNIDQSEYWNEKSGPKWVKLDDAMNERFSILTDKLFARANINKNERILDIGCGGGETSFRASKLVGPDGYVMGADISETLLSFARKKFSTIRNLEFNTCDAQSYKFEKANFDRVISRFGVMFFENPVEAFRNIRSSLKDGGTISCVSGQILEK

SEQ ID NO: 104939 - protein, 280 aa, Unknown
  Bacterial polypetide isolated from the Sargasso Sea
MSFRVLKFLIKHLIKTRSVVIKFEGNEHFIDNGTDPLILQINNKKFLNKIFYAPSLVLTEGYMDKDYELNNSTFYEFSELLIENYNKYLEKISNTLIFRIILIINPLFQLNFVKSSKSNVASHYDLSDRLYDLFLDETRQYSCAYFENENDSLTQAQTNKMSRLADKLLLNSNDRVLDIGCGWGSLSRHFADHHDCKVKGVSLSEEQIKYCNDQLKKSDKKENLSYSLQDYRDEENSYSKIVSVGMFEHVGKPFYKTYFKKIYNLLSDDGIAVVHTIGNI

SEQ ID NO: 104940 - protein, 228 aa, Unknown
  Bacterial polypetide isolated from the Sargasso Sea
HIKPNQKVLDIGCGWGSLAFDIAKSANCEVTGITLSENQYNYCKQKAKEHNLDNQVNFKLIDYRELDEKFDRIVSVGMFEHVGRKFYKKFFNQVEKLLKDDGISLIHTIGSVNPPRDPHPWITKYIFPGGYTPSLSEVSNPIEKSGLIVSDLEVLKLHYMHTLRNWKENCINNKEKIIQMFDERFFRMWEFYLAGCEMAFKWGDQVVFQFQLTKNYRSTPVTRDYIYQ

SEQ ID NO: 104941 - protein, 153 aa, Unknown
  Bacterial polypetide isolated from the Sargasso Sea
MNKINSIRKDWSLIETLITQDRKILDIGCGDGGLMEQLENNSNAITHGIELNRDLAANAIARGFNVVHGNAELDLSQYSNNSFDYVILSQTLQAMMKPKDILSELLRIGSKAIVSFPNFGHWKIRLQLLISGKMPVTESLPYTWYDTPNIHFL

SEQ ID NO: 104942 - protein, 231 aa, Unknown
  Bacterial polypetide isolated from the Sargasso Sea
NKLQINNDMKVLDIGCGWGGMAIEIAKLTGAKVKGITLSENQFKTASERAQKEGLSDKVSFALQDYRNENDKYDRIVSVGMFEHVGVKYFKTYFQKAYNILNDNGVFLLHTIGQRGKPTATSPWIRKYIFPGGYIPSLSEIVKETQKLNINVTDIEILRLHYAHTLSHWYKNVIENKDKIIEMFDKRFFRMWEFYLLASKYSFVNMGNVVFQIQISKNINNLPLTRNYIYN

SEQ ID NO: 104943 - protein, 144 aa, Unknown
  Bacterial polypetide isolated from the Sargasso Sea
KILDIGCGKGYLLYDFQKVIPKAEIYGIDISSYAIKNSKPEIRNRLHLGSATNLPWPDGYFDLVISINTLHCLHAHDLSDALKEMQRVGKNNKYLCVESWRNQSEKANLLYWQVSCEAFNTPEAWLWWFKHAGYNGDYSFIYFE

SEQ ID NO: 104944 - protein, 232 aa, Unknown
  Bacterial polypetide isolated from the Sargasso Sea
MISIYRYFYYIYAKFKFYKLSNKKIFSKIYKDKMWGYDYGSVYYSGYGSNNNIIVNEFILSIKNFFEEIKIKPKILDIGCGDFEVGKNIYPFSSEYTACDIVPELIEYNKTKFNYPNLRFLCFDATNNKDLPKSDVVLLRQVLQHLCNSQIKIILDKIKGNFKYLILSEHIPINKFIPNKDIHTGDLSRVFINSGIDIEKKPFNYKFKKKIILNEVFEKEGKVQTIVFKLDE

SEQ ID NO: 104945 - protein, 186 aa, Unknown
  Bacterial polypetide isolated from the Sargasso Sea
KRDWKILDIGCGYGANEFANTICDVQDLSKFYKDKNFIKLENKQLPFKDNEFDFVIASHVLEHVEDFKFFISELERVSKKGYIELPTKLEDNLVFENKNDHLWHMDFDDVNSKLLISNKLQYIEPILTVSMIQNLRENFKASLVLELYWEDKIDYDFVANNQNIKKHNLLNLFRKFISKKLRSIYN

SEQ ID NO: 104946 - protein, 135 aa, Unknown
  Bacterial polypetide isolated from the Sargasso Sea
MFDFSKARQEMVDCQIRTSDVTNYSILQALSKVSREKFVPDEYVSIAYGETNIYLGNGRYLLEPRIFAKMLELLRVNSNDLVLDIGCGLGYSSAILSQLAEVVIALEDEFFFKNAQKLLSETSIENTVIYEGSLS

SEQ ID NO: 104947 - protein, 64 aa, Unknown
  Bacterial polypetide isolated from the Sargasso Sea
MNKIQSIRKDWDLIESLIRDNSRILDIGCGEGDLIKQLEKNLSAKVHGIEKNQELALKAIAKGL

SEQ ID NO: 104948 - protein, 121 aa, Unknown
  Bacterial polypetide isolated from the Sargasso Sea
MNNIKSIRKDWNLIESLIKENSRILDIGCGKGELIEQLEKNLKANVHGIEKSQNMALQGIANGLSIIQGDAEKDLFQYSNQSFDYVILSQTLQAMMKPQKILSELLRIGSKAIVSFPNFGH

SEQ ID NO: 104949 - protein, 202 aa, Unknown
  Bacterial polypetide isolated from the Sargasso Sea
MNKIASIRKDWGLIETLIEDNRNILDIGCGDGMLMEQLQKNLNAKTYGIEIDRELASKAIAKGFNVIHGDAEIDLVQYSNNSFDYVILSQTLQAMMKPKDILSELLRIGSKAIVSFPNFGHWKIRFQLLISGRMPVTESLPYTWYDTPNIHFFTIKDFLKLCNDMNIVVEKSIGLTSRGKQFDISQSLTSVNFFTHEAIFLL

SEQ ID NO: 104950 - protein, 218 aa, Unknown
  Bacterial polypetide isolated from the Sargasso Sea
NYINSFNNFLIKNTKINSKFKILDIGCGRGKILGSLSSRLNLKYKPLGIDVVNHKDRDKRINFKRANILDLSLKKNQKFDLILIKQTIHLIKLSEVKKLLKSLVKILNTKGKILIFTLDTANNEIPTFKLMKFKLNKSLMRDKKIMKIITNLYPKRIKKKFIFKVKISKEKYIEMIESRYISTLIPLSKKQLNQGIQEIKLSYKNQLKFKDKLICIIL

SEQ ID NO: 104951 - protein, 313 aa, Unknown
  Bacterial polypetide isolated from the Sargasso Sea
MGNPIKEKPIKLKILNKNLHYKLLFHPDLYFGEAYTDGEIVIENGSLTDFLDLALMNFGRGDLNFFSYLINRLRGSYRYLTNFNFIKKSKMNVSHHYDISDDLYDLFLDPKRQYSCAYFKNETDSLETAQNNKIEHIIKKLNIKSNQKVLDIGCGWGSLAIDIAKSANCEVTGITLSENQFNYCNKKAKELNLENQLSFKLMDYRELNEKFDRIVSVGMFEHVGRKFYKKFFSQVEKLLKDDGVSLIHTIGSVNPPRDPHPWITKYIFPGGYTPSLSEVTTPIEKAGLIVADIEVLRMHYSHTLRHWKEIVSK

SEQ ID NO: 104952 - protein, 254 aa, Unknown
  Bacterial polypetide isolated from the Sargasso Sea
REEVNTQEVTDEQVQVRENVEPVTDKVSETEIESVQEEPIDLDQIDGQPLTQEAFADLDDNYLKSDPQVVGYRSLEEQEVMYDFIASNFDCTQESILDIGCGRGDFLRHVQELYQADIRYHGIDMNKILIQTAKEMSPGATFTASNLFKLDGNFAADWVINIGGLSIMYEPVKEDFDIMDALKNTVTKMMELADTGIVISLLSMNTSEDYDESYLVYDPVEVLDWALNEYGQLGGNVRLDHSVADSIFTLTIFK

SEQ ID NO: 104953 - protein, 263 aa, Unknown
  Bacterial polypetide isolated from the Sargasso Sea
EHRQYSCALFKDPNETLDQAQTNKLSHIVKKLNTKPGHKILDIGCGWGGLSRYIAKETGCVVHGISLASNQIEYCKEKARELKLDNLLSYKLCDYRQLKGSWDRIVNVGFFEHVSPKFYKTFFKKINDLLKDNGDSLCLTHTIATTNPPGPANPFINKYIFNGGKVPSASQITKALEESGLIISGWESLIDHYNLTLDHWRKNFLNNVYEARKAYGSNFIRLWDFYLSSCSAAFKWSDLLVYQIETVKDFKSVPGRTRDYIYK

SEQ ID NO: 104954 - protein, 177 aa, Unknown
  Bacterial polypetide isolated from the Sargasso Sea
MKNEIPIFFSDINHGDYFKWMKYIDELPNISVSKFDFTLDAVTIGDKSDCSIEERAILKNNLMKLKPWRKGPFNIFGLFLDAEWQSNMKWNRLVEHIKPLENKLVLDIGCGNGYYGWRMLGKKAEYVLGLDPSLLFYSQFIATKKYLPDANIDYVPFGIESIAHENLCFDSVFSMGV

SEQ ID NO: 104955 - protein, 252 aa, Unknown
  Bacterial polypetide isolated from the Sargasso Sea
LASFLNKVFTHSGFILIDANSKDYIIGNPGKNPIKLKILNKNLHYKLLFHPDLYFGEAYTDGEIIIEDGTLTDFLDLALMNFGRGDLNFFSYLINRLRGSYRYLTNFNFIKKSKMNVSHHYDISDDLYDLFLDTKKQYSCAYFKNENDSLEVAQNNKIQHIIKKLNIQPNQKVLDIGCGWGSLAIDIAKSTKCEVTGITLSENQFNYCNQQAKEMNLENQVKFKLIDYRELNEKFDRIVSVGMFEHVGRKFY

SEQ ID NO: 104956 - protein, 163 aa, Unknown
  Bacterial polypetide isolated from the Sargasso Sea
MSQRENISSEEVEKFNDLAREWWNPHGSFAPLHKLNPLRFEYIREKSSLEGKTAIDVGCGGGILTESLASVASNVHGIDMAEKGLAVANIHKNKSKLANIKYSQSTIEDYALKSNEKFDVLTCMEMLEHVPSPGETIQACSDIVIDGGDLFFATINRNIKSYI

SEQ ID NO: 104957 - protein, 108 aa, Unknown
  Bacterial polypetide isolated from the Sargasso Sea
MKKLKNWDNKTWLSSKSYISQFSKFLKTKINLNKNSKILDIGCGRANIISYLQKKYRFDKKAIGVDIVKNKEIKKNIIFKKIDAIQYLRKTNILFDIILIKQTIHFLN

SEQ ID NO: 104958 - protein, 190 aa, Unknown
  Bacterial polypetide isolated from the Sargasso Sea
FNENPNWKILDIGCGYTAHKNATVICDVQDLSDYYKDKSFIKLNNNNLPFKDKEFDFVVASHVIEHVKDVDFFIKELERVSSKGYIELPTILEDNLVFENKDDHLWHMEFNDVDNELIVSKKVQYLEPILTVSSAKKFSKYFKQSLVLELFWEDTIQYKIVKKDFEINQKISRLSLFRKFFSKLLRNIIR

SEQ ID NO: 104959 - protein, 241 aa, Unknown
  Bacterial polypetide isolated from the Sargasso Sea
MSAGFQCKQFYIGHQHCAMKVGTDALLLGAWATLPTALQATPAMLDIGCGSGILSLMLAQRTGGQIPITAVELDARAAAQAAANVALSPWPDAIRVIKGDILTYSTAERYALIISNPPFFQHALPSQDATRQQARHTDSLPFAALLKKAAQCLAPGGEFCLILPASSQAAFAQAALEQGWQCRARCAVQSKAGKPVSRYLQSWVKADTELDTEISQLQIHDSSGGYSAAYRQLLQAFYLNF

SEQ ID NO: 104960 - protein, 239 aa, Unknown
  Bacterial polypetide isolated from the Sargasso Sea
TINKEEIQKFSDLADEWWDVNGKFKPLHMFNPIRIQYITEKIKQVFNLKNQNNNFLKDLKILDIGCGGGLISEPLARLGGKITGIDASEKNIKIAKLHSKKNNLYINYLNKSPEQLNTSDKFDIILNLEVVEHVENVDLYIRSCSNLLKTDGIMFTATLNRTIVSYIKAIVGAEYILRWLPIGTHDWNKFFKPEELEKKLSLSNFSTIDVKGLEFNPFFNKWKKSDNLSVNYIICSKKN

SEQ ID NO: 104961 - protein, 236 aa, Unknown
  Bacterial polypetide isolated from the Sargasso Sea
MKKLKNWDNQTWLSSKNYIYHFNEFLNKRVRFNKNTKILDIGCGRANIISALQKSYKFKEKPIGLDIVKNNGIKKNISFKKIDGFDYLKRKNEKYDLILLKQTIHFFSSSKLKVLINIAKKRLERGGKILIFTIKTANNEIPCFKKMRQKLDNSLKRDEKLFKIIDKKLKKTSVTYFNFKVNISKQKYLKMVKSRYISCLLDLKNYEISKGISELQSKYKHQIKFTDTLKCISYKK

SEQ ID NO: 104962 - protein, 217 aa, Unknown
  Bacterial polypetide isolated from the Sargasso Sea
MTIDNATQIEFWNGETGHNWVTHDALMEAMLQPLGESVMDTLAPQPGEHVLDIGCGCGHTSLSLAQRVGAEGSVTGVDISTPMLAAASHLAAEHSSIQFVEADAQIHAFETERYDVVFSRFGVMFFEDPVAAFANIWSALRTSGRLAFCCWQPRAVNPFMTVPAIAALELLPAPPEMPPRTPGPFAFEEADYVTDVLTSAGFGNVAVTALKQPLTFG

SEQ ID NO: 104963 - protein, 165 aa, Unknown
  Bacterial polypetide isolated from the Sargasso Sea
IKDDLYDLFLDPKRQYSCAYFKNENDTLEDAQNNKIQHIIKKLNIKPNQKVLDIGCGWGSLAVDIAKSANCEVTGITLSENQLKYCKQKAKELNLENQLRFRLMDYRELDEKFDRIVSVGMFEHVGRKFYKKFFSQVEKLLKDDGVSLIHTIGSSQSSKETLIHG

SEQ ID NO: 104964 - protein, 188 aa, Unknown
  Bacterial polypetide isolated from the Sargasso Sea
MSTTINKEEIQKFSKLADEWWDVNGKFKPLHMFNPIRIEYITDSIKNHFKLKKDKINYLEGLEILDIGCGGGLISEPMSRLGASVTGIDASEKNINVAKIHSKDSGLKINYISTSPEKLKDYEKYDIILNLEIVEHVDNVEFYIQSCQKLLKKNGLMFTATLNRSLTSYIKAIIGAEYILRWLPVGTH

SEQ ID NO: 104965 - protein, 313 aa, Unknown
  Bacterial polypetide isolated from the Sargasso Sea
IVDSSDKIHEFGIGANNLKIKLTTKSIEKKLFRNPGLYFGEGYMNQEILILDGTIEQLIDLITSCYDDFIQNNFIYRIYENFSGYFKIFQQLNEAVKSKQNVAHHYDLKEDLYKLFLDQDMQYSCAYFHNENISLEQAQIDKKKHIINKLQITENMNVLDIGCGWGGMAIEIAKQTGANVKGITLSENQFNTASKRAQEEGLSDKIAFKIQDYRNETHTYDRIVSVGMFEHVGIKYFKAYLKKTYDLLKENGVFLLHTIGQRGVPTATSPWIRKYIFPGGYIPSLSDIINETQKLNINITDIEILRLHYAHTL

SEQ ID NO: 104966 - protein, 328 aa, Unknown
  Bacterial polypetide isolated from the Sargasso Sea
DGEIIIENGSLTDFLNLALMNIGRGELNFFSYLINRLRGSYRYLTNFNFIKKSKMNVSHHYDIKDDLYDLFLDPKRQYSCAYFKNESDSLEAAQNNKIQHIIKKLNIKPNQKVLDIGCGWGSLAIDIAKSAGCEVTGITLSENQLNYCNQKAKEMNLQNQVKFKLMDYRELKEKFDRIVSVGMFEHVGRKFYKKFFKQIENLLKDDGISLIHTIGSVNPPRDPHPWITKYIFPGGYTPSLSEVTTPIENAGLIVTDIEVLRLHYSHTLRHWKENCLKNKDKIVNMFDEKFFRMWEFYLAGCEMAFKWGDQVVYQFQLTKNYRSTPVTR

SEQ ID NO: 104967 - protein, 114 aa, Unknown
  Bacterial polypetide isolated from the Sargasso Sea
MENLDPEEIKKFNEMASTWWDPNGDFKALHDINPTRLDYIVSRVRKPLSAVLDVGCGGGILTESLEAHTDEIIGIDAAPKPLKVAQLHAIDQGLEIDYRLSTVETLSKEYRKPL

SEQ ID NO: 104968 - protein, 186 aa, Unknown
  Bacterial polypetide isolated from the Sargasso Sea
KYIDNQIEQNQNWNILDIGCGYTAHEKASVICDIQDLSDFYKNKKFVKLDSKKLPFKDKEFDFVISSHVIEHVEDVSFFIKELERVSSKGYIELPTSLEDNLVFENKNDHVWHTEFDDINFKLLIKKRVQYLEPMITVSTAKKLSKYFRQSLILELFWENSIDFDLLENDQFKLEKISRITLVRKF

SEQ ID NO: 104969 - protein, 241 aa, Unknown
  Bacterial polypetide isolated from the Sargasso Sea
MTTINKEEIQKFSNLADEWWDVNGKFKPLHMFNPIRIEYILDKLANHFKLNKQENLWLKKLNILDIGCGGGLISEPMCRLGAKVTGIDASEKNVKIAKAHAEKSDLNINYLNASPESLDTNSKFDVILNLEVVEHVEDLNLYLLSCSNLIKKGGIMFTATLNRTFVSYIKAIIGAEYILRWLPIGTHDWNKFIKPEELEGMLMKSKFKNLETKGLQFNPFYRSWSKSDNHSVNYIMVSEKI

SEQ ID NO: 104970 - protein, 263 aa, Unknown
  Bacterial polypetide isolated from the Sargasso Sea
FLDPKRQYSCAYFKNETDTLETAQNNKIQHLIKKLNIKPNQKVLDIGCGWGSLAIDIAKSANCEVTGITLSENQFDYCKKKAKELNLENQLHFKLIDYRELNEKFDRIVSVGMFEHVGRKFYRKFFSQVEKLLKDDGVSLIHTIGSVNPPRDPHPWITKYIFPGGYTPSLSEVSPHIEKSGLIVADIEVLRLHYMHTLRHWKENCLKNKEKIIQMFDERFFRMWEFYLAGCEMAFKWGDQVVYQFQLTKNYSSTPVTRDYIYQ

SEQ ID NO: 104971 - protein, 260 aa, Unknown
  Bacterial polypetide isolated from the Sargasso Sea
MNFDERKKSIIEYSNQIAHKRDYWIKKNHSFYSDDRSFMSFLIDSNLKILDIGCGTGDLLSSIKPKYGMGIDLSPNMIQIAKKRYPNIDFLEGDVEDKNFVSKINKKFDVIILSDVFGYFNDCQNTLNNLQHFCDFNTRIIIAYHSWFWEPILKVGEKLGLKMPSVELNWLSNDEILNFLKLTNFEPIKHETRQILPKRLLGLGTFFNKYIGTLPIIKKLSMRNYLIARSLNYSFSDKNQPSTSVIIPCRNEKGNVENII

SEQ ID NO: 104972 - protein, 79 aa, Unknown
  Bacterial polypetide isolated from the Sargasso Sea
MRTVNKTEIKKFNKLAAEWWDPEGSFKPLHKFNPIRIKYIKESIINYFNIKSKKLPLKNINILDIGCGGGLISVPIKKN

SEQ ID NO: 104973 - protein, 286 aa, Unknown
  Bacterial polypetide isolated from the Sargasso Sea
MLSQYYDDQNKLREEFTVEVNCPHCDSNEPHLSFNLNGFNHHKCRNCGSVYVSPRLNDECLHKLYSDNYYSEMFTKSMIPIFEKRKELIGVNKFNQIIENISPKLSNDRVLDIGCGVGEVIDVFNDNGWDCEAVELNPIASKWLIEKGIKVFNDTLDNYISDKKFDLIMAWNVVEHVTNPKEFVKKAFDLLKPGGLFVTEVPHGNSMLVDYCRSSGLDPLRILQGEQHIMLYSISAYKELHSMSGFQLHSIQTNGLDIGTILDCLEADVSRDSISLMQDLIDSKLY

SEQ ID NO: 104974 - protein, 220 aa, Unknown
  Bacterial polypetide isolated from the Sargasso Sea
MKKLKNWDNKTWLSSKSYISQFNRFLKKKINLNKDSIILDIGCGRANIISALQKKYKFRNKPIGIDIVVNKDVKKNIIFKKIGALKYLNKQEKYDLILIKQTIHFFSKSNLNLLLNLAKKSLNNKGKILIFSLKTNNNKIPCFKKMRKNLEKSLKRDEVLFKIIKKNLKKISYTNFNFKVNISKQKYVRMIKERYISCLLNLSNKEIKFGISEIKSKYKN

SEQ ID NO: 104975 - protein, 87 aa, Unknown
  Bacterial polypetide isolated from the Sargasso Sea
MKSKNKEYELFDSLSEEWWDEEGKFKVLHDIKPLRMQYILDQLKDRKISDLEILDIGCGGGLICEPLCRLGGKVTGIDFVKNNINVA

SEQ ID NO: 104976 - protein, 170 aa, Unknown
  Bacterial polypetide isolated from the Sargasso Sea
MKKLKNWDNKTWLSSKSYISQFNKFLKKKSNLNKNSKILDIGCGRANIISALQQKYKFRNKPIGIDIVGNKGVRKNIIFKRVEALKYLNKQEKYDLILIKQTIHFFSKTNLNRLLNLAKKRLNTKGKILIFSLKTKNNKIPCFKKMRKNLEISLKRDEVLFKIIKKNLKK

SEQ ID NO: 104977 - protein, 162 aa, Unknown
  Bacterial polypetide isolated from the Sargasso Sea
MSTINKDEIQKFSSLAAEWWDANGKFKPLHMFNPIRIEYILEMCSSHFKNQKDKNLPLKNLKLLDIGCGGGLISEPMCRLGAQVTGIDASNKNIQVAKIHAKQNNLNIVYLNNSPEQLSQKPNYDIILNLEVVEHVDDLNLYLKSCYNILNSGGLMITATLN

SEQ ID NO: 104978 - protein, 305 aa, Unknown
  Bacterial polypetide isolated from the Sargasso Sea
EDVCVSINDWRFCDELLLKGDVGLGESYVLGYWDCDNINKLVKWGIENKEPLERAIKGSFTKILFFRFKHFLKRNSKKGSVKNIHAHYDIGNKFYQLWLDSTMTYSSAIFKSANEKLSKAQENKYQSILNKLKPKSGDHILDVGCGWGGFMEYAAKNGFKVTGITISKEQYEYSKKRLTKYGDLVDVKLLDYRDIVGKYNHIVSIEMFEALGFQYWKKYFNVLYSILRPGGKLVIQSITINNDDFLSYKKCSDFIQQYIFPGGMLPSSKIVKEIATKQGFLHNDNFEFGLENGATLKKWEENFSN

SEQ ID NO: 104979 - protein, 61 aa, Unknown
  Bacterial polypetide isolated from the Sargasso Sea
MWKSKTPGIPDEEFERIESVPITKEEIRAIQISKGRLFAGQTVLDIGCGSGSVTVEASNTN

SEQ ID NO: 104980 - protein, 36 aa, Unknown
  Bacterial polypetide isolated from the Sargasso Sea
MNNIRSIRKDWDLIQSLIKDNSRILDIGCGEGDLIQ

SEQ ID NO: 104981 - protein, 168 aa, Unknown
  Bacterial polypetide isolated from the Sargasso Sea
MLSRTSLNFVNNFLSKKNNWKILDIGCGYRANKNATVIADIKDFSDYYKNKNFVRIDGKKLPFNDNEFDYVIASHVIEHVEDFEFFVRELERISQQGYIELPTRLGDNLVFENKKDHIWWFKYDDVNNQIIASKKNQLISPFITVSMAKFFEDIFRESHGNGTSLEKK

SEQ ID NO: 104982 - protein, 129 aa, Unknown
  Bacterial polypetide isolated from the Sargasso Sea
MASVVIKNWDNKTWLSSQNYINSFNNFLIKNNKINSNFKILDIGCGRGKILGSLKSRLKLKHKPLGIDIVNHKDRDKRIKFKKANILNLSLRKSQKFDLIMIKQTIHLIKLSKVKKLIKSLEKILNTKR

SEQ ID NO: 104983 - protein, 126 aa, Unknown
  Bacterial polypetide isolated from the Sargasso Sea
MVKKDIKNWDNKTWLSSNSYIKSFNKFLIKETKLNKNSKILDIGCGRGKIIGSLSSKIKLINKPIGIDLVNHKDKDKRVTFKKVDALSFFRNNKKRFDLILVKQTVHLLQLKSIKILLRKMSKSLI

SEQ ID NO: 104984 - protein, 186 aa, Unknown
  Bacterial polypetide isolated from the Sargasso Sea
MKKLKNWDNQTWLSSKNYINQFNKFLNKRVKFNKNTKILDIGCGRANIISNLEKKYKFKEKPIGLDIIENKGIKKNIIFKKIDGYNYLKRKNEKYDLILLKQTIHFFSPSTLKALLDIAKKRLKIEGKILIFSLKTTNNKIPCFKKMKQKLDSSLKRDEKLFKIIKKKLKRTNESYFHFDVRISKQ

SEQ ID NO: 104985 - protein, 118 aa, Unknown
  Bacterial polypetide isolated from the Sargasso Sea
MIKRSSKQYIDNLIDQNPNWKILDIGCGYTAHKKASVICDVKDLSEFYKDRQFVKLENKELPFKDKEFDFVITSHVIEHVDDVNFFINELQRISSKGYIELPTILEDNLVFENKHDHL

SEQ ID NO: 104986 - protein, 162 aa, Unknown
  Bacterial polypetide isolated from the Sargasso Sea
MKKLKNWDNQTWLSSKNYIYQFNKFLNKRVRLNKNTKILDIGCGRANIISALQKRYKFREKPIGLDIMKNKGVKKNIIFKKIDGYNYLKNKNSKYDLILLKQTIHFFSSSKLKVLINIAKKRLERGGKILIFTLKTTNNKIPCFKKMKQKLDGSLKRDEKYL

SEQ ID NO: 104987 - protein, 196 aa, Unknown
  Bacterial polypetide isolated from the Sargasso Sea
NDILENNPNWKILDIGCGYNAHNRANVIADVKDLGTYYKKKKFVKIDGSRLPFGDQEFDFVISSHVIEHVENFEFFIKELERISSQGYIELPSRLGDNFVFENLKDHIWWFKFDDSDNSLVVSKKNQLIEPFITVSTSRNFFEKIFRESFVIELIWQKKIEYKIDDTIKFETFKKMSFLKIFRKYLSKKFRSIYKK

SEQ ID NO: 104988 - protein, 200 aa, Unknown
  Bacterial polypetide isolated from the Sargasso Sea
ISIKYLNKVIKDNPKWKILDIGCGYRAHPSASIIADIQDLSNFYKEKKFIKINGKNLPFKDKEFDFVIASHVIEHVEDFEFFINELERISSKGYIELPTRLGDNLVFENKNDHIWWFCYDDINNNLIASRRNQLIEPFITVSSAKNLEKIFRESLVIELMWEKKIDYKIDNTIREEESKQIPFLRLVRKYLSKKIRTIFK

SEQ ID NO: 104989 - protein, 140 aa, Unknown
  Bacterial polypetide isolated from the Sargasso Sea
MIKRTSKSHINNIIKENSKWNILDIGCGYSAHENANVVCDVQDLSNYYKEKKFVKLNDKILPFQDKEFDFVVASHVIEHVEDVDTFVSELERVSNAGYIELPTILEDNLVFENKNDHLWQMEFDNVNNKLIVSNRVQYIE

SEQ ID NO: 104990 - protein, 132 aa, Unknown
  Bacterial polypetide isolated from the Sargasso Sea
MQKLKNWDNKTWLSSKRYISNFNKFLKLKVNLNKNSKILDIGCGRANIISALQNKYKFKTKPTGIDIIKNKDLKKNIVFKKFDGIKYLKNEKQKFDLILIKQTIHFFSKKKLNILLNLSKKNLNYKGTILIS

SEQ ID NO: 104991 - protein, 169 aa, Unknown
  Bacterial polypetide isolated from the Sargasso Sea
MHNLRNWDNKTWLSSKKYILDFNKFLKSKIKLNKDTKILDIGCGRANIISALQKKYKFKNKPIGIDIVKNKNLKKNIIFRNNDGISYLRREKQKYDLILIKQTIHFFSKNKLNTLLNLSKKSLNSKGILLIFSLVTRDNKIPCFKKMKKNLNKSLKTDEILLRIIKKNL

SEQ ID NO: 104992 - protein, 153 aa, Unknown
  Bacterial polypetide isolated from the Sargasso Sea
MEIKKIWYCVSLKNWDNKTWLSSKKYIYSFNNFLLKQVKLDKNSHILDIGCGRGKILGSLYSRLRLKNKPIGIDIESHQDRDKRIHFKKIDATTYLKSNKKKFDLILIKQTIHLLNFKEIKKLIFICKYRLKNKGNIAIFTLKTSKNEIPAFS

SEQ ID NO: 104993 - protein, 162 aa, Unknown
  Bacterial polypetide isolated from the Sargasso Sea
INSILDIGCGLGIVQIFFYKKYKNDLKFFMLDKDKIDKSIRYGFNENYESYNDLSETKNLLCENGIPEKQIFIKDVDKPIDIDTKIDFVLSLKSMGYHYPIEKYFELFKKVCTKETEFVFDITSGQYNYKIIENYFNQCQIIFSEDSLHPLKRLYCKGFKLI

SEQ ID NO: 104994 - protein, 396 aa, Unknown
  Bacterial polypetide isolated from the Sargasso Sea
MQLARFLNKVIKKDGFILIDANSKSYIIGTPKSDNPIKIKILDKKLHYKLLFHPDLYFGEAYTDGDIVIENGSLTDFLDLALMNFGRGEINFFSYLMNRVRGSYRYLTNFNFIKNSKKNVSHHYDISDDLYNLFLDPKRQYSCAYFKNENDTLESAQNNKIQHIIKKLHIKPNQKVLDIGCGWGSLAFDIAKSANCEVTGITLSENQYNYCKQKAKEHNLDNQVNFKLIDYRELNEKFDRIVSVGMFEHVGRKFYKKFFNQVEKLLKDDGISLIHTIGSVNPPRDPHPWITKYIFPGGYTPSLSEVSNPIEKSGLIVSDLEVLKLHYMHTLRNWKENCINNKEKIIQMFDERFFRMWEFYLAGCEMAFKWGDQVVFQFQLTKNYRSTPVTRDYIYQ

SEQ ID NO: 104995 - protein, 375 aa, Unknown
  Bacterial polypetide isolated from the Sargasso Sea
NSKSYIIGNPKSENPIRVKILNKNLHYKLLFHPDLYFGEAYTDGEITIENGTLTDFLDLSLMNFGRGDLNFFSYLLNRLRGSYRYLTNFNFIKKSKMNVSHHYDISDDLYDLFLDPKRQYSCAYFKNETDTLETAQNNKIQHIIKKLNIKPNQKVLDIGCGWGSLAIDIAKSANCEVTGITLSENQFNYCKKRAKELNLENQLNFKLMDYRELNEKFDRIVSVGMFEHVGRKFYKKFFSQVEKLLKDDGVSLIHTIGSVNPPRDPHPWITKYIFPGGYTPSLSEVTTPIEKAGLIVADIEVLRLHYSHTLRHWKENCIRNKDKIIQMFDERFFRMWEFYLAGCEMAFKWGDQVVYQFQLTKNYSSTPVTRDYIYQ

SEQ ID NO: 104996 - protein, 274 aa, Unknown
  Bacterial polypetide isolated from the Sargasso Sea
MLICPICQAPLMPSGNGLACANRHSFDRARQGYFNLLPVQHKNSRDPGDNAAMVEARRRFLEGGHYAPLAARLATLAAEYKPARWLDIGCGEGYYTEQIARGLPHAEGYALDISREAVKRACKRAPQLSWLVASMARVPLADASCGLLASVFSPLDWSEAKRLLAPGGGLLRMGPTRVHLMELRQKLYDEVRDYDDEKHLALIPPGMHLAHSETLEFPLHLADAQARADLLAMTPHGWRASAERREAVIAEPFEVTVAIRYDWIVKTQSPRSQD

SEQ ID NO: 104997 - protein, 301 aa, Unknown
  Bacterial polypetide isolated from the Sargasso Sea
YQAWRFISNFNFPGKSKKNVEAHYDIGGRKGEILYDVMLDKHHRQYSCGYWKEETKTLEEAQENKIQHIIKKLDIKKNQKVLDIGCGWGGLCFEIAKQFDCEVTGISLSTNQINYCKEKAKKLGLENQVKFELIDYRLVKGNYDRIVSVGFGEHLGVKFYNTFFKKINSILNENGNFLFHLIGVVDKPSAPNQFINKYIFPGGVCPSLSQLIKPIEKTGLIVADTETLIRHYDKTLEAWLERFLAKRNEIKDLFDEKFCKIWEFYLASCAAAFRYRDLVVFQLQIVKNFHSAHRTRDYIYS

SEQ ID NO: 104998 - protein, 260 aa, Unknown
  Bacterial polypetide isolated from the Sargasso Sea
MSLTDEGHYGPKQLNLLKVVWGEGFLSPGGSDEIDEIMTGVNAKDKTVLDIGCGCGGAAFHLLKKYNVKSVEGIDPEPLVIQTANQLAIKNNLQDVTIFKQINPGPLDYDDESFDMIFSKEAFLHIPDKEALLKNVHRILKPGGLIVVSDWMRMDDNPPSKQMQEYIDAEGLDMLMCSLEKYKKLLQESNFTDIVIKDRNDWYLKKAKKELEDIEGPLYQKVLDVLGLEETIGAIDIWKKLIGVLEIGEHRPGHFRAKKN

SEQ ID NO: 104999 - protein, 401 aa, Unknown
  Bacterial polypetide isolated from the Sargasso Sea
MILARVFSNIYKEGGIILIDSKGQKYICGNPRRDNPITVKLLKENLNWKIILNPELEFPEGYMRGEIIIENASLKEFLMDLVKNLGRREVNTASLFYKKIYQVWRFISNYNFPGKSKKNAEAHYDIGGKKGEHLYDVMLDKNHRQYSCAYWKHDTKTLEEAQENKIQHIIKKLYIKKNDKVLDIGCGWGGLCFEIAKKFDCEVTGVSLSTNQIKYCKEKAKELGLENQVKFELKDYRLVEGSFDRIVSVGFGEHLGVKFYNTFFKKINSILKPNGIFLFHLIGVVDQPSAPNQFINKYIFPGGVCPSLSQIIKPIEKTGLIVGDTETLIRHYDKTLEAWLERFLSKRSEIKDLFDEKFCRMWEFYLASCAAAFKYRDLAVFQLQIVKNFQSAHRTRDYIYS

SEQ ID NO: 105000 - protein, 394 aa, Unknown
  Bacterial polypetide isolated from the Sargasso Sea
MITKSLLSKIIKTGNLTWVMPNGEINTYGDGTGDPIKIRTTNNFSEIKLLMNPSIHFGESYMNGSLVVEEGRIHDFLKLIFANTEVDIDHWVMKLSKIVRAISNKLTTSNYISKSKKNVAHHYDLSDKLYDLFLDPDRQYSCAYFNSPNDSLEQAQINKKELISKKLLLEENQSVLDIGCGWGGMASHIYKKSNANVVGVTLSEEQIAYAQQRKVREKLDKVEYRLQDYRNVNEKYDRIVSVGMFEHVGTAHYQEFFNKVYDLLNDSGVALIHTIGRLNEPGNTDPWIDKYIFPGGYIPALSETVSRVEKSGLSLTDVQILKFHYAETLKRWRYNFYDNIDKVKEIYDDKFCRMWDFYLSSSQASFEESTLVVFQMQLSKNKKTVPDKRDYMLA

SEQ ID NO: 105001 - protein, 394 aa, Unknown
  Bacterial polypetide isolated from the Sargasso Sea
MLFSILKKIKFTGTLVIVDSNNVSHKFGNNNPYVKIRLKSKSIERKLFRNPSLHLGEGYMNSEIIIEEGTIEQFIDIVTSSYDDFIKQNIFFKYYENVSSFLKPFHQVNQIVNSKKNVAHHYDLNEDLYKLFLDKDMQYSCAYFHNPNISLDQAQIDKKNHIINKLKINENMRVLDIGCGWGGMAIEIAKTTGAKVKGITLSENQFATAKKRAQDEGLSEKVDFAIQDYRHENGIYDRIVSVGMFEHVGVKYFKTFLKKSYELLNDSGVFLLHTIGQRGKPTATSPWIRKYIFPGGYIPSLSEILTICEKQNINITDIEILRLHYAHTLSHWYRNTLNNKDKIVKMFDSRFFRMWEFYLLASKYSFVNMGNVVFQIQIAKNINNLPLTRNYIYN

SEQ ID NO: 105002 - protein, 176 aa, Unknown
  Bacterial polypetide isolated from the Sargasso Sea
MSQRENISSEEVEKFNDLAKEWWNPHGSFAPLHKLNPLRFEYIRENSSLEGKSAIDVGCGGGILTESLASVAANVHGIDMAEKGLAVANIHKNKSKLANIKYSQSTVEDYALKSNEKFDVLTCMEMLEHVPSPGETIQACSDIVIDGGDLFFATINRNIKSYIMAIVGAEYILNLL

SEQ ID NO: 105003 - protein, 404 aa, Unknown
  Bacterial polypetide isolated from the Sargasso Sea
KILKSLFNFCMITKSLLGKIIKVGNLTWISPNGELNTYGDGSGEPIRIRTTNSFSELKFLMDPSVHFGESYMNGSLIVEEGQIHDFLKLIFLNTSSEIDHWVMKLSKIVRKIQNKIRTSNYISKSKHNVAHHYDLSDKLYELFLDPDRQYSCAYFNSPNDTLEQAQINKKELISKKLLLEEGQSVLDIGCGWGGMASHIYKKSNANVVGVTLSEEQIAYAKQRKIDEKLDKVEYRLQDYRNVNETYDRIVSVGMFEHVGTSHYQEFFNKVHDLLNDTGVALIHTIGRLTEPTNNDPWIEKYIFPGGYIPALSETMSRIEKSGLSLTDVQVLRFHYAETLKRWRYNFYDNIDKVKELYDEKFCRMWDFYLSSSQASFEEAGLVVFQLQLSKNKKTVPDSRNYMLT

SEQ ID NO: 105004 - protein, 393 aa, Unknown
  Bacterial polypetide isolated from the Sargasso Sea
MLNFLRKLIKDDGFELVDANKKSYIIGKPKKENPIKLKILDKSLHWKLLMNPDLYLGEGYMDGSIVIENGTLTEFLDIALKNVGRRPTNEISNVLGKFRRVYRYLTNLNLIGKSKENVAHHYDISEKFYDLFLDEKRQYSCAYFKNEDDTLEIAQNNKIDHIIKKLNLKPNQKVLDIGCGWGTLAIDITKKTQCEVVGITLSENQLEYAKKKAKEMNLENQVEFRLADYRQLNEKFDRVVSVGMFEHVGRNFYKKYFNKVYDFLNEDGVALIHTIGSVNPPRPPQPWITKYIFPGGYTPSLSEVSAPIEKSGLILSDIEVLRTHYQHTLRNWKDRFMSKKEHVLEMFDEKFFRMWEFYLVGCEMAFKWGDQVVFQLQLTKKLKATPITRDYIY

SEQ ID NO: 105005 - protein, 271 aa, Unknown
  Bacterial polypetide isolated from the Sargasso Sea
MQYICPLCALPLTLTERTWGCPQAHKFDMAKEGYVNLLPVQKKNSKDPGDNQQMMLARREFLTAGYYQSLSDRVNELALAYACGALQILDIGCGEGYYSHRLYNTLVAEHPCQLQGVDISKSAIKYASKRYPNLSFCVASAYEMPIPSHSINLAIRIYAPSKAEELQRVMAPNGILITVSPGPLHHFALKQQIYAEPRLHPASDAKIEGFECLHQERLRSQLELNNSQDISHFLEMTPYAWKFTVEQKHTFAQSGLSCELDFQIEVHRISV

SEQ ID NO: 105006 - protein, 243 aa, Unknown
  Bacterial polypetide isolated from the Sargasso Sea
MDINSIDKTEIEKFRSLSKEWWKHDGKFKTLHKFNPVRLSYIIQTIKDHFSINSEKDKPLKDLSILDIGCGGGLMCEPLARLGAKVTGIDALEKNCLTAKIHAEESGLDINYIMSTVEELPKKNQYDVILNLEVIEHVNNPKEFINKSCNLVNNNGLMFIATINKTLFSLVFAKFTAEYILGFLPKGTHNWNKFLTPEEIYSFLIQNKFDVIGSAGVNYNPLGDIWYKSQNMNANYMVAGKKI

SEQ ID NO: 105007 - protein, 395 aa, Unknown
  Bacterial polypetide isolated from the Sargasso Sea
MQLARFLNKVFKKGGFVLTDANSKDYIIGQPDNNPIKLKILNKNLHYKLLFHPDLYFGEAYTNGEIVIENGTLTDFLDLALMNFGRGELNFFSYLINRLRGSYRYLTNFNFIKKSKMNVSHHYDIKDDLYDLFLDPKRQYSCAYFKNENDSLETAQNNKIQHIIKKLNIKPNQKVLDIGCGWGSLAIDIAKSAQCEVTGITLSENQLNYCTQKAQELNLENQVKFKLMDYRELNEKFDRIVSVGMFEHVGRKFYKKFFKQIEKMLKEDGVSLIHTIGSVNPPRDPHPWITKYIFPGGYTPSLSEVTNPIEKAGLIVTDIEVLRLHYAHTLRHWKENCLKNKDKIIQMFDEKFFRMWEFYLAGCEMAFKWGDQVVYQFQLTKNYSSTPVTRDYIYQ

SEQ ID NO: 105008 - protein, 337 aa, Unknown
  Bacterial polypetide isolated from the Sargasso Sea
MLLARVLSKIYKEDGIILQDENVKYFIGKPNSKKPITVKLLNKKLKYLLLVEPEYYFPEAYINEEIIIENATLHEFLMVFVKNLGRAEITLYSDLVKKLFGIWRYISNFNTKSKSKQQISSHYDLGGKKGIKLYTNMLCSNMQYSCAIWKDDTKTLEEAQINKLNHIIKKLKIKKGDKILDIGCGFGTAAAYIAKQTGCEVTGITLSKNQLDYAVQNAKELNLDNQINFELKDYRDMGGKFDKLYSIGMFEHTSLKYYNTFFKKTYDLLKDNGTFLLHTIGVVGPPSAPSRWINTRIFPGGRCPSYSQIIKPIEKSGFIVNDCETLIKHYDLTLEAW

SEQ ID NO: 105009 - protein, 190 aa, Unknown
  Bacterial polypetide isolated from the Sargasso Sea
QHIDVNGLKILDVGCGGGILAEELTKKGAIVTGLDASKKTIKVAQNHAKEQKLKIKYLDKSLDEHAESSNDKYDMVICFELIEHIPDQMKLIQDISSVCKKGTKIFISTINRNIVSFALAKIMAEYVLKIVPEGTHQYKKFLKPSELVKMLEIEKFQMNDIKGVTLNPIDYSFSLSPITKINYFMVATKK

SEQ ID NO: 105010 - protein, 394 aa, Unknown
  Bacterial polypetide isolated from the Sargasso Sea
MLFSVLKKLNFDGTLEIIDSNDKIYKFGNSNPHVCIRLKNKSIERKLFLNPNLHIGEAYMNEELVIEKGTIEDFLNLITNCYDDFISNNKFYKFYEYLSSIFMPFQQINQLVNSKKNVAHHYDINEDLYKLFLDQDMQYSCAYFHNPNMSLDQAQKDKKQHIIKKLQITENMDVLDIGCGWGGMAIEIAKSTGAKVKGITLSENQFKTASERAQKEGLSDKVSFALQDYRNETEKYDRIVSVGMFEHVGVKYFKTYLSKANDILKENGVFLLHTIGQRGKPTATSPWIRKYIFPGGYIPSLSEVMNETQKLNINVTDVEVLRLHYAHTLSKWYQNVIENKDKIINMFDQRFFRMWEFYLLASKYSFVNMGNVVFQIQIAKNINNLPLTRNYIYN

SEQ ID NO: 105011 - protein, 280 aa, Unknown
  Bacterial polypetide isolated from the Sargasso Sea
MKFKFVTKDYLVTGESFDIVECEACSIRTTTPFPDKKIIGNYYSSDDYISHDDKVSGIFDSIYGLVRTYQLNKKKKLIGKYFNKSNGKILDIGCGAGDFLQYMKENHWNINGVDTSNKARKIANKKLNIKVMDPKDWINNKEKYDVITCWHSLEHVHEPWVYLDKIKKSLTLDGFLIVALPNYQSTDAKIYKEFWAAYDTPRHLYHFTIKSMNKTIKPHGLNIESIYRMNFDPFYVSMLSAKHMGKSFMSGLINGFKSWTLSIFSKDKCSSLIFIIKKNA

SEQ ID NO: 105012 - protein, 483 aa, Unknown
  Bacterial polypetide isolated from the Sargasso Sea
MNNKFSIRKDWSLIESLIVENSRILDIGCGEGGLISQLEKNINAKTYGIEVNSELARKAIAEGLNVIEGNAEKDLDQYSNNSFDYVILSQTLQAMLKPKDVLLELLRIGSKAIVSFPNFGHWRIRLQLLFTGKMPMTKGLPYQWYETPNIHFFTIKDFENLCKELNIVIEKSIGLTSSGKQFSISKKLSNENLFTSEAIFLLSYQNFEPIKLKSKQKTFCWKFNHSKIMLIKSVSIELIPQLKDNYSYVIKDNLSNDIIIIDPAESELILEKIKNKKLQLKAILLTHHHNDHTAGVSDILKFFSVPVYSPSKNILRTSFEVSDNDEIKTSFINFKVISTKGHTLDHIVFYNKDNGILFSGDTLFRLGCGRVFEGTFEDMHTSLKKLEKIDNETLVFCGHEYTLNNLAFLKSTFPEFNGLDEEEKEIKDQLKKTNSSIPFNLGKEKAINPFLSSKAMYYEKFKKTKNLNDFEMFSFIRKLKDNF

SEQ ID NO: 105013 - protein, 396 aa, Unknown
  Bacterial polypetide isolated from the Sargasso Sea
MQLARFLNSVFKKDGFILVDANSKSYIIGNPKKENPIKLKIHNKKLHYKLLFHPDLYFGEAYTDGEITIENGSLTDFLDLALMNFGRGDLNFFSYLINRLRGSYRYLTNFNFIKKSKMNVSHHYDISDDLYDLFLDPKRQYSCAYFKNADDTLEDAQNNKIRHIIKKLNIKPNQKVLDIGCGWGSLAIDIAKSANCEVTGITLSQNQFNYCQKKAKELNLENQVNFKLMDYRELDEKFDRIVSVGMFEHVGRKFYRKFFSQIEKLLEDDGVSLIHTIGSVNPPRDPHPWITKYIFPGGYTPSLSEVTTPIEKAGLIVADIEVLRLHYSHTLRHWKENCIKNKEKIIQMFDERFFRMWEFYLAGCEMAFKWGDQVVYQFQLTKNYRSTPVTRDYIYQ

SEQ ID NO: 105014 - protein, 350 aa, Unknown
  Bacterial polypetide isolated from the Sargasso Sea
MHLQDSKQSFKKGGFILIDAYSKEYIIGIPENIPIKLKILNKTLHYKLLFLPDLYFGEAYTDGEIVIENGSLTDFLDLALMNIGRGELNFFSYLLNRLRGSYRYLTNFNFIKKSKMNVSHHYDIKDDLYDLFLDPKRQYSCAYFKNEEDSLETAQNNKILHIIKKLNIKADQKVLDIGCGWGSLAIDIAKSAGCEVTGITLSQNQLNYCNQKIKEMNLENQVKFKLMDYRELNEKFDRIVSVGMFEHVGRKFYRKFFNQIENLLKEDGVSLIHTIGSVNPPRDPHPWITKYIFPGGYTPSLSEVTSPIENAGLIVTDIEVLRMHYSHTLRNWKENCIKNKDKIINMFDER

SEQ ID NO: 105015 - protein, 275 aa, Unknown
  Bacterial polypetide isolated from the Sargasso Sea
MKNIKNKIMCSFDKKASSYDKYSLIQDEVAQRLCDRLSNITIKPVSILDIGCGTGYLSDMLFKLYPHANITCLDISLNMLEESHKKNSNLNCILSDAENMPFKNNKFDLIISSFTLHWCFEIEKIFFDIHRFLKDKGLFLFTTVGPNTLAELDTAYYEAVDSVRHINYFSDMHTYGDLLLKFGFQDPVMDMEKIIIEYKTFKDVLDSLRKTGANTVIENIPSYTSKDSYRKLSEAYPTNHSTKRYPVTYEMIYGTAWKNLENTDENTGVIPIKKI

SEQ ID NO: 105016 - protein, 320 aa, Unknown
  Bacterial polypetide isolated from the Sargasso Sea
FLDIALMNFGRGDINFFSNLINKIRGSYRYLTNFNFIKKSKMNVSHHYDISDNLYDLFLDPKRQYSCAYFKNENDTLEDAQNNKIKHIIKKLNIMPNQKVLDIGCGWGSLAMDMAKSMNCEVTGITLSENQLNYCNKKAQELNLQNQVNFKLMDYRELDEKFDRIVSVGMLEHVGRKFYRKFFSQIEKLLKDDGVSLIHTIGSVNPPRDPHPWITKYIFPGGYTPSLSEVTTPIEKAGLIVADIEVLRLHYTHTLRHWKENCIKNREKIIQMFDERFFRMWEFYLAGCEMAFKWGDQVVYQFQLTKDYSSTPVTRDYIYQ

SEQ ID NO: 105017 - protein, 281 aa, Unknown
  Bacterial polypetide isolated from the Sargasso Sea
MEDKNVKQKEFWSGAGGDVWVNKQKEMDIMLNPLGQRAIDKLDLSNGKTILDIGCGCGATTLEIAKMIPEGKIIGVDISEPMLNQARKDALEMSLSNTEFVVQDVQTDEISKDAFDIAFSRFGVMFFEDSYEAFKNINNALKIGGQLSFVCWQEPLLNPWQSLSIQVIKQFIDLPAPPPKSPGPFAFEDKSYIEDILDRSNFKEINIDDNQEEIIMFSGKSLKEASEDYLTINPVVTEMLKNSPKELKEEILEALIIKFSDFHEDHGLVFPSATWIVTAKK

SEQ ID NO: 105018 - protein, 384 aa, Unknown
  Bacterial polypetide isolated from the Sargasso Sea
MQLLNFLRKLIKDDGFELVDANSKSYIIGKPKKENPIKLKILDKTLHWKLLINPDLYLGEGYMNGSIVIENGTLTDFLDIALKNVGRQPTNTMTNLLGRFRRVYRYITNFNLIGKSKENVAHHYDISEKFYDLFLDEKRQYSCAYFKSEDNTLEEAQNNKIDHIIKKLNLKPNQRVLDIGCGWGTLAIDIAKKTQCEVVGITLSENQLEYAKQKAKEMNLENQVEFRLADYRQLNEKFDRVVSVGMFEHVGRKFYKKYFNKVFDFLNEDGVALIHTIGSINPPRGPQPWITKYIFPGGYTPSLSEVTLPIEKSGLIVSDIEVLRTHYQHTLRNWKDRFISKKEEVLEMFDEKFFRMWEFYLVGCEMAFKWSDQVVFQFQLTKKL

SEQ ID NO: 105019 - protein, 181 aa, Unknown
  Bacterial polypetide isolated from the Sargasso Sea
MDQRDNINTEEVDKFNDLANEWWNPYGSFAPLHKLNPLRFEYIRANSNLDGKTAIDVGCGGGILTEALASVASEVHGIDMAEKGLAVANIHKNKSNITNIKYSQSTIEDYALKHENKFDVLTCMEMLEHVPSPEETIKACSDIVIEGGDLYFATINRNIKSYVMAIIGAEYILNLLPQRNP

SEQ ID NO: 105020 - protein, 220 aa, Unknown
  Bacterial polypetide isolated from the Sargasso Sea
MPVVPVYEMMKEEFAWEKNFAPSKDIRMSKKIRRSIKSLIKRNKLLYLLNKFIKNGEVLDIGCGSGVKFNEIPHNYIPYGIDISKKSALEAKINFEKRGGTAICAPATDVLKEYGQSKFKGAILRSYLEHEHYPFEVLEGLRETLTSNGSIIIKVPNYASVNRKIRGKNWCGYRFPDHVNQFTPYTLEKIVIKAGYKIIKFNYLDKQITSDNMWMVAQPI

SEQ ID NO: 105021 - protein, 196 aa, Unknown
  Bacterial polypetide isolated from the Sargasso Sea
MWKSKTPGIPDEEFERTESVPITKEEVRAIQISKGRLSVGQTVLDIGCGSGSVTVEAAIQIEESGKVIGVDIDPNAIELTEKNLKKFGISNYTLVEGNAKEKISELPQADTVFIGGTGGDTRDIVELCQDKIKSGGRIVIGVILIETLYSVLQTIEKLDFESIDITQITIGKSRKTKTGTMMLARNPVTVISATKK

SEQ ID NO: 105022 - protein, 233 aa, Unknown
  Bacterial polypetide isolated from the Sargasso Sea
MNIKNWDNKTWLSSNDYIRSFNNFLFKNIKLNSNSEILDIGCGRGKILGTIKSSLKLKSKPIGIDIINHKDKDKRINFKKSDATSFFLTNTKKFDLILIKQTIHLLTFKKIKKLLFLCKKNLKHNGKIFILTLDGKKNELPTFRKMKIRLNNSLKRDNKVLKLITRLFPQRKRTNFIYKVKINKKKYLTMIENKYISILLPLSKREILEGIEEINHEYKNYIQFRDKLDCFIL

SEQ ID NO: 105023 - protein, 175 aa, Unknown
  Bacterial polypetide isolated from the Sargasso Sea
MKKLKNWDNKTWLSSKSYISQFNRFLKKKINLDKNSKILDIGCGRANIISALQKKYKFRNKPIGIDIVANKDVKKNIVFKKIGALKYLKKKEKYDLILIKQTIHFFSKSNLNHLLNLAKKSLNNKGKILIFSLKTNNNKIPCFEKMRKNLEKSLKRDEVLFEIVKKNLKEISYTN

SEQ ID NO: 105024 - protein, 261 aa, Unknown
  Bacterial polypetide isolated from the Sargasso Sea
MNTPKIKFNNAAGYDRMMGVWSQLIGDIFLDWLSFEEKGCWLDIGCGTGAFTQQIKERCAPSEIIGVDPSDVQLEFARTRKGMGDCIFQSADAMALPFENQKFDSSTMALVLFFVPDPAKGLSEMIRVTKKNGTVSAYVWDILGGGFPAEPIQAGLRSMNYKYALPPSVDISLMDNLKECWESAGLQSIQTQVFEVERTFDDFEEFWEVTSNSASIKSVLADMDKQKKSELQNLVKQQLPPSGNGAIKYSSWANAIQGVVK

SEQ ID NO: 105025 - protein, 345 aa, Unknown
  Bacterial polypetide isolated from the Sargasso Sea
KRCFNTVEASARDRARWISANLYYHKRDLAYLNFILAKDCSVLDIGCGNGWLLGQLDAKVKCGIDLSPSMVDVAQKHCPEATVIQADIEASSDLKKIRDHGPFDYIILSDTLAFLDDIELGLSHVRQLCDPYTRVILSRYNQLWEPVLKFGELIGRKQRMKFDLNWISRDDVRSFCALSGLDLLTSESHQIIPFRLLGLGHLMNKWLAPLPIIRALNLRQYVVARPTLHQKRLKPSVSVIVPVRNEAGNIEPAVKRLSKFPGDFELIYVEGNSSDNSWDEIQRVKGAYKDTNIVALKQPGKGKGDAVHYAFQQASGDILMILDGDLTVPPEDMIKFYNVLGSWHR

SEQ ID NO: 105026 - protein, 386 aa, Unknown
  Bacterial polypetide isolated from the Sargasso Sea
MIKNDGFELLDANNKSYIIGKPKKEKPIRLKILDKSLHWKLIINPDLYFGEAYMNGSIVIENGSLTEFLDIALKNVGREPTNAITDVLARFRRVYRYITNFNLIGKSKENVAHHYDISEKFYDLFLDEKRQYSCAYFKNEDDTLEEAQNNKINHIIKKLNLKPNQKVLDIGCGWGTLALDIAKKTQCEVVGITLSENQFEYAKQKAKEMNLENQVEFRLADYRQLNEKFDRVVSVGMFEHVGRKFYRKYFNKVFDFLKEDGVALIHTIGSINPPRGPQPWITKYIFPGGYTPSLSEVALPIEKSGLIISDLEVLRTHYEYTLRNWKERFMSKKGEVLEMFDEKFFRMWEFYLVGCEMAFKWSDQVVFQLQLSKKLKATPITRDYIY

SEQ ID NO: 105027 - protein, 239 aa, Unknown
  Bacterial polypetide isolated from the Sargasso Sea
MKSAVIKNWDNKTWLSSYDYIKSFNKFLSKNTKFRSNSKILDIGCGRGKIIGDLSSQLNLKIKPIGIDLINHTDKDKRIKFIKKDALSFFINNKQKFDLILIKQTIHLLSLNSIKKLVKECKKKLNTDGKIFIFTLDPFKNEIPSFELMKKKLKRSLKRDEMILKFLSQLNSSKNPKKFFYKVKITKKKYLKMIQNRFISTLLPMTKKQISNGIKEIDLKFNKILKFNDNLICVILKKN

SEQ ID NO: 105028 - protein, 191 aa, Unknown
  Bacterial polypetide isolated from the Sargasso Sea
MIEFLGTGKGRLLDIGCGEGALSDTLSQHGYTVTGIDPLVGNGTSAWRVRASAGAVPLASDSFDIAVFHWSLHHVPEELMSAALAEAQRVLTGAGRLFVIEPEPVGSWQEVSQPFHDETEVQAKAVKAVDKVVSASALTRRRQYYLSEDCYNSFDEFVESMMSYAYNRYTEDQIRQQRVRDAFESRREGDI

SEQ ID NO: 105029 - protein, 324 aa, Unknown
  Bacterial polypetide isolated from the Sargasso Sea
MKKQAVINASDVKPNFSKVKEAWNEMLSDYYTSENILNEKYTVEVNCPHCDSDETHSSFILNGFNHVTCKNCDSVYVSPRLNDECLHKLYSDEYYSEMFTKSMIPFFDKRKVLIGENKFNQILDFFSADESKKKVLDIGCGVGEVIDVFNDNGWQCEAIELNPVASEWLRGKGIKVFNDTLDNYQTSEKFDLIMAWNVVEHVTNPKEFIRKSFDLLRPGGLFVTEVPHGNSMLIDYCRKTGMDPLRILQGEQHIMLYSINAYKELHQLPGFEEVHIQTNGLDIGTIFDCSKLEIERNVVSTMQDLVDSKLYGDLLRGFWKKPGI

SEQ ID NO: 105030 - protein, 196 aa, Unknown
  Bacterial polypetide isolated from the Sargasso Sea
MWKSKTPGIPDEEFERTESVPITKEEIRAIQISKGRLSAGQTVLDIGCGSGSVTVEAAIQIEDSGKVVGVDIDPNAIELTEKNLKKFGISNYTLIEGNAKEKISELPEADTVFIGGTGGDTKDIVELCQEKIKTGGRIVIGVILIETLYSVLQTIEKLDFESIDITQITIGKSRKTKTGTMMLARNPVTVISATKK

SEQ ID NO: 105031 - protein, 227 aa, Unknown
  Bacterial polypetide isolated from the Sargasso Sea
MNKINSIRKDWSLIETLITQDRKILDIGCGDGGLMEQLENNSNAITHGIELNRDLAANAIARGFNVVHGNAELDLSQYSNNSFDYVILSQTLQAMMKPKDILSELLRIGSKAIVSFPNFGHWKIRLQLLISGKMPVTESLPYTWYDTPNIHFFTIKDFLNLCNEMNIVIEKSIGLTSKGKQFDISESVTGVNFFTHEAIFLLSYKNFEPIKIKSSKKVFAKNSVIAN

SEQ ID NO: 105032 - protein, 164 aa, Unknown
  Bacterial polypetide isolated from the Sargasso Sea
MSFDAGVAVQAEGSANAKGSLNAKGVFKAEEASTTPAINEQNVAHRFSKAAAKYNSIASIQRVIAEQALANLPKALQGEALDIGCGTGIHTQALVKKGATVTGVDIAKGMLAQARKMYSDPIFVQGSAVDLPFVDSAFSTVFSSMALQWVSDTHLVANEIARVL

SEQ ID NO: 105033 - protein, 396 aa, Unknown
  Bacterial polypetide isolated from the Sargasso Sea
MQLARFLNSVFKKDGFILVDANSKSYIIGNPEKENPIKVKILNKNLHYKLLFHPDLYFGEAYTDGEIVIENGSLTDFLDLSLMNFGRGNLNFFSYLINRLRGSYRYLTNFNFIKKSKMNVSHHYDIKDDLYDLFLDPKRQYSCAYFKNENDTLETAQNNKIQHIIKKLNIKPNQKVLDIGCGWGSLAVDIARSANCEVTGITLSENQLKYCKQKAKELNLENQLRFILMDYRELDEKFDRIVSVGMFEHVGRKFYKKFFSQVEKLLKDDGVSLIHTIGSVNPPRDPHPWITKYIFPGGYTPSLSEVTTPIEKAGLIVSDIEVLRMHYSHTLRHWKENCLNNKDKIINMFDERFFRMWEFYLAGCEMAFKWGDQVVYQFQLTKNYTSTPVTRDYIYQ

SEQ ID NO: 105034 - protein, 142 aa, Unknown
  Bacterial polypetide isolated from the Sargasso Sea
MTTINKEEIQKFSKMADEWWDTSGKFKPLHMFNPVRIEYILEKICEYYKLSEKKSFPLEKIKILDIGCGGGLISEPMARLGANVTGIDASFKNMEIAKIHAKKSGLKIDYFNKSPEQMNEQEKYDVILNLEIVEHVENLDLY

SEQ ID NO: 105035 - protein, 394 aa, Unknown
  Bacterial polypetide isolated from the Sargasso Sea
MLFTILNKINFKGKLVVTNYKGKTFHFGNGADLVKIRLTNKSIENKLFRNPSLYLGEGYMNKEIVIEEGTLDDFLKIITASYNDYMSNNFVFKMYESVSTFFKSFQQINKLVRSKENVAHHYDIDEKMYKLFLDKDMQYSCAYFHNQNIGIDQAQFDKKKHIIEKLQIKEGMSVLDIGCGWGGMAIQIAKDTGARVKGITLSENQFATAKKRAHEEGLADKVTFALQDYRNEKDTYDRIVSVGMFEHVGVDYFPAFFSKTYEILKDTGVFLLHTIGQRTKPSATSPWIRKYIFPGGYIPSLSEVLKETEKQNIIVTDIEILRMHYAHTLDHWYKNTMQHKETIVKMFDEKFLRMWEFYLLISKYSFINMGNVVFQIQIAKNINNLPLTRNYIYN

SEQ ID NO: 105036 - protein, 235 aa, Unknown
  Bacterial polypetide isolated from the Sargasso Sea
MKPLKNWDNRTWLSSKRYISQFHKFIKRKTKFNKNTRVLDIGCGRANIISFLQKKYKFKTRAIGIDILKNKNTRKNILFKKSDALKYLKKGKKFDVIIIKQTIHFFSQTKIVSLLNLVKKNLNEKGTLLIFSLKTKNNKIPCFKIMKKQLNNSLKKDEKLFKIIRKNLTRIKETNFNFNVKITKRKYVSMIKNRYMSCLLSLSKKEIEKGIDEINLNFKNQLNFTDTLKCISFRK

SEQ ID NO: 105037 - protein, 225 aa, Unknown
  Bacterial polypetide isolated from the Sargasso Sea
MQYICPLCALPLTLTERTWGCPQAHKFDMAKEGYVNLLPVQKKNSKDPGDNQQMMLARREFLTAGYYQSLSDRVNALALEYASEAQQILDIGCGEGYYSHRLYNTLVAEHPCQLQGVDISKSAIKYAAKRYPNLSFCVASAYEMPIPSHSIDLAIRIYAPSKVEELQRVMASNGILITVSPGPLHHFALKQQIYAEPRLHPASDAKIEGFECLHQERLRSQLELN

SEQ ID NO: 105038 - protein, 263 aa, Unknown
  Bacterial polypetide isolated from the Sargasso Sea
MSNDIKIKKRKNCPLCNAENSEISILMHDNWELVECSECSFVYMPEVPVYEMMKEEFAWEKNFSPSKDIKLSKKIRRSIKGLIKRNKLLFLLDKYIKEGQVLDIGCGSGIKFDDIPQKFIPFGIDISEKSAFEAKTNFEKRGGTAICAPATDVLKEYGKNKFKGAILRSYLEHEHHPFEVLDELKETLTSDGSIIIKVPNYASVNRSVRGKNWCGYRFPDHVNQFTPFTLTKMVKKAGYKIIKFNYLDKQITSDNMWMVAQPI

SEQ ID NO: 105039 - protein, 220 aa, Unknown
  Bacterial polypetide isolated from the Sargasso Sea
LDIGCGFGTAAAYIAKQTGCEVTGITLSKNQLDYALQNAKELNLDNQINFELKDYREMGGKFDKCYSIGMFEHTSLKYYNTYFKKVFDLLKDNGTFLLHTIGIVGPPSAPSRWINSRIFPGGRCPSYSQIIKPIEKSGFIVNDCETLIRHYDLTLEAWRERFLAKRTEMKDLFDEKFCKMWEFYLSSTASSFRFRDLCVYQIQLVKNFSTASKTRDYIYK

SEQ ID NO: 105040 - protein, 394 aa, Unknown
  Bacterial polypetide isolated from the Sargasso Sea
MARFLNNVFKKDGFILIDANSKSYIIGNPKSENPIKVKILNKNLHYKLLFHPDLYFGEAYTDGEIIIENGTLTDFLDLSLMNFGRGELNFFSSLINKLRGSYRYFTNFNFIKKSKMNVSHHYDISDDLYDLFLDPKRQYSCAYFKNETDTLETAQNNKIQHIIKKLNIKPNQKVLDIGCGWGSLATDIAKSANCEVTGITLSENQFNYCKKRAKELNLENQLHFKLMDYRELDEKFDRIVSVGMFEHVGRKFYRKFFSQVEKLLKDDGVSLIHTIGSVNPPRDPHPWITKYIFPGGYTPSLSEVSPHIEKSGLIVADIEVLRLHYMHTLRHWKENCLKNKEKIIEMFDEKFFRMWEFYLAGCEMAFKWGDQVVYQFQLTKNYSSTPVTRDYIYQ

SEQ ID NO: 105041 - protein, 159 aa, Unknown
  Bacterial polypetide isolated from the Sargasso Sea
MNNLRSIRKDWDLIESLIKDNSRILDIGCGEGDLIQQLEKNLTAKVHGIEKSRELALKGIAKGLNVTHGDAEKDLLQYSNHSFDYVILSQTLQAMIEPKKILKELLRIGSKAIVSFPNFGYWKIRLQLLFNGKMPITEGLPYSWYDTPNIHFFTLKDFQ

SEQ ID NO: 105042 - protein, 56 aa, Unknown
  Bacterial polypetide isolated from the Sargasso Sea
MWKSKTPGIPDEEFERTESVPITKEEIRAIQISKGRLSAGQTVLDIGCGSGSVTVE

SEQ ID NO: 105043 - protein, 395 aa, Unknown
  Bacterial polypetide isolated from the Sargasso Sea
MSFRVLKFLIKHLIKTRSVIIKLEGNDHLIDNGTDPLILQINNKKFLNKIFYAPSLVLTEGYMDKDYELSNSTFYEFSELLIENYNKYLEKISNTLIFRIILIINPLFQLNFIKSSKSNVASHYDLSDRLYDLFLDETRQYSCAYFENENDTLTQAQTNKMSRLADKLLLNSNDRVLDIGCGWGSLSRHFADHHNCKVKGVSLSEEQIKYCNDQLKKSDKKENLSYSLQDYRDEENSYTKIVSVGMFEHVGKPFYKTYFKKIYNLLSNDGIAVVHTIGNIRVPKMTPAFIRKYIFPGGYIPSLSEVMPAVEKSGLIISDIEVLRLHYAKTLSHWFKNFKKEEKEVLKLYDDRFIRMWEAYLNLSELSFTKGDNVIFQLVLTKKRDSFPLVRKKIS

SEQ ID NO: 105044 - protein, 202 aa, Unknown
  Bacterial polypetide isolated from the Sargasso Sea
MGSIPNKTKINSSELIWNDENALWYADQYGNHISNELTINSITIDPNDILLDIGCGIGAAVKIAAKRCNNGKVYGIDPIETMIKIAKKNQLTNSNIEFSIGTAENIPLENESVNKIISINSIHHWRDYKKGLSEVKRVLISDGLFFISSDIVNNNDCGHGPGPLQTNKDIVKELEIAGFKDITLRNYSLDDEGIHLVRCKKE

SEQ ID NO: 105045 - protein, 235 aa, Unknown
  Bacterial polypetide isolated from the Sargasso Sea
MQPLKNWDNKTWLSSKKYILYFHKFLNKKFDFNSNTKILDIGCGRAHIISFLHRKYKFKKQPIGIDIIKNKNIKKNITFIKTDANKYLKKNKRFDLIIIKQTVHFFNKKKITFLLEKIKKSLNPRGKLLILSLKIKNNRIPCFKKMKLKLNESLKKDKKLIDFIKKNLPNYKLSYFKFKVSITKKRYLRMIKDRYISCLLKLSNQDIKNGISEINLKYSRKIQFIDTLLCISFRK

SEQ ID NO: 105046 - protein, 49 aa, Unknown
  Bacterial polypetide isolated from the Sargasso Sea
MSDDVYVHGHHESVLRSHTWRTIENSAKYLEQHLEDRSSLLDIGCGPGT

SEQ ID NO: 105047 - protein, 362 aa, Unknown
  Bacterial polypetide isolated from the Sargasso Sea
MITKSLLGKIIKVGNLTWISPNGELNTYGDGTGEPIRIRTTNSFSELKLLMNPSVHFGESYMNGSLIVEEGRIHDFLKLIFSNTSSEIDHWVMKLSKIVRMIQNKIRTSNYISKSKDNVAHHYDLSDKLYELFLDPDRQYSCAYFNSPNDTLEQAQINKKELISKKLLLEEGQSVLDIGCGWGGMASHIYKKSNANVVGVTLSEEQIAYAKQRKIDEKLDKVEYRLQDYRNVNETYDRIVSVGMFEHVGTSHYQEFFDKVHDLLNDTGVALIHTIGRLTEPTNNDPWIEKYIFPGGYIPALSETMSRVEKSGLSLTDVQVLRFHYAETLKRWRYNFYDNIDKVKELYDEKFCRHVGLLLVIS

SEQ ID NO: 105048 - protein, 394 aa, Unknown
  Bacterial polypetide isolated from the Sargasso Sea
MITKSLLSKIIKTGNLTWVMPNGEINTYGDGTGDPIKIRTTNNFSEIKLLMNPSIHFGESYMNGSLVVEEGRIHDFLKLIFANTEVDIDHWVMKLSKVVRAISNKLTTSNYISKSKRNVAHHYDLSDKLYELFLDPDRQYSCAYFNSPNDTLEQAQINKKELISKKLLLEENQSVLDIGCGWGGMAAHIYKKSNANVVGVTLSEEQIAYAQQRKIREKLEKVEYRLQDYRNVNEKYDRIVSVGMFEHVGTAHYQEFFNKVYDLLNDSGVALIHTIGRLNEPGNTDPWIDKYIFPGGYIPALSETVSRVEKSGLSLTDVQVLRFHYAETLKRWRYNFYDNIDKIKEIYDEKFCRMWDFYLSSSQASFEESTLVVFQMQLSKNKKTVPDSRNYMLT

SEQ ID NO: 105049 - protein, 384 aa, Unknown
  Bacterial polypetide isolated from the Sargasso Sea
MNSLCSDAVIVNETNDNWTRMGKELLSQADIRINGSRAWDIQLHHTGFFKRVLQQGSLGLGESYMEGWWDCERLDILFCKILKAKLDQQMPGNLKDILRIASARLFNLQSRSRAWIVGKEHYDIGNDLFALMLDPHMQYSCGYWKDATTLNDAQNAKLKMICEKLQLKPGMRLLDIGCGWGGLAEYAARHYGVAVEGVTISKEQQKMAQQRCEGLDVNILLQDYRDLNKHYDRIVSVGMFEHVGPKNYDTYFSIADRCLKPDGLFLLHTIGSNKKGMSVDPWINKYIFPNGCLPAISHIAEASESRFVMEDWHNFGSDYDKTLMAWHERFNQAWPELSSRYSATFRRMFNYYLCACAGAFRARDIELWQVLFSRGVEGGIRVYR

SEQ ID NO: 105050 - protein, 207 aa, Unknown
  Bacterial polypetide isolated from the Sargasso Sea
MDKTSKLFDVWAKTGRSEEMEKGHGTTVNQFLDKLSLKEKFRFLDIGCGNGWVVRKMSQKSSCVKAIGIDKSKMMIKNAKSKISSTKESFFVTDLESWDTKEKFDIIFSMESLYYSVPMEPALKKVFKLLKKGGTFYCGTDFYSDNTLTTRWVKDMNIPMDLRSEKEWKKMFREIGFTTRSKHVTDPKNKSKWKREFGTLFVIGRKP

SEQ ID NO: 105051 - protein, 242 aa, Unknown
  Bacterial polypetide isolated from the Sargasso Sea
MSTTINKAEIQKFSRLADEWWDVNGKFKPLHMFNPVRIEYITDKIKNHFKLQKNKGNYLKGINILDIGCGGGLISEPMARLGAKVTGIDASEKNINIAKLHSKKSGLQINYLNTSPENLDDFEKYDVILNLEIVEHVNNVNLYIKSCHKLLKKNGLMFTATLNRSFTSYVKAIIGAEYLLRWLPIGTHDWNKFIKPEELEKFLFNEKFSTLDISGLNFNPFLGKWKKSKNLSVNYIICSLKG

SEQ ID NO: 105052 - protein, 363 aa, Unknown
  Bacterial polypetide isolated from the Sargasso Sea
KLLKKNLNLKLVINPDLSFPEAYMNGDIIIENATLSEFLDLAFKNVGRGEITTSAYIIKKILQLWRFISNYNFPLKSKKDIQHHYDVGGEKGEKLYDIFLDKKHRQYSCAYFKTPNETLEQAQQNKLDHIIKKLNIKPGQKLLDIGCGWGGLAFEIARQKQCEVLGISLSENQIKYCKEKAKEHNLDNQVRFELIDYRHAKGKFDRIVSVGMAEHLGKKFYKTYFKKINELLKNDGVGLVHTIGSIAHPQPPAPFIQKYIFPGGVVPSLSDLISPIEKTGLIVNDVETLIRHYDKTLEGWLSRFMSKRSEVKDLFDEKFVKCWEFYLASCASAFKYRDLVVFQLQLVKNFDAIPSNRRDYIYS

SEQ ID NO: 105053 - protein, 241 aa, Unknown
  Bacterial polypetide isolated from the Sargasso Sea
MTTVNKEEIQKFSKIADEWWDTKGKFKPLHMFNPIRIKYIKEKCISHFKLKEDHPKPLMPLELLDIGCGGGLISEPMCRLGAKVTGIDASNKNINVATLHAKKSGLDINYVNTSPEQKVIKKKFDVVLNLEIIEHVDNVDLFLESSSKLLKENGIMFIATINRTFESYIKAIVGAEYILRWLPIGTHEWNKFLRPNEIHERLKKLNFENIETDGFNFNLFLQNWKKSKDCSVNYIIVAKKN

SEQ ID NO: 105054 - protein, 207 aa, Unknown
  Bacterial polypetide isolated from the Sargasso Sea
MDKTSKLFDVWAKTGRSEEMEKGHGTTVNQFLGKLSLKEKFRFLDIGCGNGWVVRKMSQKPSCVKAIGIDKSKMMIKNAESKISSTKESFFVTDLESWDTKEKFDVIFSMESLYYSVPMEPALEKVFKLLKKGGTFYCGTDFYSDNTLTTRWVKDMNIPMDLRSEKEWKKMFREIGFTTRSKHVTDPKNKSKWKREFGTLFVIGRKP

SEQ ID NO: 105055 - protein, 279 aa, Unknown
  Bacterial polypetide isolated from the Sargasso Sea
MNVSHHYDISDDLYDLFLDPKRQYSCAYFKNETDTLETAQNNKIQHIIKKLNIKPNQKVLDIGCGWGSLAIDIAKSANCEVTGITLSENQFNYCKKKAKELNLENQLNFKLMDYRELNEKFDRIVSVGMFEHVGRKFYKKFFSQVEKLLKDDGVSLIHTIGSVNPPRDPHPWITKYIFPGGYTPSLSEVTTPIEKAGLIVADIEVLRLHYSHTLRHWKENCIRNKDKIIEMFDERFFRMWEFYLAGCEMAFKWGDQVVYQFQLTKNYSSTPVTRDYIYQ

SEQ ID NO: 105056 - protein, 378 aa, Unknown
  Bacterial polypetide isolated from the Sargasso Sea
IVDSKNNTHQFGSGTGNLKIRLKNKSIEKKLFRNPSLHFGEGYMNKEILIEEGSIEELIDLITSCYDDFIKHNSIYRMYENFSGYFKIFQQLNEVVKSKQNVAHHYDLKEDLYKLFLDKDMQYSCAYFHNENISLDQAQIDKKNHIINKLQISEKMKVLDIGCGWGGMAIEIAKQTGAKVKGITLSENQFETASQRAQEEGLSEKITFKLQDYRDENETYDRIVSVGMFEHVGIKYFKEYLKKTYDLLKDSGVFLLHTIGQRGVPTATSPWIRKYIFPGGYIPSLSDIIHETEKLNINITDIEILRLHYAHTLSRWYKNVQKNKSQIINMFDERFYRMWEFYLLASKYSFVNMGNVVFQIQISKNINNLPLTRNYMYN

SEQ ID NO: 105057 - protein, 260 aa, Unknown
  Bacterial polypetide isolated from the Sargasso Sea
MSLTDEGHYGPKQLNMLKVIWGEGYLSPGGSLEIDEIIGDLDLSNKKILDIGCGTGGAVFHLLEKHNAAEAIGYDPEPLVIEKANELAAEKNLSDRANFHCIEPGPIQADDESMDVVFSKETFIHIPDKNELMKDIHRVLKPNGLLTVGDWMRSDDGPPSEQMIEYIKAEGLDFFMCSLEKYREVLENSGFKIISMTDRNQWYLEKVRNEVKQIEGPLWSKVVDAIGPEEGAYALDIWKKLLGVVEKGEHRPGNFRAIKV

SEQ ID NO: 105058 - protein, 227 aa, Unknown
  Bacterial polypetide isolated from the Sargasso Sea
MNNIRSIRKDWDLIESLIRDSSRILDIGCGEGDLIQQLEKNLAAKVHGIEKSRDLALKGIAKGLNVTHGDAEKDLLQYANHSFDYVILSQTLQAMIEPKKILNELLRIGSKAIVSFPNFGHWKIRLQLLFNGKMPITEGLPYSWYDTPNIHFFTLKDFQNLCNEMNIVIENSIGLTNKGKQFAINGSLLPANIITNEAIFLLSYKNFEPIKLKSTNKIFTKNSAIVN

SEQ ID NO: 105059 - protein, 395 aa, Unknown
  Bacterial polypetide isolated from the Sargasso Sea
MSFRILKFILRKLIKSKSILIKSDNSEYLIDNGNDAVILKINNKKFLKKIYYAPSLVLTEGYMDKDYELKNASFYEFSDLLIENYNKYLEKVSKSIFFRIFLIINPFFQLNFVKRSKNNIANHYDLSDKLYDLFLDDTRQYSCAYFEKETDTLSDAQNNKMNRLADKLLLNSSDNVLDIGCGWGSLSKNFVDNYKCNVKGISLSEEQIKYCNEQLENNKNKEKLNYSLQDYRDENNSYSKIVSVGMFEHVGKPFYKTYFNKIHELLSDDGIAVVHTIGNIRTPKLTPAFIRKYIFPGGYIPSLSEIMPAIERSGLIISDIEVLRLHYAKTLSHWFQNFKNSKDEVLKLYDKRFIRMWEAYLNLSELSFIKGENVIFQLVLTKKRDSFPLVRKKIN

SEQ ID NO: 105060 - protein, 296 aa, Unknown
  Bacterial polypetide isolated from the Sargasso Sea
MILAKLFTKIFKEGGIILIDSENQKYICGSPRQINPITLKLLKKDLNWKILLNPELEFPEGFMRGDIVIENASLKEFLMEVLKNLGRSEVSTASIFFKKVYQAWRFITNFNFPGKSKKNVEAHYDIGGRKGEILYDVMLDKHHRQYSCGYWKDETKTLEEAQENKIQHIIKKLDIKKNQRVLDIGCGWGGLCFEIAKQYDCEVTGISLSTNQINYCKEKAKKLGLENQVKFELIDYRLVKGNYDRIVSVGFGEHLGVKFYNTFFKKINSLLNENGNFLFHLIWCCGQTFCSKSIHK

SEQ ID NO: 105061 - protein, 200 aa, Unknown
  Bacterial polypetide isolated from the Sargasso Sea
MQLARFLNKLFKDDGFVLIDADLKKYIIGNPKKENPITVKLLDKKLNYKLLLYPDLYLGEAYTDGTLIIENGSLTNFLNIAMKNIGRNEINTFGRIIKKIRGTYRYLTNFNFAKKSKDNVAHHYDISDDLYDLFLDPKRQYSCGYFKDENSSLETAQEDKINHIIKKLNLKPNQKVLDIGCGWGSLAIDIAKKSKCEVTG

SEQ ID NO: 105062 - protein, 185 aa, Unknown
  Bacterial polypetide isolated from the Sargasso Sea
MKSSNLQKTLAKSEQYLPAEDTFFLADHLEGLSGDSALDIGCGSGYLTDILKSTFRLVVGTDISFNTLVEQNFKTQNVICCNSADALNLDFDVIICNLPYLATDEIIDVATDGGKDGLEIPQKIISSALPHLSKQGKFLFVTSSLSDYMGLIDFVQSKNFKAKIIDRKKLFYEELIIVEVKHLLS

SEQ ID NO: 105063 - protein, 73 aa, Unknown
  Bacterial polypetide isolated from the Sargasso Sea
MNNIKSIRKDWNLIESLIRENSRVLDIGCGEGDLIQQLEKNLTAKVHGIEKSQDLALKGIAKGLNITQGDAEK

SEQ ID NO: 105064 - protein, 242 aa, Unknown
  Bacterial polypetide isolated from the Sargasso Sea
MKKLYISKDYYAPIKRNNNFSKDDYWLESVDPDGNKRNRIDEKEQYISDISAEMDYINKLKPGKILDIGCGLGWLLSAVDDAWEKHGVEISQYASEYATKYANIKNDDFLNVDYDSNFFDLIVMHHVIEHMENPIENLKQAIRMLKDGGTMIIATPNFDSGCARLFGNNYRLLHDSTHISLFSDDSMQRMLRDHSLLVDYVDYPYFNTRYFNKENLDKLFKTNEISPAFYGNFMTFYCRKNK

SEQ ID NO: 105065 - protein, 185 aa, Unknown
  Bacterial polypetide isolated from the Sargasso Sea
MKLSNLQKKLKKSEQYLPAEDTFFLADRLKDLCGKSALDIGCGSGYLTEILNSNFQLVVGTDISFNTLCTQNYKTQNAICCHSADALNLQFDLIICNLPYLATDEIIDVATDGGKDGLEIPLEIISSALPHLDKNGKFLFVTSSLSDYMGLVNFVKSKNFQAKIIDKKKLFFEELIIVEVKHLLS

SEQ ID NO: 105066 - protein, 303 aa, Unknown
  Bacterial polypetide isolated from the Sargasso Sea
MALRRALSRGARAAFATFDAPSTRTCGLSSTRALSRAHNTASASTSASEDAPIGQVDAREKAKFESDAALWWNEDEGPFAALHAMNPVRVRFIRDALMRRFEKELAQNPPYAALRGVKILDVGCGGGILAESLARLGADVTAIDAGAANIAIAEAHAALDPDLAKNLRYEAVTAEELASRGETFDCVTSLEVIEHVTDPLEFTLSISQLVKPSGSLFISTINRTARSFVMAILAAERILGIVPPGTHQFTKFLTPGEVAVMASRAECEMKELAGMVYDPLRNKWSLSSDTQINFIAPLRQGDA

SEQ ID NO: 105067 - protein, 237 aa, Unknown
  Bacterial polypetide isolated from the Sargasso Sea
MTTTINREEIQKFSDLADEWWDVNGKFKPLHMFNPIRIEYITEKIKQEFNLINRNNNFLKDLKILDIGCGGGLISEPLARLGGEVTGIDASEKNIKVAKLHSKKNNLNINYFNKSPEQLNDSEKFDIVLNLEIVEHVENVDLYIKSCSNLLKKNGIMFTATLNRTIISYIKAIVGAEYILRWLPIGTHDWNKFIKPEELEKKLSLANFCTIDVKGLEFNPLFNKWKQSDNLSVNYII

SEQ ID NO: 105068 - protein, 236 aa, Unknown
  Bacterial polypetide isolated from the Sargasso Sea
MASVVIKNWDNKTWLSSQNYINSFNNFLIKNTKINSNFKILDIGCGRGKILGSLKSRLKLKYKPLGIDIVNHKDRDKRIKFKKANILNLSLRKSQKFDLIMIKQTIHLIKLSKVKKLLKSLEKILNTKGKIIIFTLDTENNEIPTFKLMKLKLNKSLIRDKKIFKIITNLYPQRIQKKFIFNVRISKKKYLDMIKNRYISTLIPLSKKQLIQGIQEIELNYKNKLKFKDKLTCIIL

SEQ ID NO: 105069 - protein, 197 aa, Unknown
  Bacterial polypetide isolated from the Sargasso Sea
MKKEFKVIADLLPNNTRVLDIGCGDGSLMHLLRIEKNIEVRGLELNQDNVKECIYKGLPVIQGNAETELHQFPDKSFDYVVLSQTLQAFYEPEKVLKNLLRIGKSVIISIPNFGYWKVRTKLLLFGEMPVTKTLPNTWYNTPNLHMCTIKDLFNFCDEKNIIIKKVVGVNENKTSLISKSNLEIKNLFSKVGIFLIS

SEQ ID NO: 105070 - protein, 240 aa, Unknown
  Bacterial polypetide isolated from the Sargasso Sea
MKNKIKELKNWDNKTWLSSSAYINSFNIFLLKKKKLNKNSQILDIGCGRGKIIGAISRKIKLLNKPIGIDPIVHKDVDKSIDFRNEDVFKFFKTNQIKFDLIMIKQTLHFFNKNKRSKLIKVCKNNLKKNGVLIIFSLNTINNEIPCFKLMKQKLNKGLIRDSIMIKSTCKILKNYKIDKFKFKVSITKSKYIQMLKQRYISCLVNLNKEQINKGIKEIKDIYPNKILFKDILICLKYKS

SEQ ID NO: 105071 - protein, 204 aa, Unknown
  Bacterial polypetide isolated from the Sargasso Sea
MSFLADTPSQEPDTVPSEALDKGEALDKGKASNKDKPKKRGYALDIGCGCTNRFVPVIESAGLAYEGIDVSKNMLAIATSQLPAHIFYCADVCTFTIPKHYSFISAWDSFWHIPLTQQEPLLKKLVDHLDDDGVLLFSCGGTDESGQHTNEVMGPEVYYASLGLHRYIEILIEAGGFVRHVEFDQHPELHTIIIVQKRTAQKTQ

SEQ ID NO: 105072 - protein, 271 aa, Unknown
  Bacterial polypetide isolated from the Sargasso Sea
MQYICPLCALPLTLTQRTWGCPQAHKFDMAKEGYVNLLPVQKKNSKDPGDNQQMMFARREFLNAGYYQILSDRVNQLALQYASSAQQILDIGCGEGYYSHRLYNALVAHHFCYLQGVDISKSAIKYAAKRYPNLSFCVASAYEMPIPSNSIDLAIRIYAPSKVEELQRIMAPSGILITVSPGPLHHFALKQQIYDQPRLHPESEARVDGFECLHQERLSAQLDLNDSKDIGNFLEMTPYAWKFTAEQKQAFSQRGLSCELDFQIEVHRISV

SEQ ID NO: 105073 - protein, 376 aa, Unknown
  Bacterial polypetide isolated from the Sargasso Sea
MLSNISHGSLKVITPDGKHHHFSGTKTGEDVYVCINDWRFCDELLLKGDVGLGESYVLGYWDCENINMLVKWGIENKEPLERAIKGSFTKILFYRFKHFLKRNSKKGSIKNIHAHYDIGNKFYQLWLDSTMTYSSAIFKSSNEKLSEAQENKYQNILNKLKPKDGDHILDVGCGWGGFMEYAARNRFKVTGITISQEQYEYAKKRLSKYGDLAEVKLLDYRDIAGKYNHIVSIEMFEALGFHYWKKYFNVLYSILRPGGKLIIQSITINNDDFLSYKKCSDFIQQYIFPGGMLPSSKIVKEIATKQGFLHNDNFEFGLDYGATLKKWEENFSNALDKIKMLGFDERFIRTWRFYLKYCQGGFESKKLSVSQFNFVK

SEQ ID NO: 105074 - protein, 396 aa, Unknown
  Bacterial polypetide isolated from the Sargasso Sea
MQLARFLNSVFKKDGFILVDANSKSYIIGNPKKENPIKLKILNKKLHYKLLFHPDLYFGEAYTDGEIKIENGSLTDFLDLALMNFGRGDLNFFSYLINRLRGSYRYLTNFNFIKKSKMNVSHHYDISDDLYDLFLDPKRQYSCAYFKNEDESLEDAQNNKIGHIIKKLNIKPNQKVLDIGCGWGSLAIDIAKSANCEVTGITLSQNQFNYCQKKAKELNLENQLNFKLMDYRELDEKFDRIVSVGMFEHVGRKFYRKFFSQVEKLLKDDGVSLIHTIGSVNPPRDPHPWITKYIFPGGYTPSLSEVTTPIEKAGLIVADIEVLRLHYSHTLRHWKENCIKNKEKIIQMFDERFFRMWEFYLAGCEMAFKWGDQVVYQFQLTKNYRSTPVTRDYIYQ

SEQ ID NO: 105075 - protein, 209 aa, Unknown
  Bacterial polypetide isolated from the Sargasso Sea
MKQESINKIINRYRKRISEYGTTFESLGSGSLEHQSIRFEMLKTGIKPGDSVLDIGCGLGDFYHYLLSCDIDVDYHGVDIVPEFIKTAEEKYPQAEFQVRNILEEPFKDDSFDFVVCSQVLNFKLREEDNLQHAKDMLKNMNSFSRKSVACDFLTSYVDYEEDHLFYYKPEQIFEFCKSLTKRVNLIHSYPLFEFCIFLYKDFDGWRNE

SEQ ID NO: 105076 - protein, 241 aa, Unknown
  Bacterial polypetide isolated from the Sargasso Sea
MTTINKEEIQKFSKLADEWWDVNGKFKPLHMFNPIRIEYILDEISKHFKLDKNKKFFLKNLEILDIGCGGGLISEPMARLGGNVTGIDASEKNIKVASLHSKENNLKIAYLNKSPEQLDDKEKFDIILNLEVVEHVDNLDLYLKSCYKLLKPNGLMFTATINRTFTSYVKAIIGAEYILRWLPIGTHDWNKFIKPEEMQKKLVDINLLTNNIKGLEFNPIFNKWKKTENLSVNYIISSYKN

SEQ ID NO: 105077 - protein, 256 aa, Unknown
  Bacterial polypetide isolated from the Sargasso Sea
MLLARLLSKIYKKNGIILIDSQEQKYICGKPDLKNPLTLKLLKKNLNWKLALNPDLNFPEAYIRGEIKIENGSLLDLLNMTFENLGRDEINMYGYIIKKIFHSWRFLTNYNFPGKSKQNSKYHYDIGEELYDLFLDKKHRQYSCAYFTKENESLEDAQQNKINHIIKKLNLKPGQKVLDIGCGWGGMAFEIARQSKCEVKGISLSENQINYCNKKAKELNMDNQVHFEFCDYRSINDKFDRIVSVGAFEHFGEKIL

SEQ ID NO: 105078 - protein, 396 aa, Unknown
  Bacterial polypetide isolated from the Sargasso Sea
MQLARFLNSVFKKDGFILVDANSKNYIIGNPKSDNPIKVKILNKNLNYKLLFHPDLYFGEAYTDGEIVIENGSLTDFLDLSLMNFGRGDLNFFSYLINRLRGSYRYLTNFNFIKKSKMNVSHHYDISDDLYDLFLDPKRQYSCAYFKSETDSLETAQNNKIQHIIKKLNIKPNQKVLDIGCGWGSLAIDIAKSANCEVTGITLSENQFNYCKKKAKELNLENQLNFKLMDYRELNEKFDRIVSVGMFEHVGRKFYKKFFSQVEKLLKDDGVSLIHTIGSVNPPRDPHPWITKYIFPGGYTPSLSEVTTPIEKAGLIVADIEVLRMHYSHTLRHWKENCLKNKEKIIHMFDERFFRMWEFYLAGCEMAFKWGDQVVYQFQLTKDYSSTPVTRDYIYQ

SEQ ID NO: 105079 - protein, 92 aa, Unknown
  Bacterial polypetide isolated from the Sargasso Sea
MKKEFKVISDLIEEKSRALDIGCGDGNLMEYLLQNKTKDIRGLEISKEKVQNCLSKGLAVIEGDAENDLKQFPNKSFDYVILSQTLQAFLSP

SEQ ID NO: 105080 - protein, 377 aa, Unknown
  Bacterial polypetide isolated from the Sargasso Sea
MDANSKSYIIGKPKKKIPIRLKILEKSLHWKLLINPDLYLGEGYMDGSIVIENGTLTEFLDIALKNVGRQPTNEITNILARFRRVYRYITNFNLIGKSKENVAHHYDISEKFYDLFLDEKRQYSCAYFKDVDNTLEEAQNNKIDHIIKKLNLKPNQRVLDIGCGWGTLAIDIAKKTQCEVVGITLSENQLEYAKQKARETNLENQLEFRLVDYRQINEKFDRVVSVGMFEHVGRKFYKKYFNKVYDFLNEDGVALIHTIGSINPPRGPQPWITKYIFPGGYTPSLSEVSLPVEESGLIISDLEVLRTHYQHTLRNWKERFISKKGEVLEMFDEKFFRMWEFYLVGCEMAFKWSDQVVFQFQLTKKFKATPITRDYIY

SEQ ID NO: 105081 - protein, 264 aa, Unknown
  Bacterial polypetide isolated from the Sargasso Sea
MSFVTINCPVCDNDYFSIFKEVFDDRYGEPNKYNLAKCSRCSHISTYPILDQKELGELYSKYYPRKNINYKDVQANVKLNKNFFSRFLNWFQGISNQGQLYAKKNDQVLDIGCGDCSSLIYLRKLGAIPYGVEADINVKPIAKSLNFSVHFGGIEDNPFSKVFFDLIVMNQVLEHMPEPAKTLNLIKERLKRKGRIIIVIPNNESFWHKVTGYKWINWHVPYHLHHFKQKNIERMLRKNDLKIIKIPKQLHQIYGTFLQIKHFF

SEQ ID NO: 105082 - protein, 321 aa, Unknown
  Bacterial polypetide isolated from the Sargasso Sea
MQLASFLNRIFKKGGFILTDANSKDYIIGEPDKNPIRLKILNKNLHYKLLLHPDLYFGEAYTNGEIIIENGSLTDFLDLSLMNIGRGELNFFSYLINRLRGSYRYLTNFNFIKKSKMNVSHHYDIKDDLYDLFLDPKRQYSCAYFKNDNDDLETAQNNKIQHIIKKLNIQPNQKVLDIGCGWGSLAIDIAKSAGCEVTGITLSENQLNYCKQKAKEMNLENQVKFKLMDYRELKEKFDRIVSVGMFEHVGRKFYKKFFYQIEKLLKDDGVSLIHTIGSVNPPRDPHPWITKYIFPGGYTPSLSEVTTPIEKAGLIVTDIEV

SEQ ID NO: 105083 - protein, 314 aa, Unknown
  Bacterial polypetide isolated from the Sargasso Sea
MQLARFLNNVFKKDGFILVDANSKSYIIGNPKSENPIKLKILNKNLHYKLLFHPDLYFGEAYTDGEIIIENGTLTDFLDLSLMNFGRGDLNFFSYLINRLRGSYRYLTNFNFIKKSKMNVSHHYDISDDLYDLFLDPKRQYSCAYFKNPTDTLETAQNNKIQHIIKKLNIKPNQKVLDIGCGWGSLAIDIAKSANCEVTGITLSENQFNYCKKRAKELNLENQLNFKLMDYRELNEKFDRIVSVGMFEHVGRKFYRKFFSQVEKLLKDDGVSLIHTIGSVNPPRDPHPWITKYIFPGGYTPSLSEVTTPMKKQA

SEQ ID NO: 105084 - protein, 261 aa, Unknown
  Bacterial polypetide isolated from the Sargasso Sea
MSITDEGEYGKKQIDTLEMIWGEGYLSPGGASEIDLILNDKSLKNKKILDIGCGCGSAAFHFIKNHSPNYVLGVDVEEMVIDKANVLKSSLIEKKKVDFKVIQPGELPFDDLSFDVIFSKDTFLHILDKERLVEDLYRVLKPDGFLCVGDWMRIDDNAPSKLMQEYIKLEGLSMNMCSLQRYGNALNNAGFNNIKLTDRNKWYLNLAKKELNDLSTIYKEKLIKILGIEDAEGTINIWKKMIEVLEKGEHRPGHFYAEKRT

SEQ ID NO: 105085 - protein, 197 aa, Unknown
  Bacterial polypetide isolated from the Sargasso Sea
MKKEFKVIADLLPNDSRVLDIGCGDGSLMHLLKIEKNIEVRGLELNQDNVQECIYKGLPVIQGNAETELHQFPDKSFDYVVLSQTLQAFYEPEKVLKNLLRIGKSVIISIPNFGYWKVRTKLLLFGEMPVTKTLPNSWYNTPNLHMCTIKDLFNFCDKKNIIIKKVVGVNENKTSLIKKSNLEIKNLFSKVGIFLIS

SEQ ID NO: 105086 - protein, 235 aa, Unknown
  Bacterial polypetide isolated from the Sargasso Sea
MARFLNNVFKKDGFILVDANSKNYIIGNPKSENPIKVKILNKNLHYKLLFHPDLYFGEAYTDGEITIENGTLTDFLDLSLMNFGRGDLNFFSYIINRLRGSYRYLTNFNFIKKSKMNVSHHYDISDDLYDLFLDPKRQYSCAYFKNETDTLETAQNNKIQHIIKKLNIKPNQKVLDIGCGWGSLAVDIAKSANCEVTGITLSENQFNYCKKKAKELNLENQLNFKLMDYRELNEK

SEQ ID NO: 105087 - protein, 226 aa, Unknown
  Bacterial polypetide isolated from the Sargasso Sea
MRRLHNSEKRKLIESVAKPGYSVLDVGCGFGGDLQKWNGVGVNISMCEPSEEALKEAKSRAKNMKIRVNFYHGDIHACPNRKYDIICYNFALHYIFQSHGLFMSTLREIKKRMKPGGMCIGIIPDSEKILFKTPLHDTYGNFFKMKSTSNGDFGEKLFVHLVDTPYYADGPKSEPIAHKDLLVTHMENNGFSMELWEGLSGNPISELYSKFMFVYRNDNSDRSSGD

SEQ ID NO: 105088 - protein, 195 aa, Unknown
  Bacterial polypetide isolated from the Sargasso Sea
MAILTHFGLTASSMVLDIGCGCLRGGRWLIPYLNSDCYFGVEPNVEMLEIGKKIVIDSKILQDKKPKFNTNSDFEFDVFGTTFDYFIARSIWTHSSKKQIEKMLDQFVRHSSPSARFLTSYMRPRIPFLDGYKGESWVGKSHESDQPGIARHSLRWIEKACLNRGLKVSSIDEPKLNYGAQIWLLIERTQEDTDL

SEQ ID NO: 105089 - protein, 379 aa, Unknown
  Bacterial polypetide isolated from the Sargasso Sea
MELSQYYTPTSFSSILIANMLTIDADSVLDIGCGQASLLEAARHRWSTAKLIGYDIDPTNYSLKGKNLHIGFGDGLDPDLSSKILDTFGNIDISVANPPYTSVDMNRGIVRILKQACLFDCLPRNIKKIPSEIVFLAQNFLVLKDCGELGAILPASIISGEKWKHLREYLITEKRIGKVIQLPKKAFSNTEAATFAVVLDNRKSNSDSIELSSIDSKTSLKIDNVRCIKRLDYCYHSNGLNMHISKVNDGLIIFRGNKSSKEITSSSEPFIHTSDLKNIFQILSFEKRNYPKGAKVAKKGDFVVSRVGSRCIGKAAYINEGEVEVSDCITVLSGLDKELYIPFFKFGKFYENALSNALGTGAQYLTFEIIREALGMYDF

SEQ ID NO: 105090 - protein, 316 aa, Unknown
  Bacterial polypetide isolated from the Sargasso Sea
MVTSKTVASASSLNDRRRQPFAAVRGQLQNDYESRVMEAYQDDPAQWSKAIGDRLWFQFGVYDDPQSPRPADLDESGLRYFERQLKIAGLDTPGRQPINRILDIGCGWGTVLRDLSERFPGCHRLDGINISDRQLEYCAEVNAARGVSDRINLFRCNALDIDLLPDFDVPYDLAIMRGVISHFPYDLFEIVMAKLRRRLAANGTVIVSDNLYNVDLSEYRSDTPDLVDRLACKYRKTPAYLRQVFEQSGFRVHDMQVLPNRTDATRWLLDVQDNIERHFPTGAVGALEELRVMCESLAVAIVKRQVSIYSFVLKHG

SEQ ID NO: 105091 - protein, 607 aa, Unknown
  Bacterial polypetide isolated from the Sargasso Sea
YDTDILHSLASIHIALKEENDAIHLLNKVKQLEKDTATTYFFLGLAYNNLKDEKNIIRSFLDGAKKDPQNKAIAKYLNSYMLTYLDFKNVPHKEDIMIFYINTIEFNVLEIEDIKPVAQEFLIQEFDFIKNIDLKNLNIENIKNKIFTSINNKLLLQIIENTRISNQFLEELILKLYIAIITLLKTNNFSKVEELILINFFNALRKQNILKEVLWIKSNEELSIINEHKKEIINKIEKNKNLTDLEFLSFYKQFVNEEDQKADKIFDTYKKKNQAIAEEIEDISKMQKIDKKFDKKLSINKEIKNKNTIEVMEYYNLFPCKPWTKVKIDQKIAFENFLTNDLLPTKILGKREIFNKKDTFNVLDIGCGTGRDAILLSSIENSEIDALDVSRQNLKYALTKADEHNTKNINFMKLDFLDIKIMKKQYDFINCSFSLNEFEDVNKVFKMMKEILKPGGFIRLRINSELGNKNVELLKSKISSSKDVKKEKLKFWEDIKKQILLINDPQFEFIKKDNSLSSVSNLAHSLFPIRTKNFTIDEIINYISKNDLTFLGWSDFVNKEYKMSIFSNYQKEYPNDTNFKNLTNWKKLEIKHPIIFTNSYSFWLEKK

SEQ ID NO: 105092 - protein, 310 aa, Unknown
  Bacterial polypetide isolated from the Sargasso Sea
RNELNIFSYLLNKLRGSYRYLTNFNFIKKSKMNVSHHYDIKDDLYDLFLDPKRQYSCAYFKNENDSLETAQNNKIQHIIKKLNIKPDQKVLDIGCGWGSLAIDIAKNAKCEITGITLSENQLNYCNQKAKEMNLQNQVKFKLMDYRELDEKFDRIVSVGMFEHVGRKFYKKFFKQIEKLLKDDGVSLIHTIGSVNPPRDPHPWITKYIFPGGYTPSLSEVTNPIEKAGLIVTDIEVLRLHYAHTLRHWKENCLKNKDKIIQMFDEKFFRMWEFYLAGCEMAFKWGDQVVYQFQLTKNYRSTPVTRDYIYQ

SEQ ID NO: 105093 - protein, 223 aa, Unknown
  Bacterial polypetide isolated from the Sargasso Sea
QDKKAYPREPISARLVADLFISAGADRIVSIDLHTQQIQGFISQPFDHLTAMPLFVNYFKDKYKEPITIISPDAGGVRRATTFAKNMEAYVGFVHKKRDPKIHNEVKAFTVIGEVEDRHAILFDDIIDTGGTIAAASRALIERGAKSVSVAATHGIFSDESVEKLKDTPIDEIIVTDTLKQNGNIEKIGNVKILSVSSIIATALTSIFADDSVSAIFMGENVL

SEQ ID NO: 105094 - protein, 203 aa, Unknown
  Bacterial polypetide isolated from the Sargasso Sea
MIKRTSKTYIEKTLSENPDWKILDIGCGYGANKHATTVSDILDLSNHYKDKSFVKITEKKLPFKDKEFDFVFASHVAEHVEDVSYFLNELSRIGKKGYIEVPTRLEDNLVFENKKAHIWHLVFDDVNSQINISKKQQYFEPVLTVGTIKKLNEYFRESLVIELSWEGSIKFNMVEDNLKTPVKISILNLLKKYFSKKIRLLIK

SEQ ID NO: 105095 - protein, 66 aa, Unknown
  Bacterial polypetide isolated from the Sargasso Sea
MIKRTSKTYIENIISQNPNWKVLDIGCGYDANKYATTVSDILDLSEHYRDKNFVKITEKKLPFKDK

SEQ ID NO: 105096 - protein, 49 aa, Unknown
  Bacterial polypetide isolated from the Sargasso Sea
MASVVINNWDNKTWLSSQNYINSFNNFLIKNTKINSNFKILDIGCGRGK

SEQ ID NO: 105097 - protein, 231 aa, Unknown
  Bacterial polypetide isolated from the Sargasso Sea
MIKLNKKSKKLILLQRNELLSEKQKILRKRFGRFLFTNFFVHFFQNQKLDESVQNLFEKEYETIKNFLPSNASNILDIGCGLAILDIFLAQNYEKPNFFLIDKNKVDLKIKYGFSKNYESYNNLNETKKVLLANNILDEQIFIKNAEEKIDINKKMDLVLSIKSMAFHYPLENYLDLLRRVCTQNTEFIFDISTERYQLDSLSEYFEKIDLIYEEDSQQPLKRVHCKNFKL

SEQ ID NO: 105098 - protein, 204 aa, Unknown
  Bacterial polypetide isolated from the Sargasso Sea
MIKRSSKKYIDKLLSENPSWKILDIGCGYNASKYATTVCDILDLSSFYKNKEFIRIDDKNFPFKDKEFDFVIASHVLEHVKDISYFIKELERISTRGYIEVPTKLEDNLVFENKKAHIWQLSFDDDQNQIIINNKLQYFEPILTVGSIKKLNHYFRDSLVIELNWEGKIDYKIESIELLNNDKISIFSLFKKYFSKKLRMIFSR

SEQ ID NO: 105099 - protein, 114 aa, Unknown
  Bacterial polypetide isolated from the Sargasso Sea
MTNFKEEYGEVETPLFFIEKMFEMIPDKLFKNKNLKWLDIGCGNGAFSMYLFNILFKSLQEEIPEPNLRRNHIIENMLYMVEVNKVCELNLIFFFGNKANIYIKDYLQDFHLPD

SEQ ID NO: 105100 - protein, 243 aa, Unknown
  Bacterial polypetide isolated from the Sargasso Sea
MNTTIDPVEREKFSKMAEEWWDPSGKFKALHKFNPKRIEFIRNKIIDHFSIEPNAENPFSNLDILDIGCGGGLLSEPMSRLGGNVSGIDIVEKNINVAKTHSEEQNLEINYKMTTAEELALGKKKFDVILNMEVIEHVSDLNLFIESCEKLLKKNGLLFFATLNRNLLSFGLAIVGAEYILGWLPKGTHNWKKFITPEELKIIFRSSGLNITDIMGMKYNPIYDSWYLSEDTSVNYLGTAIKS

SEQ ID NO: 105101 - protein, 205 aa, Unknown
  Bacterial polypetide isolated from the Sargasso Sea
MNTVNKKEIEKFSKISNEWWDIEGKFKPLHKFNPSRIKYIKNKVITHYNIISKQQPLKNIQLLDIGCGGGLLSEPMCRLGAKVTAIDASQNNINVAKYHAKKNNLKINYLCTSPEKVIFKKKFDVILNMEIVEHVDDLNLFIKKSSFLLKKNGLMFVATLNRTLKSYLFAIIGAEYFLRWLPIGTHDWNKFVEPKELEDMEKKIV

SEQ ID NO: 105102 - protein, 77 aa, Unknown
  Bacterial polypetide isolated from the Sargasso Sea
MSNNTINREEVEKFNKIAEEWWNPNGKFKPLHKFNPIRIEYIKNNIIKDFNISSNDKPLKGISILDIGCGGGLLSEP

SEQ ID NO: 105103 - protein, 141 aa, Unknown
  Bacterial polypetide isolated from the Sargasso Sea
MSSVNKIEIEKFSNMADEWWDPHGKFKPLHKFNPIRIKYIKENIIRQFKIKNKNKPLSGINILDIGCGGGLLSEPMCRLGANVTGIDASIKNIKISKLHAKKDNLKINYICSSPEKLKISKKFDVILNMEIVEHVEDISFF

SEQ ID NO: 105104 - protein, 139 aa, Unknown
  Bacterial polypetide isolated from the Sargasso Sea
MKNSTINKEEIEKFSKIAEEWWDPAGKFKPLHKFNPIRIEYIKNNIIKTFKLDNKKKPLDKIKILDIGCGGGLLSEPMSRMGASVTGIDASNKNITVAKLHAKKNKLGIKYICSSPEIFKTNIKYDVILNMEIIEHVED

SEQ ID NO: 105105 - protein, 153 aa, Unknown
  Bacterial polypetide isolated from the Sargasso Sea
MKRSTINKEEIDKFSKLSDEWWDPDGKFKPLHKFNPVRIEYIKKHIINHFKINKTQFPLKNLKILDIGCGGGLLSEPMSRLGANVTGIDASEKNIKIAKAHLKKSKLKIKYFCDSPENFKKKEEYDVILNMEIVEHVDDVELFIRKSSELLKK

SEQ ID NO: 105106 - protein, 86 aa, Unknown
  Bacterial polypetide isolated from the Sargasso Sea
MSTINKKEIEKFSKIAAEWWNPNGKFKPLHKFNPIRIKYIRDNIVKKFNLKSSRKPLKNISILDIGCGGGLLSEPISRMGAKGCWD

SEQ ID NO: 105107 - protein, 134 aa, Unknown
  Bacterial polypetide isolated from the Sargasso Sea
MKNNTINKKEIEKFSKIADEWWNPEGKFKPLHKFNPIRISYLKENIIKTFKLNNKKSPLKNVKILDIGCGGGLLSEPMCRLGASVTGIDASKKNIDIAKLHSKKNNLKIDYFCSSPEKYKVKDKFDVILNMEIV

SEQ ID NO: 105108 - protein, 236 aa, Unknown
  Bacterial polypetide isolated from the Sargasso Sea
MKNNTINKKEIEKFSKIAEEWWDPNGKFKPLHKFNPIRIKYIRDTILSEFKIKKEHEPFKGLSILDIGCGGGLLSEPMAKLGGDVVGIDASFKNIQVAKYHLKKSKLKIKYYNSSPENLKIKKKFDIILNMEIVEHVEDVDFFIKESSKFLKQSGVMFIATLNKTLKSYLFAIIGAEYVLKWLPIGTHDWEKFVKPEYLTNICKKNSLKLKKIDGMTFNPILDKWSVTSDKSVNYI

SEQ ID NO: 105109 - protein, 256 aa, Unknown
  Bacterial polypetide isolated from the Sargasso Sea
MTNTVDKREIEQFSSLSNKWWDMSGPFSALHKMSNARMEFITQNSTRILKKDNIGVNLLDGLNCLDIGCGGGILSEKLRRLGANVTGIDASKRSIDIAKDHAKKSRLEINYKCITTSELLEIKEEKALNKFDLVIASEVIEHVHNRKIFLSDISNLCRPGGLVIFTTINNSVLGILLGKYFAEDILKIIPSGTHEVEKLISPENLAKEAEQHGIILDSFTGFAPTFRLKNIINKEFGNFKLSSNMQVNYGAAGIKL

SEQ ID NO: 105110 - protein, 242 aa, Unknown
  Bacterial polypetide isolated from the Sargasso Sea
MKNNTINKKEIEKFSKIAEEWWDPNGKFKPLHKFNPIRIAYIRDNIIKTFKINQKKSPLSKLKILDIGCGGGLLSEPMCRLGATVTAIDASEKNINVAKLHANKNNLKINYICTSPEKMNIKNHFDVILNMEIVEHVEDVEFFLKTCSGLLKKNGIMFVATLNKTLKSYVFAIVGAEYILRWLPIGTHDWEKFLKPEELISILKNYNLSLDKINGMQFNILTDKWKVSEDKSVNYIAKFIKN

SEQ ID NO: 105111 - protein, 197 aa, Unknown
  Bacterial polypetide isolated from the Sargasso Sea
IINHFKKNKKINQLKGLKILDIGCGGGLLSEPFARLGANVTGIDASYKNIKVAKIHAKKSKLNINYICCTPENLNSDKRFDVVLNMEVVEHVEDIDFFMKQSTKFLKKNGLMFVATLNKTLKSYVFAIIGAEYILRWLPIGTHNWEKFVEPSRLIKIGANNNLKMDLIDGIKYNPILDQWNISKDKSVNYISKFIKI

SEQ ID NO: 105112 - protein, 148 aa, Unknown
  Bacterial polypetide isolated from the Sargasso Sea
MKNNTINKKEIEKFTKIAEEWWDPNGKFKPLHKFNPIRIKYIRDTIISEFKIKKDHEPFKGLSILDIGCGGGLLSEPMARLGAEVTGIDASNKNIQVAKYHLKKSKLKINYYNSSPENLKIKKKFDVVLNMEIVEHVENVDHFIKESS

SEQ ID NO: 105113 - protein, 148 aa, Unknown
  Bacterial polypetide isolated from the Sargasso Sea
MTSVNKKEIDKFSKMADEWWNPQGKFKPLHKFNPTRIKYIKENVIHNFKLKNKSKPLSGINILDIGCGGGLLSEPMSRMGANVTGIDASDKNIKIAKLHSKKNKLKINYLCSSPEKLRVKKKFDVILNMEIVEHVEDIDFFLKSCSKL

SEQ ID NO: 105114 - protein, 130 aa, Unknown
  Bacterial polypetide isolated from the Sargasso Sea
MSSVNKKEIEKFSNMADEWWDPHGKFKPLHKFNPIRIKYIKENIIRQFKIKNKNKPLSGINILDIGCGGGLLSEPMCRLGANVTGIDASTKNVKISKLHAKKDNLKINYICSSPEKLKISKKFDVILNME

SEQ ID NO: 105115 - protein, 91 aa, Unknown
  Bacterial polypetide isolated from the Sargasso Sea
MKTSTINIKEIEKFSKMADEWWDPNGKFKPLHNFNPVRIDYIKRNVISHFKIKNSENPLYGKDILDIGCGGGLLSEPMSKLGGNVTGIDAS

SEQ ID NO: 105116 - protein, 239 aa, Unknown
  Bacterial polypetide isolated from the Sargasso Sea
MNIKSSLMKSNTINKKEIEKFSKIAEEWWDPQGKFKPLHKFNPIRISYIKENIIKSFKLNYQKNPLNKIKILDIGCGGGLLAEPMSRLGADVTGIDASFKNIEVAKLHSKKNNLKIRYLCSSPEKLKIKTKFDVILNMEIIEHVEDVNFFLKSCSKLLKKNGLMFVATLNKTLKSYLFAIIGAEYILRWLPIGTHEWEKFITPEDLINLLKRNNLKLERLDGMNFNIIKDEWKVSSDKS

SEQ ID NO: 105117 - protein, 218 aa, Unknown
  Bacterial polypetide isolated from the Sargasso Sea
NGKFKPLHKFNPIRIGYIKNSIIKHFKIKSSIKPLKKINILDIGCGGGLLSEPMSKLGANVVGIDASKKNIEVAKLHSKKNGLKINYICSSPEILKIEKKFDVILNMEILEHVEDVNFFIKKSSELLKKNGLMFIATLNKTLKSYAFAIIGAEYILRWLPIGTHDWEKFIRPEDLIKISKKNNLVIKNLDGLKYDLLEDKWRLSSDKSVNYIARFKKN

SEQ ID NO: 105118 - protein, 242 aa, Unknown
  Bacterial polypetide isolated from the Sargasso Sea
MKNNTINKKEIEKFSKIAEEWWDPNGKFKPLHKFNPIRIKYIRDTILSEFKIKKDHEPFKGLSLLDIGCGGGLLSEPMARLGADVVGIDASLKNIQVAKYHLKKSKLKIKYYNSSPENLKIKKRFDIILNMEIVEHVEDVDFFIKESSKFLKKSGVMFIATLNKTLKSYLFAIVGAEYVLKWLPIGTHDWEKFVKPEYLTNICKKNSLELKKIDGMTFNPILGKWSVTSDKSVNYISEFKKV

SEQ ID NO: 105119 - protein, 191 aa, Unknown
  Bacterial polypetide isolated from the Sargasso Sea
MNNNTINKEEIEKFNKIAEEWWDPNGKFKPLHKFNPIRIEYIKNNIIKDFNISSNHKPLKGISILDIGCGGGLLSEPLARLGANVVGIDASKKNIDIAKHHLKKSNLKIEYYDRSPENFNYEKKFDVILNMEIVEHVEDIPKFINQSTKFLKDNGLMFIATLNQTLKSYVFAIIGAEYILRWLPIGTHDLE

SEQ ID NO: 105120 - protein, 187 aa, Unknown
  Bacterial polypetide isolated from the Sargasso Sea
MTSVNKKEIEKFSKIADEWWNPQGKFKPLHKFNPIRIKYIKENIINNFKLKNKAKPLLGVNILDIGCGGGLLSEPISRLGANVTGIDASEKNIKIAKLHSKKNNLKINYLCSSPEKVKFKNKFDVILNMEIVEHVEDIDFFLKSCSKLLKKNGIMFVATINKTLKSYVFAIVGAEYLLRWLPNRNTR

SEQ ID NO: 105121 - protein, 190 aa, Unknown
  Bacterial polypetide isolated from the Sargasso Sea
MKSNTINKKEIEKFSKIAEEWWDPNGKFKPLHKFNPIRISYIKENIIKSLNLRDNEKPLNKVKILDIGCGGGLLSEPMCRLGADVTGIDASSKNISVAKTHAKQNNLNIKYFCSSPENLKTKSNFDVILNMEIIEHVEDVNFFLNTCTKLLKKNGIMFVATLNRTLKSYLFAIIGAEYILRWLPIGTHQW

SEQ ID NO: 105122 - protein, 138 aa, Unknown
  Bacterial polypetide isolated from the Sargasso Sea
EEIEKFSKMASQWWDPNGKFKPLHKFNPVRIGYIKNSIIKHFKLKHSTNPLKKINILDIGCGGGLLSEPMYKLGANVVGIDASKKNIEIAKFHAKKNNLRINYICSSPEILRTKKKFDVILNMEIIEHVEDIDFFIKK

SEQ ID NO: 105123 - protein, 145 aa, Unknown
  Bacterial polypetide isolated from the Sargasso Sea
MKSNTINAEEIKKFSKISSEWWNPEGKFKPLHKFNPIRIHYIKYNIINNFKIKNKIKPLKDIDILDIGCGGGLLSEPISRLGAKVTGIDASEKNINVAKFHAKKNKLKINYICSSPEKLKLKKKFDVILNMEIVEHVDDVNFFIN

SEQ ID NO: 105124 - protein, 240 aa, Unknown
  Bacterial polypetide isolated from the Sargasso Sea
MSTVNKKEIEKFSNIAAEWWNPDGKFKPLHKFNPIRIRYLKENIINHFGIKSKNQPLKKLDILDIGCGGGLLSEPFSRLGANVTAIDASKKNIEVAKFHAKKNNLKINYKCILPEKLKVKKKFDVILNMEIVEHVNDLNFFIKKTSELLKKNGLMFVATLNKTLKSYLFAIIGAEYILNWLPIGTHDWDKFVKPNELIEIAKKNNLKLIKIDGMKFNPFFDQWNISDDNSVNYISEFEKN

SEQ ID NO: 105125 - protein, 166 aa, Unknown
  Bacterial polypetide isolated from the Sargasso Sea
MKNNTINKKEIEKFSKIAEEWWNPEGKFKPLHKFNPIRITYIKENIIKTFKINQKKNPLKNIKILDIGCGGGLLSEPMCRLGANVTAIDASNKNIRIAKLHAKNNGLKIKYICTSPEKIKIENKFDVILNMEIVEHVEDINFFLKSSSKLLKKNGIMFVATLNKTL

SEQ ID NO: 105126 - protein, 155 aa, Unknown
  Bacterial polypetide isolated from the Sargasso Sea
MHNINDAEIKKFDELAHKWWDTDGEFRALHDINQLRLDFILQRSNLTSGPAIDVGCGGGILTESLAKISPTNVTGIDLANKALEVAKLHAKISGVEVDYRAISAEDLSIEYESHFETLSCMEMLEHVPSVEESIDSCARLIKPGGNLFFSTINKT

SEQ ID NO: 105127 - protein, 118 aa, Unknown
  Bacterial polypetide isolated from the Sargasso Sea
MKNNTLDKKEIEKFSKIAEDWWNPTGKFKPLHKFNPIRIKYIKDNLIKEFNLKNKKKPLHGLNILDIGCGGGLLSEPMARLGANVTGIDPVKRNIEIAKHHLKKSNLNIKYFNFSPEK

SEQ ID NO: 105128 - protein, 237 aa, Unknown
  Bacterial polypetide isolated from the Sargasso Sea
DNFTGPYRIIWWDQKGPMAPLHAFTPVRIDYILHAIRRFFPIQTRMLGNASEVLGGLKILDIGCGGGLLAEPMARLGASVTGIDVTNAAVTAAKAHAKTMHLSINYQTISAEELAKSGIIFDVIYASEVIEHVADRPIFVKAIAQMLAPNGVVIITTINRSLPALVFAKFALEYIARIVPVGTHDPQKFVKPSELRAEFNNAGILLDDMTGFAPRLGGGFVPTGSLAVNYAASGGFR

SEQ ID NO: 105129 - protein, 231 aa, Unknown
  Bacterial polypetide isolated from the Sargasso Sea
EKFSKMANEWWNPEGKFKPLHRFNPIRIEYIKNCIINHFNIKNKTQPLKNLSILDIGCGGGLLSEPMYKMGADVTGLDASKKNIHIAKIHSKKNKLKINYICSSPEKLKMKRKFDIVLNMEIVEHVNDVDFFLKKSSELLKKNGLMFVATLNKTLKSYFFAIIGAEYILKWLPIGTHDWNRFVEPHKLIKLGKNSSLKLKKIDGMKFNPLSNEWKISKDKSVNYIVKFIKF

SEQ ID NO: 105130 - protein, 185 aa, Unknown
  Bacterial polypetide isolated from the Sargasso Sea
MTSVNKKEIEKFSKMAAEWWNPEGKFKPLHKFNPIRIQYIKENIINNFKLKNKNKPLSGVNILDIGCGGGLLSEPMSRMGANVTGIDASDKNIKIAKLHSKKNKLKINYLCSSPEKLKVKKKFDVILNMEIVEHVEDIDFFLKSCSELLKKNGLMFVATINKTLKSYVFAIVGAEYVLKWLPIGT

SEQ ID NO: 105131 - protein, 256 aa, Unknown
  Bacterial polypetide isolated from the Sargasso Sea
MNPSEPRSETIDQNDIDRFNALAEQWWDENGPMKPLHLFTPVRLDYILKAIRNRGLAIENTPPQTNNTLKPLSGLKILDIGCGGGLLAEPLTRLGAALTGIDASRGAVAAATAHAQAEELTIDFRCLASEELAAFPHYHGYFDVIYASEVIEHVSDIHSFASSIAQMLSPKGVVVITTINRTIPALLFAKFAAEYVLKLIPAGTHQFEKFVRPSELRSVFRDSGILIDDVTGFVPNSQGGFSMSPLTSVNYGASGS

SEQ ID NO: 105132 - protein, 85 aa, Unknown
  Bacterial polypetide isolated from the Sargasso Sea
MNNTTINKLEIEKFSKLAEEWWDPFGKFRTLHKFNPVRIKYIKEAIILNHSIKLKDKPLKKIEILDIGCGGGLLSEPMSKLGANV

SEQ ID NO: 105133 - protein, 207 aa, Unknown
  Bacterial polypetide isolated from the Sargasso Sea
MNSVNKTEIEKFSNMADQWWDPHGKFKPLHKFNPIRIKYIKENIIRQFNIKNTNKPLSGINILDIGCGGGLLSEPMCRLGANVTGIDASIKNIKISKLHAKKDRLKINYICSSPEKLKISKKFDVILNMEIIEHVEDISFFLKSCSKLLNKNGLMFVATINKTLKSYVFAIVGAEYILRWLPIGTHDWEKFVKPEELKKILSKNNLS

SEQ ID NO: 105134 - protein, 184 aa, Unknown
  Bacterial polypetide isolated from the Sargasso Sea
MKKFKFGENWNSFSKLINNKKLKYSVNSLQKLTDMKSFKNMTFLDIGCGSGLSSLAAINLKCKSLFAIDDDPQSVLTTKLVLKKYKKKAKVKKISVFDLNEQNKFDIVYSWGVLHHTGFMIKAIKKTCKMVDNDGLLIISLYKKTYLCSFWKVEKLIYNKSPIFIQKIIKNAFIFFFKFGFFLT

SEQ ID NO: 105135 - protein, 94 aa, Unknown
  Bacterial polypetide isolated from the Sargasso Sea
MNSINKKEIEKFSNMAAEWWDPEGKFKPLHKFNPIRIKYIKENIIKEFKLKNKKYPLSGINVLDIGCGGGLLSEPMCRLGANVTAIDASNKNIA

SEQ ID NO: 105136 - protein, 152 aa, Unknown
  Bacterial polypetide isolated from the Sargasso Sea
MTSINKKEIDKFSKIADEWWDPEGKFKPLHKFNPTRIKYIKENIINNFKLKNKSKPLLGIKILDIGCGGGLLSEPMSRMGANVTGIDASDKNIKIAKLHSKKNKLKIKYLCSSPEKLKIERKFDVILNMEIVEHVEDIDFFLKSCSKLLKKN

SEQ ID NO: 105137 - protein, 244 aa, Unknown
  Bacterial polypetide isolated from the Sargasso Sea
QIISMKTVNKKEIEKFSKMASEWWNPHGKFKPLHKFNPIRIQYIKENIIKNFNLKNNNKPLSGINILDIGCGGGLLSEPMSRLGANVTGIDASNKNIKIAKIHSKKNKLKINYFCSSPERFKSEKKFDVILNMEIIEHVEDIDFFLKSCSKLLKKNGVMFVATINKTFKSYIFAIIGAEYILRWLPIGTHEWEKFVKPQDLKEILIKNNLSLKKLDGMSFNILKDEWNVSKDLSINYIAKFIKD

SEQ ID NO: 105138 - protein, 107 aa, Unknown
  Bacterial polypetide isolated from the Sargasso Sea
MNTNNNNQEDLFDEYAYDWWNKTGNYKLLHKLNPLRLEYILSKLEIKNKKILDIGCGGGILSEELSKMGAKVTGVDSSKKSINIAKKHAKEQDLEIEYINGSILDLS

SEQ ID NO: 105139 - protein, 111 aa, Unknown
  Bacterial polypetide isolated from the Sargasso Sea
MTKEKFLNQTYKLATPDDTFAHYEAWAETYDEEITENDYAQPRRCADALAQYSISSEINILDIGCGSGLSGVALNSSGFKNIDGCDFSPAMLEKAKNTDVYQKLFLADINQ

SEQ ID NO: 105140 - protein, 242 aa, Unknown
  Bacterial polypetide isolated from the Sargasso Sea
MAINTINKEEIEKFNSLAEEWWDQEGKFKPLHKFNPTRIEYIKNNLIKDFNIKNKKKPFSNLEILDIGCGGGLLTEPMHRLGGKLTGIDPSKKNIEIAKVHARKNNLKINYICCSPENLKSKKKFDVILNMEVVEHVDDLNFFIKSSSSLLKKNGIMFIATLNKTFKSYLFAIIGAEYVLNWLPVGTHDWFKFVEPEKLQNICKKNNLKLLNVDGLSYNILTDKWNLNKNTAVNYISKFKRY

SEQ ID NO: 105141 - protein, 240 aa, Unknown
  Bacterial polypetide isolated from the Sargasso Sea
MKSNTINKQEIEKFSKIASQWWNPNGKFKPLHKFNPIRIRYIKDSIIKHFKIKSPTQPLKGINILDIGCGGGLLCEPMSRLGANVVGIDASKNNIQTAKLHAKKNNLKINYICSSPEVLKTREKFDVILNMEIVEHVNDVNFFIKKSSELLKKNGLMFVATLNKTLKSYMFAIIGAEYILRWLPIGTHNWEKFVKPEDLIKISKKNNLEIKNLDGLNFNPLSNKWKISSDNSVNYIAKLK

SEQ ID NO: 105142 - protein, 157 aa, Unknown
  Bacterial polypetide isolated from the Sargasso Sea
MAINTINKEEIEKFSLLAEEWWNPEGKFKPLHKFNPIRIEYIKNSIIKEFNIKNKTKPLSNLEILDIGCGGGLLTEPMYRLGGKLTGIDASEKNINIAKAHSKKDNLKINYICSSPEKLKITKKFDVILNMEIVEHVSDLDIFIKSSSLLLKKNGLM

SEQ ID NO: 105143 - protein, 109 aa, Unknown
  Bacterial polypetide isolated from the Sargasso Sea
MKNNTINKKEIEKFSKIADEWWNPTGKFKPLHKFNPIRIKYIKENLIEHFSLKKNNKPLKNLEILDIGCGGGLLSEPMSRLGANVTGIDASKNNINIAKHHFKKSKLKI

SEQ ID NO: 105144 - protein, 178 aa, Unknown
  Bacterial polypetide isolated from the Sargasso Sea
LDIGCGGGLLSEPMARLGADVVGIDASSKNIQVAKYHLKKSKLKIKYYNSSPENLKIKKRFDIILNMEIVEHVEDVDFFIKESSKFLKKSGVMFIATLNKTLKSYLFAIVGAEYVLKWLPIGTHDWEKFVKPEYLTDICKKNSLKLKKIDGMSFNPILNKWSVTSDKSVNYISEFKKV

SEQ ID NO: 105145 - protein, 171 aa, Unknown
  Bacterial polypetide isolated from the Sargasso Sea
MSTIDKKEVEKFSKLAKDWWNPNGKFKPLHLFNPARISFIKKKLIQYYKLDSSSDSPLKKLNILDIGCGGGLLCEPLKRLGANITGIDASKNNIEVAKLHSNEMGLDIKYFHSSPEKFKIDSKYDVILNMEIVEHVSDVNIFLKNCSNMIQKNGLMFVATLNRNLKSYFFA

SEQ ID NO: 105146 - protein, 179 aa, Unknown
  Bacterial polypetide isolated from the Sargasso Sea
MKNNTINKKEIEKFSKIAEEWWDPNGKFKPLHKFNPIRIKYIRDTILSEFKIKKEHQPFKGISILDIGCGGGLLSEPMARLGADVVGIDASFKNIKVAKYHLKKSKLKIKYYNSSPENLKIKKRFDIILNMEIVEHVEDVDFFIKESSKFLKKSGVMFIATLNKHLNHIYLRLWEQNIF

SEQ ID NO: 105147 - protein, 208 aa, Unknown
  Bacterial polypetide isolated from the Sargasso Sea
NPIRIKYIKDNLIIDFNLKNKKKPLQGLNILDIGCGGGLLSEPLARLGAEVTGIDPIKRNIEIAKHHLKKSKLNIKYYNYSPEKFKLNKKYDVILNMEIVEHVENVNLFIKHSTRFLKKSGIMFIATLNQTLKSYIFAIVGAEYILKWLPIGTHDWEKFIKPDELIKICKKNSLTLKSFNGMSFNPILDKWNISEDKSVNYITKFKKN

SEQ ID NO: 105148 - protein, 184 aa, Unknown
  Bacterial polypetide isolated from the Sargasso Sea
MKNNTINKKEIEKFSEIAEEWWNPEGKFKPLHKFNPIRISYIKNNIINAFQLKNTSEPLKSVKILDIGCGGGLLSEPMSKLGAEVTAIDASEKNINVAKIHSKKNNLNINYLCTSPENFKVKEKFDVILNMEIIEHVEDVDLFLKSCSKLLKKNGIMFVATLNKTLKSYVFAIIGAEYVMRWLP

SEQ ID NO: 105149 - protein, 97 aa, Unknown
  Bacterial polypetide isolated from the Sargasso Sea
MTSVNKKEIDKFSKMANEWWDPEGKFKPLHKFNPTRIKYIKENIINNFKLKNKSKPLLGIKILDIGCGGGLLSEPMSRMGANVTGIDASDKNIKICK

SEQ ID NO: 105150 - protein, 149 aa, Unknown
  Bacterial polypetide isolated from the Sargasso Sea
MTSVNKKEIDKFSKMADEWWDPEGKFKPLHKFNPTRIKYLKENIVYNFKLKNKSKPLSGIKILDIGCGGGLLSEPMSRMGANVTGIDASDKNIKIAKVHSKKNKLKINYVCSSPEKLKIGNKFDVILNMEIVEHVEDIDFFLKSCSKLL

SEQ ID NO: 105151 - protein, 185 aa, Unknown
  Bacterial polypetide isolated from the Sargasso Sea
MSTINKKEIEKFSKIANEWWDIEGKFKPLHKFNPLRIKYIKDKVIDHFKINSKSQPLKNLELLDIGCGGGLLSEPMCRLGAKVTAIDASQKNIDVASYHSKKNNLKINYLCSSPEKISLNKKFDIILNMEIVEHVNDLNFFLKKSSLLLKKNGLMFVATLNKTLKSYMFAIIGAEYVLKWLPIGT

SEQ ID NO: 105152 - protein, 163 aa, Unknown
  Bacterial polypetide isolated from the Sargasso Sea
MKKITINKKEINKFSKLAEEWWDPNGKFKPLHNFNPVRLKYIKDSILKKYKNNDKKRPLKNIRILDIGCGGGLLCEPLSKLGAEVVGIDASEKNIKIAKLHSRENNLKINYFCASPENFKIKGKFDVILNMEIVEHVENVNFFLNQSTKFLKKKGLMFVATLK

SEQ ID NO: 105153 - protein, 198 aa, Unknown
  Bacterial polypetide isolated from the Sargasso Sea
MNDHKIHCMKIAKKYGKEYWDGNRRYGYGGYKYIEGKLEKVAKRIIKNYGLNNSSKILDIGCGKGYLLYEIKKVLPKIKVYGFDVSKYAIVNSKKEIKKYLFTGDIRKTFKFKKKYFDLVFCLGVFHNLNLIEIERSLKKINKIAKKSFIMVESYRNEKELFNLQCWALTCDSFFSPSEWKYIFKKNAYKGDFEFIYF

SEQ ID NO: 105154 - protein, 153 aa, Unknown
  Bacterial polypetide isolated from the Sargasso Sea
MSTINKKEIEKFSKIASEWWNPNGKFKPLHKFNPIRIKYIKENIIQNFKINSENKPLKKIKILDIGCGGGLLSEPMCRLGAEVVGIDASKKNIEIAKIHAKENNLKINYMCATPEILKNQKFDVILNMEIVEHVEDVSFFMKKSSELLKKNGL

SEQ ID NO: 105155 - protein, 137 aa, Unknown
  Bacterial polypetide isolated from the Sargasso Sea
MKSNTINIKEIQKFSKMADEWWDPNGKFKPLHKFNPVRIHYIKNNIIKHFKLKNRNKPLKNLNILDIGCGGGLLSEPMCRLGASVTGIDAAEKNIKIAKIHAKKNKLNIKYIYNSPENFLSKKKFDIVLNMEIVEHV

SEQ ID NO: 105156 - protein, 207 aa, Unknown
  Bacterial polypetide isolated from the Sargasso Sea
MANNTINKQEIEKFNRLAEEWWDPEGKFKPLHKFNPVRIEYIKNNIIKKFKIKNKKKPFSNLNILDIGCGGGLLAEPMHRLGGKITGIDASNKNIQIAKIHAKKNNFKIDYICSSPENFESKKKFDVILNMEVVEHVDNLNFFIKSSSSLLKKDGVMFIATINKTLKSYIFAIIGAEYILNWLPVGTHDWFKFVEPSKLQKILKEII

SEQ ID NO: 105157 - protein, 177 aa, Unknown
  Bacterial polypetide isolated from the Sargasso Sea
MKSITINKQEIAKFSKIATEWWNPEGKFKPLHKFNPIRIKYIKDNIIKNFKLNSTIKPLKKINILDIGCGGGLLTEPMCRLGANVVGIDASQKNIDIAKYHAKKNRLKINYLCTTPEDLKIKKKFDVILNMEIVEHVENVNFFLKKSSELLKKNGLMFIATLNKTLKSYAFAIIGAE

SEQ ID NO: 105158 - protein, 228 aa, Unknown
  Bacterial polypetide isolated from the Sargasso Sea
EFNKFNKLLKKRNNRQPLAQIINKKEFWKKNLYIDDNVLIPRPESEHLVEETINLIKDAANYSILDIGCGSGCLIISILLEKIKCRGIALDVSKKAIKVSKINAKMQHIENRIKFIHSDIDKLIVGKYDLIVTNPPYISKHKIKYLDDEVRIFEPKLALDGGIDGLSKIRNIILKSSKLIKRGGKLIIEIGFDQKYKVLEILKKNFFYVNKVVKDYSGKDRCIISTKL

SEQ ID NO: 105159 - protein, 236 aa, Unknown
  Bacterial polypetide isolated from the Sargasso Sea
NKKEIEKFSKIAEEWWNPNGKFKPLHKFNPIRIKYIRDTILNEFKIKKEHQPFKGLSILDIGCGGGLLSEPMAKLGGDVFGIDASNKNIQVAKYHLKKSKLKIKYYNTAPENFKIKKKFDIILNMEIVEHVEDVDFFIKESSKFLKKSGLMFVATLNKTLKSYLFAIVGAEYVLKWLPIGTHDWEKFVKPEYLTDICKKNSLKLKKIDGMTFNPLLNEWSLTSDKSVNYISEFKKI

SEQ ID NO: 105160 - protein, 120 aa, Unknown
  Bacterial polypetide isolated from the Sargasso Sea
MKNNTINKKEIEKFSKIADEWWNPTGKFKPLHKFNPIRIKYIKENLIEHFSLKKNNKPLKKLEILDIGCGGGLLSEPMSRLGANVTGIDASKNNINIAKHHLKKSKLKINYLNCSPENLN

SEQ ID NO: 105161 - protein, 236 aa, Unknown
  Bacterial polypetide isolated from the Sargasso Sea
NKKEIEKFSKMASEWWNPLGKFKPLHKFNPIRIKYIRDSAAKHFKIKSNNLPLKNLSILDIGCGGGLLSEPMNKLGASVTGIDASETNINIAKIHSKKNKLKINYICASPEKLKINQKFDIILNMEIVEHVEDVNYFISKSSQFLKKGGLMYVATLNKTLKSYLFAIIGAEYILRWLPIGTHEWDKFIEPSKLIKYGKKNSLELKKLDGMVFNPIMDRWNISSDNSVNYIVQFKKI

SEQ ID NO: 105162 - protein, 104 aa, Unknown
  Bacterial polypetide isolated from the Sargasso Sea
METNTINKKEIEKFSKIAEEWWDPNGQFKPLHNFNPIRISYIKENIIKTFGLRSEDKILSGIKILDIGCGGGLLSEPMSRLGAEVYGIDASKKNMKLQKFTQKK

SEQ ID NO: 105163 - protein, 153 aa, Unknown
  Bacterial polypetide isolated from the Sargasso Sea
MNTINKKEIDKFSKIANEWWNPEGKFKPLHKFNPIRIDYLKKNIIKHFDIKNKKNNKPLNGVSILDIGCGGGLLSEPMFRLGAKVTGIDASEKNIKIAKFHSKKQNLKINYLCTSPDNMKGNEKFDVILNMEIVEHVDNLDLFFKESSTHFKK

SEQ ID NO: 105164 - protein, 107 aa, Unknown
  Bacterial polypetide isolated from the Sargasso Sea
MENNTINIKEIEKFSAMADEWWDPNGKFKPLHRFNPIRIEYIKKTLLLHFKIKDGLRPLSGLNILDIGCGGGLLSEPMYNLGANVTGIDASDKNINIAKSHAKRNNL

SEQ ID NO: 105165 - protein, 213 aa, Unknown
  Bacterial polypetide isolated from the Sargasso Sea
LWWDKSGPFKALHLLNPIRFKFITKFSDIKDKEVLDVGCGGGILSEELAKNKAFVTGLDLSEESIKIADIHKEVSGLEINYINCSTKSLLSRGKKYDIICCFEMLEHVDDPKEIIKECLSLLKPNGSFYMSTLNRNLKSFVSIIVGAEYLLNMVPKGTHSYSKFIKPSEINNYLIQNKYVIKNISGIKYNFLYKNFYESSDVSTNYILHAQKI

SEQ ID NO: 105166 - protein, 96 aa, Unknown
  Bacterial polypetide isolated from the Sargasso Sea
MISHFKLNFNDEKPLKKIKILDIGCGGGLLCEPLSVLGANMTGIDASINNIKVAKMHSKEMDLKINYIHCAPENLNFKNEFDVILNMEVVEHVADV

SEQ ID NO: 105167 - protein, 162 aa, Unknown
  Bacterial polypetide isolated from the Sargasso Sea
MSSVNKIEIEKFSNMADEWWDPHGKFKPLHKFNPIRIKYIKENIIRQFKIKNKNKPLSGINILDIGCGGGLLSEPMCRLGANVTGIDASTKNVKISKLHAKKDNLKINYICSSPEKLKISKKFDVILNMEIVEHVEDISFFLKSCSKLLNKNGLMFVATINK

SEQ ID NO: 105168 - protein, 89 aa, Unknown
  Bacterial polypetide isolated from the Sargasso Sea
MKKDTINKKEIDKFSKLADEWWDPEGKFKPLHNFNPVRLRYIKDTIIKRFGNRSEKLPLKDIKILDIGCGGGLLSEPLSRLGATVTGID

SEQ ID NO: 105169 - protein, 157 aa, Unknown
  Bacterial polypetide isolated from the Sargasso Sea
MKNNTINKKEIEKFSKIAEEWWNPEGKFKPLHKFNPIRISYIKENIIETFKLGYNKTPLKDIKILDIGCGGGLLSEPMCRLGAKVTGIDASDKNIKVAKLHSKKSNLQIDYFCSSPEKFDAKEKFDVILNMEIVEHVEDVNFFLKSCSKLLKKNGIM

SEQ ID NO: 105170 - protein, 242 aa, Unknown
  Bacterial polypetide isolated from the Sargasso Sea
MNNNTINKEELEKFNKIANEWWDPKGKFKPLHKFNPIRIEYIKNNIIKDFKISSNHKPLKGISILDIGCGGGLLSEPLARLGAEVVGIDASKKNIEIAKHHLKKSNLKIEYYDKSPENFNYEKKFDVILNMEIIEHVEDIPKFINQSAKFLKDNGVMFIATLNQTLKSYIFAIIGAEYILRWLPIGTHDWNKFVKPENLENICNKNSLILKRIDGVKFNPLLNKWSLSSDKSINYITKYKKG

SEQ ID NO: 105171 - protein, 205 aa, Unknown
  Bacterial polypetide isolated from the Sargasso Sea
MNSINKKEIEKFSKIASEWWNPEGKFKPLHKFNPIRIKYIKENIINNFKLKNKSKPLSGVNILDIGCGGGLLSEPMSRMGANVTGIDASEKNIKVAKLHSKENKLKINYLCSSPEKLIIKKKFDVILNMEIVEHVEDLDFFLKSCSNLLKKNGIMFVATINKTLKSYVFAIVGAEYILRWLPIGTHEWEKFVKPEELKNILMKYN

SEQ ID NO: 105172 - protein, 202 aa, Unknown
  Bacterial polypetide isolated from the Sargasso Sea
MSTVNKKEIEKFSKIATEWWNPDGKFKPLHKFNPIRIRYLKENIINHFGIKSKNQPLRKLDILDIGCGGGLLSEPFSRLGANVMAIDASKKNIEVAKFHAKKSNLKINYKCVSPEKLKVKKKFDVVLNMEIVEHVSDLNFFIKKSSDLVKKDGLMFIATLNKTLKSYIFAIVGAEYILRWLPIGTHDWSKFVKPDELIEIAK

SEQ ID NO: 105173 - protein, 206 aa, Unknown
  Bacterial polypetide isolated from the Sargasso Sea
MNTVNKKEIEKFSKIADEWWDIEGKFKPLHKFNPLRIKYIKEKIVSHFNIDSKLQPLKNIELLDIGCGGGLLSEPMCRLGAKVTAIDASKKNIDVASYHSKKNNLKIDYLCSSPENIKLNKKFDVILNMEIVEHVDDLNLFIKKSSLLLKKNGLMFIATLNKTLKSYLFAIVGAEYILKWLPIGTHDWNKFVKTKDLIDIANKNDL

SEQ ID NO: 105174 - protein, 209 aa, Unknown
  Bacterial polypetide isolated from the Sargasso Sea
MKSSTINKKEIEKFSKMASEWWNPLGKFKPLHKFNPIRIKYIRDSAAKHFKIKSNNEPLKNLNILDIGCGGGLLSEPMNKLGASVTGIDASKTNINIAKIHSKKNKLKINYICASPENLKTSKKFDIILNMEIVEHVEDVNYFINKSSQFLKKNGLMYVATLNKTLKSYLLAIIGAEYILRWLPIGTHKWDKFIEPSKLIQYGKQNSLK

SEQ ID NO: 105175 - protein, 124 aa, Unknown
  Bacterial polypetide isolated from the Sargasso Sea
MSNTVDKKEIEQFSSLSNQWWEKSGPFSALHKMSNARIEFIIQNASRIINNNIGINSLDGLNCLDIGCGGGILSEKLVRLGAFVTGIDASEDSIKVAKEHAENSRLNINYKCISTSDLLKFEKE

SEQ ID NO: 105176 - protein, 178 aa, Unknown
  Bacterial polypetide isolated from the Sargasso Sea
LDIGCGGGLLSEPMCRLGARVTGIDASDKNIKVARLHSKKNNLQIDYFCSSPEKFDTKEKFDVILNMEIVEHVEDVNFFLKSCSKLLKKNGIMFVATLNKTLKSYIFAIVGAEYILRWLPIGTHEWGKFLKPEDLISILEKNDLRVDRVDGMNFNLIKDKWSVGNDKSVNYIAMFIKN

SEQ ID NO: 105177 - protein, 159 aa, Unknown
  Bacterial polypetide isolated from the Sargasso Sea
MKSNTINKKEIEKFSKIAEEWWNPEGKFKPLHKFNPIRISYIKENIINTFNLNHKNAPLKNIKILDIGCGGGLLSEPMCRLGAKVTAIDASKKNISVAKLHSKKNNLNINYLCTSPEKLKTKDKFDVILNMEIVEHVADVNYFLKTCSKLLKKKWNNVR

SEQ ID NO: 105178 - protein, 229 aa, Unknown
  Bacterial polypetide isolated from the Sargasso Sea
MKKNIEVDKDEILKFEAMASEWWDPYGKFKPLHMLNPCRLEYITSQIKTHFNCDYKDLEPFKGLRILDIGCGGGLLTEPMARLGASVVGVDPVEKNIKVAKLHSEKSGLEINYMASTAENLLSKKELFDVILNMEVIEHVPNPQSYLHTCSKLLKKNGLMTCSTINRNYKSYLFAIIGAEYVMKWLPKKTHEWSKFIKPEELFDLTEKSDLKVLDKRGFVFNFLKWDWS

SEQ ID NO: 105179 - protein, 180 aa, Unknown
  Bacterial polypetide isolated from the Sargasso Sea
MVTTADKREIDNFAALSDHWWDVRGPMAPLHAFTPIRIDYILTNVERFWPRKARPSASASYPLTGLRILDIGCGGGLLAEPMARLGATMTGIDVTETAIMAATAHTKQVGLDIDYHCCTAEEMASSGASFDVIYASEVIEHVANRSLFVTAIASMLDPKGVVIVTTINRSLPAFLLAKLR

SEQ ID NO: 105180 - protein, 140 aa, Unknown
  Bacterial polypetide isolated from the Sargasso Sea
MKNNTINKEEIEKFSKIADEWWNPTGKFKPLHKFNPIRISYIRDNITSSFKLKNKRKPLEKVKILDIGCGGGLLSEPMSRLGAEVVGIDASEKNIQVAKLHAKKNGLNIKYHCSSPENFVTNTKFDVILNMEIVEHVEDV

SEQ ID NO: 105181 - protein, 203 aa, Unknown
  Bacterial polypetide isolated from the Sargasso Sea
RYIKDAITQKFGNKSEKLPLKNIKILDIGCGGGLLSEPLSRLGATVTGIDASDRNIKIAKMHLEKSKLEINYYCSSPEKFVAKEKFDVVLNMEIVEHVDNVDFFLFKSSELLKKNGLMFIATLNKTLKSYAFAIIGAEYILKWLPIGTHDWNKFLKPNDLIKICKNNSLNLKNLVGVKFNVLKNEWIISKDSSVNYLAEFSKN

SEQ ID NO: 105182 - protein, 203 aa, Unknown
  Bacterial polypetide isolated from the Sargasso Sea
MKNITINKKEIDKFSKLASEWWDPEGKFKPLHKFNPVRLNYIKKCIVENVKKKNTAKPLRNIKILDIGCGGGLLCEPLSKLGAKVVGIDASEKNIKIAKTHAKQSNLKINYFCASPEKFNFKGKFDVVLNMEIVEHVGNVSLFIKESAKFLKKDGIMFIATLNKTLKSYIFAILGAEYILRWLPIGTHDWNMFVEPLKLKQIC

SEQ ID NO: 105183 - protein, 221 aa, Unknown
  Bacterial polypetide isolated from the Sargasso Sea
MKSNTINKKEIDKFSKIAEEWWNTNGKFKPLHIFNPIRIKYIKENIVKNLKIKNKIKSKNFSDLNLLDIGCGGGLLSEPMARLGANVIGIDASDQNIKVAKHHLNKTKLNIKYINTSPENFRTNKKFDVILNMEIVEHVEDLNLYIQESSKFLKKSGIMFVATLNQTLKSYIFAIVGAEYILRWLPIGTHDWNKFVKPKNLIDICKKNSLSLKKIDGIKFN

SEQ ID NO: 105184 - protein, 103 aa, Unknown
  Bacterial polypetide isolated from the Sargasso Sea
MKNNTLDKKEIEKFSKIAEEWWNPSGKFKPLHKFNPIRIKYIKDYLINDLDIKKKKKPLKGLNMLDIGCGGGLLSEPMARLGAKVTGIDPIQRNIEIAKHHLK

SEQ ID NO: 105185 - protein, 163 aa, Unknown
  Bacterial polypetide isolated from the Sargasso Sea
MSTINKKEIEKFSKIASEWWNPNGKFKPLHKFNPIRIRYIKDNVIENFKLSPSSKPLKKIKILDIGCGGGLLSEPMCRLGADVMGIDASKNNIEIAKNHAKKNKLKINYMCATPEILKNKKFDVILNMEIVEHVEDVNFFIKKSSELLKKNGLMFVATIKQKL

SEQ ID NO: 105186 - protein, 214 aa, Unknown
  Bacterial polypetide isolated from the Sargasso Sea
KPLHKFNPLRIEYIKNNIIREFKIKKKNKPLNNLEILDIGCGGGLLSEPMSRLGGKVTGIDASIKNINIARAHAFKNNLKINYINASPEKLKYKKKYDVILNMEVVEHVDDINLFIKSCSLLLKKNGIMFLATINKTLKSYLFAIIGAEYVLNWLPVGTHDWFKFVDPKELDLICKKNTLQLLEIKGMKFNIFQNEWNISKNTDVNYISKFKKF

SEQ ID NO: 105187 - protein, 182 aa, Unknown
  Bacterial polypetide isolated from the Sargasso Sea
NLNILDIGCGGGLLSEPLTRLGANVTGIDASKRNISVAKAHLKTSKLKINYINTSPEKLKIKKKFDVVLNMEIVEHVDNLDLFIKDTSFFLKKNGIMFIATLNKTLKSYIFAIIGAEYILRWLPIGTHDWEKFVSPKELIDKGNKNSLKLKNITGVNFDLLKKEWKTSKDKSVNYIAEFIKT

SEQ ID NO: 105188 - protein, 218 aa, Unknown
  Bacterial polypetide isolated from the Sargasso Sea
MKNNTINKKEIEKFSKIASEWWNPEGKFKPLHKFNPVRIKYIKDNSIKHFKLKSNNFPLRKLKILDIGCGGGLLSEPMSRLGADVIGIDASQQNINVAKLHSSKKKLKIKYICSSPEKLNIKEKFDIILNMEIIEHVDDVNFFIKNSTKFLKKNGIMFVATLNKTFKSYIFAIVGAEYILKWLPIGTHEWNKFVKPSELIEIAEKNSMKIEKVDGVVF

SEQ ID NO: 105189 - protein, 172 aa, Unknown
  Bacterial polypetide isolated from the Sargasso Sea
MKNNTINKKEIEKFSSIAEEWWDPTGKFKPLHKFNPIRISYIKNNIIKSLKLNNNEKPLKKVKILDIGCGGGLLTEPMKKLGADVVGIDASEKNIKIAKLHSKKNNLNIKYLCVSPENFIAKEKFDVILNMEIVEHVEDIDFFLKSSSKLLKKGGIMFVATLNKTLKSYLFA

SEQ ID NO: 105190 - protein, 137 aa, Unknown
  Bacterial polypetide isolated from the Sargasso Sea
MQEYLEIQSLDGKTFLDIGCGSGLMSLAARKLGAKVLSFDYDKNSVECTRFLKELYFKDDIYWTIEEGSVLNKDYLRTIGKFDFVYSWGVLHHTGSMNTALNNVLIPLSCDDGVLAIAIYNQNGVETDFWKKVKSFL

SEQ ID NO: 105191 - protein, 240 aa, Unknown
  Bacterial polypetide isolated from the Sargasso Sea
MSTINKKEIEKFSKMADEWWDTEGKFKPLHKFNPLRINYIKKKIITHFNIKSKSQPLKNIKLLDIGCGGGLLSEPMCRLGANVTGIDASQKNINVASLHSSKNNLKINYLCSSPEKINLKKKFDVILNMEIVEHVEDLNLFLKKSSLLLKKNGLMFVATINKTLKSYIFAIVGAEYILQWLPIGTHDWSKFVKPEELIGLGKKNNLKLVEISGVKFDILKNEWMTSEDSSVNYITKFKKI

SEQ ID NO: 105192 - protein, 203 aa, Unknown
  Bacterial polypetide isolated from the Sargasso Sea
MKNNTINKKEIEKFSKIAEEWWNPNGKFKPLHKFNPIRIKYIRDTILKEFKIKKEHQPFKGLNILDIGCGGGLLSEPMAKLGADVVGIDASLKNIQVAKYHLKKSKLKIKYYKSSPENLKLKKKFDIILNMEIVEHVEDIDFFIKESSKFLKRSGVMFIATLNKTLKSYVFAIIGAEYVLKWLPIGTHDWEKFVKPGRFNKYL

SEQ ID NO: 105193 - protein, 211 aa, Unknown
  Bacterial polypetide isolated from the Sargasso Sea
HKFNPIRIKYIKDTILNEFKIKQEHQPFKGLSILDIGCGGGLLSEPMAKLGGDVVGIDASNKNIYVAKYHLKKSKLKINYYNSSPENLKIKKRFDIILNMEIVEHVDDVDFFIKESSKFLKKSGVMFIATLNKTLKSYLFAIVGAEYVLKWLPIGTHDWEKFVKPEDLTNICKKNSLKLKKIDGMTFNPILNKWSVTSDKSVNYISEFKKV

SEQ ID NO: 105194 - protein, 242 aa, Unknown
  Bacterial polypetide isolated from the Sargasso Sea
MKNNTINKKEIEKFSKIAEEWWDPNGKFKPLHKFNPIRIKYIRDTILSEFKIKKEHQPFKGLSILDIGCGGGLLSEPMAKLGADVVGIDASFKNIQVAKYHLKKSKLKIKYYNSSPENLKIKKRFDIILNMEIVEHVEDVDFFIKESSKFLKKSGVMFIATLNKTLKSYLFAIVGAEYILKWLPIGTHDWEKFVKPEYLTNICKKNSLKLKKIDGMTFNPILNKWSVTSDKSVNYISEFKKV

SEQ ID NO: 105195 - protein, 240 aa, Unknown
  Bacterial polypetide isolated from the Sargasso Sea
MSTVNKKEIEKFSKIATEWWNPNGKFKPLHKFNPIRIQYLKDNIIKHFGLKIEKKPLKNLNILDIGCGGGLLSEPLSRLGANVTGIDASKKNIQIAKFHAKENNLKINYFCLAPEKFNVKKKYDIILNMEIVEHVEDVNFFINETSNLLKKNGLMFVATLNKTLKSYLFAILGAEYILRWLPIGTHEWEKFVKPNELVDIGKRNNLKLKKINGLQFNPFIDKWSLSNDTSVNYIINFEKT

SEQ ID NO: 105196 - protein, 241 aa, Unknown
  Bacterial polypetide isolated from the Sargasso Sea
MSSVNKKEIEKFSKIAEEWWDPLGKFKPLHKFNPIRISYIKENIIKSLNLKNNKNTPLKKVKILDIGCGGGLLSEPMCRLGAEITGIDASIKNINIAKLHAKKNELNIKYLCTTPENLKIKEKFDVILNMEIVEHVENINFFLNSCSKLLKKNGIMFVATINKTLKSYLFAIVGAEYILRWLPIGTHEWEKFVKPEELIKIQKENNFKLERLDGMKFDLIKDQWNLSSDKSVNYISKFIKN

SEQ ID NO: 105197 - protein, 242 aa, Unknown
  Bacterial polypetide isolated from the Sargasso Sea
MANNTINKEEIDKFSRMSEEWWDPDGKFKPLHKFNPIRIEYIKNNVIKEFKIKKKTKPFSNLEILDIGCGGGLLTEPMHRLGGKLTGIDASGKNINIAKIHAKKKGLKINYICSSPENMKPKKKYDVILNMEVVEHVNDLDFFINTSSKLLKKNGIMFIATLNKTLKSYLFAIVGAEYILNWLPVGTHDWFKFVEPTKLQNICKKNNLKLSEIDGLNYNLFFDKWQKSKNTDVNYISIFKKI

SEQ ID NO: 105198 - protein, 240 aa, Unknown
  Bacterial polypetide isolated from the Sargasso Sea
MSTINKKEIEKFSKMADEWWDPEGKFKPLHKFNPLRISYIKKKVMSHFNISSKLLPLKNIELLDIGCGGGLLSEPMCRLGARVTAIDASQKNINVASFHSNKNKLKINYLCSSPEKINIEKKFDVILNMEIVEHVDDLNFFLEKSSLLLKKNGLMFVATLNRTLKSYLFAIVGAEYILRWLPIGTHEWNKFVKPEELIDFGKKNSLKLMQIDGVKLNILKNEWNISEDKSINYITQFQKI

SEQ ID NO: 105199 - protein, 240 aa, Unknown
  Bacterial polypetide isolated from the Sargasso Sea
MSTVDKKEIQKFSRIADEWWDVEGKFKPLHKFNPLRINYIKKTIMDHFNINSKSQPLKNIELLDIGCGGGLLSEPMCRLGAKVTAIDASKKNIDVASFHSKKNNLKINYKCSSPEKINLNKKFDVILNMEIVEHVDDLNFFLKKSSLLLKKNGLMFIATLNKTIKSYLFAIIGAEYILKWLPIGTHDWNKFVEPEKLIDINKGNNLDLIKVDGVSFNILKKEWIISKDESVNYIAQFKKN

SEQ ID NO: 105200 - protein, 243 aa, Unknown
  Bacterial polypetide isolated from the Sargasso Sea
MNTTIDPVEREKFSKMAEEWWDPSGKFKALHKFNPKRIEFIRNKIIDHFSIEPNAENPFSNLDILDIGCGGGLLSEPMSRLGGNVSGIDIVEKNINVAKTHSEEQNLEINYKMTTAEELAVGKKKFDVILNMEVIEHVSDLNLFIESCEKLLKKNGLLFFATLNRNLLSFGLAIVGAEYILGWLPKGTHNWKKFITPEELKIIFKSSGLNITDIMGMKYNPIYDSWYLSDDTSVNYLGTAIKS

SEQ ID NO: 105201 - protein, 242 aa, Unknown
  Bacterial polypetide isolated from the Sargasso Sea
MKNNTINKKEIEKFTKISEEWWNPEGKFKPLHKFNPIRISYIKENIIKTFGLKNEDKPLKKIRVLDIGCGGGLLSEPMKKLGAEVTGIDASGKNIEIAKLHAKKSNLGIEYICTSPEKFNTKIKFDVILNMEIIEHVENVDFFLKACTKLLKKNGTMFVATLNKTLKSYFFAIIGAEYVMRWLPIGTHDWEKFVKPEDLINLQKKNKMKLKKIDGMKFNLITDLWSLSNDKSVNYIAQFVKD

SEQ ID NO: 105202 - protein, 406 aa, Unknown
  Bacterial polypetide isolated from the Sargasso Sea
MFWEKKLAQWADEVRAKANIPARLVLWNGDQLDFGTFSAPQVTLKVNSASALPLLLEPSLDNLGEAYVKGKIDIEGKLSDIINIGYSLARSTVTSASKLARVKRYFNHSKSTDKKAIQYHYDVSNEFYKLWLDENMVYSCAYFENGDEDLATAQIKKIDHILTKIRLQPGQRLLDIGCGWGALVLRAAQKFGAQCLGVTLSQNQFDLATARVKAAGLEDRIEIRLQDYREIDGQFDRITSVGMFEHVGRKNLPLYFSRIHDLLADDGIAMNHGITSTDAESGETALGGGEFIDRYVFPDGELPHISLALEAAQRGGLEAIDVESLRRHYARTLDIWTENFEAKADAARQLVDDEKFRIWRVYLAGCAYAFEHDDVSIFQIVCRKAGQSAKTLPWSRRYMYEHALPR

SEQ ID NO: 105203 - protein, 242 aa, Unknown
  Bacterial polypetide isolated from the Sargasso Sea
MSNNTINKEEVEKFSKIAEEWWNPNGKFKPLHKFNPIRIEYIKNNIIKDFNISSNHKPLAGISILDIGCGGGLLSEPLARLGADVVGIDASKKNIDIAKHHLKKSNLKIEYHDRSPENFNYEKKFDVILNMEIVEHVEDIPKFINQSSKFLKNNGLMFIATLNQTLKSYVFAIIGAEYILRWLPIGTHDWNKFVKPENLENICNKNSLKLKSIDGVKFNPILNKWKLSNDKSVNYITKYKKS

SEQ ID NO: 105204 - protein, 242 aa, Unknown
  Bacterial polypetide isolated from the Sargasso Sea
MKTNTINKKEIEKFSKIAKEWWDPIGKFKPLHKFNPIRIKYIKDNLIKDFSLKNKKKPLTDLEILDIGCGGGLLSEPMARLGAKVTGIDPSLKSINVAKHHLTISNLKIKYFNCSPENFNSKNKFDVILNMEIIEHVEDIDIFLKQSSKFLKKSGIMFVATLNQTLKSYLFAIIGAEYILKWLPIGTHDWYKFVKPKDLILNCKKHSLNLKNIDGMIYNPIFDKWKISNDKSINYIAKFKKV

SEQ ID NO: 105205 - protein, 242 aa, Unknown
  Bacterial polypetide isolated from the Sargasso Sea
MKKDTINKKEIDKFSKLADEWWDPEGKFKPLHNFNPVRLRYIKDTITKKFGNKSEKLPLKDIKILDIGCGGGLLSEPLSRLGATVTGIDASDRNIKIAKMHLKKSKLDVDYYCSSPDKFVAKEKFDVVLNMEIVEHVDNVDFFLFKSSELLKKNGLMFIATLNKTLKSYIFAIIGAEYILKWLPIGTHNWNKFLTPGDLINICKNNSLNLNDLIGVKFDILKNEWIVSEDSSVNYLAQFSKT

SEQ ID NO: 105206 - protein, 242 aa, Unknown
  Bacterial polypetide isolated from the Sargasso Sea
MKNNTINKKEIEKFSKIAEEWWDPNGKFKPLHKFNPIRIKYIRDTILSEFKIKKEHKPFKGLSILDIGCGGGLLSEPMAKLGGDVVGIDASNKNIQVAKYHLKKSKLKIKYYNSSPENLKIKKKFDIILNMEIVEHVEDVDFFIKESSNFLKKSGVMFIATLNKTLKSYLFAIVGAEYILKWLPIGTHDWEKFIKPENLTNICKKNSLKLKKIDGMTFNPILNKWSVTSDKSVNYISEFKKI

SEQ ID NO: 105207 - protein, 404 aa, Unknown
  Bacterial polypetide isolated from the Sargasso Sea
MFWEKKLAQWVEEVKTKANLPARLVLWDGQQHDFGQFAAPQVTLHVKSATALPYLLEPSLDNLGEAYVKGKIDIEGKLSDIINVGYQLARNTVTSASKLARVRRYFNHSKSSDKKAIQYHYDVSNEFYKLWLDENMVYSCAYFENGNEDLATAQIKKIDHILTKIQLQPGQRLLDIGCGWGALVLRAAQKFGAKCVGVTLSQNQFDLATARVKAAGLENQIEIRLQDYRDVEGQFDRITSVGMFEHVGRKNLPGYFQKIHDLLVDDGIAMNHGITSSDADSGETALGGGEFIDRYVFPDGELPHISLALESMQRGGLEAVDVESLRRHYARTLDIWADNFETHADEARKLVDDEKFRIWRVYLAGCAYAFENDDVSIYQVVCRKAGRSAKTLPWSRRYMYDKTL

SEQ ID NO: 105208 - protein, 57 aa, Unknown
  Bacterial polypetide isolated from the Sargasso Sea
MHELNPIRLGWIDAHAHLAGKTVLDIGCGGGILTESMAGLGAHVKGIDLSSQALGVA

SEQ ID NO: 105209 - protein, 256 aa, Unknown
  Bacterial polypetide isolated from the Sargasso Sea
MTNTVDKKEIEQFSSLSNKWWDMSGPFSALHKMSNARIEFITRNSTRILKKENIGINLLDGLNCLDIGCGGGILSEKLKRLGAKVTGIDASKSSIDVAKEHARKSRLEINYKCITTSELLEIKKEKALNKFDLVIASEVIEHVYDRKIFLSDISNLCRPGGLVIFTTINNSFLGILLGKYFAEDILKILPSGTHKVEKFISPINLAKEAEEHAIILDSFTGFTPTFGFKNIITKEFGNFKLSSNMQVNYGAAGIKL

SEQ ID NO: 105210 - protein, 189 aa, Unknown
  Bacterial polypetide isolated from the Sargasso Sea
QSLYLLKNIELLDIGCGGGLLSEPMCRLGAKVTAVDASQKNINVASYHSNKNKLKINYLCASPDNLNLKKKFDVILNMEVVEHVDNLDFFLKKSSILLNKNGIMFISTINKTLKSYLFAIVGAEYVLKWLPIGTHDWNKFVKPKELIEIGAKNNLKLVKINGVNFNILKNEWVITSDNSVNYISQFRKI

SEQ ID NO: 105211 - protein, 122 aa, Unknown
  Bacterial polypetide isolated from the Sargasso Sea
MKTNTINKEEIEKFSRIAEEWWDPSGKFKPLHKFNPIRISYIKENIINSFKIKNQDKPLKNLKILDIGCGGGLLSEPMRRLGADVTGIDASEKNVKVAKIHAKKNNLDIKYYCTSPENLKTS

SEQ ID NO: 105212 - protein, 216 aa, Unknown
  Bacterial polypetide isolated from the Sargasso Sea
KFKPLHKFNPTRIKYIKENIINNFKLKNKFKPLSGINILDIGCGGGLLSEPMSKMGANVTGIDASDKNIKIAKLHSKKNKLKINYLCSSPEKLKIKKKFDVILNMEIVEHVEDIDFFLKSCSKLLKKNGLMFVATINKTLKSYIFAIVGAEYILRWLPIGTHEWEKFVKPEDLKKILMKYDLSLNKLEGMNFNIIKDEWNISRDLSVNYIAKFIKN

SEQ ID NO: 105213 - protein, 194 aa, Unknown
  Bacterial polypetide isolated from the Sargasso Sea
MKKDTINKKEIDKFSKLAEEWWDPEGKFKPLHNFNPVRLKYIKDTIIKNFGNKSEKLPLKDIKILDIGCGGGLLSEPLSRLGATVTGIDASDRNIKIAKMHSEKSKLDINYYCSSPEKFNAKEKFDVILNMEIVEHVENVDFFLLKSSELLRKNGLMFIATLNKTLKSYIFAIIGAEYFLKWLPNRYTRLEQIF

SEQ ID NO: 105214 - protein, 255 aa, Unknown
  Bacterial polypetide isolated from the Sargasso Sea
MSNTVDKKEIEQFSSLSNQWWEKSGPFSALHKMSNARIEFIIQNASRIINNNIGINSLDGLNCLDIGCGGGILSEKLVRLGAFVTGIDASKDSIKVAKEHAEKSRLNINYKCISTSDLLKFEKEKVLNKFDLVIASEVIEHVNDRKVFLSDIANLCRKGGIVVFTTINKSFLGIFFGKYFAENILKIVPKGTHNVQKLITPETLAKESAEHNIILDSFTGFKPTFKIEDIINREFGDFKLTSSLEINYGAAGIKI

SEQ ID NO: 105215 - protein, 231 aa, Unknown
  Bacterial polypetide isolated from the Sargasso Sea
EKFSKIAEEWWDPNGKFKPLHKFNPIRIKYIRDTILSEFKIKKEHQPFKGLSILDIGCGGGLLSEPMARLGADVVGIDASFKNIQVAKYHLKKSKLRIKYYNSSPENLKIKKRFDIILNMEIVEHVEDVDFFIKESSKFLKKSGVMFIATLNKTLKSYLFAIIGAEYVLKWLPIGTHDWEKFVKPEYLKNICKKNSLKLKKIDGMTFNPILNRWSVTSDKSVNYISEFKKV

SEQ ID NO: 105216 - protein, 112 aa, Unknown
  Bacterial polypetide isolated from the Sargasso Sea
MKSNTINIKEIQKFSKMADEWWDPNGKFKPLHKFNPVRIHYIKNNIIKHFKLKNKHNSLKNLNILDIGCGGGLLSEPMCRLGANVTGIDAAEKNIKIAKVHAKKNKLNIKYI

SEQ ID NO: 105217 - protein, 172 aa, Unknown
  Bacterial polypetide isolated from the Sargasso Sea
MKNNTIDKKEIEKFSKIAEEWWNPTGKFKPLHKFNPIRIKYIKDNLIKDFNLKNKKKPLQGLNLLDIGCGGGLLSEPLSRLGAKVTGIDPIKRNIEIAKHHLKKSKLNIKYYNVSPEKFKPINKYDVILNMEIIEHVENVDFFIKQSSRLLKKSGIMFVATLNQTLKSYLFA

SEQ ID NO: 105218 - protein, 208 aa, Unknown
  Bacterial polypetide isolated from the Sargasso Sea
MKYLEAAKFGNDYLINKNIQNYKLDVEILASETINKSREHFLLNEKNKFTKKEFKKFNKLLKQRNNRQPIAQIINKKEFWKKNLYIDGNVLIPRPESEHLVEETINLIKDEANYSILDIGCGSGCLIISILLERIKCRGTAVDVSKKAIKVSKINAKMQHIQNRIKFIHSDIDKVIVGKYDLIVTNPPYINKHKIKYLDDEVRIFEPK

SEQ ID NO: 105219 - protein, 242 aa, Unknown
  Bacterial polypetide isolated from the Sargasso Sea
MKKDTINKKEIDKFSKLADEWWDPEGKFKPLHNFNPVRLRYIKDTIAKKFGNKSEKLPLKDIKILDIGCGGGLLSEPLSRLGATVTGIDASDRNIKIAKMHLKKSKLDINYYCSSPESFEAKEKFDVVLNMEIVEHVDNVDFFLLKSSELLKKDGLMFIATLNKTLKSYVFAIIGAEYILKWLPIGTHDWNKFLKPDDLINICKNNSLNLNNLIGVKFDILKNEWIVSNDKSINYLAQFSKT

SEQ ID NO: 105220 - protein, 89 aa, Unknown
  Bacterial polypetide isolated from the Sargasso Sea
MKNNTINKKEIEKFSKIAEEWWNPNGKFKPLHKFNPIRIKYIKDTIVSEYKIKKEDKPFKGLSILDIGCGGGLLSEPMAKLGAEVVGID

SEQ ID NO: 105221 - protein, 687 aa, Unknown
  Bacterial polypetide isolated from the Sargasso Sea
MGKALLTKDQPVYVQFYVTARCNLTCEQCNIIYSNADVPECSLDDVKRIADNFAEMGVAIVLLTGGEPFARKDLPEIISAFESRGVHVRMQTNGFATEEQIQAAVEAGGKDISISLDSLNPGLQDEINGGFPSSWHKAIKSIELFSKYLPKEGSFASLGCVLQPYNIGDVEDVIRFGTSIGWYTSMVPIHVSNHANPRGFRTFNDKLKFEEKELIEVDRLIHRVKKMRKEGYLLYDSDEYLANIKLFLRDQTSTNWRRKNKGSCDSPNLYFALLPNGEFAPCCDFRHNDSRMAQDPDFPKVYKDPIWRQSVEKITTKCDGCMYGSYPEISISMRFFSATLQRIGTFGLKNKNKNWPINYEELIKKANAIASEKRNRLTSREEIQKIRIIEASMPKKIKFESFKYRLLAAAEEYQILDYEDLTWDEFLNSLSFKYEKNKIFVESIYFKTALEPFDLQQPKFYKSKSSADSEEGSRDYKKYNEEYFNTVLTKIINNTEFPVKKIKKSINSLEEERIFHDEWAKNENVTEIDLRTRNEALTAPEMRYIMSELGNLEGKTLLDVGCGLGEASVYFALKGASVTSSDLSAEMLIKTQSLAEHHGVKLKIHNASSDEIQLATNSFDIIYAGNLMHHVEIEDTVKGLKKLLKEDGLLVTWDPLTYNPAINVYRNIETEVRTPEEHPLTWSDIKI

SEQ ID NO: 105222 - protein, 62 aa, Unknown
  Bacterial polypetide isolated from the Sargasso Sea
WDKDGLTSKIESIIGAGVDVMQSLIVRQHTFDLIFVDADKNNYPNYYALSLSLVPSNGIIII

SEQ ID NO: 105223 - protein, 265 aa, Unknown
  Bacterial polypetide isolated from the Sargasso Sea
LQTQGIGEIEYEDYHNRLGLTGEDPLPINERISHLLEFHTREAKPVWWNIFERQTKLQDELIDDAECLGGLQQVGSPEPEKRSLIYSYRFPPQEYKLKVGSSVVEVDVVHRETAGTVVDINEDSCIVKIKRGATKDRLPEILSIGPGQPISSKVIRASIYRYADRVLQNPDSLNVATELLNRNVPRILGKIPGEAIITSDDLQSDALEAIAALENSYLFIQGPPGAGKTYTSSHIIVDLMKRGKKIGVTSNSHKVIHNLLEQVEK

SEQ ID NO: 105224 - protein, 182 aa, Unknown
  Bacterial polypetide isolated from the Sargasso Sea
INHLLVKYAKEGKKVLRLKGGDPFIFGRGGEEIETLAEEKIPFQVVPGITSASGCSAYSGIPLTHRDYAQSCIFVTGHLKEGKLDLDWKNLVQPNQTIVFYMGLVSINIICNELINNGMDEETPCALVQQGTTNTQKEYISVLKDMPRLVEAKKPKAPTIFIIGGVVSLRDKLKWYTTNAED

SEQ ID NO: 105225 - protein, 192 aa, Unknown
  Bacterial polypetide isolated from the Sargasso Sea
VPQEGINQLLLDEAKKGQRVVRLKGGDPFIFGRGGEELETLVGSGVGFQVVPGITAASGCAAYAGIPLTHRDHAQSVRFVTAHGKGGARDLDWPLLARDKQTLVFYMGLSSCATIREQLMAHGKGGDTPVALIERGTQPSQRIIRGTLDQLPELAVGVESPALIMVGSVVTLADQLAWFGQGNDAARIAASA

SEQ ID NO: 105226 - protein, 322 aa, Unknown
  Bacterial polypetide isolated from the Sargasso Sea
PGITSSIAAAAYAGIPVTHRGIATNFTVISGSEDPTKPTSMVPWDVLAKTQGTLVVLMGWASLPKIIEVLVENGRKADTPISLVQWGTWTKQKTVTGILTDIVDKARNENLGSPVVAVIGDVVNLRPDIQWFDSKPLFGTRVLVTRSRTQSSKLKSLLFELGAEVIELPMIEITKLEDYAQLDTELKSVQSFSWLFFTSVNSVEAVFERLHELGKDARHLAHVKIMAIGDATRDKLLSKGIVADFMPSKSSSEEVVKELHSFDWKDAKVLIPASNIARTVIKGGLIEFGAEVVQINAYKNQTPEDISHLAVKILKEGVDVIT

SEQ ID NO: 105227 - protein, 216 aa, Unknown
  Bacterial polypetide isolated from the Sargasso Sea
VLYDRLVSKKIISMIPKRTKAIYVGRAVGDDTRHQDGTNELMVKYAKLNKNVVRLKGGDPIIFGRGGEEAEFLKSFKVKYEIVPGITSGIGSSTYAGIPLTHRKHASSVVFVTGHEDPEKKTEIVKWKRLAKSVDTIVIMMGLSRIGIISKQLVDGGMKKSTPVAVIQNGTTPKQKMVVGTLSTISSKVKKEKITPPANIIIGDVVDLHKTIGWKK

SEQ ID NO: 105228 - protein, 117 aa, Unknown
  Bacterial polypetide isolated from the Sargasso Sea
LVGAGPGDPGLMSLAGLHALQTSDVIIYDALVGDDILKLARPEAQQEYAGKRGGKPSPKQTDITERLVELARDGKRVLRLKGGDPFVFGRGAEECFRLIEADIPFRVVPGITAGVGG

SEQ ID NO: 105229 - protein, 235 aa, Unknown
  Bacterial polypetide isolated from the Sargasso Sea
MTGKVYLVGAGPGDPKLITLRAIELIKEADVVLYDRLVSKKIISMIPKRAKSIYVGRAVGDDTRHQDGTNELMVKYAKLNKKVVRLKGGDPIIFGRGGEEAEFLKSFKVKYEIVPGITSGIGSATYAGIPLTHRKYASSAVFVTGHEDPEKNEEIVKWKKLAKSVDTIVIMMGLSRIGIISKQLIDGGMKKTTPVAVIQNGTTPKQKMIVGTLTNISGKIKKEKMTPPANIIIGE

SEQ ID NO: 105230 - protein, 177 aa, Unknown
  Bacterial polypetide isolated from the Sargasso Sea
LMLRYARQGKCVVRLKGGDPCIFGRGGEEATWLRERGIEVELVNGITSGLAGATQCDIPLTLRGVSRGVTLVTAHTQDDSSLNWRALAEGGTTLVVYMGVAKLEEIREQLLNGGMAADMPVAMIENASLPQQRECRSSLAAMHEAAKAFALKSPAILVIGQVAGAAQMASIAAAASA

SEQ ID NO: 105231 - protein, 257 aa, Unknown
  Bacterial polypetide isolated from the Sargasso Sea
MERPSADDVASTSSIPRRDPNAGKVYLIGTGPGDPGLLTLKAYHLMQTADVVLYDRLVSPQILDLVSTDSTMLYVGKQSGYHTRTQDEIEAMMLAFAANGATIVRLKGGDPLVFGRGGEEMEALAARGHEVRIVPGITAAAGVGSELGIPLTHRGVATSVRLLTGHLREGAAKEAVSGDGNAIADAVDFAVTSADLDTTLVVYMGLATLPALAAKLLASGFPADTPAVAVERGTTHHERRVFSTIEDLPESVATCGL

SEQ ID NO: 105232 - protein, 234 aa, Unknown
  Bacterial polypetide isolated from the Sargasso Sea
MELLPKDLPDFKPGWVWLAGAGPGDVGLLTLHALNALRQADVLVYDALVGREIIELVSSECELEYAGKRGGKPSPKQKDISLRIVELAKQEKRVLRLKGGDPFIFGRGGEEALHLFKAGIPFRIIPGVTAGIGGTAYAGIPLTHRDFNSAVTFIAGRDSAGELPVRHNWEAIAKGSPVIVMYMATKYIHEIVSRLLNYGRKPDEPVAVIAKASLPEQIVLETRLCECVEEIKKN

SEQ ID NO: 105233 - protein, 320 aa, Unknown
  Bacterial polypetide isolated from the Sargasso Sea
TRARIETLFPAAYGRLAQLAKRFRQQVKDAFPTINQRRAFWENIFQGEVAERVFAGRDGEAAVMLEAELRGQRDKVYQGEVYLVGAGPGDPDLLTFRALRLMQQADVVLHDRLVAPAIIDLCRRDADRIYVGKARSDHAVPQEEINQLLVRLAQQGKRVLRLKGGDPFIFGRGGEEIEELATHGVPFQVVPGITAANGCSAYAGIPLTHRDYAQSVRFVTGHLKDGSTNLPWRDLVAPGQTLVFYMGLVGLPDICSQLIAHGRDAQTPIALVQQGTTHNQKVLIGTLADMAERVAGETIKPPTLLIVGEVVQLHDKLKWV

SEQ ID NO: 105234 - protein, 250 aa, Unknown
  Bacterial polypetide isolated from the Sargasso Sea
EQTMTGKVYLVGAGPGDPKLITLRAVELLKEADVVLYDRLVSKKIISMIPKRAKAIYVGRAVGDDTRHQDGTNELMVKYAKLNKNVVRLKGGDPIIFGRGGEEAEFLKSFKVKYEIVPGITSGIGSSTYAGIPLTHRKHASSVVFVTGHEDPEKKTEIVKWKRLAKSVDTIVIMMGLSRIGIISKQLVEGGMKKSTPVAVIQNGTTPKQKMIVGTLSTISSKVKKEKISPPANIIIGDVVDLHKTIGWKK

SEQ ID NO: 105235 - protein, 215 aa, Unknown
  Bacterial polypetide isolated from the Sargasso Sea
MELFPNDLPEFKPGWVWLAGAGPGDVGLLTLHALNALRQADVLVYDALVGGEIIELVSSDCELEYAGKRGGKPSPKQKDISLRLAELAQQGKRVLRLKGGDPFIFGRGGEEALHLFKAGIPFRIIPGITAGIGGPAYAGIPLTHRDYNSTVTFIAGRGSAGELPERHNWEAIAKGSPVIVMYMATKYIRQIADHLLNHGRKPEKPVAVIAKASLP

SEQ ID NO: 105236 - protein, 77 aa, Unknown
  Bacterial polypetide isolated from the Sargasso Sea
CKSTPQAFIEKLMLMAVNEGENVVRLKGGDPFIFGRGGEEVEHLRAAGVQVTVINGITAGLAGLTSLGAPLTHREHA

SEQ ID NO: 105237 - protein, 107 aa, Unknown
  Bacterial polypetide isolated from the Sargasso Sea
MLVEGFEFPVFEPGWVWLTGAGPGDLGLLTLHALNGLKQADVVIYDALVDEKILGLTRSSCELEYAGKRGGKPSPKQTDISYRIIQRARNQKRVLRLKGGDPFVFGR

SEQ ID NO: 105238 - protein, 207 aa, Unknown
  Bacterial polypetide isolated from the Sargasso Sea
EKIYVGKQRADHAMPQENINQLLARLALEGKKVLRLKGGDPFIFGRGGEEIESLINDDIPFQIVPGITAASGCASYAGIPLTHRDHSQACIFVTGHLRDGTVNLNWKMLAHEKQTLVFYMGMHGSKIICEQLIKHGLNNNTPAALIVKGTTANQKVIIGDLESMPNIIEKNKIVPPTLLIIGSVVSLHDKLKWFNPFSKELEKNFHL

SEQ ID NO: 105239 - protein, 297 aa, Unknown
  Bacterial polypetide isolated from the Sargasso Sea
IFPSIVDRSPLLVAISSGGTAPVLARVLREKIEALLPTSLGRMAEKASYWRNHLKTRLTSVTERRRFWERVFRGRFASLMHAGNETAAQKILEDELDNPGSTGGEIILVGAGPGDAGLLTLRGLQVLQDADVVFYDHLVTDGVRELIRRDAEQICVGKRAGEHSVPQHDTNQMLIDAAKAGKTVVRLKGGDPFIFGRGGEELQAAAEAGVPFQVVPGITAASAVTAYAGIPLTHRDYAQSVTFVTGHYKADSTPFDWSHLAQSRQTLAIYMGTMKAADISEQLIQHGREATTPVAVI

SEQ ID NO: 105240 - protein, 435 aa, Unknown
  Bacterial polypetide isolated from the Sargasso Sea
GEVAARKLELIMKTPATITVVAPWVCDTVKQLAQNEKVTLIEREFENSDLTHKDMVFIATDKGDVNQHIHDLARANKVLVNVVDNTPLCQFITPSIVDRSPIVIAMSSGGVAPVLLRYLRQKLETVLPANLSRLGAFSEKFREKVKQTLNGVTARRYFWEDVLDGDIAEMVEKGQDSKADDAFELALQAAAQDKKVEGQVYLVGAGPGDPDLLTFRALRLMQKADVVVYDRLVSPQILELVRRDAEKIYVGKAKSNHTLPQDDINQLMVDEAKKGNRVVRLKGGDPFIFGRGGEEIQTLIKHGIDFQVVPGITAASGASSYAGIPLTHRDHAQSVVFATGHLKNGTIDLNWPALAQKNQTAVFYMGLTGLPIICEKLIEHGLDANTPIALVQSATTEKQAVLTGTLSNIVAKQERRNYSLLHLLSSVQLLVYVTN

SEQ ID NO: 105241 - protein, 222 aa, Unknown
  Bacterial polypetide isolated from the Sargasso Sea
MKEADVVLYDRLVSKKIISMIPKRTKAIYVGRAVGDDTRHQDGTNDLMVKYAKLNKKVVRLKGGDPIIFGRGGEEAEFLKSFKVKYEIVPGITSGIGSATYAGIPLTHRKYASSAVFVTGHEDPEKNEEIVKWKKLAKSVDTIVIMMGLSRIGIISKQLIDGGMKKSTPVAVIQNGTTPKQKMIVGTLTSIAGKIKKEKMTPPANIIIGEVVKLHKTIGWKK

SEQ ID NO: 105242 - protein, 468 aa, Unknown
  Bacterial polypetide isolated from the Sargasso Sea
MKYFPFYIDLKKKSVLLIGGGEVAERKLDLLIKAKADVTLISPETTLYISDIAEKNNIKIINEKYSSQYLDKKYSFVIAATNNEKLNKSIALDANKNNILVNVVDRPEICDFIFPSILERGDITVSVSTGGASPVLARMLRTKLETMIPGAYGKVAKIIAENRVMVREKLKQSQSNKIFWEQMLNSKFLELVLSGQEAEALEYLNTSIDNINEDKINQGEVYLVGAGPGDPDLLTFRALRLMQQCDVVLYDRLVQPAIMDLVRRDAKKIYVGKERDNHVVRQHEINNLLVEYAKKGNKVLRLKGGDPFIFGRGGEEIDTLVDHKVSFQVVPGITSASGCSAYSGIPLTHRDHAQSCIFVTGHLKDGKLELNWEKLIQPNQTIVFYMGLVSIDIICTELTKHGLDKNTLCALVQQGTTVNQRVFTSNLRELPELVKKEKPKPPTILIIGSVVSLRDKLRWYEGTISHRD

SEQ ID NO: 105243 - protein, 258 aa, Unknown
  Bacterial polypetide isolated from the Sargasso Sea
MELLPKDLPDFKPGWVWLAGAGPGDVGLLTLHALNALRQADVLVYDALVGEKIMELVSSNCELEYAGKRGGKPSPKQKDISLRLAELAQQGKRVLRLKGGDPFIFGRGGEEALHLFKAGIPFRIIPGITAGIGGTAYAGIPLTHRDINSSVTFIAGRGSAGELPERHNWEAIAKGSPVIVMYMATKYIHEIVGRLLNYGRKPDEPVAVIAKASLPEQMVLETRLCECVEEIKKNKIEPPALIVVGEVVSLRSYMKWMD

SEQ ID NO: 105244 - protein, 229 aa, Unknown
  Bacterial polypetide isolated from the Sargasso Sea
TLRAIELLKEADVVLYDRLVSKKIISMIPKRTKAIYVGRAVGDDTRHQDGTNELMVKYAKLNKKVVRLKGGDPIIFGRGGEEAEFLKSFKVKYEIVPGITSGIGSATYAGIPLTHRKYASSAVFVTGHEDPEKNEEIVKWKKLAKSVDTIVIMMGLSRIGIISKQLIAGGMKKSTPVAVIQNGTTPKQKMIVGTLTSIAGKIKKEKMAPPANIIIGEVVKLHKTIGWKK

SEQ ID NO: 105245 - protein, 470 aa, Unknown
  Bacterial polypetide isolated from the Sargasso Sea
MDYLPMFAKLDGRPVLLVGGGEVALRKARLLLAAGARLTLVSPELEPDFHQFAGRFTHLAERFTPAHLAGQILVVAATDDLEVNALVYQSANQLGLFVNVVDDPKRSSFIFPSIIDRSPIMVAVSSGGKAPVLVRLLRERLESLLPRHLGGLAELSGRVRDQAKRVLSSISDRRRFWERAFASNTLAGLIEKEDWQGAEQWLNDGLDQAKSEVGEVVLVGAGPGDPGLLTLKALQQIQQAEVVLYDQLVSAEILDLVRRDANLVSVGKKAGAHSVPQEETNRLLVEYAKAGNRVVRLKGGDPFMFGRGGEELEVLAEEGIPFSVVPGITAAAGATAYAGIPLTHRDYAQSAVFITGHCQIDGKEPDWQQLAATSQTLVIYMGLMRSEHIRQQLVSHGRSSATPIAIIERGTTARQRVLTGTLADLAELAAQAVSPSLIVIGEVVALRERLAWFGEGQQQGTCDLKLVSLA

SEQ ID NO: 105246 - protein, 252 aa, Unknown
  Bacterial polypetide isolated from the Sargasso Sea
MSQISLVGAGPGPLELLTLRALQRIEAAEVVVYDRLVGEEILARIPQGAARFDVGKRCGEPSPSQAQINALLLALARTGKRVVRLKGGDPLVFGRGGEEALHLARHGIAAELVPGITAALGCAASSLIPLTHRGLARSLTLVTGHLMDEGDYQGWQGLTRAGHTLVFYMGLERAAEIRQGLLAAGASPDLPVALVVAGCSARQQVHENTLDGLAQAAGALLGQSPVLMIMGEVVRLRAELQGLLGLALDRVA

SEQ ID NO: 105247 - protein, 415 aa, Unknown
  Bacterial polypetide isolated from the Sargasso Sea
MDYFPIFLDLKNKKCVIVGGGEVAHRKTKAVLKSGAIVNIVSIEFSKKFNAFPEARCFLIKDEFNVRHLTDATLVIAATDSLSMNKKVANEANKLGIPVNVVDEPSLCSFIMPALIDKSPVIIGISTGGNSPVLTRTIKEIIEVNLPSNVGLLAKMMGSWRQRVKERFNSFDMRLKFWEKLMDSEVPQLVFKNKLVLADKRIQEQLRNNSFENSIGEVYLVGGGPGDPELLTLKALRLMYQCDVVLYDRLVSKEVLNKVRPDAEFISVGKSESQHTVEQHKINEMLILLAKEGKKVLRLKGGDPFIFGRGGEEINELAKSNIPFQVVPGVTAASGCGSYAGIPLTHRDYAQSVRFLTGHLKDGKLDIDWKNLNKKQETLVFYMGLLSLPKICEELMKHGMPASMPIAAIEHGTTY

SEQ ID NO: 105248 - protein, 266 aa, Unknown
  Bacterial polypetide isolated from the Sargasso Sea
MPGIVYLVGAGPGDPELLTLRAHRLLQRCDALVHDSLVPMELLELVPEGCEIHAVGKRRGHHSVPQPSTNALLQQLAGRCRCVVRLKGGDPFLFGRGGEEAAYLAKRGVAVEVVPGVTSGIAAPAYVGIPITHRRAGSSVTFVTGHEEIDKGRPAVDWRALAACSDGLVIYMGLHNLARICEELQAGGLLGTTPAAIIQQGSVNGQKHLIATLEDLADAAQEQGFSAPSIVVIGEVVEQRIPSCAPMPAPVTMPSPIPLSPQNAPA

SEQ ID NO: 105249 - protein, 342 aa, Unknown
  Bacterial polypetide isolated from the Sargasso Sea
VAVSTGGASPVLARVLRTKLETMVPASYGKLADIVSSNRIRVRDKMKKFSSNKIFWEKMLNGKFVELVLSGKTDEAKSFLDKQIDDFDEDIANQGEVYLVGAGPGDPDLLTFKALRLMQQADIALYDRLVHPSIVDLIRRDATKIYVGKERDNHVVRQEEINDLLVKYAKKGKKVLRLKGGDPFIFGRGGEEIETLADEKIAFQVVPGITSASGCSTYSGIPLTHRDYAQSCIFVTGHLKEGKLDLQWDKLIQPNQTIVFYMGLVSIDIICKQLVKHGLSKSTPCALVQQGTTNTQREYISTLQDMPMLVKTEKPKAPTILIIGGVVSLRDKLKWYSTDAED

SEQ ID NO: 105250 - protein, 156 aa, Unknown
  Bacterial polypetide isolated from the Sargasso Sea
MTSLETGIDFPEFSPGSVWLVGAGPGDPGLLTALALYALQQCDVLVYDALVGDGILKLVGEKTEKIYAGKRGGKPSPKQPDITARLVALARENKRVLRLKGGDPFVFGRGGEEALVLKSNEVPFRIVPGISSGIGGLAYAGIPVTHRDTNSAITIL

SEQ ID NO: 105251 - protein, 143 aa, Unknown
  Bacterial polypetide isolated from the Sargasso Sea
MANPSASLEFAGKRGGKPSPKQVDISLRLIHLARKNKRVLRLKGGDPFVFGRGGEEATALYEAGIPFRIIPGITSGIGGLAYAGIPLTHRDTNHAVTLVTGHDAVGGISTIDWASISKSAPVIVIYMAIKHLDSIVNSLLAAG

SEQ ID NO: 105252 - protein, 242 aa, Unknown
  Bacterial polypetide isolated from the Sargasso Sea
ELLTLKAHRLLGQCDALVYDSLVPEEVLDLVPANCERRFVGKRRGHHSVPQPSTNAVLVEMAQKHSTVVRLKGGDPFLFGRGGEEAAYLAERNIPVQVVPGVTAGIAAPAYAGIPVTHRRAGSSVTFVTGHEEIDKRRPSVDWRALAAASDGLVIYMGLHNLPRIAEELMAGGLAETTPVAVIQQGTVAGQRCLKASLVDVADQCRAEAFKSPSIVVVGEVIDQQVEACRPTPAAVTMPIPF

SEQ ID NO: 105253 - protein, 122 aa, Unknown
  Bacterial polypetide isolated from the Sargasso Sea
MLVEGFEFPVFEPGWVWLTGAGPGDPGLLTLHALNGLKQADVVIYDALVDEKILGLTRSSCELEYAGKRGGKPSPKQADISYRIIQRARNQKRVLRLKGGDPFVFGRGGEEAFDFGGSGHSL

SEQ ID NO: 105254 - protein, 243 aa, Unknown
  Bacterial polypetide isolated from the Sargasso Sea
MLVEGFEFPVFEPGWVWLTGAGPGDPGLLTLHALNGLKQADVVIYDALVDEKILGLTRSSCELEYAGKRGGKPSPKQADISYRIIQRARNQKRVLRLKGGDPFVFGRGGEEALNLVEAGIPFRVIPGVTSGTAAPAYAGIPVTHRDTNSAVTFITGHGANGLVPERHDWEGIAKGSPVIVMYMAVKHLHSIASKLMEYGRSPEEPLALISKACTSEQQILETTLGNASIDALDAGIEPPAVVV

SEQ ID NO: 105255 - protein, 166 aa, Unknown
  Bacterial polypetide isolated from the Sargasso Sea
MLVEGFEFPVFEPGWVWLTGAGPGDPGLLTLHALNGIKQADVVIYDALVDEKILGLTRSSCELEYAGKRGGKPSPKQADISYRIIQRARNQKRVLRLKGGDPFVFGRGGEEALNLVEAGIPFRVIPGVTSGTAAPAYAGIPVTHRDTNSAVTFITGHGANGLVPER

SEQ ID NO: 105256 - protein, 182 aa, Unknown
  Bacterial polypetide isolated from the Sargasso Sea
QGGDPFVFGRGGEEALNLVEAGIPFRVIPGVTSGTAAPAYAGIPVTHRDTNSAVTFITGHGVNGLVPERHDWEGIAKGSPVIVMYMAVKHLHSIASKLMEYGRSPKEPLALISKACTSEQQILETTLGNASIDAFDAGIEPPAVVVVGEVVRMRQSLDWLGALEGKVLQRDPLGKRTLPETG

SEQ ID NO: 105257 - protein, 135 aa, Unknown
  Bacterial polypetide isolated from the Sargasso Sea
MLVEGFEFPVFEPGWVWLTGAGPGDPGLLTLHALNGLKQADVVIYDALVDEKILGLTRSSCELEYAGKRGGKPSPKQADISYRIIQRARNQKRVLRLKGGDPFVFGRGGEEALNLVEARDTLSRYSWSDIGDGGS

SEQ ID NO: 105258 - protein, 276 aa, Unknown
  Bacterial polypetide isolated from the Sargasso Sea
MEILSLPGQSAKGKVWLVGAGPGDVELLTLKAWRILKSADAVLYDALVSQDILDLIPKDAEKIAVGKRAGKHSAAQDEINQLLVTKAYTRKNVVRLKGGDPFIFGRGGEELQTLVEAGVEFEVVPGITAASGTSAYAGIPLTHRDYAQGVTFITGHCQLENRPMDWQGYANPNNTLVVYMGILNAGIIRQGLINAGRSPETPVAIVSKATTQSQQRFIGQLDSLEQLAADPQLQMPALMIIGEVVGLSETLNWFQPKGQGSQPLDALNTTKVAAKI

SEQ ID NO: 105259 - protein, 380 aa, Unknown
  Bacterial polypetide isolated from the Sargasso Sea
MVKSGYKKIVRLKGGDPFLFGRGGEEAEELKKNRINFEIVPGITSAIAVPAYAGIPVTHRDMTSTLSIVTGHEDPDKNESSIDWSSLSRMKSIIFLMGTKNLKKNLNNLINNGMPKKTNIAVINWGTYSKQKTVTGNLINIHEEIQKNKIKSPSIVVIGDICKMRSKLNWFEKKPLFGKNIVVTRARKNSSKLSKKIIELGGNPIEIPTIEIKPKSSKTLRTNLNKINSYEWLVFTSVNGVEIFFDEFLKINNDIRKLGNLKIATIGSETARSLNKLNLSVDLIPDKFTAEGLLNSFKKLKIRKSKIFIPRASLARDTLVSGLRKIGNEVKEVKIYDTILPSKLTKKDVLNKVSGVNIDFITFTSSSTVDNFFKYITPKK

SEQ ID NO: 105260 - protein, 279 aa, Unknown
  Bacterial polypetide isolated from the Sargasso Sea
MLVEGFEFPVFEPGWVWLTGAGPGDPGLLTLHALNGLKQADVVIYDALVGEKILGLTRSSCELEYAGKRGGKPSPKQADISYRIIQRARNQKRVLRLKGGDPFVFGRGGEEALNLVEAGIPFRVIPGVTSGTAAPAYAGIPVTHRDTNSAVTFITGHGANGLVPERHDWEGIAKGSPVIVMYMAVMHLHSIASKLMEYGRSPEEPLALISKACTSEQQILETTLRNASMDALDAGIEPPAVVVVGEVVRMRQNLDWLGALEGKVLRRDPMGKRNLPETG

SEQ ID NO: 105261 - protein, 276 aa, Unknown
  Bacterial polypetide isolated from the Sargasso Sea
MEILSLPGQRAKGKVWLVGAGPGDVELLTLKAWRILKSADAVLYDALVSQEILDLIPKDAEKIAVGKRAGKHSAAQDEINQLLVTKAYTRKNVVRLKGGDPFIFGRGGEELQTLVEAGVEFEVVPGITAASGTSAYAGIPLTHRDYAQGVTFITGHCQLESRPMDWQGYANPNNTLVVYMGILNAGIIRQGLIDAGRSPNTPVAIVSKATTQSQQRFIGQLDSLEQLAADPQLQMPALMIIGEVVALADSLNWFQPKGEGESALNTTDAAKIVAKV

SEQ ID NO: 105262 - protein, 251 aa, Unknown
  Bacterial polypetide isolated from the Sargasso Sea
KVARTGNYKCWLPTITSKVKAKESFLVEEWKKNQSLTNKDLKITIPGPMTITDTIANTFYDSDEHMGEDLADAVNVEIKRLVDVGCKYIQVDEPLFARKPENALNFGIKNLERCFKDINNQSIEKITHICCGYPDKLDAVDYPKAPLDSYSKISKALDESIIDTVSIEDAHRYNDLKFLKDFKQTKVIFGLVKIASSQVETKEEIVSRINDALRFIDKEQLIVAPDCGLGHLPRDLAKIKLKIMVEASSSF

SEQ ID NO: 105263 - protein, 175 aa, Unknown
  Bacterial polypetide isolated from the Sargasso Sea
IKRLVDAGCKYIQVDEPLFARKPENALLFGIKNLEKCFSGINQNDVEKITHICCGYPDKLDVVDYPKAPLDSYRKIALSLDNSIIDTVSIEDAHRYNDLTLLKDYKQTKIIFGLIKIASSKIETVEEIEDRIKEALKFISKEQLIAAPDCGLGHLSRELAMKKLQIMCLAANKFN

SEQ ID NO: 105264 - protein, 185 aa, Unknown
  Bacterial polypetide isolated from the Sargasso Sea
LGADLGNALNQKILSLVEAGCQYIQVDEPVFARKPEKALKYGVENLERCFAGVPDHVTRAMHACCGYPNALDTNNYYKAPPQSYFDIAAAIDQSSINAISIEDAHRPNDPKLLELFQNTTVIMGLVDVAKSKLEEVDQVKERIKLCLEHIDRERFIAAPDCGLGLLNRDLAKAKLKNLCQAAHSI

SEQ ID NO: 105265 - protein, 291 aa, Unknown
  Bacterial polypetide isolated from the Sargasso Sea
MLTSVIGAYPKPSYIKITDWFNAKGGTDTEHPTKFYNNEINKMGNRVEELFNRATKEIISDQEECGIDILTDGEVRRENYIHYHCRYLEGIDFDNLTEKVARTGNYKCWLPTITGKVKAKDSFLVEEWKSNQKLTSKPIKITIPGPMTITDTIANTFYNSDQEMGEDLADAINIEIKRLADAGCKYIQVDEPLFARKPENALNFGIKNLERCFKDIKDQNIEKITHICCGYPDKLDVIDYPKAPLDSYSKISKELDDSIIDTVSIEDAHRYNDLKFLKDFKNTKVIFGLIK

SEQ ID NO: 105266 - protein, 275 aa, Unknown
  Bacterial polypetide isolated from the Sargasso Sea
EVRRENYIFYQCRRIKGIDFNTVTNTSVRSGAYQADLPTITGPVTLEKTMLGRDYITAQKFCSNPVKITIPGPMTIIDSIADDYYNNDKKLGLDLANALNTEILNLVEAGCQNIQVDEPVFARKPEKALEYGIENLERCFDGVPENVTKISHMCCGYPNALDSENYLKAKPSAYFKIAEALDESILDAISIEDAHRPNDLKLLEIFKETSIILGFIDVAKSKLEEVDQIRERIQQCLNHIDHHRLIAAPDCGLGLLNRQLAIDKMKNLCIAAHSI

SEQ ID NO: 105267 - protein, 195 aa, Unknown
  Bacterial polypetide isolated from the Sargasso Sea
MLTTVIGAYPKPNYLKITDWFNASGGTDTQFPTKYYNDEIKQMGNEAEKLFLRATKEIIHDQEKCDVDIITDGEVRRENYIHYHCRHLAGIDFNNLTEKVARTGNYKCWLPTITNKISAKDPFLVDDWKNNQNLSKKPVKVTIPGPMTITDTIANTFYKSDEELGYDLAIAINKEIKRLVEAGCKFIQVDEPLFC

SEQ ID NO: 105268 - protein, 266 aa, Unknown
  Bacterial polypetide isolated from the Sargasso Sea
MGDRVEELFNRATKEIISDQEECGIDILTDGEVRRENYIHYHCRYLEGIDFDNLTEKVARTGNYKCWLPTITGKVRATGSFLVEEWKNNQKITSKPIKITIPGPMTITDTIANTFYNSDQEMGEDLADAINVEIKRLVDAGCKYIQVDEPLFARKPENALNFGIKNLERCFKNIEDQNIEKITHICCGYPDRLDAIDYPKAPLDSYSKISRELDDSIIDTVSIEDAHRYNNLEFLKDFKNTKIIFGLIKIASSQIESKEEIVTRIK

SEQ ID NO: 105269 - protein, 270 aa, Unknown
  Bacterial polypetide isolated from the Sargasso Sea
YIHYHCRYLEGIDFTNLTEKVARTGNYKCWLPTITSKVRAKESFLVEEWKKNQSLTNKDLKITIPGPMTITDTIANTFYDSDERMGEDLANAINVEIKRLVDAGCKYIQVDEPLFARKPENAIKFGIKNLERCFKNINNQSIEKITHICCGYPDKLDAVDYPKAPLDSYGKISKALDNSIIDTVSIEDAHRYNDLNFLKDFNQTKVIFGLIKIASSQVETKEEIVSRINDALKFIDKEQLIVAPDCGLGHLPRDLAKIKLKIMVEASNSF

SEQ ID NO: 105270 - protein, 261 aa, Unknown
  Bacterial polypetide isolated from the Sargasso Sea
NVFDFKNLERRVFRDGAYDSHLPAIRKKIEHTNVGYAAFDYISSQKVSPVPIKFTLPGPLTIMDTTADCYYDDRPKLNRDLADTINKEILRLVDAGCRYIQVDEPLFARQVDDASSFGMEGIERCFHGVPKDVKKIMHMCCGYPDHLDDKDYKKADPDSYHQLAREVDDLNIDEVSIEDAHCQNNLNLLEKFEKKSVIFGAVAIASSRIETEDEIINRINSALNHIDRNRLVIAPDCGLGLLTPDLAEAKLRVMCSAVKKI

SEQ ID NO: 105271 - protein, 242 aa, Unknown
  Bacterial polypetide isolated from the Sargasso Sea
MLAATITGRVRANASFLVDEWKNNQQLTSKHLKITIPGPMTITDTIANTYYKSDEEMGVDLADAINVEIKRLVDAGCKYIQVDEPLFARKPENALNFGIKNLERCFKDINNKNVEKITHICCGYPDKLDAINYPKAPLNSYSKISKELDKSIIDTVSIEDAHRYNNLEFLKDFNNTKVIFGLIKIASSQIETKEEIVSRIKEVIKFIDKKQLIVAPDCGLGHLPRDLAKNKLKIMVEAAKSF

SEQ ID NO: 105272 - protein, 257 aa, Unknown
  Bacterial polypetide isolated from the Sargasso Sea
CRYLNGFDFKNLERRVFRDGAYDSHLPAIRKKIEHTNVGYAAFDYISSQKVSPVPIKFTLPGPLTIMDTTADCYYEDRPKLNRDLADTINKEILRLVDAGCRYIQVDEPLFARQVDDASSFGMEGIERCFHGVPKEVKKIMHMCCGYPDHLDDEDYKKADPGSYHQLAREVDDLNIDEVSIEDAHCQNDLNLLERFEKKSVIFGAVAIASSRIETEDEIINRINSALNHIDRNRLVIAPDCGLGLLTPDLAVTKLSV

SEQ ID NO: 105273 - protein, 175 aa, Unknown
  Bacterial polypetide isolated from the Sargasso Sea
IKRLVDAGCKYIQVDEPLFARKPDNALKFGVSNLEKCFEGINVSDIEKITHICCGYPDKIDAIEYPKAPLDSYKKIAKALDNSIIDSVSIEDAHRYNNLSLLSDFEQTKVIFGVIKIASSSIETEEEIENRINEALKYISKEQLILAPDCGLGHLSRELAIQKLKIMSSVARKFN

SEQ ID NO: 105274 - protein, 300 aa, Unknown
  Bacterial polypetide isolated from the Sargasso Sea
TAKNTAVFYEDIKINILDTPGHADFGGEVERSLNLVDGALLLVDASEGPLPQTRFVLKKALEKDLPIILVINKIDRSDARITEVVNEVYDLFIDLDASEDQIEFPIIYTNAKLGVAHIELESDSSDLTPLFKTILSTVEGPKADDNHVPQFLITSLDYDSYVGQIAVGRLNNGKLNMNGSYSLCKVDEVRPNQKFSALYTFQGLKKVPVDEVESGDIIAFAGVDDISIGDTMSDNESPDPLPRIQVDEPTVSMLFYVNDSPFAGQDGKFLTTRHISERLNRETLSNVSLQVTATERPKCI

SEQ ID NO: 105275 - protein, 178 aa, Unknown
  Bacterial polypetide isolated from the Sargasso Sea
MTITDSIADDFYNDDKKLGADLGNALNQEILSLVEAGCQYIQVDEPVFARKPEKALEYGVENLERCFAGVPDHVTRAMHACCGYPNALDTDNYYKAPPQSYFDIAEAIDQSSINAISIEDAHRPNDSKLLELFQNTTVMMGLVDVAKSKLEEVDQIKQRIKLCLEHIDRERFIAAPDC

SEQ ID NO: 105276 - protein, 206 aa, Unknown
  Bacterial polypetide isolated from the Sargasso Sea
IPGPMTITDSIADDYYNNDKKLGIDLGNALNSEILNLVEAGCKNIQVDEPVFARKPEKALEYGIENLERCFAGVPGNVTKIAHMCCGYPNALDSQNYLKASPSAYFNIAEALDESDLDAISIEDAHRPNDLKLLEIFKKTSVIMGLIDVAKSKLEEVYQITERIQECLNHIDPHRLIAAPDCGLGLLNRKLAINKMKNLCKAAHSI

SEQ ID NO: 105277 - protein, 227 aa, Unknown
  Bacterial polypetide isolated from the Sargasso Sea
MANKPLITTVIGSFPKPSYLPIEDWFDGARNDGGMNTERVTKEFTQYIEKKSESDEHLFVRAAKEVINLQIDAGIDIPTDGEVRRENYIHYHCRYLEGFDFKNLEHRVLRDGAYETNLPAVRNKIKHNGSSYSVHDFKSSQSVSSAPVKFTLPGPLTIMDTTADCFYDDRPKLNRDLAETVNKEILSLVDAGCKYIQVDEPLFARQVDDASSFGMEGIERCFHGVPK

SEQ ID NO: 105278 - protein, 195 aa, Unknown
  Bacterial polypetide isolated from the Sargasso Sea
TYYKSDEELGYDLAIAINTEIKRLVDAGCKYIQVDEPLFARKPANALAFGIQNLEKCFEGINQNDVEKITHICCGYPDKIDVVDYPKAPLDSYKKIAMQLDNSIIDSVSIEDAHRYNDLTLLKDYKQTKVIFGLIKIASSKIETVEEIEERIFEALKNISKDQLIAAPDCGLGHLSRDLAIKKLKIMSQAVKKFN

SEQ ID NO: 105279 - protein, 287 aa, Unknown
  Bacterial polypetide isolated from the Sargasso Sea
MKKAGESAESDFLNAIQEVVDDQVQAGIDIPTDGEVRRENYIFYQCRRIKGIDFNTVTNTSVRSGAYQADLPTITGPVALAKTMLGRDYSTAQKFCSNPVKITIPGPMTIIDSIADAYYNNDKKLGLDLANALNTEILNLVEAGCQNIQVDEPVFARKPEKALEYGIENLERCFAGVPENVTKISHMCCGYPNALDSENYLKAKPSAYFKIAEALDESILDAISIEDAHRPNDLKLLEIFKKTSIILGFIDVAKSKLEEVDQIRKRIQQCLNHIDRHRLIAAPDCGL

SEQ ID NO: 105280 - protein, 219 aa, Unknown
  Bacterial polypetide isolated from the Sargasso Sea
RTKILVQTPVKITIPGPMTIIDSIADDYYNNDKKLGLDLASAINTEILNLVEAGCQNIQVDEPVFARKPEKALEYGIENLERCFDGVPENVTKISHMCCGYPNALDSENYLKAKPSAYFKIAEALDESILDAISIEDAHRPNDLKLLEIFKETSIILGFIDVAKSKLEEVDQIRERIQQCLNHIDHHRLIAAPDCGLGLLNRQLAIDKMKNLCIAAHSI

SEQ ID NO: 105281 - protein, 280 aa, Unknown
  Bacterial polypetide isolated from the Sargasso Sea
HGCGIAFRGDFEERMKKVLKEIKNRGDIILFIDEIHTLVGAGAAEGAIDAASMLKPMLARGELQTIGATTLDEYRKYIEKDAALERRFQPIQVDEPSIPLAIEILKGLRDRYEAHHKITITDEAITSAANLASRYIQDRFLPDKAIDLIDEAGARMNIRRMTAPPDLREFDERIARVRVEKEAAIDAQDFERAAGLRDDEKKLLAEREAKEEEWKQGDESVPAVVGPDEIAEVLSGATGIPVFKLTEEESQRLLHMEDEIGKRYVGQEDAVKALCRSIRR

SEQ ID NO: 105282 - protein, 225 aa, Unknown
  Bacterial polypetide isolated from the Sargasso Sea
MLTTVIGSYPKPSYLKITDWFNATGGTDTQFPTKYYSNEIKQMGNEAEELFIRATKEIIHDQEECGIDIITDGEVRRENYIHYHCRHLEGIDFNHLTEKVARTGNYKCWLPTITNKISAADPFLVDEWKSNQTLTDKPIKITIPGPMTITDTIANTYYKSDEELGNDLAIAINTEIKRLVDAGCKYIQVDEPLFARKPANALAFGIQNLEKCFEGINQNDVEKIT

SEQ ID NO: 105283 - protein, 202 aa, Unknown
  Bacterial polypetide isolated from the Sargasso Sea
MKQSSIVTTVIGSFPKPKYLPIEDWFDATRKNQGMNTSNITRLYTDYSKNQNPNDEKLFIKAAKEIINLQLNAGIMIPTDGEVRRENYIHYHCRYLDGFDFDNLEFQVWRDGAYESYLPAIRNKIFHNRNSYSVHDFKASQNVSPVPIKFTLPGPLTIMDTAVDCCYFNRPKLNYDLAETVNKEILALVDSGCSFIQVDEPL

SEQ ID NO: 105284 - protein, 223 aa, Unknown
  Bacterial polypetide isolated from the Sargasso Sea
MGNEAEELFIRATKEIIHDQEECGIDIITDGEVRRENYIHYHCRHLEGIDFNHLTEKVARTGNYKCWLPTITNKVSAADPFLVDEWKSNQTLTDKPLKITIPGPMTITDTIANTYYKSDEELGNDLAIAINTEIKRLVDVGCKYIQVDEPLFARKPANALAFGIQNLEKCFEGINQNDVEKITHICCGYPDKIDAVDYPKAPLDSYKKIAMQLDNSIIDSVSI

SEQ ID NO: 105285 - protein, 309 aa, Unknown
  Bacterial polypetide isolated from the Sargasso Sea
TYKLDGIKMPLPLLTTTIGSFPKPKYTPIRDWFDISREKGGMNCAQTTRNYAADLSKNKEKNEELFVKAAKEVIDIQIRAGIDIPTDGEVRRENYIHYHCRHLSGFDFSKLEHRILRDGAYETDLPAIRNDISHSGAAYSVSDFTTAQKLSPKPLKFTLPGPLTIMDTTADCFYDDRPRLNKVLAETINKEILALVDAGCEHIQVDEPLFARQVNDALSFGFEGIDRCFHKVPNSVKRIVHMCCGYPDHLDDSEYKKADPQSYIDLSSMIDDAEFDQISIEDKHCCNDLDLLEKFKKKTVILEVCHRVK

SEQ ID NO: 105286 - protein, 229 aa, Unknown
  Bacterial polypetide isolated from the Sargasso Sea
EVRRENYIFYQCRRIKGIDFNTVTNTSVRSGAYQADLPTITGPVALAKTMLGRDYSTAQKFCSNPVKITIPGPMTIIDSIADAYYNNDKKLGLDLANALNTEILNLVEAGCQNIQVDEPVFARKPEKALEYGIENLERCFAGVPENVTKISHMCCGYPNALDSENYLKAKPSAYFKIAEALDESILDAISIEDAHRPNDLKLLEIFKKTSIILGFIDVAKSKLEEVDQI

SEQ ID NO: 105287 - protein, 240 aa, Unknown
  Bacterial polypetide isolated from the Sargasso Sea
MPAIRKKIEHTNVGYAALDYISSQKVSPVPIKFTLPGPLTIMDTTADCYYDDRPKLNRDLADTINKEILRLVDAGCRYIQVDEPLFARQVDDASSFGMEGIERCFHGVPRDIKKIMHMCCGYPDHLDDEDYKKADPGSYHQLASEVDALNIDEVSIEDAHCQNNLDLLEKFKKKSVIFGAVAIASSRIETEDEIISRINSALNHIDRNRLVIAPDCGLGLLTPDLAVAKLSVMCSAVKKI

SEQ ID NO: 105288 - protein, 130 aa, Unknown
  Bacterial polypetide isolated from the Sargasso Sea
TNVGYAAFDYISSQKVSPVLIKFTLPGPLTIMDTTADCYYENRPKLNRDLADTINKEILRLVDAGCRYIQVDEPLFARQVDDASSFGMEGIERCFHGVPKDVKKIMHMCCGYPDHLDDKDYKKADPDSYY

SEQ ID NO: 105289 - protein, 208 aa, Unknown
  Bacterial polypetide isolated from the Sargasso Sea
MLTTVIGAYPKPDYLKITDWFNAKGGTDTANPTKFYENEIKKMGSNAELIFNKAAKEVIRDQLDCGIDIITDGEIRRENYIHYHCRHLNGVDFNTLTEKVARTGNYKCWLPTITNKISAADPFLVDEWKNNQSLSNKPVKVTIPGPMTITDTIANTYYKSDEEMGYDLAIAINTEIKRLVDAGCKYIQVDEPLFARKPDNALAFGIKI

SEQ ID NO: 105290 - protein, 227 aa, Unknown
  Bacterial polypetide isolated from the Sargasso Sea
FLVEEWRSNQKLTTKHLKITIPGPMTITDTIANTFYKSDEEMGEDLADAINIEIKRLVDVGCKYIQVDEPLFARKPENALNFGIKNLERCFRDIIDDSVEKITHICCGYPDKLDAINYPKAPLDSYNKISKELDNSIIDTVSIEDAHRYNNLQFLKDFKNTKIIFGLIKIASSEIETEEEIVARIKDALEFIDKEQLIVAPDCGLGHLPRDLAKTKLKIMVNAANNF

SEQ ID NO: 105291 - protein, 280 aa, Unknown
  Bacterial polypetide isolated from the Sargasso Sea
MGNEAEELFIRATKEIIHDQEECGIDIITDGEVRRENYIHYHCRHLEGIDFNHLTEKVARTGNYKCWLPTITNKVSAADPFLVDEWKSNQTLTDKPLKITIPGPMTITDTIANTYYKSDEELGNDLAIAINTEIKRLVDVGCKYIQVDEPLFARKPANALAFGIQNLEKCFEGINQNDVEKITHICCGYPDKIDAVDYPKAPLDSYKKIAMQLDNSIIDSVSIEDAHRYNDLTLLKDYKKTKVIFGLIKIASSKIETVEEIEGRIVEALKNISKDQLIAA

SEQ ID NO: 105292 - protein, 268 aa, Unknown
  Bacterial polypetide isolated from the Sargasso Sea
MGADAKSIFEKAAKEVIRDQLDCGIDIITDGEIKRENYIHYHCRHLNGVDFNTLTEKVARTGNYKCWLPTITNKISATDPFLVDEWKSNQSLSNKPVKVTIPGPMTITDTISNMHYTSDEEMGYDLAIAINTEIKRLVDAGCKYIQVDEPLFARKPDNALAFGIKNLEKCFEEINQSDVEKITHICCGYPDKIDAENYPKAPLDSYTKIAKALDNSKIDSVSIEDAHRYNDLSLLKNYKNTKIIFGVIKIASSKIETVEEIESRIKET

SEQ ID NO: 105293 - protein, 225 aa, Unknown
  Bacterial polypetide isolated from the Sargasso Sea
IPTDGEVRRENYIYYQCRRITGIDFHTVTHKSVRSGAFQADLPTITGPVSLSKPVLGHDYRTAQKFCSNPVKITIPGPMTITDSIADDYYNNDKKLGIDLGYALNAEILNLVEAGCINIQVDEPVFARKPEKALEYGIENLERCFAGVPENVTKIAHMCCGYPNALDSENYLKASPSAYFSIAEALDESDLDAISIEDAHRPNDLKLLEIFKKTSVIMGLIDVAK

SEQ ID NO: 105294 - protein, 359 aa, Unknown
  Bacterial polypetide isolated from the Sargasso Sea
MPLTTTTIGAFPKPKSTPVQDWFLGSKSDEEKKASKGLLANWSPGAYEKALEEAGENAEKLFLQAIEEVVTDQVNAGIDVPTDGEVRRESYVLYQCRFLNGISFKEVTHKSVRQGAFEADLPTIIGPISSKEVRLHHDWKSAQQFTKKPLKITLPGPMTITDSIANNYYDDLKKLGFDFAMALNKEVKALVDAGCQYIQVDEPVFARKPEQAIEYGMENLERTMHGIPKEVQRVCHICCGYPNSLDSEGYKKADLDAYDRIADLVDQSSIDEVSLEDSHRHNDLSLLEKFEKTKVIFGVIDIARSRMEDVEEVRSRILDALNHIDENRLIAAPDCGLGFFSREQAIEKMSILSKAAKSI

SEQ ID NO: 105295 - protein, 348 aa, Unknown
  Bacterial polypetide isolated from the Sargasso Sea
MILTTTIGAYPKPDFLTLPDWFKDEKGTDAEYPTSKWEQAKLKMGEEYEVQIKLASESIIKDQIECGIDIITDGEVRRENYIHYHCRHLGGIDFEKLTKKTARTGNYDCWLPTITNKVEFLGSFLNKEYEINQSISKNPIKVTIPGPLTITDTIADEFYNDHKMLGVDLGEAINKEIKSLVNSGCKYIQVDEPLFARKSKEAIEFGIDNLERCFHGVTDCEKITHICCGYPDKIDADDYPKAPLISYFEIADALENSLIDTISIEDAHRHNDLKLLELYKSKKIIFGLIKVASSEVEEIDVIRDRLLSCLNHIDKERLIAAPDCGLGYLSRDMAMLKLKNLSKAAKSI

SEQ ID NO: 105296 - protein, 192 aa, Unknown
  Bacterial polypetide isolated from the Sargasso Sea
FYDDRPRLNKVLAETINKEILALVDAGCKHIQVDEPLFARQVNDALSFGFEGIDRCFHKVPNSVKRIVHMCCGYPDHLDDSEYKKADPQSYIDLSSMIDDAEFDQISIEDKHCCNDLDLLEKFKKKAVIFGSIAIASSKIETLDELVNRLKQALSHIDRERLIVAPDCGLGLLPPNLAEEKLKIMCQAAAIV

SEQ ID NO: 105297 - protein, 279 aa, Unknown
  Bacterial polypetide isolated from the Sargasso Sea
MLTTVIGAYPKPNYLNITDWFNASGGTDTEYPTKFYEDEIKKMGDNIEELFNKATKEIISDQEECGIDILTDGEVRRENYIHYHCRYLEGIDFTNLTEKVARTGNYKCWLPTITSKVKAKESFLVEEWKKNQSFTNKDLKITIPGPMTITDTIANTFYDSDEHMGEDLADAINVEIKRLVDAGCKYIQVDEPLFARKPENALKFGIKNLERCFKDINNQSIEKITHICCGYPDKLDAVDYPKAPLDSYSKISKALDESIIDTVSIEDAHRYNDLDFLKN

SEQ ID NO: 105298 - protein, 299 aa, Unknown
  Bacterial polypetide isolated from the Sargasso Sea
ALFRRATEEVVKAQISCDITIPTDGEQRRENYVHYQCRNISGFDFENLEHRIMRNGAYETDLPAIRGKIKAGQPVLPRDYLEAQAASDRPVKITLPGPLTIMDTTADCHYNDRNKLARDLADALNVEVLELAQAGCQHIQVDEPIFARKPKDAMSFGIEALERVFHGVSDNVVRTAHMCCGYPDRIDNPDYPKADHMVYHDLVEALDGKIEALSIEDCHCKNDLELFEKFKKTTAIVGFVDISVSKIEVVDEVVERMKYVLQVLPQERLIAAPDCGLGFLRTHLSMEKLTVLCDAANQI

SEQ ID NO: 105299 - protein, 351 aa, Unknown
  Bacterial polypetide isolated from the Sargasso Sea
MKVQVFWVEKKKHEIGLIGGTFDRFHAGHMSLIAAGLAHCKNIQVWITNDELARSKDRRIRDWYDRESDLIDATSEHSSRITTHQLDDKFGPSLQSTEASAIICTAETIQGCLEINSLREKEGFYPLDIISVERVTSWDGEPISSSRIRDGHIDREGMPWIPEPFRTSDPIMTPEVESQLKEPFGELIEGPEEDITVAALEAISRIVESTKFSGPLIAVGDVTVLAFQNSGRPADIAIVDGQTKREEWEGSNEIDFSLYDNLLECISPAGSLSRSLLKSCESSISSWMENEESSIIRVVGEEDLSPLLLHPMAPIGSVVLYGQPERGLVIRWCDEESKIRCRNLLRGFSTD

SEQ ID NO: 105300 - protein, 349 aa, Unknown
  Bacterial polypetide isolated from the Sargasso Sea
MLTTVIGAYPKPSYLRITDWFNASGGTDTEYPTKFYEEEIKKMGDNVEELFNKATKEIISDQEECGIDILTDGEVRRENYIHYHCRYLEGIDFANLTEKVARTGNYKCWLPTITSKVKAKESFLVEEWKKNQSLTNKDLKITIPGPMTITDTIANTFYDSDEHMGEDLADAINVEIKRLVDAGCKYIQVDEPLFARKPENALKFGIKNLERCFKDLNNQSIEKITHICCGYPDKLDAVDYPKAPLDSYSKISKALDESIIDTVSIEDAHRYNDLNFLKDFKQTKVIFGLVKIASSQVESKEEIVSRINDALKFIDKEQLIVAPDCGLGHLPRDLAKIKLKIMVEASNSF

SEQ ID NO: 105301 - protein, 228 aa, Unknown
  Bacterial polypetide isolated from the Sargasso Sea
MKIKTTTIGAYPKPSCTPIGDWFPDADDEEAKGADKGLLQRWSITDYEENIEQAGDEAESLFLQAIREVIEDQTQTGIDIPTDGEVRRENYIYYQCRQIEGIDFKTVTHKSVRAGAFEADLPTIIKPVSLLAPILGRDYKTAQQFTNNPVKITIPGPMTITDSIADDFYNDDKKLGADLGNALNQEILSLVEAGCQYIQVDEPVFARKPEKALEYGVENLERCFAGVP

SEQ ID NO: 105302 - protein, 349 aa, Unknown
  Bacterial polypetide isolated from the Sargasso Sea
MLTTVIGAYPKPSYIEITDWFNAKGGTDTEHPTKFYNNEINKMGDRVEELFNKATKEIISDQEECGIDILTDGEVRRENYIHYHCRYLEGIDFDNLTEKVARTGNYKCWLPTITEKIKAKGSFLVEEWKNNQKLTSKPIKITIPGPMTITDTIANTFYNSDQEMGEDLADAINVEIKRLVDAGCKYIQVDEPLFARKPENALNFGIKNLERCFKNIEDQNIEKITHICCGYPDKLDAIDYPKAPLNSYSKISRELDESIIDTVSIEDAHRYNNLEFLKDFKNTKIIFGLIKIASSQIESKEEIVTRIKDALQFIDKEQLIVAPDCGLGHLTRGLAKIKLKIMVQAARSF

SEQ ID NO: 105303 - protein, 165 aa, Unknown
  Bacterial polypetide isolated from the Sargasso Sea
CRYIQVDEPLFARQVNDASSFGMEGIERCFHGVPKDVTKIMHMCCGYPDHLDDEDYKKADPGSYHQLAREVDDLNIDEVSIEDAHCQNNLNLLEKFEKKSVIFGAVAIASSRIETEDEIINRINSALNHIDRNRLVIAPDCGLGLLTPELAVAKLSMMCSAVKKI

SEQ ID NO: 105304 - protein, 225 aa, Unknown
  Bacterial polypetide isolated from the Sargasso Sea
VDEWNSNQKLTSKPLKITIPGPMTIADTIANTYYKSDEKMGEDLADAINIEIKRLVDVGCKYIQVDEPLFARKPENTLNFGIKNLERCFKDINDDSVEKITHICCGYPDKLDVIDYPKAPLDSYRKVSEDLDNSIIDTVSIEDAHRYNDLNFLKNFKNTKIIFGLIKIASSEIETKEEIISRIKDVLHFIDKEQLIVAPDCGLGHLSRDLAKTKLKIMVDAAKSF

SEQ ID NO: 105305 - protein, 264 aa, Unknown
  Bacterial polypetide isolated from the Sargasso Sea
MLTTVIGAYPKPNYLKITDWFNASGGTDTQFPTKFYNNEIKQMGNEAEKLFIRATKEIIHDQEECGIDIITDGEVRRENYIHYHCRHLEGIDFNNLTEKVARTGNYKCWLPTITNKVSAADPFLVDEWKSNQTLTDKPLKITIPGPMTITDTIANTYYKSDEELGNDLAIAINIEIKRLVNAGCKYIQVDEPLFARKPANALAFGIQNLEKCFEGINQNDVEKITHICCGYPDKIDAVDYPKAPLDSYKKIAMQLDKFIIDSVS

SEQ ID NO: 105306 - protein, 349 aa, Unknown
  Bacterial polypetide isolated from the Sargasso Sea
MLTTVIGAYPKPSYLKITDWFNASGGTDTEYPTKFYEDEIKKMGDNVEELFNKATKEIISDQEECGIDILTDGEVRRENYIHYHCRYLEGIDFANLTEKVARTGNYKCWLPTITSKVKAKESFLVDEWKKNQSLTNKDLKITIPGPMTITDTIANIFYDSDEHLGEDLADAINVEIRRLVDAGCKYIQVDEPLFARKPENALNFGIKNLERCFKNINNQSIEKITHICCGYPDKLDAVDYPKAPLDSYSKISKALDESIIDTVSIEDAHRYNDLNFLKDFKQTKVIFGLVKIASSKVETKEEIVSRINDALGFIDKEQLIVAPDCGLGHLPRDLAKIKLNIMVEASNSF

SEQ ID NO: 105307 - protein, 244 aa, Unknown
  Bacterial polypetide isolated from the Sargasso Sea
AFEADLPTIIKPVSLRAPILGRDYKTAQQFTKNPVKITIPGPMTITDSIADEFYNDDKKLGADLGNALNQEILTLVEAGCQFIQVDEPVFARKPEKALEYGVENLERCFAGVPDHVTRAMHACCGYPNALDTDNYYKAPPQSYFDIAVAIDQSSINAISIEDAHRPNDPKLLELFQNTTVMMGLVDVAKSKLEEVDQVKERIKLCLEHIDRERFIAAPDCGLGLLNRDLAKAKLKNLCQAAHSI

SEQ ID NO: 105308 - protein, 347 aa, Unknown
  Bacterial polypetide isolated from the Sargasso Sea
MKIKTTTIGAYPKPACTPIGDWFPDTEDEDARGADKGLLQRWSITDYEENMKKAGESAETDFLNAIHEVVDDQVQAGIDIPTDGEVRRENYIFYQCRRIKGIDFNTVTNTSVRSGAYQADLPTITGPVTLEKTMLGRDYSTAQKFCSNPVKITIPGPMTIIDSIADDYYNNDKKLGLDLANALNTEILNLVEAGCQNIQVDEPVFARKPEKALEYGIENLERCFDGVPENVTKISHMCCGYPNALDSENYLKAKPSAYFKIAEALDESILDAISIEDAHRPNDLKLLEIFKETSIILGFIDVAKSKLEEVDQIRERIKQCLSHIDHHRLIAAPDCGLGLLNRQLAMT

SEQ ID NO: 105309 - protein, 284 aa, Unknown
  Bacterial polypetide isolated from the Sargasso Sea
MGIDIPTDGEVRRENYIYYQCRQVEGIDFKTVTHKSVRAGAFEADLPTIIKPISLRAPILGRDYKTAQQFTNNPVKITIPGPMTITDSIADDFYNDDKKLGADLGNALNQEILSLVEAGCQYIQVDEPVFARKPEKALEYGVENLERCFAGVPDHVTKAMHACCGYPNALDTDNYYKAPPQSYFDIAEAIDQSSINAISIEDAHRPNDPKLLELFKNTTVMMGLVDVAKSKLEEVDQVKERIKLCLEHIDRERFIAAPDCGLGLLNRDLAKAKLKNLCQAAHSI

SEQ ID NO: 105310 - protein, 356 aa, Unknown
  Bacterial polypetide isolated from the Sargasso Sea
MAHSLLTTVIGSFPKPEYLPIEDWFDAARNEGAMNSERVTENFTKYQENTKESDEQLFIKAAEEVINLQINSGIDIPTDGEVRRENYVHYHCRYLTGFDFKNLERRVFRDGAYDSHLPAIRKKIEHTNVGYAAFDYISSQKVSPVPIKFTLPGPLTIMDTTADCYYEDRPKLNRDLADTINKEILKLVDAGCRYIQVDEPLFARQVDDASSFGMEGIERCFHGVPKEVKKIMHMCCGYPDHLDDEDYKKADPGSYHQLAREVDDLNIDEVSIEDAHCKNDLKLLEKFEKKSVIFGAVAIASSRIETEDEIINRINSALNHIDRNRLVIAPDCGLGLLTQDLAVAKLSVMCSAVKKI

SEQ ID NO: 105311 - protein, 122 aa, Unknown
  Bacterial polypetide isolated from the Sargasso Sea
MGFPRIGARRELKFAQEAFWKGEKSEAELLQTAAELRAQNWKRQAGLDLVPVGDFSLYDQVLDLSFTLGNLPARVQGLQGSELDQYFRVARGRSANDSGCNCVHAGEMTKWFDTNYHYIVPE

SEQ ID NO: 105312 - protein, 124 aa, Unknown
  Bacterial polypetide isolated from the Sargasso Sea
MTLTHNLGYPRIGEKRELKRATEAFWKGELSIDELLKEGSALRKTNWLKQKKAGIELIPVNDFSFYDQMLDMSCLLGNVPPRFQWNGGKTDINTVFTVARGTQGGASLVEDEKDCQTGKVSTIA

SEQ ID NO: 105313 - protein, 321 aa, Unknown
  Bacterial polypetide isolated from the Sargasso Sea
KKPIHLIGPYTFLKLSKGSFDFKTKLMELTDVYLEILNKKGSYSSFHIDEPAFVMDTTPEEIEMITEVYTKLSNKADNINIFTYYEDVEWLRELFELPVNGIGLDFVNGRNNLREILSLGSLSLKDKVLYAGFVDGINVWKTDIRHACINIDYLSKMAKDVVVTNAGPLYHLPVTTEGENNIPEELKKHLSFATEKLQELDDIKHRDYTKYDKYVGSWNNMVSDRVDNLTDEDFVKSKDVVERREIQDRILGLPELPTTTIGSFPQTKEVRVNRLHHKKGKINTGEYSSKVAKFIKEAIDIQEDIGNGCFGTRRNQNEVIW

SEQ ID NO: 105314 - protein, 426 aa, Unknown
  Bacterial polypetide isolated from the Sargasso Sea
MDILSLRKKFISPSLSLSYDKPIHFVKGKGQYLYDIDGKRYLDAVNNIQHVGHCHPKIVEAAHEQNALLNINTRYLDEKIIDYAQSLTEKLPEGLDVCFFTNSGSESNDLAIRIARSISNSKETIVLDSAYHGHLSSLIDLSPYKHNSIGGSGPPDFVYTVPLPDTFRGMYRGDNCSIDYINEVKRIINTIKNKGNQLSAFFVESLMGCGGQIILPDGFIKKSFELVRESGGLCIADEVQTGFGRVGAHYWGFETCDVIPDIVTMGKSMGNGHPLSALVTTKEIAEKFNNGMEYFNSFGGNPVSCAIGKAVLDVIDKEELQKNAKLVGDYLIKKLKGLQSNYEFIGQVRGQGLFIGIEMINDVETLKPDKDSAKIIANEMKKSGILISVDGPDHNVLKIKPPIIFNYENADELVFNFRSILNKYYA

SEQ ID NO: 105315 - protein, 237 aa, Unknown
  Bacterial polypetide isolated from the Sargasso Sea
MARTHISGFPRIGAHRELKFAQESFWRGESDDAYLREVGKALRARHWELQRAAGLDFVAAGDFAWYDPMLNLTALLGALPERFGFEPKTLSLAQYHELARGNKAQPAMEMTKWFDTNYHYLVPELGPDTTFDGGVDWLFEEIDEALALDLAVKPVLIGPITYLWLAKSRVAGFDRLSLLPRLVIRYLRILDTLKARGIEWVQLDEPALCVDLEADWLEAFSAVYTVLGDSGVKVLLA

SEQ ID NO: 105316 - protein, 52 aa, Unknown
  Bacterial polypetide isolated from the Sargasso Sea
MAGLLRKAARRIPLERLWVNPDCGLKTRAWPETEAALVNMVAAARQLRVELA

SEQ ID NO: 105317 - protein, 170 aa, Unknown
  Bacterial polypetide isolated from the Sargasso Sea
MPRVGRKRELKFATEKYWRQEITASELLSTATDVVDDIYTQQLNAGIDLIPVNDFSFYDRVLDLCCFLGITPERFSQNVKPLFLDEYFRLARGDGEIAAMEMTKWFDTNYHYLVPEIEATTNPSFSDQLFAQQIFPELDSKKQKFCLIGPVTFLALAKGADSVDKYSIKK

SEQ ID NO: 105318 - protein, 290 aa, Unknown
  Bacterial polypetide isolated from the Sargasso Sea
FDSVHLDLITDDSNLENIKNVNCKNISLGIISGRNIWRLNWEKTLRKIDSLPLKDFETIYLGPSTSLQHLPYSIELEKKIDDELLSWLAFAKEKISELALLANHFSDQSSEEEIENIKAANEARQTSNRVTKTSVRERMSGLSEKDFERNSAFAVRQSAQKEKFNFPILPTTTIGSFPQTTDIRKARARLTKGEISQEEYETFMQESIIECIKIQEDLDLDVLVHGEPERNDMVQYFGELLSGFAFTSFGWVQSYGTRCVKPPIIFGDVERPEAMTVKWSEFAPKTQKKL

SEQ ID NO: 105319 - protein, 221 aa, Unknown
  Bacterial polypetide isolated from the Sargasso Sea
DWITYAQSKTNKIMKGMLTGPVTIVNWSFVRDDKPKEEVSKQIAIALSDEINDLQNAGIKIIQVDEAAFKEGYPLRQENIIDYESWATRDFKIAVSSAKTQTQIHTHMCYSEFNDIIKTIEDMDADVISIETARSGNELLKIFQHVGYKQEVGPGVYDIHSPRIPSVEELKQQIKRLLEVLPKEQLWINPDCGLKTRKWEEVIPSLKNMVQAVQEVRSELR

SEQ ID NO: 105320 - protein, 323 aa, Unknown
  Bacterial polypetide isolated from the Sargasso Sea
VDGLHIDLVRAPEQYPTILDRLPAYKVLSLGVVNGRNVWRCDLEKALEVLRHAHERLGERLWVAPSCSLLHSPVDLAREDQLDAELKGWLAFAVQKCQEVALLGKALEEPADASVQAALQASRAVQAARAASTRIHKPEVQARLAAIRPRHAQRQSPFAERIEQQRERLQLPLLPTTTIGSFPQTSAIRLARQSFKQGKLSAAEYTEAMHSEIRHAVQVQERLGLDVLVHGEAERNDMVEYFAEQLDGYAFTRFGWVQSYGSRCVKPAVIVGDLSRPQAMTVEWITYAQGLTDKIMKGMLTGPVTMLMWSFPREDVSREVQAR

SEQ ID NO: 105321 - protein, 300 aa, Unknown
  Bacterial polypetide isolated from the Sargasso Sea
DFSFYDQVLDMSFTLGNLPERVRDFRGDELDNYFRVARGRSAQSAEEHAQCCGGVAAGEMTKWFDTNYHYIVPEFTQDTAFTLNASRLIEQLREAKAHNVAAKPVIIGPLTYLALGKEKDDSDRFDLLARLLPVYLELLNALAVEGVEWVQIDEPILVTELPSGLDVAFEQAYHALAAAPVKLLLATYFGRLQENLPLVTRLPVAGVHLDAVNAADEVEALAAQLPQDSVLSLGVINGRNIWKTDLNATLQWLTPLATARGERLWVAPSCSLLHVPVDLASEQTLDTEIASWLAFALQKL

SEQ ID NO: 105322 - protein, 140 aa, Unknown
  Bacterial polypetide isolated from the Sargasso Sea
RLGTYLEWAINSFRIAANGVDDSTQIHTHMCYSEFNDIIEAIARMDADVITIETSRSDMELLDAFRSFEYPNDIGPGVYDIHSPNIPDKEHIINLMTLAAERIPAERLWINPDCGLKTRKWEEVTPALETMVAAARELRS

SEQ ID NO: 105323 - protein, 254 aa, Unknown
  Bacterial polypetide isolated from the Sargasso Sea
MKDFETIYLGPSTSLQHLPYSIELEKKIDDELLSWLAFAKEKISELALLANHFSDQSSDEEIENIKAANEARQTSNRVTKASVTERMSGLSEKDFERNSAFPIRQSAQKEKFNFPILPTTTIGSFPQTTDIRKARARLTKGEISQEEYETFMQESIIECIKIQEDLDLDVLVHGEPERNDMVQYFGELLSGFAFTSFGWVQSYGTRCVKPPIIFGDVERPEAMTVKWSEFAQKNTKKVMKGMLTGPVTILQWSF

SEQ ID NO: 105324 - protein, 321 aa, Unknown
  Bacterial polypetide isolated from the Sargasso Sea
FERNNVFSIRQDAQKKKLIFPILPTTTIGSFPQTTDIRKARASLTKGEISQQEYESFMQDSIVECIKIQEDLDLDVLVHGEPERNDMVQYFGELLSGFAFTSFGWVQSYGTRCVKPPIIYGDVERPEAMTVKWSEFAQQNTKKVMKGMLTGPVTILQWSFVRDDQPRKDTCYQIALAIRDEVKDLEDAGIHVIQVDEAAFREGLPVRRAQWNEYLKWAVDTFRLTTACVEDSTQIHSHMCYSEFNDVIEDIAAMDADVISIECSRSNMELLKAFKDFDYPNEIGPGVWDIHSPRVPSQSEIENLIEKAKNSVKLENLWINP

SEQ ID NO: 105325 - protein, 254 aa, Unknown
  Bacterial polypetide isolated from the Sargasso Sea
MSKKFELSFGVIDGRSIWKSNILDLINWLNKLGIENYIVSSSCSFLHSPYSLEEESILDPDLKNILSFGYEKLNELKLIVTSLNKAEVSEEAKEFNNSFQLSNKQLSGRVNPEVRERVEGLNEKDFNRSTKREERLLFQNENLNIPPLPTTTIGSFPQTAETRNLRKKYKANEINDEEYHEGLKEIIKETVEIQESLDLDILVHGEAERNDMVEYFGELLDGFAFTKFGWVQSYGSRCVKPPIIYGDVNRVDPM

SEQ ID NO: 105326 - protein, 228 aa, Unknown
  Bacterial polypetide isolated from the Sargasso Sea
RGIECVQIDEPALVLELPQAWLDAFKPAYDALAGQLKLLLTTYFEGIAANLDTITALPVQGLHVDLVHGKDDVAALHQRLPSDWLLSAGLINGRNVWRADLTEKYAQIKDLVGQRALWIASSCSLLHSPIDLSVETRLDAEVKSWFAFALQKCEELALLRDALNSGETAKLAEWSAPIQARRHSPRVHNAAVEKRLAAITAQDSQRNSPYAERARAQRTRFNLPAWPT

SEQ ID NO: 105327 - protein, 248 aa, Unknown
  Bacterial polypetide isolated from the Sargasso Sea
TRVPTPQWKNVWAAITAQDSQRANAYPVRAEAQRARFNLPAWPTTTIGSFPQTTEIRGLRLDFKKGNLDAGNYRTGIAEHIKQAIAEQERLGLDVLVHGEAERNDMVEYFGEHLDGFVFTQNGWVQSYGSRCVKPPVVIGDVSRPEAITVEWAKYAQSLTDKPVKGMLTGPVTILCWSFPREDVTRETIAKQIALALRDEVADLEAAGIGIIQIDEPALREGLPLRRSDWAAYLEWGVEAFRINAAVA

SEQ ID NO: 105328 - protein, 98 aa, Unknown
  Bacterial polypetide isolated from the Sargasso Sea
MDADVITIETSRSDMELLDAFKHFQYPNEIGPGVYDIHSPNIPTQEYMVKLMQLAAERVPAQRLWVNPDCGLKTRQWAEVRPALANMVAAARALRATL

SEQ ID NO: 105329 - protein, 754 aa, Unknown
  Bacterial polypetide isolated from the Sargasso Sea
MTCAHTLGFPRIGAKRELKFALESYWRGETSQAELIATGKSLRERHWQAQQQAGVTLLPVGDFAWYDQVLGTSLLVDAIPARHRHGDTDLDTLFRVARGRAPTGPAAAAAEMTKWFNTNYHYLVPEFSRDQRFKLGWSQLFDEVEEAKALGLPVKAVLLGPVSYLWLGKEKESGFSRLELLDRLLIVYQEILAKLAAQGVEWVQIDEPALALDLPDEWRLAYLNAYERLAGPCKLLLTTYFGSVAHQRDIITSLKVDGLHLDLVAAPEQLETLVPHLPAQWVISAGVINGRNVWRANLAKLVPTLKSLKDKLGERLWVASSCSLLHSPVDLTLELELDAQTRSWFAFALQKCYELGLLADHLNGGELDKITAYSQPIVDRESDSRVHKKAVQSRLASLTNRDFDRHSAYPVRAEAQRSDLKLPLLPTTTIGSFPQTSEIRVLRQDWRAGRIDDQAYEAGIQAQIKDAIERQEAIGLDVLVHGEAERNDMVEYFGELLDGFAITRFGWVQSYGSRCVKPPVITRDIDRPTPMTLEWTKFAQSLTDKPVKGMLTGPVTILCWSFPREDVSREQSALQIGLAIRDEVADLEAAGIKIIQIDEPAIREGLPLRKQDHQAYLDWAVRAFRLSASPVADSTQIHTHMCYSDFNLIIEAVAALDADVITIETSRSQMQLLEAFERFNYPNEIGPGVYDIHSPNVPSQSWIEGLLRKAAKQIPAERLWVNPDCGLKTRGWEETEAALKVMVDATKALRAELA

SEQ ID NO: 105330 - protein, 764 aa, Unknown
  Bacterial polypetide isolated from the Sargasso Sea
MVTTHNLGFPRIGAKRELKFGLERYWKGESSRDELKALGAELRQRHWNDQRGLDLAPIGDFAFYDQVLDMSFTLGNLPKRVQGFHGDVLDNYFRVARGRSAQSADAHAACCGGVAAGEMTKWFDTNYHYIVPEFHADTNFSLDPSRLLQQLAEAQAQGVAAKPVILGPVTYLWLGKAKDDSDRLALLPKLLPVYGALLDTLTAQGVEWVQIDEPILVTELDAEWQQAFETAYAALETRRIKVLLATYFGQLQGNLALASSLSVDGLHVDAINARDEVAALVRELPASRVLSVGAINGRNIWKTDLNATLDWLEPLAKQLGDRLWLAPSCSLLHVPVDLASEEKLDAEIRSWLAFALQKLDELKVLATALNEGRDKVADALAANAAAIHSRRYSPRVNNPVVKAAIARIDAQLGNRVSPYTQRAPKQSARLNLPAFPTTTIGSFPQTGEIRQARSQFKAGALDEAGYRAAMRAEIERSVREQESLELDVLVHGEAERNDMVEYFGEQLDGYAFSQFGWVQSYGSRCVKPPILFGDISRPKAMTVEWITYAQSLTNKPIKGMLTGPVTILNWSFVRDDQPRSVSCYQLALAIREEVLDLEKAGVRVIQIDEAALREGLPLRRAQWDAYLKWAVESFRITANGVQDDTQIHTHMCYSEFNDIIASIADMDADVITIETSRSDMELLDAFDDFKYPNEIGPGVYDIHSPNIPTQEHIVGLMKKAAERIPAERLWVNPDCGLKTRQWAEVIPALTNMVAAAKTLRNPVQ

SEQ ID NO: 105331 - protein, 756 aa, Unknown
  Bacterial polypetide isolated from the Sargasso Sea
MQLNSLGFPRIGRRRELKFALEKYWRGESTQAELHEVAKELRRTHWQWQVAAGIEQVPVGDFAFYDQVLTLSATLNAIPDRHRGEGAIDLDTLFRVARGRAPTGTDAPASEMTKYFNTNYHYLVPELKQDQVFSIAYEQFFDEVAEAQALGYQAKPVLLGPVSYLYLAKTVGQDFDKLSLLPNLLKAYADILARFAAQGVTWVQLEEPILALELTADWQAAISEAYQALKTAQVKILLTSYYGSISHHQALVSALPVAGLHLDLVTAPEQLALFANALRANQILSAGVVNGRNVWAAEVDLIVERIGSVARDLGARLWIGSSCSLLHSPVDLEVETTLTPALRQQLAFAKQKLLELANVRQLLQAPESVAAKEIVNTCLARREAKALAADAKVIARVAALTQADYERVSEFTERQAVQQRKYRLPLLPTTTIGSFPQTPAIRGLRSRWRKGELSDAQYTEQLQQVTRDTIDRQLKLGIDVLVHGEAERNDMVEYFGEQLEGVGFTKNGWVQSYGSRCVKSPLIYGDVSRPKAMTVEWAEFAQSLTDKPVKGMLTGPVTILHWSFAREDISRDTIATQLALAIRDEVVDLQDAGIGIIQIDEPAFREGLPLKQSEWQAYLDWAVNAFKLSAAGVVDETQIHTHMCYSEFNDTIAAIAAMDADVITIETSRSRMELLNAFEDFEYPNEIGPGVYDIHSPNTPSVEAMVHLIEKAAQKVPVRQLWVNPDCGLKTRTWDEVEPALKNMVDATRELRRRLG

SEQ ID NO: 105332 - protein, 756 aa, Unknown
  Bacterial polypetide isolated from the Sargasso Sea
MQLNSLGFPRIGRRRELKFALEKYWRGESTQAELHEVARELRRTHWQWQVAAGIEQVPVGDFAFYDQVLTLSATLNAIPDRHRGEGAIDLDTLFRVARGRAPSGTDAPASEMTKYFNTNYHYLVPELKQDQVFSIAYEQLFDEVAEAQALGYQAKPVLLGPVSYLYLAKTVGQDFDKLSLLPNLVKAYADILARFAAQGVTWVQLEEPILALELAADWQAAISQAYQALKTAQVKILLTSYYGSISHHQALVSALPVAGVHLDLVTAPEQLALFANALRPDQILSAGVVNGRNVWAAEVDLIVERIGGVARDLGARLWIGTSCSLLHSPVDLEVETTLTPTLRQQLAFAKQKLLELANVRQLLQAPESVAAKEIVNSCVARREAKAQAADAKVIARVAALTPADYERVSEFTERQVVQQRKYRLPLLPTTTIGSFPQTPAIRGLRSRWRKGELSDAQYTEQLQQVTRDTIDRQLKLGIDVLVHGEAERNDMVEYFGEQLEGVGFTKNGWVQSYGSRCVKPPLIYGDVSRPKAMTVDWAEFAQSLTDKPVKGMLTGPVTILHWSFAREDISRDTIATQLALAIRDEVVDLQNAGIGIIQIDEPAFREGLPLKQSQWQAYLDWAVNAFKLSAAGVIDETQIHTHMCYSEFNDTIAAIAAMDADVITIETSRSRMELLNAFEDFEYPNEIGPGVYDIHSPNTPSVEAMVHLIEKAAQKVPVRQLWVNPDCGLKTRTWAEVEPALKNMVDATRELRRRLG

SEQ ID NO: 105333 - protein, 257 aa, Unknown
  Bacterial polypetide isolated from the Sargasso Sea
MALSHSLGFPRIGRDRELKKALEAHWKGELDEAGLRAVGQRLRAEHWQLQKDAGIDLLPVGDFAWYDQVLAHSLAFGVIPERFRPAAGKPTLDTLFAMARGAVANKSSGSCCGGAHAQEMTKWFDTNYHYLVPEFSADQQFALSWEQLFEEVAEAHALGHDVKPVLIGPLTYLWLGKAKGGDFDKLELLESLLPVYGEIFQRLAAQGVEWVQIDEPILVLDLPQAWKNAFERAYNLIQREPCKKLIATYFGGLEDTS

SEQ ID NO: 105334 - protein, 453 aa, Unknown
  Bacterial polypetide isolated from the Sargasso Sea
MWIAPSCSLAHVPVTLASEKKLDAELKSWLAFATEKLDELSTIALALRHLGAGLPGAGLPAAARAALAAATTALESRRHSGAVFNVLVQRRVAAIAETMASRKSPFAERSRVQRHSLKLPLLPTTTIGSFPQTPAIRQARAAYRRGEMRALEYLERMRAETATVVRRQEELGLDVLVHGEVERNDMVEFFADKLWGYALTENGWIQNYGSQCVKPPIIYGDIYRPEPMIVDAACHAQSLTDRLVKGVLTGPVTMLEWSFVRDDQPRSTTALQLALVIRDEVMDLEKAGIRIIQIDEPAFREGLPLRKADWSDYLDWATRAFRISAGGVSDATQIHTHMCYSEFNDILPSIAALDADVITIETSRSSMELLDGFGEFAYPNGIGPGVYDTHSSRVPSAEAMQRLLERACEVIPADRLWVNPDCGLKTRGWPETEAALSNMVLAARTLRQRLAVQ

SEQ ID NO: 105335 - protein, 646 aa, Unknown
  Bacterial polypetide isolated from the Sargasso Sea
MATTHNLGFPRIGAKRELKFALESYWKGESSLAELKALGAELRQRHWAHQADLGFAAVGDFAFYDHVLDMSFMLGNLPERVRGFQGDALDNAFRVARGRSAKGAEEHGACCGGVAAGEMTKWFDTNYHFIVPEFSAGTEFKLDPSRLLEQLAEANAQGVKAKPVIVGPVTYLALGKAKDDSDKLALLPRLLPVYAELLAALAAQGVEWVQIDEPVLVTELSAEWQQAYVTAYDALANSKVKLLLATYFGQLLDNLPLACKLPVQGLHLDAINARAEVAAAIAQLPQDRVLSLGVINGRNIWKTDLNGVLDWLEPVAKQLGERLWIAPSCSLLHVPVDLESEQKLDAEVRSWLAFALQKLGELKVLASALNNGRDAVKAELAANGAAIAARRASPRVNNPAVKAALAKISPALGQRKNTYPARADKQAALLKLPPYPTTTIGSFPQTGAIRHARSQFRSGALDEAGYKAAMRAEIERSVREQETLGLDVLVHGEAERNDMVEYFGEQLDGYAFSQFGWVQSYGSRCVKPPVLFGDISRPKAMTVEWIKYAQSLTSKPMKGMLTGPVTILNWSFVRDDQPRSVSCYQLALAIREEVLDLEKTGVRVIQIDEAALREGLPLRKSQWQEYLDWAVTSFRIAANGVDDETQ

SEQ ID NO: 105336 - protein, 169 aa, Unknown
  Bacterial polypetide isolated from the Sargasso Sea
LEDAGIHVIQVDEAAFREGLPVRRAQWDEYLKWAVDTFRLTTACVEDSTQIHSHMCYSEFNDVIENIAAMDADVISIECSRSNMELLKAFKDFDYPNEIGPGVWDIHSPRVPSQVEIESLIEKAKSSVKLENLWINPDCGLKTRGWPEVKNTIEHMVNATKKAREQLDN

SEQ ID NO: 105337 - protein, 239 aa, Unknown
  Bacterial polypetide isolated from the Sargasso Sea
DWNPSLYLQYKTERSRPATELLSRVALESVRSVVDLGCGPGNSTALLHQRWPSAQITGVDTSPAMLNEARNTLPKCHFIEADISTFQAEHPVDLLYANASLQWVPDHYELFPHLVSQLSHNGVLAVQMPDNWLEPTHVLMREVAYEQDYPDRGRAPLPGVHAYYDILTEAGCDVDIWRTTYYHIMDSHQAIIDWVSSTGLRPWLQDLSESEQRHYLARYHELLQEQYPLQENGKILLAF

SEQ ID NO: 105338 - protein, 261 aa, Unknown
  Bacterial polypetide isolated from the Sargasso Sea
MTTPLDRYAAQYVQFEDERTRPIRDLLAAVPNTPIHTAIDIGCGPGNSTEALIARAPHATVHGIDASADMIDAARKRLPDVRFDVVDISTWDDPGGYDLILANAVLQWVPAHDTLFPALVGRLAPGGHLAVQMPDNLDEPAHRLMREVAAAGPWADKLKGAARTERFDARYYHALLSPLCSRVDVWRTTYYHPLRGGADAVVEWFKGSALRPFLAALDDGERAAFLAQYRDAVAGPGGYPALADGTVLLPFPRLFIVATRA

SEQ ID NO: 105339 - protein, 240 aa, Unknown
  Bacterial polypetide isolated from the Sargasso Sea
SGLIKYLMRHWHSTPFEMCEIKYHVKLPIFIARQWIRHRTANVNEYSARYSILDKEFYLPSKENLAAQSTNNRQGRGNVISGGQAEEVLSLLKDDAERTYKNYEEMLNERYDGSVIDESKTGLARELARMNLTLNTYTQWYWKTDLLNLMNFLRLRADHHAQYEIRAYADVMLNTLKRWVPITYDAFIDYRVGGTEISSKGKEIIKKLIKGEKISIEETDLSKREWNELMLAFSLKDKLI

SEQ ID NO: 105340 - protein, 59 aa, Unknown
  Bacterial polypetide isolated from the Sargasso Sea
HITPFEMCEIKYHVKLPIFIARQWIRHRTANVNEYSARYSILDKEFYLPSQENLRCSIN

SEQ ID NO: 105341 - protein, 238 aa, Unknown
  Bacterial polypetide isolated from the Sargasso Sea
LIKYLMRHWHSTPFEMCEIKYHVKLPIFIARQWIRHRTANVNEYSARYSILDKEFYIPSKDQLSKQSTANRQGRGDLITGEQADEVLKILKDDATRTYSNYEKMLNERYDGSTIDESKTGLARELARMNLTLNSYTQWYWKTDLLNLLNFLFLRADSHAQYEIRVYAETMLDTVKKWVPITHSAFLDYRVGAVHVSSKGKKVIQKMARGEKITIDNSGLSKREWNELMTSFGFNEKIV

SEQ ID NO: 105342 - protein, 231 aa, Unknown
  Bacterial polypetide isolated from the Sargasso Sea
FGHSTPFEMCEIKYHVKLPIFIARQWIRHRTANVNEYSARYSILDKEFYLPETEHLASQSQINRQGRGDVIKGDQAKLVLELLKKDAEQTYKNYETMLNERYDGSIIKEGKIGLARELARMNLTLNTYTQWYWKTDLLNLMNFLRLRADRHAQYEIRSYANAMLDTLKKWVPITYEAFMDYRVGGTEVSSKGKEIIQKLIKGEKVSLEQSGLSKREWNELMIAFDLSDQII

SEQ ID NO: 105343 - protein, 112 aa, Unknown
  Bacterial polypetide isolated from the Sargasso Sea
MKLTTEQAKEIKDQQNQQNETKRVTAPELEKILYEAIPLLDHGFIRVVDYMGDDTSIVQAARVSYGKGTKKVSTDSGLIKYLMRHWHSTPFEMCEIKYHVKLPIFIARQWIR

SEQ ID NO: 105344 - protein, 250 aa, Unknown
  Bacterial polypetide isolated from the Sargasso Sea
RVSYGKGTKKVSEDSGLIKYLMRHSHSTPFEMCEIKLHVKLPIFIARQWVRHRTANINEYSARYSILDNEFYVPDINNLGAQSQSNRQGRDEVLTGDEANEVLEILKNDALNLYGNYEKMMNVDSQGDQIDPERQGLARELARMNLSLNYYTQWYWKIDLHNLLHFLRLRADSHAQLEIREYADVILNVVEKWVPETYKAFVEYQMNGVKLSATAWSAVKNMINGKLPSHKELNMSKREWDELKDMISGE

SEQ ID NO: 105345 - protein, 105 aa, Unknown
  Bacterial polypetide isolated from the Sargasso Sea
MKLTKEQEKEIKDLQSQHHQTKRVTAPELEKILYEPISILDHGFVRVIDYMGDDTSIVQAARVSYGKGTKQVSTDSGLIKYLMRHWHSTPFEMCEIKYHVKLPIF

SEQ ID NO: 105346 - protein, 113 aa, Unknown
  Bacterial polypetide isolated from the Sargasso Sea
MKLTKEQSQEIKDQQSQSNNTKRITAPELEKILYEAIPVLDHGFIRVIDYMGDDTSIVQAARVSYGKGTKKVNTDAGLIKYLMRHWHSTPFEMCEIKYHVKLPNFYCKAMDKT

SEQ ID NO: 105347 - protein, 64 aa, Unknown
  Bacterial polypetide isolated from the Sargasso Sea
MRHWHSTPFEMCEIKYHVKLPIFIARQWIRHRTANVNEYSARYSILDKEFYLPEPQHLCCSITK

SEQ ID NO: 105348 - protein, 222 aa, Unknown
  Bacterial polypetide isolated from the Sargasso Sea
CEIKYHIKLPIFIARQWIRHRTANVNEYSARYSILDKEFYLPEQKHLAAQSKSNRQGRGQTLKGDQAKKVLDLLKKDAETTYKNYEIMLNEKYDGSIIDENQNGLARELARMNLTLNTYTQWYWKTDLLNLMNFLRLRADHHAQYEIRAYADVMLDTLKRWTPTTYEAFMDYRVGGTEVSSKGKQILKKFIKGEKVNYDDSGLSKREWNELMEAFDQKDKLI

SEQ ID NO: 105349 - protein, 250 aa, Unknown
  Bacterial polypetide isolated from the Sargasso Sea
GKGTKQVSTDKGLIKYLMRHWHSTPFEMCEIKYHVKLPIFIARQWIRHRTANVNEYSARYSILDKEFYLPSQENLAAQSTSNRQGRGDVLEGKQAEEVLELLKSDAERTYDNYETMLNERFDGSTIDENKKGLARELARMNLTLNTYTQWYWKTDLLNLMNFLRLRADSHAQYEIRVYADIMLDTLNKWVPITYNAFMDYRVGGTEVSAKGKLIIQKLIKGEKVSIEESGLSKREWNELMESFEQNDLLI

SEQ ID NO: 105350 - protein, 108 aa, Unknown
  Bacterial polypetide isolated from the Sargasso Sea
MKLTKEQEREIKEQQSQETSTKRVTAPNLEKILYEAIPILDHGFIRVVDYMGNDTSIVQAARVSYGKGTKKVSTDAGLIKYLMRHWHSTPFEMCEIKYHVKLPIFIAR

SEQ ID NO: 105351 - protein, 115 aa, Unknown
  Bacterial polypetide isolated from the Sargasso Sea
MKLTKEQKQEIADQQAQKNQTKRVTSPELEKILYEALPVLDHGFVRVVDYMGDDSSIVQSARVSYGKGTKKVSTDEGLIKYLMRHWHSTPFEMCEIKYHVKLPIFIARQWIRHRT

SEQ ID NO: 105352 - protein, 175 aa, Unknown
  Bacterial polypetide isolated from the Sargasso Sea
MKLTSEQAQEIKDQQSQEFKTKRVTAPELEKIFYEALPILDHGFIRVVDYMGDDTSIVQSARVSYGKGTKKVSTDEGLIKYLMRHWHSTPFEMCEIKYHVKLPIFIARQWIRHRTANVNEYYARYSILDKEFYLPAPEHLAAQSQSNRQGRGDILEGDKAKQVLDLLKVRCRTNI

SEQ ID NO: 105353 - protein, 105 aa, Unknown
  Bacterial polypetide isolated from the Sargasso Sea
MKLTKEQQQEIADQQTQKNQTKRVTSPELEKILYEALPVLDHGFVRVVDYMGDDSSIVQSARVSYGKGTKKVSTDEGLIKYLMRHWHSTPFEMCEIKYHVKLPIL

SEQ ID NO: 105354 - protein, 120 aa, Unknown
  Bacterial polypetide isolated from the Sargasso Sea
MKLTKEQSEEIKSQQSQSNQTKRVTAPELEKILYDAIPALDHGFVRVVDYMGDDTSIVQSARVSYGKGTKQVSTDKGLIKYLMRHWHSTPFEMCEIKYHVKLPIFIARQWIKHRTANVNE

SEQ ID NO: 105355 - protein, 243 aa, Unknown
  Bacterial polypetide isolated from the Sargasso Sea
STDEGLIKYLMRHWHSTPFEMCEIKYHVKLPIFIARQWIRHRTANVNEYSARYSILDKEFYIPAKEQLSAQSTINRQGRGDLITGNQADEVLKILKDDATRTYGNYEKMLNERFDGTTIDEGKAGLARELARMNLTLNSYTQWYWKTDLLNLLNFLFLRADSHAQYEIRVYAEAMLDTVKKWVPITHAAFLDYRVGAVHVSAKGKKVIQQMAKGEKVSHENSGLSKREWNELMTSFNFTEKIV

SEQ ID NO: 105356 - protein, 119 aa, Unknown
  Bacterial polypetide isolated from the Sargasso Sea
MKLTKEQSQEIKDQQSQQNPTKRVTAPELEKILYEAIPALDHGFVRVIDYMGDDTSIVQSARVSYGKGTKQVSTDSGLIKYLMRHWHSTPFEMCEIKYHVKLPIFIARQWIRHRTANVN

SEQ ID NO: 105357 - protein, 108 aa, Unknown
  Bacterial polypetide isolated from the Sargasso Sea
MKLTKEQIQDIKDQQSQENITKRVNAPELEKILYEAIPVLDHGFIRVVDYMGNDTSIVQAARVSYGKGTKKVSTDAGLIKYLMRHWHSTPFEMCEIKYHVKLPNIYCS

SEQ ID NO: 105358 - protein, 100 aa, Unknown
  Bacterial polypetide isolated from the Sargasso Sea
MKLTDEQIKEIKDQQSQQNSTKRVTAPELEKILYDAIPILDHGFIRVVDYMGDDTSVVQSARVSYGKGTKKVSTDSGLIKYLMRHWHSTPFEMCEIKYHV

SEQ ID NO: 105359 - protein, 247 aa, Unknown
  Bacterial polypetide isolated from the Sargasso Sea
TKKVQTDAGLIKYLMRHWHSTPFEMCEIKYHVKLPIFIARQWIRHRTANVNEYSARYSILDKEFYLPKTENLAAQSQSNRQGRGDVLQGEQAKKVLDLLKNDAEQTYNNYEMMLNERYDGSVIDEKEIGLARELARMNLTLNTYTQWYWKTDLLNLMNFLRLRADHHAQYEIRTYADAMLDTLKKWVPITYEAFMDYRVGGTEVSAKGKIILQKLIKGEEVSLDQSGLSKREWNELMTAFGLKDKLI

SEQ ID NO: 105360 - protein, 101 aa, Unknown
  Bacterial polypetide isolated from the Sargasso Sea
MKLTSEQKKEITEQQSQKNQTKRVTSPELEKILYEAIPVLDHGFVRVVDYMGDDSSIVQSARVSYGKGTKKVSTDEGLIKYLMRHWHSTPFEMCEIKYHVK

SEQ ID NO: 105361 - protein, 227 aa, Unknown
  Bacterial polypetide isolated from the Sargasso Sea
TPFEMCEIKYHVKLPIFIARQWIRHRTANVNEYSARYSILDKEFYLPTSENLAAQSQSNRQGRGEVIEGEQAKQVLDLLKTDAERTYKNYEEMLNQRFDGSTIDENKKGLARELARMNLTLNTYTQWYWKTDLLNLMNFLRLRADSHAQYEIRAYADAMLDTVKKWVPITYEAFMDYRVGGTEVSSKGKKVIQKLISGGKVDIEQSGLSKREWNELMLALELKDKLI

SEQ ID NO: 105362 - protein, 123 aa, Unknown
  Bacterial polypetide isolated from the Sargasso Sea
MKLTKEQSEEIKSQQSQSNQTKRVTAPELEKILYDAIPALDHGFVRVVDYMGDDTSIVQSARVSYGKGTKQVSTDKGLIKYLMRHWHSTPFEMCEIKYHVKLPIFIARQWIRHRTANVNEYSA

SEQ ID NO: 105363 - protein, 282 aa, Unknown
  Bacterial polypetide isolated from the Sargasso Sea
MKLTKKQQEEIKNQQTQSNQTKRVTAPELEKILYEAIPALDHGFVRVVDYMGDDTSIVQSARVSYGKGTKQVSTDKGLIKYLMRHWHSTPFEMCEVKYHVKLPIFIARQWIRHRTANVNEYSARYSILDKEFYLPSQANLAAQSNSNRQGRGEVLEGQQAEEVLELLKSDAERTYDNYETMLNERFDGSTIDENKKGLARELARMNLTLNTYTQWYWKTDLLNLMNFLRLRADNHAQYEIRVYADIMLNTLKRWVPITYDAFMDYRVGGTEVSAKGKLIIQK

SEQ ID NO: 105364 - protein, 237 aa, Unknown
  Bacterial polypetide isolated from the Sargasso Sea
IKYLMRHWHSTPFEMCEIKYHVKLPIFIARQWIRHRTANVNEYSARYSILDKEFYLPSQENLAAQSTSNRQGRGDVLEGKQAEEVLELLKSDAERTYDNYETMLNERFDGSTIDENKKGLARELARMNLTLNTYTQWYWKTDLLNLMNFLRLRADSHAQYEIRVYADIMLDTVKKWVPITYDAFMDYRVGGTEVSAKGKVIIQKLIKGETLDVESSGLSKREWNELMTAFDLKDKLI

SEQ ID NO: 105365 - protein, 115 aa, Unknown
  Bacterial polypetide isolated from the Sargasso Sea
MKLTKEQQEEIKNQQSQSNQTKRVTAPELEKILYEAIPALDHGFVRVVDYMGDDTSIVQSARVSYGKGTKQVSTDKGLIKYLMRHWHSTPFEMCEIKYHVKLPIFYARQWIRHKT

SEQ ID NO: 105366 - protein, 129 aa, Unknown
  Bacterial polypetide isolated from the Sargasso Sea
MKLTPEQKREINEQQSQKNETKRVTSSELEKILYEALPVLDHGFVRVVDYMGDDSSIVQSARVSYGKGTKKVSTDEGLIKYLMRHWHSTPFEMCEIKYHVKLPIFIARQWIRHRTANVNEYSAKIFYFR

SEQ ID NO: 105367 - protein, 234 aa, Unknown
  Bacterial polypetide isolated from the Sargasso Sea
MMRHWHSTPFEMCEIKYHVKLPIFIARQWIRHRTANVNEYSARYSILDKEFYLPSQENLAAQSTSNRQGRGDVLEGKQAKEVLELLKSDAERTYDNYETMLNERFDGSTIDENKKGLARELARMNLTLNTYTQWYWKTDLLNLMNFLRLRADSHAQYEIRVYADIMLDTVKKWVPITYDAFIDYRVGGTEVSAKGKLIIQKLIKGENVDVESSGLSKREWNELMNAFDLKDKLI

SEQ ID NO: 105368 - protein, 100 aa, Unknown
  Bacterial polypetide isolated from the Sargasso Sea
MKLTKEQEQEIKEQQSQESSTKRVTAPELEKILYEAIPILDHGFVRVVDYMGNDSSIVQAARVSYGKGTKKVSTDSGLIKYLMRHWHSTPFEMCEIKYHV

SEQ ID NO: 105369 - protein, 105 aa, Unknown
  Bacterial polypetide isolated from the Sargasso Sea
MKLTKEQQEEIKNQQSQSNQTKRVTAPELEKILYEAIPALDHGFVRVVDYMGDDTSIVQSARVSYGKGTKQVSTDKGLIKYLMRHWHSTPFEMCEIKYHVKLPIF

SEQ ID NO: 105370 - protein, 103 aa, Unknown
  Bacterial polypetide isolated from the Sargasso Sea
MTSENEFSSSERPQRFETGRVTVPMLEENLNKPFTVLDHGFVRIIDYMGDDNAVVQAARVSYGSGTKRVREDRGLIRYLMRHRHTTPFEMCEIKFHVKLPIFV

SEQ ID NO: 105371 - protein, 284 aa, Unknown
  Bacterial polypetide isolated from the Sargasso Sea
MSKIPEDAIRCLDKGFVRLVDAMGGDDAIVQAARVSYGKGTAKVSQDRGLIRYLMRHRHTTPFEMVEFKFHCKMPIFVARQWVRHRTANINEYSLRYSEARDEFYCPDPEHIQFQSSLNKQGRLGEVSESLKTKVQDYFQEISNRSFEIYSELNDAGVARELARAILPVNLYTEWYWKNDLHNLLHFVGLRSDSHAQYEIRVFSDAMAESVKKVAPFAWEAYQDYVVSGLRFSRIEQGLLEQNLPDRVIDDIMEDIVYQITASLHNNKPREDHDLFPLYKKQGA

SEQ ID NO: 105372 - protein, 177 aa, Unknown
  Bacterial polypetide isolated from the Sargasso Sea
MSDLPNDAIKCLDKGFVRLVDSMGGDDAIVQSARVSYGKGTSKLSQDRGLIRYLMRHRHTTPFEMVEFKFHCKMPIFVARQWVRHRTANINEYSLRYSEARDEFYFPDPNHIEFQSAVNKQGRMGEVDKKLKQKVQAYFKEISDRSFEIYSELNEAGVARELARAILPVNLYTEWYG

SEQ ID NO: 105373 - protein, 320 aa, Unknown
  Bacterial polypetide isolated from the Sargasso Sea
MSNIPDDAIKCLDKGFVRLVDSMGGDDAIVQAARVSYGKGTSKVSQDRGLIRYLMRHRHTTPFEMVEFKFHCKMPIFVARQWVRHRTANINEYSLRYSEARDEFYLPDPEHIQFQSSLNKQGRLGEVSDSLKAKVSDYFQEISNRSFEIYSELNDAGVARELARAVLPVNLYTEWYWKNDLHNLLHFVGLRSDSHAQYEIRVFSDAMAESVKKVAPFAWEAYQDYVISGLRFSRIEQSLLEQNLPERVIDDILEDIAYQITASLHNNKPRQESELFALYKKQGGHDSEEDFKLKWDSGEIEVGNVRELREFKGKLSSLKK

SEQ ID NO: 105374 - protein, 244 aa, Unknown
  Bacterial polypetide isolated from the Sargasso Sea
SFTDKGLIKYLMRHWHSTPFEMCEIKYHVKLPIFIARQWIRHRTANVNEYSARYSILDKEFYLPSQENLAAQSTSNRQGRGDVLQGKQAEEVLELLKSDAERTYDNYETMLNERFDGSTIDENKKGLARELARMNLTLNTYTQWYWKTDLLNLMNFLRLRADSHAQYEIRVYADIMLDTVKKWVPTTYDAFMDYRVGGTEVSAKGKLIIQKLIKGENVDVESSGLSKREWNELMTAFDLKDKLI

SEQ ID NO: 105375 - protein, 161 aa, Unknown
  Bacterial polypetide isolated from the Sargasso Sea
MEYKVLDHGFVRLVDHMPRQDLDNSIVQAARVSYGDGTTTSRGDTGLIRYLMRHWHTTPFEMVEFKFHIKMPIYIARQHLRHRTASVNELSARYSVVPKEYYEPDTFRGQSTVNHQGSEGVVDIDKTDMSSHLSQSFDIYEKLLQDGCCREQARGNLPQST

SEQ ID NO: 105376 - protein, 100 aa, Unknown
  Bacterial polypetide isolated from the Sargasso Sea
MKLTKEQKKEIKNQQSQENKTKRVNSPELEKILYEAMPVLDHGFVRVVDYMGNDTSIVQAARVSYGTGTKQVSTDSGLIKYLMRHWHSTPFEMCEIKYHI

SEQ ID NO: 105377 - protein, 245 aa, Unknown
  Bacterial polypetide isolated from the Sargasso Sea
KVSTDEGLIKYLMRHWHSTPFEMCEIKYHVKLPIFIARQWIRHRTANVNEYSARYSILDKEFYIPAKEQLSAQSISNRQGRGDLITGEQADEVLKILKDDATRTYDNYEKMLNERFDGTIIDEDKAGLARELARMNLTLNSYTQWYWKTDLLNLLNFLFLRADSHAQYEIRVYAETMLDTVKKWVPITHSAFLDYRVGAVHVSAKGKKVIQQMAKGKKVSYENSGLSKREWNELMNSFEFKEKIV

SEQ ID NO: 105378 - protein, 321 aa, Unknown
  Bacterial polypetide isolated from the Sargasso Sea
MNELPKDAIKCLDKGFVRLVDSMGGDDAIVQSARVSYGKGTSKVSQDRGLIRYLMRHRHTTPFEMVEFKFHCKMPIFVARQWVRHRTANINEYSLRYSEARDEFYYPDPDNIEFQSALNKQGRMGEVDPELKEKVQKYFKEISERSFAIYSELNDAGVARELARAILPVNLYTEWYWKNDLHNLLHFIGLRSDGHAQYEIRVFSDAMASFVKNVAPFAWEAYQDYVVKGMRFSKIEQSLLEKNLPDRVIDDIQEDLAYQLTASLHINKPRSDEDLFPLYKDQGGTDSKEDFNLKWTSGEIDAGNVRELREFKSKIETLRQS

SEQ ID NO: 105379 - protein, 320 aa, Unknown
  Bacterial polypetide isolated from the Sargasso Sea
MSKIPEDAIQCLDKGFVRLVDSMGGDEAIVQAARVSYGKGTTKLSQDRGLIRYLMRHRHTTPFEMVEFKFHCKMPIFVARQWVRHRTANINEYSLRYSEARDEFYYPDPEHIQFQSALNKQGRMGDVPDDLKKKVQDYFKEISNRSFEIYSELNTAGVSRELARAILPVNLYTEWYWKNDLHNLLHFVGLRSDSHAQYEIRVFSDAMAESVKAVAPFAWEAYQDYAVSGLRFSKIEQGLLEQNLPERVIDDIIEDVVYQITATLHHNKPRQENEIYPLYQKQNGTDSEADFKLKWDSGEIKTGNVRELREFKEKLLSLKK

SEQ ID NO: 105380 - protein, 320 aa, Unknown
  Bacterial polypetide isolated from the Sargasso Sea
MNNTPKDAIKCLDKGFVRLVDSMGGDGAIVQAARVSYGKGTSKVSQDRGLIRYLMRHRHTTPFEMVEFKYHCKMPIFVARQWVRHRTANINEYSLRYSEARDEFYYPDPENIQFQSALNKQGRLGEVSDELKKKVNTYFKEISDRSFEIYSELNNAGVARELARAVLPVNLYTEWYWKNDLHNLLHFIGLRSDDHAQYEIRVFSDAMAESVKKVAPFAWEAYQDYVVSGLRFSRIERGILEKKLPKRVIEDLLEDLAYQITASLHNNKPRSDKDLFPLYTKQGGSDSKGDFFLKWNSGEIHPSNVRELREFKTKLKRLMK

SEQ ID NO: 105381 - protein, 254 aa, Unknown
  Bacterial polypetide isolated from the Sargasso Sea
RVSYEKGTKQVSTDSGLIKYLMRHWHSTPFEMCEIKYHVKLPIFIARQWIRHRTANVNEYSARYSILDKEFYLPDPENLAAQSIANRQGRGDVIEGEQAKEVLELLKNDAERTYHNYETMLNQKYDGSTIDENKKGLARELARMNLTLNTYTQWYWKTDLLNLMNFLRLRADHHAQYEIRVYADIMLDTLKRWVPITYDAFMDYRVGGTEVSAKGKIIIQKLLKGENVNIDNSGLSKREWNELMEAFEIKDKIV

SEQ ID NO: 105382 - protein, 140 aa, Unknown
  Bacterial polypetide isolated from the Sargasso Sea
MVEVVGTAPTSAMVITKFVYRRSWKTNTINIKTIIKDSIKIMKLTKDQINEIKEQQSQQHQTKRVTAPALEKILYEAIPALDHGFVRVVDYMGDDTSIVQSARVSYGKGTKKVSTDSGLIKYLMRHWHSTPFEMCEIKYH

SEQ ID NO: 105383 - protein, 159 aa, Unknown
  Bacterial polypetide isolated from the Sargasso Sea
MVEVVGTAPTSVMFITKFVYRHSWKTNTINIKVICKDSIKFMKLTKEQIKEIQDLQSQKNETKRVTAPNLEKIMYEAIPILDHGFIRVIDYMGNDTSIVQAARVSYGKGTKQVSTDSGLIKYLMRHWHSTPFEMCEIKYHVKLPIFIARQWITAQNRER

SEQ ID NO: 105384 - protein, 148 aa, Unknown
  Bacterial polypetide isolated from the Sargasso Sea
MKLTKEQEQEIKEQQSQETSTKRVTAPNLEKILYEAIPILDHGFIRVVDYMGNDTSIVQAARVSYGKGTKKVSTDAGLIKYLMRHWHSTPFEMCEIKYHVKLPIFIARQWIRHRTANVNEYSARYSILDKEFYLPKTENLAAQSQSNR

SEQ ID NO: 105385 - protein, 160 aa, Unknown
  Bacterial polypetide isolated from the Sargasso Sea
MKLTKEQQQEIKELQSQDNKTRRIISPGLEKILFEAIPILDHGFVRVIDYMGDDTSIVQAARVSYGKGTKKVSTDSGLIKYLMRHWHSTPFEMCEIKYHIKLPIFIARQWIRHRTANVNEYSARYSILDKEFYLPSKENLAAQSKSNRQGRGDILTGDQA

SEQ ID NO: 105386 - protein, 286 aa, Unknown
  Bacterial polypetide isolated from the Sargasso Sea
MKLTKEQKQEIKDQQSQKNVTKRVTSPELEKILYEANPVLDHGFVRVVDYMGDDTSIVQAARVSYGKGTKKVSSDSGLIKYLLRHRHSTPFEMCEIKFHVKLPIFVARQWIRHRTANVNEYSARYSILDKEFYIPDKQHLAAQSEINRQGRGNLINGKQADEILDMLKEDAQKNYDDYEKMLNQKYDGTIIDEKKQGLARELARMNLTLNAYTQWYWKTDLLNLLNFLSLRAESHAQYEIRAYADVMIDSLKRWVPITYEAFMDYRVGAVEVSSKGKAVIEKLFKR

SEQ ID NO: 105387 - protein, 285 aa, Unknown
  Bacterial polypetide isolated from the Sargasso Sea
KILYEAIPILDHGFIRVVDYMGNDTSIVQAARVSYGKGTKKVSTDSGLIKYLMRHWHSTPFEMCEIKYHVKLPIFIARQWIRHRTANVNEYSARYSILDKEFYLPNIENLAAQSQSNRQGRGDTLQGEQAQKVLSLLKKDAEQTYDNYEMMLNERYDGSVINENAVGLARELARMNLTLNTYTQWYWKTDLLNLMNFLRLRADHHAQYEIRTYAEAMLDTLKKWVPITYEAFMDYRVGGTEVSAKGKIILQKLIKGEEVNVDQSGLSKREWNELMIAFGLKDKLI

SEQ ID NO: 105388 - protein, 118 aa, Unknown
  Bacterial polypetide isolated from the Sargasso Sea
MKLTKEQSEEIKNQQSQSNQTKRVTSPELEKILYEAIPALDHGFVRVVDYMGDDTSIVQSARVSYGKGTKQVSTDKGLIKYLMRHWHSTPFEMCEIKYHIKLPIFIARQWIRHRTANV

SEQ ID NO: 105389 - protein, 268 aa, Unknown
  Bacterial polypetide isolated from the Sargasso Sea
VDYMGDDTSIVQSARVSYGKGTKQVSTDKGLIKYLMRHWHSTPFEMCEIKYHVKLPIFIARQWIRHRTANVNEYSARYSILDKEFYLPSKENLAAQSTSNRQGRGDVLEGKQAEEVLELLKSDAKRTYDNYETMLNERFDGSTIDENKKGLARELARMNLTLNTYTQWYWKTDLLNLMNFLRLRADSHAQYEIRVYADIMLDTVKKWVPITYDAFMDYRVGGTEVSAKGKLIIQKLIKGENVDVESSGLSKREWNELMTAFDLKDKLI

SEQ ID NO: 105390 - protein, 298 aa, Unknown
  Bacterial polypetide isolated from the Sargasso Sea
MVDQQSQKSTTKRVTSQELEKILYEALPVLDHGFIRVIDYMGDDTSIVQSARVSYGKGTKKVSTDEGLIKYLMRHWHSTPFEMCEIKYHVKLPIFIARQWIRHRTANVNEYSARYSILDKEFYIPSKDQLSAQSISNRQGRGDLITGKQADEVLNILKDDATRTYDNYEKMLNERFDGTTIDESKTGLARELARMNLTLNSYTQWYWKTDLLNLLNFLFLRADSHAQYEIRVYADAMLETVKKWVPITHAAFLDYRVGAINVSAKGKKVIQKMAKGEKVDIENSGLSKREWNELMTSF

SEQ ID NO: 105391 - protein, 272 aa, Unknown
  Bacterial polypetide isolated from the Sargasso Sea
FVRVVDYMGDDSSIVQAARVSYGKGTKKVSTDSGLIKYLMRHRHSTPFEMCEIKYHVKLPIFVARQWIRHRTANVNEYSARYSILDKEFYLPSKENLAAQSTSNRQGRGEVINGKQADNILDMLKKDAEQTYANYETMLNEKFDGSTINENNKGLARELARMNLTLNTYTQWYWKTDLLNLLNFLSLRADSHAQYEIRAYADVMIDSLKKWVPITFDAFMDYRVGGMELSAKGKKVIQKLIKGEKCDLESSNLSKREWNELMQSFGFNEKIV

SEQ ID NO: 105392 - protein, 238 aa, Unknown
  Bacterial polypetide isolated from the Sargasso Sea
MKLTKDQQEEIKNQQSQSSNTKRVTAPELEKILYEAMPALDHGFVRVVDYMGDDTSIVQSARVSYGKGTKQVSTDKGLIKYLMRHWHSTPFEMCEIKYHIKLPIFIARQWIRHRTANVNEYSARYSILDKEFYLPTNENLAAQSKSNRQGRGDVLEGDQAKEVLSLLKNDAERTYANYETMLNERYDGTTIDENKKGLARELARMNLTLNTYTQWYWKTDLLNLMNFLRLRADSHASV

SEQ ID NO: 105393 - protein, 250 aa, Unknown
  Bacterial polypetide isolated from the Sargasso Sea
MKLTKEQAQEIKDQQSQENSTKRVIAAELENILYEALPILDHGFIRVVDYMGNDTSIVQAARVSYGKGTKKVNTDSGLIKYLMRHWHSTPFEMCEIKYHVKLPIFIARQWIRHRTANVNEYSARYSILDKEFYLPSQENLAAQSQSNRQGRGDVLEGEQATKVLDLLKTDAERTYNNYEEMLNQRYDGSTIDESKIGLARELARMNLTLNTYTQWYWKTDLLNLMNFLRLRADHHAQYEIRAYADTMLDT

SEQ ID NO: 105394 - protein, 280 aa, Unknown
  Bacterial polypetide isolated from the Sargasso Sea
LEKILYEALPALDHGFVRVVDYMGDDTSIVQSARVSYGKGTKQVSTDKGLIKYLMRHWHSTPFEMCEIKYHIKLPIFIARQWIRHRTANVNEYSARYSILDKEFYLPSLENLAAQSTSNRQGRGDVLVGKQAEEVLELLKTDAERTYDNYETMLNERYDGSTIDENKKGLARELARMNLTLNTYTQWYWKTDLLNLMNFLRLRADSHAQYEIRVYADIMLDTVKKWVPITYDAFMDYRVGGTEVSAKGKLIIQKLIRGENVDVESSGLSKREWNELMTAF

SEQ ID NO: 105395 - protein, 310 aa, Unknown
  Bacterial polypetide isolated from the Sargasso Sea
EQKQEILDHKSQKNITKRVTSPELEKVLYEAMPVLDHGFVRVVDYMGDDTSIVQSARVSYGKGTKKVSTDSGLIKYLMRHRHSTPFEMCEIKYHIKLPIFIARQWIRHRTANVNEYSARYSIMDKEFYVPERQNLAAQSTNNRQGRGDLINGKQADSILKILKEDAERNYQHYEEMLNEKYDGSIIDNKKQGLARELARMNLTLNSYTQWYWKTDLLNLLNFLALRADSHAQYEIREYANVMLNTVKKWVPTTYDAFIDYRVGGMELSAKGKIVIQKMIKGEKCDIETSGLSKREWNELMDSFGCKQHLA

SEQ ID NO: 105396 - protein, 296 aa, Unknown
  Bacterial polypetide isolated from the Sargasso Sea
STKRVTAPNLEKILYEAIPILDHGFLRVVDYMGNDTSIVQAARVSYGKGTKKVSTDAGLIKYLMRHWHSTPFEMCEIKYHVKLPIFIARQWIRHRTANVNEYSARYSILDKEFYLPKIENLAAQSQSNRQGRGDVLQGEQAKKVLELLKNDAEQTYNNYEMMLNERYDGSLINEKEAGLARELARMNLTLNTYTQWYWKTDLLNLMNFLRLRADHHAQYEIRTYADAMLDTLKKWVPITFEAFMDYRVGGTEVSSKGKAIIQKLIKGEKVSVQESGLSKREWNELMTAFDLKDKLI

SEQ ID NO: 105397 - protein, 224 aa, Unknown
  Bacterial polypetide isolated from the Sargasso Sea
MKLTKDQIAEIRQQQTQRFSTKRVVSPELEKILYEAMPVLDHGFVRVVDYMGDDTSIVQAARVSYGKGTKKVSTDSGLIKYLMRHRHSTPFEMCEIKYHIKLPIFIARQWIRHRTANVNEYSARYSIMDKEFYVPSKANLAAQSTNNRQGRGNLINGTQADSILKILKEDAERNYKHYEEMLNEKYDGTIIDDKKKGLARELARMNLTLNSYTQWYGKLIYLIY

SEQ ID NO: 105398 - protein, 174 aa, Unknown
  Bacterial polypetide isolated from the Sargasso Sea
MKLTREQSEEIKNQQSQSNTTKRVTAPELEKILYEAMPALDHGFVRVVDYMGDDTSIVQSARVSYGKGTKQVSTDAGLIKYLMRHWHSTPFEMCEIKYHIKLPIFIARQWIRHRTANVNEYSARYSILDKEFYLPTSENLAAQSTSNRQGRGDVLEGEQAKEVLELLKNDAERT

SEQ ID NO: 105399 - protein, 213 aa, Unknown
  Bacterial polypetide isolated from the Sargasso Sea
MKLTKEQQENIKEQQSQTSKTKRVTAAELEKILYEAIPILDHGFIRVVDYMGDDTSVVQAARVSYGKGTKKVSTDSGLIKYLMRHWHSTPFEMCEIKYHVKLPIFIARQWIRHRTANVNEYSARYSILDKEFYLPETENLAAQSQSNRQGRGDVLQGDQAKKVLNLLKHDAEQTYNNYETMLNERYDGSTIDEKEVGLARELARMNLTLNTYT

SEQ ID NO: 105400 - protein, 137 aa, Unknown
  Bacterial polypetide isolated from the Sargasso Sea
MKLTKEQSEEIKNQQSQSSQTKRVTAPELERILYEALPALDHGFVRVVDYMGDDTSIVQSARVSYGKGTKQVSTDKGLIKYLMRHWHSTPFEMCEIKYHIKLPIFIARQWIRHRTANVNEYSARYSILDKEFYLPSK

SEQ ID NO: 105401 - protein, 183 aa, Unknown
  Bacterial polypetide isolated from the Sargasso Sea
MKLTKEQTQEIKDQQSQVNSTKRVIAPQLEEILYEAVPILDHGFVRVVDYMGNDTSIVQAARVSYGKGTKKVSTDEGLIKYLMRHWHSTPFEMCEIKYHVKLPIFIARQWIRHRTANVNEYSARYSILDKEFYLPSSKHLAAQSQSNRQGRGDILEGEKAKQVLNLLKGDAEQTYNNYEMSKS

SEQ ID NO: 105402 - protein, 148 aa, Unknown
  Bacterial polypetide isolated from the Sargasso Sea
VQAARVSYGKGTKKVSTDAGLIKYLMRHWHSTPFEMCEIKYHVKLPIFIARQWIRHRTANVNEYSARYSILDKEFYLPKTENLAAQSQINRQGRGDVLQGEQAKKVLSLLKNDAEQTYNNYEMMLNERYDGSVINEKESGLARELARM

SEQ ID NO: 105403 - protein, 263 aa, Unknown
  Bacterial polypetide isolated from the Sargasso Sea
MRSEQNQTLRAVSVGMENHLYKVYPVLDHGFVRVVDYMGDDAAICQAARVSYGRGTKSVQNDEGLIRYLMRHWHSTPFEMCEVKLHVKLPVFVARQWIRHRTANVNEYSARYSILDREFYIPEPEALAAQSVINNQGRGEVLTGEEAEEVLRLLKNDSAQTYDHYEQMISQEGQKGLARELARMNLPANIYTQWYWKVDLHNLFHFLRLRADSHAQFEIRVYADEICKLISDWVPFAYGAFEDYRLGGATLSSKALDCIKRMI

SEQ ID NO: 105404 - protein, 259 aa, Unknown
  Bacterial polypetide isolated from the Sargasso Sea
MTISEQQKKEISEQQNQKNITKRVTSPELEKILYEVMPVLDHGFVRVVDYMGDDSSIVQAARVSYGKGTKKVSTDSGLIKYLMRHRHSTPFEMCEIKYHVKLPIFVARQWIRHRTANVNEYSARYSILDKEFYLPSKENLAAQSISNRQGRGEVINGKQADNILDMLKKDAEQTYANYETMLNEKFDGSTINENNKGLARELARMNLTLNTYTQWYWKTDLLNLLNFLSLRADSHAQYEIRAYADAMIDSLKKMGTYNF

SEQ ID NO: 105405 - protein, 166 aa, Unknown
  Bacterial polypetide isolated from the Sargasso Sea
MKLTKEQINEIKTLQSQSNKTKRVVAPELEKILYEAIPALDHGFVRVIDYMGDDASIVQAARVSYGKGTKQVSTDKGLIKYLMRHWHSTPFEMCEIKYHIKLPIFIARQWIRHRTANVNEYSARYSILDKEFYLPSVQNLAAQSKSNRQGRGDLLEGAQAKEVLDL

SEQ ID NO: 105406 - protein, 267 aa, Unknown
  Bacterial polypetide isolated from the Sargasso Sea
DYMGDDTSIVQAARVSYGKGTKQVSTDSGLIKYLMRHWHSTPFEMCEIKYHIKLPIFIARQWIRHRTANVNEYSARYSILDKEFYLPASENLAAQSTSNRQGRGDVLEGAQAKEVLELLKNDAERTYSNYEMMLNERYDGSTIDENKKGLARELARMNLTLNTYTQWYWKTDLLNLMNFLRLRADHHAQYEIRVYADIMLDTLKKWVPITYEAFMDYRVGGTEVSAKGKIVLQKLIEGENVSIEDSGLSKREWNELMEAFHLKDKLI

SEQ ID NO: 105407 - protein, 272 aa, Unknown
  Bacterial polypetide isolated from the Sargasso Sea
VEELENILYEAIPILDHGFIRVIDYMGDDTSIVQAARVSYGKGTKKVSTDSGLIKYLMRHWHSTPFEMCEIKYHVKLPIFIARQWIRHRTANVNEYSARYSILDKEFYLPSVENLAAQSQSNRQGRGEVLKGDQAKKVLDLLKKDAEQTYDNYETMLNERYDGSVIDEKQVGLARELARMNLTLNTYTQWYWKTDLLNLMNFLRLRADHHAQYEIRAYADAMLDTVKKWVPITYEAFMDYRVGGTEVSSNGKEIIKKLINGEKIDPEKSGLS

SEQ ID NO: 105408 - protein, 287 aa, Unknown
  Bacterial polypetide isolated from the Sargasso Sea
LSEQQKKEIAEQQAQQNTTKRVTSSELEKILYEALPVLDHGFVRVVDYMGDDSSIVQAARVSYGKGTKKVSTDSGLIKYLMRHRHSTPFEMCEIKYHVKLPIFVARQWIRHRTANVNEYSARYSILDKEFYLPSKDNLAAQSTNNRQGRGELINGTQADNILNILKKDAEKTYADYELMLNERYDGSTINENNKGLARELARMNLTLNTYTQWYWKTDLLNLLNFLSLRADSHAQYEIRAYADVMIESLKRWVPITFDAFMDYRVGGMELSSKGKIVIQKNVEGTKM

SEQ ID NO: 105409 - protein, 298 aa, Unknown
  Bacterial polypetide isolated from the Sargasso Sea
MKLTNEQKQEIADQQSQKNTTKRVTSLELEKILYEALPVLDHGFVRVVDYMGDDSSIVQSARVSYGKGTKKVSTDEGLIKYLMRHWHSTPFEMCEIKYHVKLPIFIARQWIRHRTANVNEYSARYSILDKEFYIPAKDQLSAQSASNRQGRGDLITGEQADEVLKILKDDATRTYDNYEKMLNERYDGTTIDKEKTGLARELARMNLTLNSYTQWYWKTDLLNLLNFLFLRADSHAQYEIRVYAETMLNTVKKWVPITHAAFLDYRVGAVHVSANGKKVIQQMAKGEKVSHESSRFIK

SEQ ID NO: 105410 - protein, 204 aa, Unknown
  Bacterial polypetide isolated from the Sargasso Sea
MKLTKEQQEEIKNQQSQSNQTKRVTAPELEKILYEAIPALDYGFVRVIDYMGDDTSIVQSARVSYGKGTKQVSTDKGLIKYLMRHWHSTPFEMCEIKYHVKLPIFIARQWIRHRTANVNEYSARYSILDKEFYLPSQKNLAAQSTSNRQGRGDVLEGKQAEEVLELLKSDAERTYNNYETMLNERFDGSTIDENKKGLARRLAR

SEQ ID NO: 105411 - protein, 123 aa, Unknown
  Bacterial polypetide isolated from the Sargasso Sea
MKLTKEQQEDIKNQQSQCNSTKRVTSPELEKILYEALPALDHGFVRVVDYMGDDTSIVQSARVSYGKGTKQVSTDSGLIKYLMRHWHSTPFEMCEIKYHIKLPIFIARQWIRHRTANVNEYSA

SEQ ID NO: 105412 - protein, 205 aa, Unknown
  Bacterial polypetide isolated from the Sargasso Sea
MKLTKEQQEEIKNQQSQSNQTKRVTAPELEKILYEAIPALDHGFVRVVDYMGDDTSIVQSARVSYGKGTKQVSTDKGLIKYLMRHWHSTPFEMCEIKYHVKLPIFIARQWIRHRTANVNEYSARYSILDKEFYLPSQENLAAQSTSNRQGRGDVLEGKQAEEVLELLKSDAERTYDNYETMLNERFDGSTIDENKKGLARELARM

SEQ ID NO: 105413 - protein, 133 aa, Unknown
  Bacterial polypetide isolated from the Sargasso Sea
MKLTKEQINDIKDQQSQENVTKRVTAPELEKVLYEAMPALDHGFIRVIDYMGDDSSIVQSARVSYGKGTKQVSTDSGLIKYLMRHWHSTPFEMCEIKYHVKLPIFIARQWIRHRTANVNEYSARYSILDKEFY

SEQ ID NO: 105414 - protein, 166 aa, Unknown
  Bacterial polypetide isolated from the Sargasso Sea
MKLTTEQKQEIADQQAQKHETKRVTSPELEKILYEALPVLDHGFVRVVDYMGDDSSIVQSARVSYGKGTKKVSTDEGLIKYLMRHWHSTPFEMCEIKYHVKLPIFIARQWIRHRTANVNEYSARYSILDKEFYIPAKEQLSAQSTINRQGRGNLITGNQADEVLKI

SEQ ID NO: 105415 - protein, 271 aa, Unknown
  Bacterial polypetide isolated from the Sargasso Sea
IRVIDYMGNDTSIVQAARVSYGKGTKQVSTDSGLIKYLMRHWHSTPFEMCEIKYHVKLPIFIARQWIRHRTANVNEYSARYSILDKEFYLPKKEHLAAQSKNNRQGRGEVLEGDQANKVLSLLKDDAERTYDNYETMLNERYDGSVVDENEPGLARELARMNLTLNTYTQWYWKTDLLNLMNFLRLRADSHAQYEIRAYADAMLETLKSWVPITYDAFLDYRVGGTEVSSKGKFLIQKLIKGEKIDMESSGLSKREWNELMEAFNLKDKLI

SEQ ID NO: 105416 - protein, 184 aa, Unknown
  Bacterial polypetide isolated from the Sargasso Sea
MTISEEDKKSVEEERKKSFTTKRATVEDLENSLFTIHPVLDHGLVRVIDYMGDDDAIVQAARVSYGAGTKKAQDDNSLIRYLIRHWHSTPFEMCEIKLHVKLPVFVARQWIRHRTANVNEYSARYSILDKEFYIPDPSNLAAQSKFNNQGRGEILEAEDAQKVLEILKHDSDSSYANYENLLSF

SEQ ID NO: 105417 - protein, 165 aa, Unknown
  Bacterial polypetide isolated from the Sargasso Sea
MKLTKEQAEEIKNQQSQSNQTKRVTVPELENVLYEALPALDHGFVRVVDYMGDDTSIVQSARVSYGKGTKQVSTDKGLIKYLMRHWHSTPFEMCEIKYHIKLPIFIARQWIRHRTANVNEYSARYSILDKEFYLPTQENLAAQSTSNRQGRGDVLEGKQAEEVLE

SEQ ID NO: 105418 - protein, 183 aa, Unknown
  Bacterial polypetide isolated from the Sargasso Sea
MKLTKEQIKDIKEQQSQNNTTKRVTVPELEKVLYEAMPALDHGFIRVIDYMGDDSSIVQSARVSYGKGTKQVSTDSGLIKYLMRHWHSTPFEMCEIKYHVKLPIFIARQWIRHRTANVNEYSARYSILDKEFYLPDPQNLAAQSIANRQGRGDVIEGDQAKEVLELLKNDAERTYDNYETMLN

SEQ ID NO: 105419 - protein, 262 aa, Unknown
  Bacterial polypetide isolated from the Sargasso Sea
MKLTKEQLQEIKDQQSQENSTKRVIAPDLEKVLYEAIPILDHGFIRVVDYMGNDSSIVQAARVSYGKGTKKVNTDAGLIKYLMRHWHSTPFEMCEIKYHVKLPIFIARQWIRHRTANVNEYSARYSILDKEFYLPSPENLAAQSQSNRQGRGDVLEGEDAKKVLDIIKSDSERTYSNYEEMLNERYDGSKIEENKSGLARELARMNLTLNTYTQWYWKTDLLNLMNFLRLRADSHAQYEIRAYADVMLDTLKKMVSTTYEAF

SEQ ID NO: 105420 - protein, 129 aa, Unknown
  Bacterial polypetide isolated from the Sargasso Sea
MKLTTEQAQEIKDQQNQDNKTKRVTAPELEKILYEAIPLLDHGFIRVVDYMGDDTSIVQAARVSYGKGTKKVSTDAGLIKYLMRHWHSTPFEMCEIKYHVKLPIFIARQWIRHRTANVNEYSARYSILD

SEQ ID NO: 105421 - protein, 214 aa, Unknown
  Bacterial polypetide isolated from the Sargasso Sea
MTAKKLKKDSEKDLKSLRRIRNITSRATVKKLENVIYKKFKVLDHGFVRLIDYMGDDSSIVQAARVSYGKGTKKINEDKNLINYLLSHRHSTPFEMNEIKLHIKLPIFVARQWIRHRTANVNEYSARYSILEKEFYIPELKHMQTQSSVNNQGRGEKIDKENALKKRQVIKKHSESSFEKYSYLLNENLVGETLDLNNVGLARELARMTLPLNA

SEQ ID NO: 105422 - protein, 131 aa, Unknown
  Bacterial polypetide isolated from the Sargasso Sea
MKLNKEQQQEIKELQSQEFKTKRVTAPELEKVLFEAIPVLDHGFIRVIDYMGDDTSIVQAARVSYGKGTKKVSTDSGLIKYLMRHWHSTPFEMCEIKYHVKLPIFIARQWIRHRTANVNEYSARYSILDKE

SEQ ID NO: 105423 - protein, 217 aa, Unknown
  Bacterial polypetide isolated from the Sargasso Sea
MKLTEDQIKEIKEQQSQQNSTKRVTAPELEKILYDAIPILDHGFIRVIDYMGDDTSIVQAARVSYGKGTKKVSTDSGLIKYLMRHWHSTPFEMCEIKYHIKLPIFIARQWIRHRTANVNEYSARYSILDKEFYLPKAEHLAAQSQNNRQGRGQVLEGDKAKKVLDLLKSDAEQTYKNYEMMLNEKYDGSTIDKNSPGLARELARMNLTLNTYTQWYW

SEQ ID NO: 105424 - protein, 233 aa, Unknown
  Bacterial polypetide isolated from the Sargasso Sea
MRHWHSTPFEMCEIKYHIKLPIFIARQWIRHRTANVNEYSARYSILDKEFYLPAKENLAAQSISNRQGRGDVLEGKQAEDVLELLKSDAERTYDNYETMLNERFDGSTIDENKKGLARELARMNLTLNTYTQWYWKTDLLNLMNFLRLRADSHAQYEIRVYADIMLDTLKKWVPITYEAFMDYRVGGTEVSAKGKTVLQKFLKNKNVSLESSGLSKREWNELMAAFDLKERIL

SEQ ID NO: 105425 - protein, 217 aa, Unknown
  Bacterial polypetide isolated from the Sargasso Sea
MKLTTEQAQEIKDQQNQDNKTKRVTAPELEKILYEAIPLLDHGFIRVVDYMGDDTSIVQAARVSYGKGTKKVSTDSGLIKYLMRHWHSTPFEMCEIKYHVKLPIFIARQWIRHRTANVNEYSARYSILDKEFYLPAQEHLAAQSKSNRQGRGDVLEGDQAKKVLDLLKNDAERTYDNYEMMLNERYDGSTIDENGVGLARELARMNLTLNTYTQWYW

SEQ ID NO: 105426 - protein, 233 aa, Unknown
  Bacterial polypetide isolated from the Sargasso Sea
MRHRHSTPFEMCEIKYHIKLPIFIARQWIRHRTANVNEYSARYSIMDKEFYVPSKENLAAQSSNNRQGRGDLINGKQADNILKILKEDAERNYQHYEEMLNEKYDGSIIDDKKQGLARELARMNLTLNSYTQWYWKTDLLNLLNFLALRADSHAQFEIREYANTMLDTVKKWVPITFDAFIDYRVGGMELSAKGKIVIQKMIKGEKCEINSSGLSKREWNELMDSFGFKQNLV

SEQ ID NO: 105427 - protein, 272 aa, Unknown
  Bacterial polypetide isolated from the Sargasso Sea
MKLTKEQSEEIKNQQSQSNQTKRVTVPELEDILYEAIPALDHGFVRVVDYMGDDTSIVQSARVSYGKGTKKVSTDKGLIKYLMRHWHSTPFEMCEIKYHIKLPIFIARQWIRHRTANVNEYSARYSILDKEFYLPTQENLATQSTSNRQGRGDVLEGEQAKEVLEILKNDAVRTYDNYETMLNERFDGSTIDENKKGLARELARMNLTLNTYTQWYWKTDLLNLMNFLRLRADSHAQYEIRVFADIMLDTVKKWVPITHEAFMDYRVGGTEV

SEQ ID NO: 105428 - protein, 216 aa, Unknown
  Bacterial polypetide isolated from the Sargasso Sea
MKLTSEQAQEIKDQQSQEYKTKRVTAPELEKILYEALPILDHGFIRVVDYMGDDTSIVQSARVSYGKGTKKVSTDEGLIKYLMRHWHSTPFEMCEIKYHVKLPIFIARQWIRHRTANVNEYSARYSILDKEFYLPAPEHLAAQSQSNRQGRGDVLEGDKAKQVLELLKGDAEQTYNNYQTMLNERYDGSVIDENAVGLARELARMNLTLNTYTQWY

SEQ ID NO: 105429 - protein, 255 aa, Unknown
  Bacterial polypetide isolated from the Sargasso Sea
ARVSYGKGTKQVSTDSGLIKYLMRHWHSTPFEMCEIKYHVKLPIFIARQWIRHRTANVNEYSARYSILDKEFYLPDPENLAAQSVANRQGRGDVINGEQAKEVLELLKNDAERTYHNYETMLNQRYDGSTIDENKKGLARELARMNLTLNTYTQWYWKTDLLNLMNFLRLRADHHAQYEIRVYADIMLDTLKRWVPITYDAFMDYRVGGTEVSAKGKIIIQKLIKGKEVNFDNSGLSKREWNELMETFEIKDKIV

SEQ ID NO: 105430 - protein, 253 aa, Unknown
  Bacterial polypetide isolated from the Sargasso Sea
MKLTKEQAQEIRDQQSQENLTKRVNSPELEKVLYEAIPILDHGFIRVVDYMGNDTSIVQAARVSYGKGTKKVNTDSGLIKYLMRHWHSTPFEMCEIKYHIKLPIFIARQWIRHRTANVNEYSARYSILDKEFYLPNSENLAAQSQSNRQGRGDVLQGDQAKKVLELLKSDAEKTYSNYEEMLNQRYDGTVIDENKIGLARELARMNLTLNTYTQWYWKTDLLNLMNFLRLRADHHAQYEIRAYADAMLDTLKK

SEQ ID NO: 105431 - protein, 165 aa, Unknown
  Bacterial polypetide isolated from the Sargasso Sea
MKLTKEQKLEIEDQQSQKNQTKRVTAPELEKILYEAIPILDHGFIRVVDYMGNDSSIVQAARVSYGKGTKKVSTDAGLIKYLMRHWHSTPFEMCEIKYHVKLPIFIARQWIRHRTANVNEYSARYSILDKEFYLPAPEHLAAQSKSNRQGRGNILEGEKAKEVLN

SEQ ID NO: 105432 - protein, 153 aa, Unknown
  Bacterial polypetide isolated from the Sargasso Sea
MKLTKEQKQEIADQQSQKNQTKRVTSPELEKILYEAIPVLDHGFVRVVDYMGDDTSIVQSARVSYGKGTKKVSTDEGLIKYLMRHWHSTPFEMCEIKYHVKLPIFIARQWIRHRTANVNEYSARYSILDKEFYIPAKEQLSAQSTINRQGRGD

SEQ ID NO: 105433 - protein, 154 aa, Unknown
  Bacterial polypetide isolated from the Sargasso Sea
MRSGQNQTLRAVSVGMENHLYKVYPVLDHGFVRVVDYMGDDAAICQAARVSYGRGTKSVQNDEGLIRYLMRHWHSTPFEMCEVKLHVKLPVFVARQWIRHRTANVNEYSARYSILDREFYIPEPEALAAQSVINNQGRGEVLTGEEAEKVLRLL

SEQ ID NO: 105434 - protein, 252 aa, Unknown
  Bacterial polypetide isolated from the Sargasso Sea
ARVSYGKGTKKISNDQGLINYLMRHRHSTPFEMCEIKFHVKLPIFIARQWIRHRTANVNEYSARYSVLDREFYVPDPKNLAVQSDSNRQGRGETLTAEDAQRVLEILRGDAESTYNHYIEMLNENESGEVIDKSKKGLTRELARMNLTLNTYTQWYWKIDLHNLLHFLSLRADEHAQYEIRAYAEEILKVVKRWCPITYQAFINYRIKGVALSGQALEVIKAIVGGEKIELENSGLSKREWRELMATLELDE

SEQ ID NO: 105435 - protein, 303 aa, Unknown
  Bacterial polypetide isolated from the Sargasso Sea
MKLTKEQAQEIKDQQSQENITKRVGAPELEKILYEVLPILDHGFIRVVDYMGNDTSIVQAARVSYGKGTKKVNTDSGLIKYLMRHWHSTPFEMCEIKYHIKLPIFIARQWIRHRTANVNEYSARYSILDKEFYLPAPEHLAAQSQSNRQGRGNILEGEKAQKVLDLLKGDAEQTYSNYEMMLNERYDGSVIDKNAVGLARELARMNLTLNTYTQWYWKTDLLNLMNFLKLRADHHAQYEIRVYADAMLDTLKKWVPITYEAFMDYRVGGLEISANGKKVIQKLIKGEEISIEHSGLSKESGMN

SEQ ID NO: 105436 - protein, 197 aa, Unknown
  Bacterial polypetide isolated from the Sargasso Sea
MKLTKEQEQEIKDLQSQENKTKRVVATELEKILYDAISVLDHGFVRVIDYMGDDTSIVQAARVSYGKGTKKVSTDSGLIKYLMRHWHSTPFEMCEIKYHVKLPIFIARQWIRHRTANVNEYSARYSILDKEFYLPKNEHLAAQSKSNRQGRGEVLQGEQAKKVLSLLKNDAERTYENYETMLNERYDGSVVDEKETG

SEQ ID NO: 105437 - protein, 302 aa, Unknown
  Bacterial polypetide isolated from the Sargasso Sea
HKSQSNQTKRVTAPDLEKILYEAIPALDHGFVRVVDYMGDDTSIVQSARVSYGKGTKQVSTDKGLIKYLMRHWHSTPFEMCEIKYHVKLPIFIARQWIRHRTANVNEYSARYSILDKEFYLPSHEDLAAQSTSNRQGRGDVLEGKQAEEVLELLKSDAERTYENYETMLNERFDGSTIDENKKGLARELARMNLTLNTYTQWYWKTDLLNLMNFLRLRADSHAQYEIRVYADIMLDTVKKWVPITYDAFMDYRVGGTEVSAKGKVIIQKLIKGEDVDTESSGLSKREWNELMIAFDLNDKII

SEQ ID NO: 105438 - protein, 255 aa, Unknown
  Bacterial polypetide isolated from the Sargasso Sea
MKLTKEQTEEIKNQQSQSNQTKRVTVPELENILYEAIPALDHGFVRVVDYMGDDTSIVQSARVSYGKGTKQVSTDKGLIKYLMRHWHSTPFEMCEIKYHIKLPIFIARQWIRHRTANVNEYSARYSILDKEFYLPLQENLAAQSTSNRQGRGDVLEGKQAEEVLELLKSDAERTYDNYETMLNERFDGSTIDENKKGLARELARMNLTLNTYTQWYWKTDLLNLMNFLRLRADSHAQYEIRVYADIMLDTGKNGS

SEQ ID NO: 105439 - protein, 212 aa, Unknown
  Bacterial polypetide isolated from the Sargasso Sea
MKLTKEQQQEIKDLQSQENKTKRVIAPELEKILFEVIPILDHGFVRVIDYMGDDTSIVQAARVSYGKGTKKVSTDAGLIKYLMRHWHSTPFEMCEIKYHIKLPIFIARQWIRHRTANVNEYSARYSILDKEFYLPSQENLAAQSKNNRQGRGEIISGEQAKEVLKLLKTDAERTYDNYETMLNERYDGSVIDEKKSGLARELARMNLTLNTY

SEQ ID NO: 105440 - protein, 237 aa, Unknown
  Bacterial polypetide isolated from the Sargasso Sea
MKLTKKQAEEIKNQQSQTNQTKRVTAPELEKILYEAIPALDHGFVRVIDYMGDDTSIVQSARVSYGKGTKQVSTDKGLIKYLMRHWHSTPFEMCEIKYHVKLPIFIARQWIRHRTANVNEYSARYSILDKEFYLPSKENLAAQSISNRQGRGDVLEGKQAEEVLELLKSDAERTYDNYETMLNERFDGSTIDENKKGLARELARMNLTLNTYTQWYWKTDLLNLMNFLRLRADSHAQ

SEQ ID NO: 105441 - protein, 284 aa, Unknown
  Bacterial polypetide isolated from the Sargasso Sea
LYEAIPILDHGFIRVVDYMGDDTSIVQAARVSYGKGTKKVSTDAGLIKYLMRHWHSTPFEMCEIKYHIKLPIFIARQWIRHRTANVNEYSARYSILDKEFYLPSAEHLAAQSQINRQGRGDVLKGEQATKVLDLLKNDAERTYNNYEEMLNQRYDGTVIDEKKVGLARELARMNLTLNTYTQWYWKTDLLNLMNFLRLRADRHAQYEIREYADAMLDTVKKWVPITYDAFMDYRVGGTEVSAKGKKVIQQLIKGEEVSIEQSGLSKREWNELMEAFDLEDKSLK

SEQ ID NO: 105442 - protein, 284 aa, Unknown
  Bacterial polypetide isolated from the Sargasso Sea
ILYEAIPILDHGFIRVVDYMGDDSSIVQSARVSYGKGTKKVSTDAGLIKYLMRHRHSTPFEMCEIKYHVKLPIFVARQWIRHRTANVNEYSARYSILDKEFYLPSKENLAAQSTSNRQGRGTVINGKQADNILEMLKKDAEQTYNNYETMLNERYDGSIIDKKNQGLARELARMNLTLNTYTQWYWKTDLLNLLNFLSLRADSHAQYEIRAYADAMTETLKKWVPITFEAFMDYRVGAMELSAKGKAVIQKMIKGESCDFESSKLSKREWNELMQSLGFNEKML

SEQ ID NO: 105443 - protein, 152 aa, Unknown
  Bacterial polypetide isolated from the Sargasso Sea
MKLTKEQSADIKNQQSQSNSTKRVTVPLLEEVLYEAIPALDHGFVRVVDYMGDDTSIVQSARVSYGKGTKKVSTDAGLIKYLMRHWHSTPFEMCEIKYHIKLPIFIARQWIRHRTANVNEYSARYSILDKEFYLPTIENLAAQSSSNRQGRG

SEQ ID NO: 105444 - protein, 265 aa, Unknown
  Bacterial polypetide isolated from the Sargasso Sea
MGDDSSIVQSARVSYGKGTKKVSTDEGLIKYLMRHWHSTPFEMCEIKYHVKLPIFIARQWIRHRTANVNEYSARYSILDKEFYIPSKDQLSAQSTSNRQGRGDLITGNQADEVLKILKDDATRTYDNYEKMLNERYDGTTIDENKAGLARELARMNLTLNSYTQWYWKTDLLNLLNFLFLRADSHAQYEIRVYAEAMLDTVKKWVPITHAAFLDYRVGAVHVSAKGKKVIQLMAKGEKVSHESSGLSKREWNELMNSFGFTEKTV

SEQ ID NO: 105445 - protein, 118 aa, Unknown
  Bacterial polypetide isolated from the Sargasso Sea
MPVNKEQLEEIEALRSEISETARVTAPELEAVLYKPIEVLDHGFIRVIDYMGDDSSIVQSARVSYGKGTKKISNDKGLIKYLMRHRHSTPFEMCEIKFHIKLPIFIARQWIRHRTANV

SEQ ID NO: 105446 - protein, 134 aa, Unknown
  Bacterial polypetide isolated from the Sargasso Sea
MKLTKEQSDEINNQQSQSNETKRVTAPELENILYEAIPALDHGFVRVVDYMGDDTSIVQSARVSYGKGTKQVSTDKGLIKYLMRHWHSTPFEMCEIKYHIKLPIFIARQWIRHRTANVNEYSARYSILDKEFYL

SEQ ID NO: 105447 - protein, 279 aa, Unknown
  Bacterial polypetide isolated from the Sargasso Sea
MPALDHGFVRVVDYMGDDTSIVQSARVSYGKGTKQVSTDAGLIKYLMRHWHSTPFEMCEIKYHIKLPIFIARQWIRHRTANVNEYSARYSILDKEFYLPTKENLAAQSTSNRQGRGDILEGDQANEVLELLKNDAERTYANYETMLNEKYDGSTIDEDKKGLARELARMNLTLNTYTQWYWKTDLLNLMNFLRLRADHHAQYEIRVYADIMLDTLKKWVPITYDAFMDYRVGGTEVSAKGKIIIQNLAKGKKISLEDSGLSKREWNELMEAFDFKDRLI

SEQ ID NO: 105448 - protein, 264 aa, Unknown
  Bacterial polypetide isolated from the Sargasso Sea
VTVTELENILYDAIPALDHGFVRVVDYMGDDTSIVQSARVSYGKGTKQVSTDKGLIKYLMRHWHSTPFEMCEIKYHIKLPIFIARQWIRHRTANVNEYSARYSILDKEFYLPSPENLAAQSTSNRQGRGDILEGKQAKEVLELLKRDAETSYDDYETMLNERFDGSTIDENKKGLARELARMNLTLNTYTQWYWKTDLLNLMNFLRLRADSHAQYEIRVYADIMLDTLKKWVPITHEAFMDYRVGGIEVSSKGKLILQKLINGK

SEQ ID NO: 105449 - protein, 271 aa, Unknown
  Bacterial polypetide isolated from the Sargasso Sea
MKLTKEQIKEIRDQQTQQNKTKRVTVPELESILFEAMPALDHGFVRVIDYMGDDSSIVQSARVSYGKGTKQVSSDSGLIKYLMRHWHSTPFEMCEIKYHIKLPIFIARQWIRHRTANVNEYSARYSILDKEFYLPTAENLAAQSSSNRQGRGDILDDKQAKEVLELLKNDAEQTYNNYETMLNQRYDGSTIDENKKGLARELARMNLTLNTYTQWYWKTDLLNLMNFLRLRADSHAQYEIRVFADIMLDTLKRWVPITYEAFMDYRVGGTE

SEQ ID NO: 105450 - protein, 281 aa, Unknown
  Bacterial polypetide isolated from the Sargasso Sea
MKLTKEQSAEIKNQQSQSNKTKRVVVSELENILYEAIPALDHGFVRVVDYMGDDTSIVQAARVSYGKGTKQVSTDSGLIKYLMRHWHSTPFEMCEIKYHIKLPIFIARQWIRHRTANVNEYSARYSILDKEFYLPASENLAAQSTSNRQGRGDVLEGTQAKEVLELLKNDAERTYSNYETMLNERYDGSTIDDNKKGLARELARMNLTLNTYTQWYWKTDLLNLMNFLRLRADHHAQYEIRVYADIMLDTLKKWVPITHEAFMDYRVGGTEVSAKGNVVIQ

SEQ ID NO: 105451 - protein, 120 aa, Unknown
  Bacterial polypetide isolated from the Sargasso Sea
MKNKQSNEIKNLRSKVKKTLRVTSSSLENILYKPFKVLDSGFIRVIDYMGDDSAIVQSARVSYGEGTKKVSNDKGLIRYLMKNWHTTPFEMCEIKFHIKLPIFIARQWIRHRTANVNEYS

SEQ ID NO: 105452 - protein, 132 aa, Unknown
  Bacterial polypetide isolated from the Sargasso Sea
MKLTKEQKQEIADQQSQKNETKRVTSPELEKILYEALPVLDHGFVRVIDYMGDDTSIVQSARVSYGKGTKKVSTDEGLIKYLMRHWHSTPFEMCEIKYHVKLPIFIARQWIRHRTANVNEYSARYSILDKEF

SEQ ID NO: 105453 - protein, 168 aa, Unknown
  Bacterial polypetide isolated from the Sargasso Sea
MKLTKEQEKEIKDLQSQHHQTKRVTAPELEKILYEPISILDHGFVRVIDYMGDDTSIVQAARVSYGKGTKQVSTDSGLIKYLMRHWHSTPFEMCEIKYHVKLPIFIARQWIRHRTANVNEYSARYSILDKEFYLPSPEHLAAQSKNNRQGRGKIIEGEQAKKVLDLLK

SEQ ID NO: 105454 - protein, 305 aa, Unknown
  Bacterial polypetide isolated from the Sargasso Sea
MQINSPKKTKQKGLLPPELEKILYEALPVLDHGFVRVVDYMGDDTSIVQSARVSYGKGTKKVSTDEGLIKYLMRHWHSTPFEMCEIKYHVKLPIFIARQWIRHRTANVNEYSARYSILDKEFYLPAKEQLSAQSTSNRQGRGDLITGKQADEVLQILKDDATRTYGNYEKMLNEKFDGTTIDKNKAGLARELARMNLTLNSYTQWYWKTDLLNLLNFLFLRADSHAQYEIRVYADKMLETVKKWVPITHAAFLDYRVGAVHVSAKGKKVIQQMAKGEKIDIESSGLSKREWNELMTSFGFTEKQV

SEQ ID NO: 105455 - protein, 251 aa, Unknown
  Bacterial polypetide isolated from the Sargasso Sea
KEQEQEIKEQQSQETSTKRVTAPNLEKILYEAIPILDHGFIRVVDYMGNDTSIVQAARVSYGKGTKKVSTDAGLIKYLMRHWHSTPFEMCEIKYHVKLPIFIARQWIRHRTANVNEYSARYSILDKEFYLPKTENLAAQSQSNRQGRGDVLRGEQAKKVLELLKNDAEQTYDNYEMMLNERYDGSVINEKEVGLARELARMNLTLNTYTQWYWKTDLLNLMNFLRLRADHHAQYEIRTYADAMLDTLKRMG

SEQ ID NO: 105456 - protein, 178 aa, Unknown
  Bacterial polypetide isolated from the Sargasso Sea
MTLSQEQKNAILEQQTQKNTTKRVTSPELENILYEAIPVLDHGFVRVVDYMGDDSSVVQAARVSYGKGTKKVSTDSGLIKYLMRHRHSTPFEMCEIKYHVKLPIFVARQWIRHRTANVNEYSARYSILDKEFYLPSKENLAAQSKSNRQGRGEVINGKQADNILDILKKGCRTNLCKL

SEQ ID NO: 105457 - protein, 152 aa, Unknown
  Bacterial polypetide isolated from the Sargasso Sea
MKLTKEQSEEIKNQQSQSNQTKRVTAPELEKILYEAIPALDHGFVRVIDYMGDDTSIVQSARVSYGKGTKQVSTDKGLIKYLMRHWHSTPFEMCEIKYHVKLPIFIARQWIRHRTANVNEYSARYSILDKEFYLPSTENLAAQSSSNRQGRG

SEQ ID NO: 105458 - protein, 135 aa, Unknown
  Bacterial polypetide isolated from the Sargasso Sea
MKLTKEQKLEILDQQSQKNVTKRVTSPELEKILYEAMPVLDHGFVRVVDYMGDDTSIVQSARVSYGKGTKKVSTDSGLIKYLMRHRHSTPFEMCEIKYHIKLPIFIARQWIRHRTANVNEYSARYSIMDKEFYVP

SEQ ID NO: 105459 - protein, 165 aa, Unknown
  Bacterial polypetide isolated from the Sargasso Sea
MKLTKEQKQEILDQQSQKNVTKRVTSPELEKILYEAMPVLDHGFVRVVDYMGDDTSIVQSARVSYGKGTKKVSTDSGLIKYLMRHRHSTPFEMCEIKYHIKLPIFIARQWIRHRTANVNEYSARYSIMDKEFYVPSKENLAAQSLNNRQGRGDLINGKAADSILK

SEQ ID NO: 105460 - protein, 233 aa, Unknown
  Bacterial polypetide isolated from the Sargasso Sea
MRHRHSTPFEMCEIKYHIKLPIFIARQWIRHRTANVNEYSARYSIMDKEFYVPSKENLAAQSTNNRQGRGDLINGTQADSILKILKEDAERNYKHYEEMLNEKYDGSIIDDKKQGLARELARMNLTLNSYTQWYWKTDLLNLLNFLSLRADSHAQYEIREYANAMMDSVKKWVPITYDAFIDYRVGGMELSAKGKIVIQKMIKGEKCDISSSGLSKREWNELMESFGFKQHLA

SEQ ID NO: 105461 - protein, 242 aa, Unknown
  Bacterial polypetide isolated from the Sargasso Sea
MKLTKDQINEIKALQSQSNPTKRVIAPDLEKILYEAIPALDHGFVRVVDYMGDDASIVQAARVSYGKGTKQVSTDKGLIKYLMRHWHSTPFEMCEIKYHIKLPIFIARQWIRHRTANVNEYSARYSILDKEFYLPSAENLAAQSKSNRQGRGDLLEGAQAKEVLELLKNDAERTYANYETMLNEKYDGSTIDTKKKGLARELARMNLTLNTYTQWYWKTDLLNLMNFLRLRADHHAQYEIRV

SEQ ID NO: 105462 - protein, 122 aa, Unknown
  Bacterial polypetide isolated from the Sargasso Sea
MKLTKEQKQEILEQQSQKNITKRVTSPELEKILYDALPVLDHGFVRVVDYMGDDTSIVQSARVSYGKGTKKVSTDSGLIKYLMRHRHSTPFEMCEIKYHVKLPIFVARQWIRHRTANVNEYS

SEQ ID NO: 105463 - protein, 230 aa, Unknown
  Bacterial polypetide isolated from the Sargasso Sea
KVSTDSGLIKYLMRHRHSTPFEMCEIKYHIKLPIFIARQWIRHRTANVNEYSARYSIMDKEFYVPERENLAAQSTSNRQGRGDLINGKQADNILKILKEDAERNYQHYEEMLNEKYDGSIIDDKKQGLARELARMNLTLNSYTQWYWKTDLLNLLNFLALRADSHAQYEIREYANVMLNTVKKWVPTTYDAFIDYRVGGMELSAKGKIVIQKMIKGEKCDIETSGLSKRE

SEQ ID NO: 105464 - protein, 224 aa, Unknown
  Bacterial polypetide isolated from the Sargasso Sea
MPLSPEQTEEINAQREQLAKTRRVVSAGMEEKLYTAFQVLDHGFVRVVDYMGDDSAICQAARVSYGKGTKSVQNDEGLIRYLMRHWHSTPFEMCEIKLHVKLPVFVARQWIRHRTANVNEYSARYSILDREFYIPSPEHIAAQSVINNQGRGETLKDEEAQTVLELLKADSARCYDNYEKMISQDGQQGLARELARMNLPANIYTQWYWKVDLHNLLHFLRLRA

SEQ ID NO: 105465 - protein, 144 aa, Unknown
  Bacterial polypetide isolated from the Sargasso Sea
MKLTKEQINEIKALQSQSNQTKRVIAPELEKILYEAIPALDHGFVRVVDYMGDDASIVQAARVSYGKGTKQVSTDKGLIKYLMRHWHSTPFEMCEIKYHIKLPIFIARQWIRHRTANVNEYSARYSILDKEFYLPSPENLAAQS

SEQ ID NO: 105466 - protein, 128 aa, Unknown
  Bacterial polypetide isolated from the Sargasso Sea
MTKEQKQEIADQQSQKNTTKRVTSPELEKILYEAIPVLDHGFVRVVDYMGDDSSIVQSARVSYGKGTKKVSTDEGLIKYLMRHWHSTPFEMCEIKYHVKLPIFIARQWIRHRTANVNEYSARYSILDK

SEQ ID NO: 105467 - protein, 153 aa, Unknown
  Bacterial polypetide isolated from the Sargasso Sea
RVVDYMGNDNSIVQAARVSYGKGTKQVSTDSGLIKYLMRHWHSTPFEMCEIKYHIKLPIFIARQWIRHRTANVNEYSARYSILDKEFYLPASENLAAQSLSNRQGRGDVLEGDQAKEVLDLLKNDAEQTYKNYEIMLNQKYDGSSIDDNKKWF

SEQ ID NO: 105468 - protein, 192 aa, Unknown
  Bacterial polypetide isolated from the Sargasso Sea
MKLTKEQLQEIKDQQDQENKTKRVTAQELEKILYEAIPVLDHGFIRVVDYMGNDTSIVQAARVSYGKGTKKVNTDAGLIKYLMRHWHTTPFEMCEIKYHVKLPIFIARQWIRHRTANVNEYSARYSILDKEFYLPNNENLAAQSKNNRQGRGEVLEGNQAKEVLDLLKKDAEKTYNDYEMMLNERFDGTTIE

SEQ ID NO: 105469 - protein, 166 aa, Unknown
  Bacterial polypetide isolated from the Sargasso Sea
RRHYHTTPSEMIELKFHCAMPMFVARQWIRHRTASVNEYSGRYSLMPLLFYKPESEHFSLQSADNAQGRQNDAASNELYKKAVKHWEKMRTEVSQGYRWMVEEDVARELARIDLPLSTYTQWYWKIDLHNLFHFLTLRDDPHAQWEIQAFARVMAGNAKKGSSIEL

SEQ ID NO: 105470 - protein, 231 aa, Unknown
  Bacterial polypetide isolated from the Sargasso Sea
HRHSTPFEMCEIKYHVKLPIFVARQWIRHRTANVNEYSARYSILDKEFYLPSKENLAAQSTINRQGRGDLINGKQADSILSILKKDAEQTYANYELMLNEKYDGSKINESNKGLARELARMNLTLNTYTQWYWKTDLLNLLNFLSLRADSHAQYEIRAYADVMIDSLKRWVPITFDAFMDYRVGGMELSAKAKIIIQKMVKGENCKFENSNLSKREWNELMESFGFTEKII

SEQ ID NO: 105471 - protein, 180 aa, Unknown
  Bacterial polypetide isolated from the Sargasso Sea
MKLTKEQTLEIKEQQSQENKTKRVTAPELEKILYDAIPILDHGFIRVVDYMGDDTSIVQAARVSYGKGTKKISTDAGLIKYLMRHWHSTPFEMCEIKYHVKLPIFIARQWIRHRTANVNEYSARYSILDKEFYLPELEHLAAQSQINRQGRGDVLKGDQAKKVLDLLKNDAERTYSNYET

SEQ ID NO: 105472 - protein, 291 aa, Unknown
  Bacterial polypetide isolated from the Sargasso Sea
MTLSEEQKKDIQNQRNKFNQTRRSISKGMEDNLYSINKILDHGFIRVIDYMGNDDSIVQAARVSYGEGTKKSRDDKSLIFYLMRHWHSTPFEMCEVKFHVKLPVFVARQWIRHRTANVNEYSARYSILDKEFYIPKFENLASQSSSNNQGRGEKLDEEEASRVIEILKNDSLKNYENYVEMLSQDNKKGLARELARMNLPTNIYTQWYWKTDLHNLFNFIRLRNDKHAQYEIRVYAEAIAKIVKSWVPFAYEAFEQYQLNSSQLSANGLSCLKRIIGGEDVAKKHLAWKKR

SEQ ID NO: 105473 - protein, 111 aa, Unknown
  Bacterial polypetide isolated from the Sargasso Sea
MNKNKKENLKEKSFQTYRPVSKELEKILYKPLKVLDRGFIRVVDYMGNDASVVQAARVSYGKGTKKKSEDNNLIRYLLRHKHTTPFEMCEIKLHIKLPIFIARPMDKTQNC

SEQ ID NO: 105474 - protein, 246 aa, Unknown
  Bacterial polypetide isolated from the Sargasso Sea
MKLTKEQSEEIKNQQLQSSQTKRVTAPELEKILYEALPALDHGFVRVVDYMGDDTSIVQSARVSYGKGTKQVSTDKGLIKYLMRHWHSTPFEMCEIKYHIKLPIFIARQWIRHRTANVNEYSARYSILDKEFYLPAKENLAAQSISNRQGRGDVLEGKQAEEVLNLLKSDAERTYDNYETMLNEKYDGSKIDENKKGLARELARMNLTLNTYTQWYWKTDLLNLMNFLRLRADSHAQYEIRVYADI

SEQ ID NO: 105475 - protein, 187 aa, Unknown
  Bacterial polypetide isolated from the Sargasso Sea
MKLTKEQANEIKDQQSQSNKTKRVTAPELEKIIYEAIPILDHGFIRVVDYMGDDTSVVQAARVSYGKGTKKVSTDSGLIKYLMRHWHSTPFEMCEIKYHIKLPIFIARQWIRHRTANVNEYSARYSILDKEFYLPEAEHLAAQSQINRQGRGDVLKGEQAKKVLDLLKYDAERTYKNYEQMLNERYD

SEQ ID NO: 105476 - protein, 301 aa, Unknown
  Bacterial polypetide isolated from the Sargasso Sea
QSQSNETKRVTAPELEKILYEAIPALDHGFVRVVDYMGDDTSIVQSARVSYGKGTKQVSTDKGLIKYLMRHWHSTPFEMCEIKYHVKLPIFIARQWIRHRTANVNEYSARYSILDKEFYLPSKENLAAQSTSNRQGRGDVLEGKQAEEVLELLKSDAERTYDNYETMLNERFDGSTINENKKGLARELARMNLTLNTYTQWYWKTDLLNLMNFLRLRADSHAQYEIRVYADIMLDTVKKWVPITYDAFMDYRVGGTEVSAKGKLIIQKLIKGENVDVESSGLSKREWNELMNAFDLKDKLI

SEQ ID NO: 105477 - protein, 258 aa, Unknown
  Bacterial polypetide isolated from the Sargasso Sea
HGFVRVVDYMGDDTSIVQSARVSYGKGTKQVSTDKGLIKYLMRHWHSTPFEMCEIKYHIKLPIFIARQWIRHRTANVNEYSARYSILDKEFYLPTQENLAAQSTSNRQGRGDVLEGKQAEEVLELLKSDAERTYDNYETMLNERFDGSTIDENKKGLARELARMNLTLNTYTQWYWKTDLLNLMNFLRLRADSHAQYEIRVYADIMLETVKKWVPITYDAFMDYRVGGTEVSAKGKVIIQKLIKGENIDIDSSDISKR

SEQ ID NO: 105478 - protein, 272 aa, Unknown
  Bacterial polypetide isolated from the Sargasso Sea
FIRVIDYMGDDSSIVQSARVSYGKGTKQVSTDSGLIKYLMRHWHSTPFEMCEIKYHVKLPIFIARQWIRHRTANVNEYSARYSILDKEFYLPDPQNLAAQSIANRQGRGDVIEGDQAKEVLELLKNDAERTYDNYETMLNQKFDGSTIDENKKGLARELARMNLTLNTYTQWYWKTDLLNLMNFLRLRADHHAQYEIRVYADIMLDTLKKWVPITYDAFMDYRVGGTEVSAKGKVTIQKLLKGEEINLEQSGLSKREWNELMEAFEITDKIV

SEQ ID NO: 105479 - protein, 267 aa, Unknown
  Bacterial polypetide isolated from the Sargasso Sea
DYMGDDTSIVQSARVSYGKGTKKVSTDTGLIKYLMRHWHSTPFEMCEIKYHVKLPIFIARQWIRHRTANVNEYSARYSILDKEFYLPSSENLAAQSSSNRQGRGDVLEGEQAKEVLKLLKNDAERTYDNYETMLNERFDGSKIDENKKGLARELARMNLTLNTYTQWYWKTDLLNLMNFLRLRADHHAQYEIRIYADIMLNTLKSWVPITYEAFMDYRVGGTEVSAKGKEIIKKIINGENPSLEESGLSKREWNELMEAFSIRNKLI

SEQ ID NO: 105480 - protein, 286 aa, Unknown
  Bacterial polypetide isolated from the Sargasso Sea
MKLTKEQTEEIKNQQLQNNSTKRVTSPELEKILYEAMPALDHGFVRVVDYMGDDTSIVQSARVSYGKGTKKVSTDSGLIKYLMRHWHSTPFEMCEIKYHVKLPIFIARQWIRHRTANVNEYSARYSILDKEFYLPNLNNLAAQSTSNRQGRGNILEGDQAKKVLELLKDDAERTYNNYETMLNERFDGSTIDENKKGLARELARMNLTLNTYTQWYWKTDLLNLMNFLRLRADHHAQYEIRVYADIMLNTLKKWVPITYEAFMDYRVGGTEVSSKGKKIIQKLIKG

SEQ ID NO: 105481 - protein, 283 aa, Unknown
  Bacterial polypetide isolated from the Sargasso Sea
MKLTDEQIKEIKDQQSQQNSTKRVTAPELEKILYDAIPILDHGFIRVVDYMGDDTSVVQSARVSYGKGTKKVSTDAGLIKYLMRHWHSTPFEMCEIKYHVKLPIFIARQWIRHRTANVNEYSARYSILDKEFYLPEPQHLAAQSQSNRQGRGDILDAEKAKKVLNLLKGDAEQTYNNYETMLNERYDGSTIDENAVGLARELARMNLTLNTYTQWYWKTDLLNLMNFLRLRADNHAQYEIRAYADAMLDTLKKWVPITYEAFMDYRVGGTRSFCKRKNYYSKT

SEQ ID NO: 105482 - protein, 153 aa, Unknown
  Bacterial polypetide isolated from the Sargasso Sea
MKLTKEQAAEIKNQQSQSNQTKRVTVPELEKILYEAIPALDHGFVRVVDYMGDDTSIVQSARVSYGKGTKQVSTDKGLIKYLMRHWHSTPFEMCEIKYHIKLPIFIARQWIRHRTANVNEYSARYSILDKEFYLPTQENLAAQSTSNRQGRGN

SEQ ID NO: 105483 - protein, 266 aa, Unknown
  Bacterial polypetide isolated from the Sargasso Sea
MTPEQKQEIADQQSQKNQTKRVTSPELEKILYEALPVLDHGFIRVVDYMGDDTSIVQSARVSYGKGTKKVSTDEGLIKYLMRHWHSTPFEMCEIKYHVKLPIFIARQWIRHRTANVNEYSARYSILDKEFYLPAKEQLSAQSKVNRQGRGDLITGDQADEVLKILKDDATRTYDNYETMLNERFDGTVINESKAGLARELARMNLTLNSYTQWYWKTDLLNLLNFLFLRADSHAQYEIRVYAEAMLETVKKWVPITHAAFMDYRVE

SEQ ID NO: 105484 - protein, 272 aa, Unknown
  Bacterial polypetide isolated from the Sargasso Sea
ELEKILYEAIPALDHGFVRVIDYMGDDTSIVQSARVSYGKGTKQVSTDKGLIKYLMRHWHSTPFEMCEIKYHVKLPIFIARQWIRHRTANVNEYSARYSILDKEFYLPSQENLAAQSTSNRQGRGDVLEGKQAEEVLELLKSDAERTYDNYETMLNERFDGSTIDENKKGLARELARMNLTLNTYTQWYWKTDLLNLMNFLRLRADSHAQYEIRVYADIMLDTVKKWVPITYDAFMDYRVGGTEVSAKGKLIIQKLIKGENVDVESSGCLKE

SEQ ID NO: 105485 - protein, 227 aa, Unknown
  Bacterial polypetide isolated from the Sargasso Sea
MKLTKEQKHEIADQQAQKNQTKRVTSPELEKILYEALPVLDHGFVRVVDYMGDDSSIVQSARVSYGKGTKKVSTDEGLIKYLMRHWHSTPFEMCEIKYHVKLPIFIARQWIRHRTANVNEYSARYSILDKEFYIPAKDQLSAQSTSNRQGRGDLITGDQADEVLKILKDDATRTYDNYEKMLNERYDGTTIDESKTGLARELARMNLTLNSYTQWYWKTDLLNLLNF

SEQ ID NO: 105486 - protein, 315 aa, Unknown
  Bacterial polypetide isolated from the Sargasso Sea
MKLTKEQKEEIKEQQSQETKTKRVTAPELEKVLYEAIPILDHGFIRVIDYMGDDTSIVQAARVSYGKGTKKVSTDSGLIKYLMRHWHSTPFEMCEIKYHIKLPIFIARQWIRHRTANVNEYSARYSILDKEFYLPSPKHLAAQSKNNRQGRGDILEGEQAKKVLDLLKNDAEQTYNNYETMLNEKYDGTVIDESTSGLARELARMNLTLNTYTQWYWKTDLLNLMNFLRLRADHHAQYEIRAYADTMLETVKKWVPITYEAFMDYRVGGTEVSSKGKKIIQKLIKGEKVNIEDSGLSKREWNELMEAFSLKDKLI

SEQ ID NO: 105487 - protein, 272 aa, Unknown
  Bacterial polypetide isolated from the Sargasso Sea
MKLTQDQINDIKEQQSQDNKTKRVTAPELENILYEALPALDHGFIRVIDYMGDDSSIVQSARVSYGKGTKQVSTDSGLIKYLMRHWHSTPFEMCEIKYHVKLPIFIARQWIRHRTANVNEYSARYSILDKEFYLPDPENLAAQSIANRQGRGDVIEGEQAKEVLELLKNDAERTYHNYETMLNQKYDGSTIDDNKKGLARELARMNLTLNTYTQWYWKTDLLNLMNFLRLRADHHAQYEIRVYADIMLDTLKRWVPITYDAFMDYRVGGTEV

SEQ ID NO: 105488 - protein, 315 aa, Unknown
  Bacterial polypetide isolated from the Sargasso Sea
MKLTKEQKKEISDQQSQKNVTKRVTSPELEKILYEAMPVLDHGFVRVVDYMGDDTSIVQSARVSYGKGTKKVSTDSGLIKYLMRHRHSTPFEMCEIKYHIKLPIFIARQWIRHRTANVNEYSARYSIMDKEFYVPSKENLAAQSTINRQGRGNLINGTQADSILKILKEDAERNYQHYEEMLNEKFDGSIIDEKKQGLARELARMNLTLNSYTQWYWKTDLLNLLNFLALRADSHAQFEIREYANVMMNTVAKWVPTTYEAFVDYRVGGLEISSKGKAVIQKMIKGEKCDLKTSGLSKREWNELMNSFGFSQHLL

SEQ ID NO: 105489 - protein, 296 aa, Unknown
  Bacterial polypetide isolated from the Sargasso Sea
STKRVTAPNLEKILYEAIPILDHGFIRVVDYMGNDTSIVQAARVSYGKGTKKVSTDAGLIKYLMRHWHSTPFEMCEIKYHVKLPIFIARQWIRHRTANVNEYSARYSILDKEFYLPKTENLAAQSQINRQGRGDVLQGEQAKKVLSLLKNDAEQTYNNYEMMLNERYDGSVINEKESGLARELARMNLTLNTYTQWYWKTDLLNLMNFLRLRADHHAQYEIRTYADAMLDTLKKWVPTTYEAFMDYRVGGTEVSAKGKIILQKLIKGEDVDVDQSGLSKREWNELMIAFDLKDKLI

SEQ ID NO: 105490 - protein, 315 aa, Unknown
  Bacterial polypetide isolated from the Sargasso Sea
MKLTKEQEQEIKEQQNQETSTKRVTAPELEKVLYEAIPILDHGFIRVVDYMGNDTSIVQAARVSYGKGTKKVSTDSGLIKYLMRHWHSTPFEMCEIKYHVKLPIFIARQWIRHRTANVNEYSARYSILDKEFYLPEKENLAAQSQSNRQGRGDVLQGKQAEKVLNLLKSDAEQTYDNYEMMLNERYDGSVINEKEVGLARELARMNLTLNTYTQWYWKTDLLNLMNFLRLRADHHAQYEIRAYAEVMLDTLKKWVPITFEAFMDYRVGGTEVSAKGKIILQKLIKGEDVSVDQSGLSKREWNELMIAFDLKDKLI

SEQ ID NO: 105491 - protein, 315 aa, Unknown
  Bacterial polypetide isolated from the Sargasso Sea
MKLTKEQAQEIKDQQSQSNSTKRVTAPELEKILYEAIPILDHGFIRVVDYMGDDTSIVQAARVSYGKGTKKVSTDSGLIKYLMRHWHSTPFEMCEIKYHVKLPIFIARQWIRHRTANVNEYSARYSILDKEFYLPSSENLAAQSLSNRQGRGEVIEGEQAKQVLELLKNDAERTYKNYEEMLNQRFDGSTIDENKKGLARELARMNLTLNTYTQWYWKTDLLNLMNFLRLRADSHAQYEIRAYADAMLDTVKKWVPITYEAFMDYRVGGTEVSSKGKKVIQKLINGEKVDIEQSGLSKREWNELMLALELKDKLI

SEQ ID NO: 105492 - protein, 213 aa, Unknown
  Bacterial polypetide isolated from the Sargasso Sea
MKLTKEQINDIKDQQSQENVTKRVTAPELEKVLFEAMPALDHGFIRVIDYMGDDSSIVQSARVSYGKGTKQVSTDSGLIKYLMRHWHSTPFEMCEIKYHVKLPIFIARQWIRHRTANVNEYSARYSILDKEFYLPDPQNLAAQSISNRQGRGDVIEGDQAKEVLELLKNDAERTYDNYETMLNQKFDGSTIDENKKGLARELARMNLTLNTYT

SEQ ID NO: 105493 - protein, 180 aa, Unknown
  Bacterial polypetide isolated from the Sargasso Sea
MKLTKEQKQEIRDQQNQENKTKRVTAPELEKILYEAIPILDHGFVRVVDYMGDDSSIVQSARVSYGKGTKKVSTDEGLIKYLMRHWHSTPFEMCEIKYHVKLPIFIARQWIRHRTANVNEYSARYSILDKEFYLPSKKHLAAQSQSNRQGRGEVLEGDQAKKVLNLLKQDAEQTYENYET

SEQ ID NO: 105494 - protein, 315 aa, Unknown
  Bacterial polypetide isolated from the Sargasso Sea
MKLTPEQAQEIKDQQNQENKTKRVTAPELEKILYEAIPLLDHGFIRVVDYMGDDTSIVQAARVSYGKGTKKVSTDAGLIKYLMRHWHSTPFEMCEIKYHVKLPIFIARQWIRHRTANVNEYSARYSILDKEFYLPAQEHLAAQSKSNRQGRGDVLEGEQAKKVLDLLKNDAERTYENYETMLNEKYDGSIIDENGVGLARELARMNLTLNTYTQWYWKTDLLNLMNFLRLRADHHAQYEIRTYADAMLDTLKRWVPITYDAFMDYRVGGTEVSDKGKKVIQKLIKGDKVSMEESGLSKREWNELMEAFNLKDKLI

SEQ ID NO: 105495 - protein, 315 aa, Unknown
  Bacterial polypetide isolated from the Sargasso Sea
MKLTKEQEQEIKEQQSQETSTKRVTAPNLEKILYEAIPILDHGFIRVVDYMGNDTSIVQAARVSYGKGTKKVSTDAGLIKYLMRHWHSTPFEMCEIKYHVKLPIFIARQWIRHRTANVNEYSARYSILDKEFYLPKTENLAAQSQSNRQGRGDVLQGDQAKKVLELLKNDAEQTYNNYEMMLNERYDGSVINEKEIGLARELARMNLTLNTYTQWYWKTDLLNLMNFLRLRADHHAQYEIRTYADAMLNTLKKWVPITYEAFMDYRVGGTEVSAKGKIILQKLIKGEDVNLDQSGLSKREWNELMIAFDLKDKLI

SEQ ID NO: 105496 - protein, 315 aa, Unknown
  Bacterial polypetide isolated from the Sargasso Sea
MKLTKEQTQEIKDQQSQENKTKRVTAPELENILYEAIPILDHGFIRVVDYMGNDTSIVQAARVSYGKGTKKVNTDSGLIKYLMRHWHSTPFEMCEIKYHVKLPIFIARQWIRHRTANVNEYSARYSILDKEFYLPKSEHLAAQSQINRQGRGEILEGDQAKKVLDLLKTDAERTYNNYEEMLNERYDGTVIDENVIGLARELARMNLTLNTYTQWYWKTDLLNLMNFLRLRADQHAQYEIRTYAEAMLETLKKWVPITYEAFMDYRVGGTEISSKGKLIIKKLIKGEKVSIEESGLSKREWNELMVALDLKDKLI

SEQ ID NO: 105497 - protein, 315 aa, Unknown
  Bacterial polypetide isolated from the Sargasso Sea
MKLTKEQSAEIKHQQSQSNSTKRVTVPQLEKILYEALPALDHGFVRVVDYMGDDTSIVQSARVSYGKGTKQVSTDKGLIKYLMRHWHSTPFEMCEIKYHIKLPIFIARQWIRHRTANVNEYSARYSILDKEFYLPTSDNLAAQSTSNRQGRGDVLEGQQAKEVLELLKNDAERTYDNYETMLNERYDGSTIDENKKGLARELARMNLTLNTYTQWYWKTDLLNLMNFLRLRADSHAQYEIRVYADIMLDTVKKWVPITYDAFMDYRVGGTEVSAKGKVIIQKLIKGESILMEDSGLSKREWNELMEAFDLKDKLI

SEQ ID NO: 105498 - protein, 299 aa, Unknown
  Bacterial polypetide isolated from the Sargasso Sea
MKLTKEQEQEIKDLQSQENKTKRVVAPELEKILYDAISVLDHGFVRVIDYMGDDTSIVQAARVSYGKGTKKVSTDSGLIKYLMRHWHSTPFEMCEIKYHVKLPIFIARQWIRHRTANVNEYSARYSILDKEFYLPKNEHLAAQSKSNRQGRGDVLQGEQAKKVLSLLKNDAERTYENYETMLNERYDGSVVDEKETGLARELARMNLTLNTYTQWYWKTDLLNLMNFLRLRADHHAQYEIRAYADVMLDTLKRWVPTTYDAFMDYRLGGTEVSSKGKIIIQKLISGEKVDSEQSGLQKG

SEQ ID NO: 105499 - protein, 173 aa, Unknown
  Bacterial polypetide isolated from the Sargasso Sea
MRSEKNQTFRAVSVGMEKHLYKVYPVLDHGFVRVVDYMGDDAAICQAARVSYGRGTKSVQNDEGLIRYLMRHWHSTPFEMCEVKLHVKLPVFVARQWIRHRTANVNEYSARYSILDREFYIPEPEALAAQSVINNQGRGEVLTGEEAEKVLRLLKNDSAQTYDHYEQMISQEG

SEQ ID NO: 105500 - protein, 313 aa, Unknown
  Bacterial polypetide isolated from the Sargasso Sea
MTKEQKQEILDQQSQKNVTKRVTSPELEKILYEAMPVLDHGFVRVVDYMGDDTSIVQSARVSYGKGTKKVSTDSGLIKYLMRHRHSTPFEMCEIKYHIKLPIFIARQWIRHRTANVNEYSARYSIMDKEFYVPSRENLAAQSTNNRQGRGELINGKQADNILKILKEDAERNYQHYEEMLNEKYDGKIIDENKQGLARELARMNLTLNSYTQWYWKTDLLNLLNFLALRADSHAQFEIREYADVMMNTVKKWVPISYDAFIDYRVGGMELSAKGKTVIQKMIKGEKCNIDSSGLSKREWNELMDSFGFKQHLV

SEQ ID NO: 105501 - protein, 315 aa, Unknown
  Bacterial polypetide isolated from the Sargasso Sea
MKLTKEQKQEIADQQAQKNQTKRVTSPELEKILYEALPVLDHGFVRVIDYMGDDSSIVQSARVSYGKGTKKVSTDEGLIKYLMRHWHSTPFEMCEIKYHVKLPIFIARQWIRHRTANVNEYSARYSILDKEFYIPSKDQLSAQSTSNRQGRGDLISGEQADEVLKILKDDATRTYDNYEKMLNERYDGTTINEGKAGLARELARMNLTLNSYTQWYWKTDLLNLLNFLFLRADSHAQYEIRVYAEAMLDTLKKWVPITHSAFLDYRVGAVHVSAKGKKVIQLMAKGKKVSHESSGLSKREWNELMNSFGFTEKTV

SEQ ID NO: 105502 - protein, 255 aa, Unknown
  Bacterial polypetide isolated from the Sargasso Sea
MKLTKEQKQEILDQQAQKNVTKRVTSPELEKILYEAMPVLDHGFVRVVDYMGDDTSIVQSARVSYGKGTKKVSTDSGLIKYLMRHRHSTPFEMCEIKYHIKLPIFIARQWIRHRTANVNEYSARYSIMDKEFYVPSKENLAAQSTNNRQGRGELINGKQADNILKILKEDAERNYQHYEEMLNEKYDGSIIDDKKKGLARELARMNLTLNSYTQWYWKTDLLNLLNFLALRADSHAQYEIREYADVMMNTVKKWV

SEQ ID NO: 105503 - protein, 315 aa, Unknown
  Bacterial polypetide isolated from the Sargasso Sea
MKLTKEQKQEIADQQTQKNTTKRVTSPELEKILYEALPVLDHGFVRVVDYMGDDSSIVQSARVSYGKGTKKVSTDEGLIKYLMRHWHSTPFEMCEIKYHVKLPIFIARQWIRHRTANVNEYSARYSILDKEFYIPAKDQLSAQSTSNRQGRGDLITGDQADEVLKILKEDATRTYDNYEKMLNERYDGTTIDENKSGLARELARMNLTLNSYTQWYWKTDLLNLLNFLFLRADSHAQYEIRVYAETMLNTVKKWVPITHAAFLDYRVGAVHVSAKGKKVIQLMAKGEKVSHVSSGLSKREWNELMTSFGFTEKIV

SEQ ID NO: 105504 - protein, 315 aa, Unknown
  Bacterial polypetide isolated from the Sargasso Sea
MKLTKEQQQEIKDQQSQENKTKRVTVKELENILYEAIPILDHGFIRVIDYMGDDTSIVQAARVSYGKGTKKVSTDSGLIKYLMRHWHSTPFEMCEIKYHVKLPIFIARQWIRHRTANVNEYSARYSILDKEFYLPEPNHLAAQSKNNRQGRGDILQGEQAKKVLDLLKGDAERTYDNYENMLNERYDGSVIDESQNGLARELARMNLTLGTYTQWYWKTDLLNLMNFLRLRADHHAQYEIRAYADVMLDTLKRWVPITYEAFLDYRVGGTEVSSKGKKVLKKLISGDTVDLESSGLSKREWNELVEAFEIKDKTL

SEQ ID NO: 105505 - protein, 299 aa, Unknown
  Bacterial polypetide isolated from the Sargasso Sea
MKLTKEQINDIKDQQSQENVTKRVTAPELEKVLYEAMPALDHGFIRVIDYMGDDSSIVQSARVSYGKGTKQVSTDSGLIKYLMRHWHSTPFEMCEIKYHVKLPIFIARQWIRHRTANVNEYSARYSILDKEFYLPDAQNLAAQSIANRQGRGDVIEGEQAKEVLELLKNDAERTYDNYETMLNQKFDGSTIDENKKGLARELARMNLTLNTYTQWYWKTDLLNLMNFLRLRADHHAQYEIRVYADIMLDTLKRWVPITYDAFMDYRVGGTEVSAKGKAIIQKLLKGEEINLEQSGLSKR

SEQ ID NO: 105506 - protein, 315 aa, Unknown
  Bacterial polypetide isolated from the Sargasso Sea
MKLTEEQIKEINNQQNQKYTTKRVTAPELEKILYDAIPILDHGFIRVVDYMGDDTSVVQSARVSYGKGTKKVSTDSGLIKYLMRHWHSTPFEMCEIKYHIKLPIFIARQWIRHRTANVNEYSARYSILDKEFYLPEPKNLAAQSQSNRQGRGDILDGDRAKKVLDLLKRDAEQTYNNYEIMLNERYDGSTIDENGLGLARELARMNLTLNTYTQWYWKTDLLNLMNFLRLRADHHAQYEIRAYADAMLDTLKKWVPITYEAFMDYRVGGTEVSSKGKNVIQKLIKGENVSIEESGLSKREWNELMEAFDLKDNLI

SEQ ID NO: 105507 - protein, 315 aa, Unknown
  Bacterial polypetide isolated from the Sargasso Sea
MKLNKEQQQEIKDLQSQEFKTKRVTAPELEKVLFEAIPVLDHGFIRVIDYMGDDTSIVQAARVSYGKGTKKVSTDSGLIKYLMRHWHSTPFEMCEIKYHVKLPIFIARQWIRHRTANVNEYSARYSILDKEFYLPSPEHLAAQSKNNRQGRGNIIEGDQAKKVLNLLKKDAEQTYDNYEMMLNERYDGSVIDEKETGLARELARMNLTLNTYTQWYWKTDLLNLMNFLRLRVDHHAQYEIRAYADVMLDSLKKWVPITYDAFMDYRVGGTEVSAKGKIIIQKLIKGEKVNVEESGLSKREWNELMEAFNLKDKSI

SEQ ID NO: 105508 - protein, 315 aa, Unknown
  Bacterial polypetide isolated from the Sargasso Sea
MKLTKEQAQEIKDQQSQENNTKRVTAPELEKILYEALAILDHGFIRVVDYMGNDTSIVQAARVSYGKGTKKVNTDAGLIKYLMRHWHSTPFEMCEIKYHVKLPIFIARQWIRHRTANVNEYSARYSILDKEFYLPAQENLAAQSQSNRQGRGEVLEGEQAKKVLDLLKTDAERTYSNYEEMLNERFDGSIINDNQIGLARELARMNLTLNTYTQWYWKTDLLNLMNFLRLRADHHAQYEIRAYADVMLDTLKKWVPITYEAFMDYRVGGTEVSAKGKLIIQKLIKGEEVSMEGSGLSKREWNELMEAFNLKDKLI

SEQ ID NO: 105509 - protein, 315 aa, Unknown
  Bacterial polypetide isolated from the Sargasso Sea
MKLTKEQLDEIKKQQLQSNQTKRVTSIELEKILYEAIPALDHGFVRVVDYMGDDTSIVQSARVSYGKGTKQVSTDNGLIKYLMRHWHSTPFEMCEIKYHIKLPIFIARQWIRHRTANVNEYSARYSILDKEFYLPTKENLAAQSTSNRQGRGEVLEGDQAQKVLELLKNDAERTYNNYETMLNERYDGSKIDEKKRGLARELARMNLTLNTYTQWYWKTDLLNLMNFLRLRADSHAQYEIRVYADIMLDTLKRWVPITYEAFMDYRVGGTEVSNKGKNIIKRLIKGEKISLEGSGLSKREWNELMEAFDLKDKLI

SEQ ID NO: 105510 - protein, 315 aa, Unknown
  Bacterial polypetide isolated from the Sargasso Sea
MKLTKEQEQEIKEQQSQETTTKRVVAPELERILYEAIPILDHGFVRVVDYMGNDTSIVQAARVSYGKGTKKVSTDSGLIKYLMRHWHSTPFEMCEIKYHVKLPIFIARQWIRHRTANVNEYSARYSILDKEFYLPKAEHLAAQSQSNRQGRGDVLQGEQAKKVLDLLKNDAEQTYNNYEMMLNERYDGSVIDEKKSGLARELARMNLTLNTYTQWYWKTDLLNLMNFLRLRADHHAQYEIRTYAETMLDTLKKWVPITYEAFMDYRVGGTEVSAKGKIILQKLIKGENISLDQSGLSKREWNELMIAFDLKDKLI

SEQ ID NO: 105511 - protein, 315 aa, Unknown
  Bacterial polypetide isolated from the Sargasso Sea
MKLTDEQIKEIKDQQSQQNSTKRVTAPELEKILYDAIPILDHGFIRVVDYMGDDTSVVQSARVSYGKGTKKVSTDSGLIKYLMRHWHSTPFEMCEIKYHVKLPIFIARQWIRHRTANVNEYSARYSILDKEFYLPEPQHLAAQSQSNRQGRGDILDGEKAKKVLNLLKGDAEQTYNNYETMLNERYDGSTIDENAVGLARELARMNLTLNTYTQWYWKTDLLNLMNFLRLRADHHAQYEIRAYADAMLDTVKKWVPITYEAFMDYRVGGTEVSAKGKIIIQKLIKGENVSIDDTGLSKREWNELMEAFDLKDKLI

SEQ ID NO: 105512 - protein, 315 aa, Unknown
  Bacterial polypetide isolated from the Sargasso Sea
MKLTKEQSQEIKDQQSQANNTKRVTAPELEKILYEAIPILDHGFIRVVDYMGDDTSIVQAARVSYGKGTKKISTDSGLIKYLMRHWHSTPFEMCEIKYHVKLPIFIARQWIRHRTANVNEYSARYSILDKEFYLPSKENLAAQSKSNRQGRGEVLQGEKAKKVLDLLKGDAEQTYSNYEKMLNERYDGSVIDNNSTGLARELARMNLTLNTYTQWYWKTDLLNLMNFLRLRADVHAQYEIRAYADVMLDTLKKWVPITYDAFIDYRVGGTEVSSKGKIVIQKLIKGEKISIEQSGLSKREWNELMTSFDLNDKLI

SEQ ID NO: 105513 - protein, 312 aa, Unknown
  Bacterial polypetide isolated from the Sargasso Sea
MKLTKEQTQEIKDQQSQENKTKRITAPELEKILYDAIPILDHGFIRVVDYMGDDTSIVQAARVSYGKGTKKVSTDSGLIKYLMRHWHSTPFEMCEIKYHIKLPIFIARQWIRHRTANVNEYSARYSILDKEFYLPNSEHLAAQSQINRQGRGDVLKGDQAKKVLDLLKNDAEQTYKNYEEMLNERYDGTVIDEGKTGLARELARMNLTLNTYTQWYWKTDLLNLMNFLRLRADHHAQYEIRTYANAMLDTVKKWVPITYEAFMDYRVGGTEISSKGKTVIQKMISGEKISIEESDLSKREWNELMNAFGLRE

SEQ ID NO: 105514 - protein, 315 aa, Unknown
  Bacterial polypetide isolated from the Sargasso Sea
MELTKEQIQEIKDQQSQKNETKRVTAPNLEKILYEIMPVLDHGFIRVIDYMGDDSSIVQSARVSYGKGTKKISTDSGLIKYLMRHWHSTPFEMCEIKYHVKLPIFIARQWIRHRTANVNEYSARYSILDKEFYLPSSENLAAQSKSNRQGRGEVLKGEQANEVLKLLKSDAERTYDNYETMLNERFDGTTIDENKNGLARELARMNLTLNTYTQWYWKTDLLNLMNFLRLRADSHAQYEIRAYAEVMLDTLKKWVPTTYEAFMDYRVGGTEVSAKGKIIIQKLIKGEKITLDESGLSKREWNELMIAFDLKDKTI

SEQ ID NO: 105515 - protein, 315 aa, Unknown
  Bacterial polypetide isolated from the Sargasso Sea
MKLTSEQVEEIKDQQEQKNITKRVTSPDLERLLYEVIPILDHGFIRVVDYMGNDSSIVQAARVSYGKGTKKVSTDSGLIKYLMRHWHSTPFEMCEIKYHVKLPIFIARQWIRHRTANVNEYSARYSILDKEFYLPSEENLAAQSKSNRQGRGDVIEGEQAKKVLNLLKTDAERTYNNYEEMLNERYDGSVIEENKIGLARELARMNLTLNTYTQWYWKTDLLNLMNFLRLRADHHAQYEIRAYADAMLDTLKRWVPITYDAFMDYRVGGTEVSSKGKLIIQKLIKKENVTIEESGLSKREWNELMEAFNLKDKLI

SEQ ID NO: 105516 - protein, 315 aa, Unknown
  Bacterial polypetide isolated from the Sargasso Sea
MKLTKEQKSEILEQQSQKNATKRVTSPELEKILYEAMPVLDHGFVRVVDYMGDDTSIVQSARVSYGKGTKKVSTDSGLIKYLMRHRHSTPFEMCEIKYHIKLPIFIARQWIRHRTANVNEYSARYSIMDKEFYVPSKENLAAQSKNNRQGRGDLINGTQADSILKILKEDAERNYKHYEEMLNEKYDGSIIDDNKKGLARELARMNLTLNSYTQWYWKTDLLNLLNFLALRADSHAQFEIREYASTMLNTVKKWVPITYDAFIDYRVGGMEISAKGKIVIQKMIKGEKCDINSSGLSKREWNELMQSFGFTQHLA

SEQ ID NO: 105517 - protein, 218 aa, Unknown
  Bacterial polypetide isolated from the Sargasso Sea
MSDSKNNLSSEQIKEINSLRENSNKTIRPVAPGIEKILYDVFPALDHGFVRVVDYMGDDQAIVQAARVSYGKGTTRVSEDRGLIRYLMRHRHSTPFEMCEIKLHVKLPMFIARQWIRHRTASINEYSARYSVLDKEFYIPEEKDLAVQSKSNKQGRGDTLSSKDSEEALFLLKRDAEKSYETYEYLLNESPEGEVVDNNRDGLSRELARINLTLNTYT

SEQ ID NO: 105518 - protein, 316 aa, Unknown
  Bacterial polypetide isolated from the Sargasso Sea
MKLTKEQEKEIKDQQKQQSNTKRVTAPELEKILYEAIPILDHGFIRVVDYMGDDTSIVQAARVSYGKGTKKVSTDSGLIKYLMRHWHSTPFEMCEIKYHVKLPIFIARQWIRHRTANVNEYSARYSILDKEFYLPELENLAAQSQSNRQGRGDVLKGEQAKKVLNLLKNDAEQTYNNYETMLNERYDGSVINNKEVGLARELARMNLTLNTYTQWYWKTDLLNLMNFLRLRADHHAQYEIRAYAEAMLKTLKKWVPITYEAFIDYRVGGTEVSSKGKIILQKLIQGENINIDESGLSKREWNELMNSFGLSDKIVK

SEQ ID NO: 105519 - protein, 358 aa, Unknown
  Bacterial polypetide isolated from the Sargasso Sea
MVEVVGTAPTSAMFITKFVYRRSWKTNTYNIKHYSKDSIYLCYMALSEQQKKDILDQQAQKNTTKRVTSPELEKILYEAIPVLDHGFVRVVDYMGDDSSIVQAARVSYGKGTKKVSTDSGLIKYLMRHRHSTPFEMCEIKYHVKLPIFIARQWIRHRTANVNEYSARYSILDKEFYMPTKDHLAAQSSSNRQGRGELINGKQADEILNILKKDAKQTYENYELMLNERFDGTVINESNKGLARELARMNLTLNTYTQWYWKTDLLNLLNFLSLRADSHAQYEIRAYADVMTNTLKKWVPITFDAFMDYRVGGMELSAKGKSVIKKMIKGEKCDFDSSFLSKREWNELMESFGFKEKIL

SEQ ID NO: 105520 - protein, 356 aa, Unknown
  Bacterial polypetide isolated from the Sargasso Sea
MVEVVGTAPTSAMVITKFVYRRSWKSNIINIKVITTDSITIMKLTKEQQEEIKNQQSQRNHTKRVTAPELEKILYEALPALDHGFVRVVDYMGDDTSIVQSARVSYGKGTKQVSTDKGLIKYLMRHWHSTPFEMCEIKYHVKLPIFIARQWIRHRTANVNEYSARYSILDKEFYLPSQENLAAQSTSNRQGRGDVLEGKQAEEVLELLKSDAERTYDNYETMLNERFDGSTIDENKKGLARELARMNLTLNTYTQWYWKTDLLNLMNFLRLRADSHAQYEIRVYADIMLDTVKKWVPITYDAFMDYRVGGTEVSAKGKLIIQKLIKGENVDVESSGLSKREWNELMTAFDLKDKLI

SEQ ID NO: 105521 - protein, 342 aa, Unknown
  Bacterial polypetide isolated from the Sargasso Sea
MVEVVGTAPTSVMFITKFVYRHSWKTNSINIKVIYKDSIKFMKLTKEQTQEIRDLQAQKNETKRVTAPNLEKILYEAIPILDHGFIRVIDYMGNDTSIVQAARVSYGKGTKQVSTDSGLIKYLMRHWHSTPFEMCEIKYHVKLPIFIARQWIRHRTANVNEYSARYSILDKEFYLPKKEHLAAQSKNNRQGRGEVLEGDQANKVLSLLKDDAERTYDNYETMLNERYDGSVVDENEHGLARELARMNLTLNTYTQWYWKTDLLNLMNFLRLRADHHAQYEIRAYADVMLDTLKKWTPITYDAFMDYRVGGTEVSAKGKLIVQKLIKGEKSDIESSGLSKKRV

SEQ ID NO: 105522 - protein, 166 aa, Unknown
  Bacterial polypetide isolated from the Sargasso Sea
MVEVVGTAPTSAMVITKFVYRHSWKSNFINIKGIAKDSITIMKLTKQQKEDIKNQQSQSNLTKRVTAPELEKILYEALPALDHGFVRVIDYMGDDTSIVQSARVSYGKGTKQVSTDSGLIKYLMRHWHSTPFEMCEIKYHIKLPIFIARQWIRHRTANVNEYSARY

SEQ ID NO: 105523 - protein, 356 aa, Unknown
  Bacterial polypetide isolated from the Sargasso Sea
MVEVVGTAPTSAMVITKFVYRHSWKSNFINIKGIAKDSITIMKLTKEQIAEIKSQQLQSNSTKRVTSPELEKILYEALPALDHGFVRVVDYMGDDTSIVQSARVSYGKGTKQVSTDSGLIKYLMRHWHSTPFEMCEIKYHIKLPIFIARQWIRHRTANVNEYSARYSILDKEFYLPSKENLAAQSTSNRQGRGDVLEGEQANEVLELLKNDAERTYANYETMLNEKYDGSMIDENKKGLARELARMNLTLNTYTQWYWKTDLLNLMNFLRLRADHHAQYEIRVYADIMLDTLKKWVPITYEAFMDYRVGGTEVSAKGKIIIQKLIKGEKISMGDSGLSKREWNELMEAFDLKDKLI

SEQ ID NO: 105524 - protein, 350 aa, Unknown
  Bacterial polypetide isolated from the Sargasso Sea
MPPRPQWLLRNSFIVIGWKTNFNNIKGNRTDSITIMKLTKEQSEEIKNQQSQSNQTKRVTAPELENILYEAIPALDHGFVRVVDYMGDDTSIVQSARVSYGKGTKQVSTDKGLIKYLMRHWHSTPFEMCEIKYHIKLPIFIARQWIRHRTANVNEYSARYSILDKEFYLPSSENLAAQSTSNRQGRGDVLEGKQAKEVLELLKSDAERTYDNYETMLNERFDGSTIDESKKGLARELARMNLTLNTYTQWYWKTDLLNLMNFLRLRADSHAQYEIRVYADIMLDTVKKWVPITYDAFMDYRVGGTEVSAKGKIIMQKLIRGENIDLDSSGLSKREWNELMIAFDLKDKLI

SEQ ID NO: 105525 - protein, 356 aa, Unknown
  Bacterial polypetide isolated from the Sargasso Sea
MVEVVGTAPTSAMVITKFVYRRSWKTNIINIKGITTDSITIMKLTKEQAEEIKNQQSQSNQTKRVTVPELENILYEAIPALDHGFVRVVDYMGDDTSIVQSARVSYGKGTKQVSTDKGLIKYLMRHWHSTPFEMCEIKYHIKLPIFIARQWIRHRTANVNEYSARYSILDKEFYLPTQENLAAQSTSNRQGRGDVLEGKQAEEVLELLKSDAERTYDNYETMLNERFDGSTIDENKKGLARELARMNLTLNTYTQWYWKTDLLNLMNFLRLRADSHAQYEIRVYADIMLDTVKKWVPITYEAFMDYRVGGTEVSAKGKLIIQKLIKGENVEVDSSGLSKREWNELMIAFDLKDKLI

SEQ ID NO: 105526 - protein, 356 aa, Unknown
  Bacterial polypetide isolated from the Sargasso Sea
MVEVVGTAPTSAMVITKFVYRRSWKSNIINIKVIEIDSITIMKLTKEQEEEIKNQQSQSYQTKRVTAPELEKVLYEALPALDHGFVRVVDYMGDDSSIVQSARVSYGKGTKQVSTDKGLIKYLMRHWHSTPFEMCEIKYHVKLPIFIARQWIRHRTANVNEYSARYSILDKEFYLPSQENLAAQSTSNRQGRGDVLEGKQAEEVLELLKSDAERTYENYETMLNERYDGSKIDENKKGLARELARMNLTLNTYTQWYWKTDLLNLMNFLRLRADSHAQYEIRVYADIMLDTVKKWVPITYDAFMDYRVGGTEVSAKGKVIIQKLIKGENVDIESSGLSKREWNELMTAFDLKDKLI

SEQ ID NO: 105527 - protein, 170 aa, Unknown
  Bacterial polypetide isolated from the Sargasso Sea
MVEVVGTAPTSAMVITKFVYRRSWKSNIINIKVITIDSITIMKLTKEQTEEIKNQQSQSNQTKRVTAPELEKILYEALPALDHGFVRVVDYMGDDSSIVQSARVSYGKGTKQVSTDKGLIKYLMRHWHSTPFEMCEIKYHIKLPIFIARQWIRHRTANVNEYSARYFILD

SEQ ID NO: 105528 - protein, 356 aa, Unknown
  Bacterial polypetide isolated from the Sargasso Sea
MVEVVGTAPTSAMVITKFVYRRSWKTNFINIKPFIRDSIKIMKLTSEQAQEIKEQQSQKNQTKRVTAPALENILYEALPALDHGFVRVIDYMGDDTSIVQSARVSYGKGTKKVSTDAGLIKYLMRHWHSTPFEMCEIKYHVKLPIFIARQWIRHRTANVNEYSARYSILDKEFYLPSSENLATQSISNRQGRGDVLEGEQAKEVLDLLKNDAERTYNNYETMLNEKFDGSTIDENKKGLARELARMNLTLNTYTQWYWKTDLLNLMNFLRLRADSHAQYEIRVYADIMLDTVKKWVPITYDAFMDYRVGGTEVSAKGKIIIQKLIKGENVDVDNSGLSKREWNELMIAFDLKDKLI

SEQ ID NO: 105529 - protein, 155 aa, Unknown
  Bacterial polypetide isolated from the Sargasso Sea
MEEISNLKFSTKRATVAKLEKILYKPRKVLDHGFIRLIDYMGDDSSIVQAARVSYGKGTKKLNQDKSLINYLLSHKHSTPFEMNEIKFHIKLPIFVARQWIRHRTANVNEYSARYSILDEEFYIPKIDDLKPQSQQNNQGRSGEIDKNLRKHYLS

SEQ ID NO: 105530 - protein, 288 aa, Unknown
  Bacterial polypetide isolated from the Sargasso Sea
MPVNKEQLDEIEALRSEISETARVTAPELEAVLYRPIEVLDHGFIRVIDYMGDDSSIVQSARVSYGKGTKKISNDKGLIKYLMRHRHSTPFEMCEIKFHIKLPIFIARQWIRHRTANVNEYSARYSILDKEFYIPSAENLAAQSAINNQGRGEVLTDDEASNVIQILKKDAEQTYSNYETLLNESSEGNIIDESKSGIARELARMNLTLNTYTQWYWKIDLNNLLHFLALRADDHAQYEIRVYADAMLDIVKKWVPLTYEAFEDYRIGGTELSAKEVNLMRKLLKGGE

SEQ ID NO: 105531 - protein, 271 aa, Unknown
  Bacterial polypetide isolated from the Sargasso Sea
MKKKITKVPKFKDFITTRATSSALEKILYKQISILDHGFIRVIDYMGTDQSIVQAARVSYGEGTKKLREDRGLIRYLLSHWHTTPFEMCEIKFHIKLPIFVARQWIRHRTANVNEYSARYSVLDKEFYVPEMDQLGSQSTTNKQGRSNTLDKKFAKQAQDLIQKNSEQLYDDYQNLLNGKLLNNDEYVEGEGLARELARTTLPLNYYTQWYWKVDLHNLMHFLRLRADSHAQYEIQIYAEKMVEILKKWVPLTYEAFEDYRSDSFQLSKEA

SEQ ID NO: 105532 - protein, 227 aa, Unknown
  Bacterial polypetide isolated from the Sargasso Sea
MKKKITKVPKFKDFKTTRATSSALEKILYKQIPILDHGFIRVIDYMGTDQSIVQAARVSYGEGTKKLREDRGLIRYLLSHWHTTPFEMCEIKFHIKLPIFVARQWIRHRTANVNEYSARYSVLDKEFYVPEMDQLGSQSTTNKQGRSNTLDKKFAKQAQDLIQKNSEQLYDDYQNLLNGKLLNNDEYVEGEGLARELARTTLPLNYYTQWYWKVDLHNLMHFLRLRA

SEQ ID NO: 105533 - protein, 184 aa, Unknown
  Bacterial polypetide isolated from the Sargasso Sea
MTISEQQKKEIEEEKRKSFVTKRTSVDNIEKKLYSINPVLDHGFIRVIDYMGDDSAIVQAARVSYGSGTKKSQDDSSLIRYLMRHWHSTPFEMCEIKFHIKLPVFVARQWIRHRTANVNEYSARYSILEKEFYIPEEGNLAMQSSTNNQGRGETLSSAEAHKVLEILKLDTDRSYKNYETLLSS

SEQ ID NO: 105534 - protein, 172 aa, Unknown
  Bacterial polypetide isolated from the Sargasso Sea
MKKKSDTQDLKKILNSEFKTRRVTASKLDKVLYKPFKVLDHGFVRVIDYMGDDSSIVQAARVSYGKGTKKLNQDKNLINYLLSHRHTTPFEMNEIKFHIKLPIFVARQWIRHRTANVNEYSARYSILDNEFYIPKIDDVKPQSQSNNQGRHGEIEKDLKKHYLSLIRENAKI

SEQ ID NO: 105535 - protein, 151 aa, Unknown
  Bacterial polypetide isolated from the Sargasso Sea
MSDLTKEQIEEINSQRSKVEGTKRVVSNGLEEIIYQSLPVLDHGFIRVIDYMGDDSSIVQAARVSYGKGTKHVSADKGLINYLMRHRHSTPFEMCEIKYHVKLPIFVARQWIRHRTASVNEYSARYSVLDKEYYIPEPQNLAAQSSSNKQG

SEQ ID NO: 105536 - protein, 304 aa, Unknown
  Bacterial polypetide isolated from the Sargasso Sea
MEEIEALRSEKTETARVTAPELEAVLYQPIEVLDHGFVRVIDYMGDDSSVVQSARVSYGKGTKKISNDKGLIKYLMRHRHSTPFEMCEIKFHIKLPIFIARQWIRHRTANVNEYSARYSILDKEFYIPSAENLAAQSQINNQGRGDALTDDEASNVIQILKNDAEQTYANYETLLNENSSGGVLDESKSGIARELARMNLTLNTYTQWYWKIDLNNLLHFLALRADDHAQYEIRVYADVMLDLVKKWVPLTYEAFEDYRMGGTELSAKEIKLMRKLLKGEKVSFEEEGLSKREWSELQRKFDIN

SEQ ID NO: 105537 - protein, 311 aa, Unknown
  Bacterial polypetide isolated from the Sargasso Sea
MPVNKEQLDEIEALRSEISETARVTAPELEAVLYKPIEVLDHGFIRVIDYMGDDSSIVQSARVSYGKGTKKISNDKGLIKYLMRHRHSTPFEMCEIKFHIKLPIFIARQWIRHRTANVNEYSARYSILDKEFYIPSAENLAAQSAINNQGRGDALTDDEASNVIQILKKDAEQTYSNYETLLNESSEGNIIDESKSGIARELARMNLTLNTYTQWYWKIDLNNLLHFLALRADDHAQYEIRVYADAMLDIVKKWVPLTYEAFEDYRIGGTELSAKEVNLMRKLLKGEKVSFEEEGLSKREWSELQRKFEIS

SEQ ID NO: 105538 - protein, 225 aa, Unknown
  Bacterial polypetide isolated from the Sargasso Sea
MSGLTKEQIEEIKVQRAETKETKRVVSSGLENILYESIPVLDHGFIRVIDYMGDDTSIVQAARVSYGKGTKHVSADRGLINYLMRHRHSTPFEMCEIKYHVKLPIFVARQWIRHRTASVNEYSARYSVLDKEYYIPDAKNLASQSNSNKQGRGAVLEGDNARKVLDLLIEDSEKVYDDYEKLLVGFPEKNDEENGLSRELARMNLSLNYYTQWYWKIDLHNLLHF

SEQ ID NO: 105539 - protein, 64 aa, Unknown
  Bacterial polypetide isolated from the Sargasso Sea
MWKARIFTLYPEIFPGPLNKGLYGKALQKKIWDLEVIDIRDSAEDKHKTVDDTPLEEVVECYET

SEQ ID NO: 105540 - protein, 59 aa, Unknown
  Bacterial polypetide isolated from the Sargasso Sea
EYPQYTKPQNWEGKSTPEVLLSGDHAKIKSWRLAQSEAITRRQRPDLWEKYLNKKNEKY

SEQ ID NO: 105541 - protein, 147 aa, Unknown
  Bacterial polypetide isolated from the Sargasso Sea
VYYLTPKGKVFNQNIAKNIVKKNKVNILCGHFEGVDQRVLDSRKVEEISIGDFILSGGEMASFVVLDTVLRLVPGVLGNLNSTKDESFENGLLEYPQYTKPQIWEKLSVPDILLSGDHNKIKSWRLSQSEAITRHRRPDLWQKYKKD

SEQ ID NO: 105542 - protein, 251 aa, Unknown
  Bacterial polypetide isolated from the Sargasso Sea
MLERRGITLAVERDHEAHDNPRQGRMDARLQHRHPEHQPHQHVEADPILAAAVHPQQGQGRQDADRQRRQRQLLGVEQRDDDDHAQVIHDGQRQQEHLEADRHPLAQQRHHPEGEGDVGGGGNGPAGARHFIGIVEEGIDERGRQHAAHRSDGREGGLHPGREGPFQHLALHLEADQQEEDGHEAIVDPEQQRLVDVEGGDAHLHLGIEEGLIAAGQAAVGQDHRQHGRHDQNYSGGGLQLEELFDYVAHG

SEQ ID NO: 105543 - protein, 142 aa, Unknown
  Bacterial polypetide isolated from the Sargasso Sea
MLDVQIFTLYPDLFPGLLDVGIYKKAKEKQKWSLKIIDIRDYAFDDNRTVDDTPFGGGSGMLLKPDVVASALDKNIKGKEKIIYLSPKGKRLDQKEVKSLSKLNKINILCGHFEGIDQRLLETRNIEEYSIGDFILSGGESA

SEQ ID NO: 105544 - protein, 124 aa, Unknown
  Bacterial polypetide isolated from the Sargasso Sea
MINVKILTGYPEMFPGGLTHSLMGKALKENIFTIETVNLHDFGIDNRMSVDDEPFGGGPGMVLRPDVVEKALLSVSNNKNLKSSKIYLTPSGSLLNQEKLGILAKLDEIIILCGRFEGVDQRAI

SEQ ID NO: 105545 - protein, 123 aa, Unknown
  Bacterial polypetide isolated from the Sargasso Sea
MWKARVFTLYPEIFPGPLNKGLYGKALEKKIWSLEIINIRDVAEDKHKTVDDKPFGGGNGMLLKPDILGKSLDSKIKKNEKIFYLSPKGKKFDQNFAKNLTKEKTINIICGHFEGIDERVLGT

SEQ ID NO: 105546 - protein, 113 aa, Unknown
  Bacterial polypetide isolated from the Sargasso Sea
MWQAQVFTLYPEVFPGPLSKGLYGKALYNNLWKLKVVNIRDAADDKHKTVDDTPYGGGSGMLLKANVLAKSLDENKNESERILYLSPKGKKFDQNLAKELSNEKSLSLICGHF

SEQ ID NO: 105547 - protein, 42 aa, Unknown
  Bacterial polypetide isolated from the Sargasso Sea
QLIIICGQYEGFDERVRYLADEEVSIGDYVLTGGDMKVLMRE

SEQ ID NO: 105548 - protein, 222 aa, Unknown
  Bacterial polypetide isolated from the Sargasso Sea
MYLIRGQNNLKLFKSRYPDVLLSGTIGNFDGLHLGHQAILGKIKNNAQKYNAKTIVFFTEPHAAEYFSKVRDRNQIPPPRICPWREKVQLLKKSKIDFACFLKFNNKLRTMSPDDFISQILDSINLVSFTVGDDFRFGADRKGDTDLLKNWGEKKGILVENTETICLDGQRVSSTRIREELLNNNFNNAEKLLGRPYTFSGKIVHGQHLGRTINIPTANIWL

SEQ ID NO: 105549 - protein, 112 aa, Unknown
  Bacterial polypetide isolated from the Sargasso Sea
MWQAQVFTLYPDIFPGPLSKGLYGKAMSKNIWNLKVVNIRDAAEDKHKTVDDTPYGGGSGMLMKADVLAKSLDQNKNEGEKILYLSPRGKKFDQNYAKELSKEKSVSIICGH

SEQ ID NO: 105550 - protein, 96 aa, Unknown
  Bacterial polypetide isolated from the Sargasso Sea
DFILSGGEMASFVVLDTVLRLVPGVLGNLNSTKDDFFENGLLEYPQYTKPQIWEKLSVPDILLSGDHNKIKSWRLSQSEAITRHRRPDLWQKYKKD

SEQ ID NO: 105551 - protein, 247 aa, Unknown
  Bacterial polypetide isolated from the Sargasso Sea
MQTISPILNIMIKACEKASKILKRDYGEIENLQVSLKGPGDFVTSSDKKCEKIIIQELLKAKKDYSLITEESGILKNKDKDNIWIVDPIDGTTNFMHSIPHFAISLALKSKNEIIAGVIYDPIKDEIFYGEKNSGAYLNNHRIRVSKRKNINQSLFASGDKNLSQYNNINIRKSGSAALDLAYVACGRYEGYFQKNLSIWDIAAGLIILKEAGGIISELNINNQTNLKIIASNPYINENLLNILSKF

SEQ ID NO: 105552 - protein, 230 aa, Unknown
  Bacterial polypetide isolated from the Sargasso Sea
MAKNRFNIAVIAGDGIGTEVMPEGLRALSAAATKFDIDLHFDHFDFASYNYYTKHGEMLPEDWQEKIGNHNAIFFGAVGLPDKIPDHISLWGSLLKFRREFDQYINLRPVRLLPGVPSPLANRQPGDIDFMIVRENTEGEYSSIGGKMFAGTKREIVMQQTVMSRIGVDRVLRFAFELAQSRPKRHLTSATKSNGISITMPYWDERVEEMALSYPNVAWDKFHIDILTAH

SEQ ID NO: 105553 - protein, 123 aa, Unknown
  Bacterial polypetide isolated from the Sargasso Sea
FEGVDQRAIDILDFEEISIGDYVLAGGEIAAQVLLEGCIRLIPGVLGHPKSILEESFSNNLLEYPQYTRPKVWEDSLGNKHDVPEVLTTGHHNNIKKWRLNKSVEKTKKIRPDLYVKKKQEQD

SEQ ID NO: 105554 - protein, 104 aa, Unknown
  Bacterial polypetide isolated from the Sargasso Sea
MLQVQLFTLYPEIFPGPLNKGLYGKAIKKKLWNLNVINIRDSALDKHKTVDDTPYGGGNGMLLKSDVLANSIDQNVNKGDRIFYLSPKGKIFDQTLAKELSKQK

SEQ ID NO: 105555 - protein, 81 aa, Unknown
  Bacterial polypetide isolated from the Sargasso Sea
MLSKRNPWSIGMLTLFPEMFPGPLGFSLAGRALDEKLWNLNIYDIRRFCEKSAEVDSSPFGGGNGMVMRADVIDRVLSTVT

SEQ ID NO: 105556 - protein, 127 aa, Unknown
  Bacterial polypetide isolated from the Sargasso Sea
MDIKFNLITLFPEIYDALDHGLIGKAIENNVIELNKIQLRDFAINKHGQIDGKPFGGEKGMIMMVEPLENALKSISPKKKHIVINFSPQGKQLSQNLAKKMLDYDEITIVNGRYEGIDERFIDKYVD

SEQ ID NO: 105557 - protein, 58 aa, Unknown
  Bacterial polypetide isolated from the Sargasso Sea
MWEARIFTLYPEIFPGPLQKGLYGKALSNKIWNLEVINIRDSAEDKHKTVDDTPFGGG

SEQ ID NO: 105558 - protein, 79 aa, Unknown
  Bacterial polypetide isolated from the Sargasso Sea
LIPGVLGHSDSVLEESFSKELLEYPHYTRPKTWVDKKGNAHNVPEILVSGHHEKIREWRKNKSLEITKKFRPDLLKNKD

SEQ ID NO: 105559 - protein, 45 aa, Unknown
  Bacterial polypetide isolated from the Sargasso Sea
GMQVPDILLSGNHSKITDWKKEQQIEITKSRRPDIWKKYLNNKSE

SEQ ID NO: 105560 - protein, 152 aa, Unknown
  Bacterial polypetide isolated from the Sargasso Sea
KGQEKIIYLSHKGKLFNHEYAKKLSSEKTLNLVCGHFEGVDERVLESRNIEEISIGDYILSGGEVAAFVVLDSILRFVPGILGNANSSIEESFENGLLEYPQFTKPQIWEEKSVPKVLISGDHAKIKDWRLSQSEAITRDRRPDLWQKYKKN

SEQ ID NO: 105561 - protein, 160 aa, Unknown
  Bacterial polypetide isolated from the Sargasso Sea
MGERKKTFYINTLTIFPEAFINFQDISIIGNARRKKIWDLQITDIKKFSDKNNNIDDKPYGGGPGMILKADVLQNAYEQAICDMEKKITHYHKIMLTPRGERLKQKTIEDLSASEGMIIINGRYEGVDQRFVDYNNLREVSIGDFVISGGEAAAITLIDA

SEQ ID NO: 105562 - protein, 164 aa, Unknown
  Bacterial polypetide isolated from the Sargasso Sea
ADVLARSIDDNVKGKEKIIYLSPKGKLFNHEYAKKLSSEKTLNLVCGHFEGVDERVLESRNIEEISIGDYILSGGEVAAFVVLDSILRFVPGILGNANSSVEESFENGLLEYPQFTKPQIWEEKSVPNVLISGDHAKIKDWRLSQSEAITRDRRPDLWQKYKKN

SEQ ID NO: 105563 - protein, 48 aa, Unknown
  Bacterial polypetide isolated from the Sargasso Sea
PQKWEEKDIPEVLLSGDHAKIKDWRLSQSEDITRRRRPDLWKKYKKNK

SEQ ID NO: 105564 - protein, 65 aa, Unknown
  Bacterial polypetide isolated from the Sargasso Sea
DLLEFPQYTRPKIWNNLEIPKVLTSGNHKKIALWRKDMAEKLTKKVRPDLLEKIQKKQDNKEIKY

SEQ ID NO: 105565 - protein, 85 aa, Unknown
  Bacterial polypetide isolated from the Sargasso Sea
MLQAQVFTLYPDIFPGPLGKGLYGKAMSKKLWSLNVINIRDAATDKHKTVDDTPYGGGTGMLLKPDVLANSIDQNINKGDRILYL

SEQ ID NO: 105566 - protein, 157 aa, Unknown
  Bacterial polypetide isolated from the Sargasso Sea
KQFNQAYSQELFEHNKHVILIAGYYEGVDERLFDMLPIQRVSIGDYIVNSGDCAVAVIAESIIRQVPGVLGNKDCIYEDSYCNGLLEAPKYTQPLTLDKYSVPSLLREGNHQAIARYTQKMALYTTLVQRPDLLGSYSCNKQQQDLITTLLNEMAVT

SEQ ID NO: 105567 - protein, 152 aa, Unknown
  Bacterial polypetide isolated from the Sargasso Sea
MLLARIFTLYPEFFPGPLGKGLYGKALAEKIWKLETVNIRDYTIDKHKTVDDTTYGGGSGMLIKPDVLANSLDKNLSSREKIIYLSPKGKLFNQELAKELSREKTINLICGHFEGIDQRVIEARNIEEVSIGDFVLSGGESAAFVMLDAIIR

SEQ ID NO: 105568 - protein, 77 aa, Unknown
  Bacterial polypetide isolated from the Sargasso Sea
LIPGVLGNPGSLTEETFEGNLLEYPQYTKPQKWEKKEVPDVLLTGDHAKIKDWRLAQSEDITRRRRPDLWEKYKKNK

SEQ ID NO: 105569 - protein, 83 aa, Unknown
  Bacterial polypetide isolated from the Sargasso Sea
MFIAQVFTLYPEYFPGPFKNGLYGKAIEKKIWDLRTVNIRDYAIDKHKTVDDTPYGGGSGMLIKPDVLAKSLDKNINRDEKIV

SEQ ID NO: 105570 - protein, 146 aa, Unknown
  Bacterial polypetide isolated from the Sargasso Sea
MIDIKILTAYPEMFPGSLEHSVIGKALKENIFKIDTINLHEFGIDDRMSIDDEPFGGGPGMVLRPDVVEKALKSMPEQYNKESKKIYLTPSGTILNQEKLGNLSKLEKITILCGRFEGVDQRAIDVLGFEEVSIGNYVLAGGEIAA

SEQ ID NO: 105571 - protein, 93 aa, Unknown
  Bacterial polypetide isolated from the Sargasso Sea
MLQAQIFTLYPDIFPGPLGKGLYGKAMSKKLWSLNVINIRDAATDKHKTVDDTPYGGGTGMLLRPDVLANSIDQNTSKGDRILYLSPKGKVFN

SEQ ID NO: 105572 - protein, 52 aa, Unknown
  Bacterial polypetide isolated from the Sargasso Sea
IHKTTNMGKKEVPEVLLSGDHGKIKHWRLSQSEAITRVRRPDLWLKYKKKSD

SEQ ID NO: 105573 - protein, 147 aa, Unknown
  Bacterial polypetide isolated from the Sargasso Sea
MFLYRIFTLYPEYFPGYLNKGLFGKAMNEKIWNLETVNIRDHSLDKHNTVDDTPYGGGSGMLIKADVLAKSLDDNIKEKEKIIYLSPKGKLFDHQYAKKLSNEKTINFICGHFEGIDERIIQSRNIEEVSIGDFILSGGEVATFVVL

SEQ ID NO: 105574 - protein, 108 aa, Unknown
  Bacterial polypetide isolated from the Sargasso Sea
MWQAQVFTLYPEIFPGPLSKGLYGKALSNNLWKLKVVNIRDAADDKHKTVDDTPYGGGSGMLLKADVLAKSLDENKNESERILYLSPKGKKFDQNLAKELANEKSLSL

SEQ ID NO: 105575 - protein, 147 aa, Unknown
  Bacterial polypetide isolated from the Sargasso Sea
MMKKVWTTKVITLYPEMFPGALKYSVTGKALENKLWSIKIINLRDFGCGKHKNVDDSPAGGGAGMILRADVVSRSLDSATADLDTLNETWPIICLTPRGNPLSQNISKTFAKSNGIIVLCGKFEGIDERVIKKWKMLEVSIGDFIIS

SEQ ID NO: 105576 - protein, 99 aa, Unknown
  Bacterial polypetide isolated from the Sargasso Sea
LILLEGISRLVEGILGDENSILEESFNDGLLEFPQYTRPENSEYGNVPEVLLNGNHSDIRRWRLKESLRRTLSLRPDLMESRQLTSEEKELIDEIKGEG

SEQ ID NO: 105577 - protein, 61 aa, Unknown
  Bacterial polypetide isolated from the Sargasso Sea
MPTNTYRNWKANVLTLYPEMFPGSLNFGVIGNALKRGIWSLEITDIKKFAIGKHKNVDERP

SEQ ID NO: 105578 - protein, 48 aa, Unknown
  Bacterial polypetide isolated from the Sargasso Sea
PQYTRPREYRGLRVPDVLLTGDHQRIADWRKAQATHATHGQTNNHTEK

SEQ ID NO: 105579 - protein, 112 aa, Unknown
  Bacterial polypetide isolated from the Sargasso Sea
MFLSRIFTLYPEYFPGYLNKGLFGKAMNEKIWNLETVNIRDYSFDKHKTVDDTPYGGGNGMLIKADVLAKSLDNNIKEKERIIYLSPKGKLFDYKYAKELSNEKTINFICGH

SEQ ID NO: 105580 - protein, 123 aa, Unknown
  Bacterial polypetide isolated from the Sargasso Sea
MIDVKILTAYPEMFPGSLQHSIVGKALKENIFKIDTINLHEFGIDDRMSIDDEPFGGGPGMVLRPDVVEKALKAIPEQHNQESKKIYLTPSGTILNQAKLGILSKLKKLTILCGRFEGVDQRA

SEQ ID NO: 105581 - protein, 41 aa, Unknown
  Bacterial polypetide isolated from the Sargasso Sea
WNLSIINIRDAATDKHKTVDDTPYGGWNRNVAKSRCFSKCA

SEQ ID NO: 105582 - protein, 62 aa, Unknown
  Bacterial polypetide isolated from the Sargasso Sea
MFLSRVFTLYPEYFPGYLSKGLFGKSKGKEWDLETVNIRDYALDKHKTVDDTPYGGGNGMIM

SEQ ID NO: 105583 - protein, 79 aa, Unknown
  Bacterial polypetide isolated from the Sargasso Sea
MFLSRVFTLYPDYFPGYLDKGLFGKSKGKEWNLEIINIRDYALDKHKTVDDTPYGGGNGMIMKADVLASSLDANVKSGE

SEQ ID NO: 105584 - protein, 95 aa, Unknown
  Bacterial polypetide isolated from the Sargasso Sea
MWQAQVFTLYPEVFPGPLSKGMYGKAMSKDLWKLKVVNIRDAAEDKHKTVDDTPYGGGSGMLLKPDVLAKSLDQNKIEGERILYLSPKGKKFDQN

SEQ ID NO: 105585 - protein, 293 aa, Unknown
  Bacterial polypetide isolated from the Sargasso Sea
FEKIGINKGYFFGKCAQTHTVNHFRPLLERGWVFGALDEEGLLPVNLERFARYRFSDESAEVFDDVFFFGNAQKEIFEKIFGAQKSFIVSGNPRTDMWQSNCYNIHNSVANEISESLGDFVLLPLNFSMYTNKERNAVLSDDHLKYKKDLAKNSEILFDSFCKLSQRIVDEVGINVVMRPHPADDPSKIKELMFKHGIRSERVKCIAKNEVFPWISAAQLVIHNCCTTSLEAGFLGTPVVTYAPSGTLLLQDDSDGLHKYMNKLFTIAFNENDILNILKSDHELENEKFQSSI

SEQ ID NO: 105586 - protein, 153 aa, Unknown
  Bacterial polypetide isolated from the Sargasso Sea
MLIARIFTLYPEFFPGPLGKGLYGKALDEELWKLETVNIRDYTTDKHKTVDDTTYGGGSGMLIKPDVLANSLDKNLNSNEKIIYLSPKGKLFNQKLAKELSKEKTINLICGHFEGIDQRVIEARNIEEVSIGDFVLSGGESAAFVILDAIIRL

SEQ ID NO: 105587 - protein, 115 aa, Unknown
  Bacterial polypetide isolated from the Sargasso Sea
MNINVLTIFPEIFEILNSGVISKAMKKDILSIKAIDIRKNTTNKHKNVDSKPYGGGEGMVIMAEPLIKTIKSIHKRKLGPIIYMSPQGQLLTQKKVISLSKLKNMTVICGRYEGI

SEQ ID NO: 105588 - protein, 128 aa, Unknown
  Bacterial polypetide isolated from the Sargasso Sea
MLLVKIITAFPEMFPGVLGHSIIGNSFKKKWDLEIINLRNFGIDERKTIDDTPFGGGPGMIIRPDVVEKALIQNQNSSNINAKLIYMSPSGRQLKQQDLLKYCKFEEIIILCGRFEGVDTMSYRSFGI

SEQ ID NO: 105589 - protein, 78 aa, Unknown
  Bacterial polypetide isolated from the Sargasso Sea
MWEARVFTLYPEIFPGPLQKGLYGKALSNKIWSLDVINIRDSAEDKHKTVDDTPFGGGSGMLIKPDVLAKSIDKHINK

SEQ ID NO: 105590 - protein, 190 aa, Unknown
  Bacterial polypetide isolated from the Sargasso Sea
DTPFGGGGGMILKPEPLFNAIDFAISWMKDNRDIRVIFPSPVGKNWNQALAHKLSKKNKIILICGHYKGIDERVIEQYVTDQYSIGDFVMTNGEIPAMIIMDSIVRLIPGALNNLRSVLNDTFSHDLLDHPHYTSPREYKEKYVPDILLSGNHRDIDRWRLQHRKKRTINFRPDIWEKYKNIKELENKNE

SEQ ID NO: 105591 - protein, 83 aa, Unknown
  Bacterial polypetide isolated from the Sargasso Sea
MWTARVFTLYPELFPGPLNIGLYKKALEKKLWSLEVVNIREYASDKHKTVDDTPFGGGSGMLMRADVLANSLDKNITNKKESI

SEQ ID NO: 105592 - protein, 75 aa, Unknown
  Bacterial polypetide isolated from the Sargasso Sea
MFLSRIFTLYPEYFPGYLNKGLFGKAMNEKIWNLETVNIRDYSIDKHKTVDDTPYGGGNGMFIKADVLAKSLDDN

SEQ ID NO: 105593 - protein, 71 aa, Unknown
  Bacterial polypetide isolated from the Sargasso Sea
MLEARIFTLYPDFFPGYLGQGIFGKALSENKWKIDTVDIREYAFDKHKTVDDTPYGGGEGMLMKADVLAKS

SEQ ID NO: 105594 - protein, 85 aa, Unknown
  Bacterial polypetide isolated from the Sargasso Sea
MFQVKIFTLYPEFFPGPFDKGIYGNALEKKIWDLNIVNIRDFAEDKHKTVDDTPYGGGSGMVMRADVVANSLDNNLEAKEKVYYL

SEQ ID NO: 105595 - protein, 61 aa, Unknown
  Bacterial polypetide isolated from the Sargasso Sea
DFESMKVPDELLSGNHKKIDDWRDENSLLKTFLKRPDLLNQIKLSKKQKKLLEEWESKAIL

SEQ ID NO: 105596 - protein, 100 aa, Unknown
  Bacterial polypetide isolated from the Sargasso Sea
MFITRLFTLYPEMFPGPLSEGLFGKAMENKLWKLENIDIRKYSSDKNLKVDDTPYGGGSGMLIKPDVVGSALDNNVVKGEKVIFLTPRGKIFNQKDRKRA

SEQ ID NO: 105597 - protein, 67 aa, Unknown
  Bacterial polypetide isolated from the Sargasso Sea
MFLSKVFTLYPEYFPGYLNKGLFGKAKGEKWNLETVDIRNYSSDKHKTVDDTPYGGGDGMIIKANIL

SEQ ID NO: 105598 - protein, 69 aa, Unknown
  Bacterial polypetide isolated from the Sargasso Sea
NINSINEETFENGLLEYPQYTKPQIWEKKSVPEVLLSGDHAKIKDWRLSQSEAITRDRRPDLWQKYKKN

SEQ ID NO: 105599 - protein, 89 aa, Unknown
  Bacterial polypetide isolated from the Sargasso Sea
MFIFQIFTLYPEFFPGLFKDGLYGKALEKKIWKFKIVNIREYANDKHKTVDDTPYGGGSGMLLKPDVIASALDQNTSINEKIFYLSPRG

SEQ ID NO: 105600 - protein, 178 aa, Unknown
  Bacterial polypetide isolated from the Sargasso Sea
MWTARVFTLYPELFPGPLASGLFKKALEKKLWSLEVVNIRDYALDKHKTVDETPFGGGSGMLMKADVIANSLDKNISNKSEPIIYLSPKGKKFDQTYAKKILSTNINIICGHFEGIDQRLLETRNIEEISVGDFILSGGEIGSFILIDTIVRLIPGVLGNPNSLTDETFEKNLLEYPQ

SEQ ID NO: 105601 - protein, 66 aa, Unknown
  Bacterial polypetide isolated from the Sargasso Sea
MLEARIFTLYPDFFPGYLGQGIFGKALSENKWKIDTVDIREYAFDKHKTVDDTPYGGGEGMLMKAD

SEQ ID NO: 105602 - protein, 62 aa, Unknown
  Bacterial polypetide isolated from the Sargasso Sea
DLLEYPQYTRPKKWKNLTIPDILLSGNHRNISEWRLKQSEKLTQKVRPDLWKNYKKSKTRKK

SEQ ID NO: 105603 - protein, 81 aa, Unknown
  Bacterial polypetide isolated from the Sargasso Sea
MWTARVFTLYPEVFPGPLSKGLYGKALAKKIWNIKVVNIRESAEDKHKTVDDTPFGGGKGMLMKADVLSKSLDKNVSKSER

SEQ ID NO: 105604 - protein, 55 aa, Unknown
  Bacterial polypetide isolated from the Sargasso Sea
MIKNNTWTANVVTLFPEMFPGSLSYSLTGKALKNNLWNLKTYNLRKFANGKRKTV

SEQ ID NO: 105605 - protein, 170 aa, Unknown
  Bacterial polypetide isolated from the Sargasso Sea
MTKNRFNIAVIAGDGIGTEVMPEGLRALLAASTKFDIDLHFDHFDFASYDYYSRHGDMLPEDWQTQIGDHDAIFFGAVGLPDKIPDHVSLWGSILKFRREFDQYINLRPVRLLPGVQSPLANRWPGDIDFMIVRENTEGEYSSIGGKMFAGTEREIVVQETVMSRLGVDR

SEQ ID NO: 105606 - protein, 75 aa, Unknown
  Bacterial polypetide isolated from the Sargasso Sea
MWQAQVFTLYPEVFPGPLSKGMYGKAMSKDLWNLKIVNIRDAAEDKHKTVDDTPYGGGSGMLLKPDVLAKSLDQN

SEQ ID NO: 105607 - protein, 90 aa, Unknown
  Bacterial polypetide isolated from the Sargasso Sea
FVFIDALIRLLPGVLGNKDSVKEESFENHLLEYPQYTKPREWEGKSPPEVLFSGDHAKIKGWRLSQSEAITRRQRPDLWKKYLEKKNEKH

SEQ ID NO: 105608 - protein, 54 aa, Unknown
  Bacterial polypetide isolated from the Sargasso Sea
MLEARIFTLYPDFFPGYLGQGIFGKALSENKWKIDTVDIREYAFDKHKTVDDTP

SEQ ID NO: 105609 - protein, 70 aa, Unknown
  Bacterial polypetide isolated from the Sargasso Sea
MFQAQVFTLYPEFFPGPLAKGLYGKALSNKLWNLNVVNIRDAATDKHKTVDDTPYGGGTGMLLKPDILAK

SEQ ID NO: 105610 - protein, 124 aa, Unknown
  Bacterial polypetide isolated from the Sargasso Sea
MKKNTFKVKVITLFPESFPGVLGVGVIGRALKKKIWSLKLFNPRNYAKDNHKSVDDTTSGGGPGMILRADIIGKAIDSSLRGVKEKKKISLINLTPRGKPITQKDIKRFTKKNELIILCGRYEG

SEQ ID NO: 105611 - protein, 247 aa, Unknown
  Bacterial polypetide isolated from the Sargasso Sea
MQTISPILNIMIKACEKASKILKRDYGEIENLQVSVKGPGDFVTSADKKCEKIIIQELLKAKKDFSLITEESGALKNKDKDNIWILDPIDGTSNFMHGVPHFAISLALKSKNEIIAGVIYDPIKDEIFYGEKNNGAYLNNYRIRVSKRQNISQSLFASGDKNLDKYNNINIRRSGSAALDIAYVACGRYEGYFQKNLSIWDIAAGLIILKEAGGVVNELDINNQNNLKIIASNPYINENFLNILSKF

SEQ ID NO: 105612 - protein, 227 aa, Unknown
  Bacterial polypetide isolated from the Sargasso Sea
MEVFIITPFPNTINVLIENNIANQGIKKKLLNVEVVNLRDFANDNYKKIDDEPYGGGSGMVMMCQPLFNAIDYCIDKSQKKPKVIFPSPKGKVLNHKMSSDLSNENSLIFICGHYKGIDERVIDKYVDLEISIGDFIISNGELSTMIIFDSIARLVPGVLNDLNSAMTDSFVDDLLDAPYFTRPNEIDGLKVPEVLLSGDHKAIEKWRNDKKLEITKDRKPDLLKEK

SEQ ID NO: 105613 - protein, 135 aa, Unknown
  Bacterial polypetide isolated from the Sargasso Sea
MFIAQIFTLYPDYFPGPLNKGLYGKAMEKKIWDLKTIDIREYALDKHKTVDDTPYGGGSGMLLKPDVVAKSIDANTKKGEKIFYLSPRGKKFNQSIAREISKEKKVNLICGHFEGVDQRVLDNREIDELSVGDFC

SEQ ID NO: 105614 - protein, 113 aa, Unknown
  Bacterial polypetide isolated from the Sargasso Sea
MFLSRIFTLYPEYFPGYLSKGLFGKALNEKIWNLETVNIRNYSSDKHKTVDDTPYGGGNGMLIKADVLAKSLDENIKEKEKIIYLSPKGKLFNHKYAKELSSEKSLNLICGHF

SEQ ID NO: 105615 - protein, 160 aa, Unknown
  Bacterial polypetide isolated from the Sargasso Sea
MFVARIFTLYPEFFPGPLGKGLYGKALDEKIWKLETVNIRDYAEDKHKTVDDTTYGGGSGMLMKPDVIAKSLDKNIKSSEKIIYLSPKGKLFNQSLAKKLSKEKTINLLCGHFEGIDQRVIEGRNIEEVSIGDFVLSGGESAAIVVIDSILRLLQKVLGN

SEQ ID NO: 105616 - protein, 236 aa, Unknown
  Bacterial polypetide isolated from the Sargasso Sea
MLKIKVISAHPEMFPGTLGYSIIGKALKEKKFMLEVINLHDFGIDNRKTIDDEPFGGGPGMILRPDVVEKALLSIDSEAKKDKTLRIFLTPSGKTLNQKKLTEYSKLEELIILCGRFEGVDQRAINVLNFEEISLGDYILAGGESAAQVLVEGCIRLIPGVLGQPESLLEESFSNNLLEYPQFTRPKVWEDANNFKHEVPEILTSGHHEKIKKWRHEKSIEKTNLFRPDLLKKDKI

SEQ ID NO: 105617 - protein, 192 aa, Unknown
  Bacterial polypetide isolated from the Sargasso Sea
YSKDKHGAVDDTPFGGGSGMLLRPDVLASAIDENIKEGEKIIYLTPRGKKFDQNAARALSKEKNLNLICGHFEGVDQRVLETRNIEEYSLGDFVLSGGEPASFVFIDALVRLIPGVLGNRESVKEESFENHLLEYPQYTKPREWEGKTPPEVLFSGDHAKIKGWRLSQSEAITRRQRPDLWKKYLEKKNEKH

SEQ ID NO: 105618 - protein, 155 aa, Unknown
  Bacterial polypetide isolated from the Sargasso Sea
MFLSRVFTLYPEYFPGYLSKGLFGKSKGKEWDLETVNIRDYALDKHKTVDDTPYGGGNGMIMKADVLANSLDANIKAKEKTLYLSPRGKVFNSKLAREFSSEKTINLICGHFEGVDERILESRDIEEISIGDFILSGGEVAAFVVTDSILRFIPG

SEQ ID NO: 105619 - protein, 169 aa, Unknown
  Bacterial polypetide isolated from the Sargasso Sea
MYAVKIFTLYPETFPGPLAGGIYGKAMRNGLWSLKTVNIRDYADDKHKTVDDTVFGGGSGMLMKPDIVANSLDKNISKGEKIFYLSPKGKKFNQSFANSLSKQNGINLICGHFEGIDDRLLSTRNIEEISIGDYVLSGGETAAFVILDAVLRLIPGVLGNKDSIKDETF

SEQ ID NO: 105620 - protein, 128 aa, Unknown
  Bacterial polypetide isolated from the Sargasso Sea
LNLICGHFEGVDQRLLETRNIEEYSLGDFVLSGGEPASFVLVDALIRLLPGVLGNKDSVKEESFENHLLEYPQYTKPREWEGKSPPEVLFSGDHAKIKGWRLSQSEAITRRQRPDLWKKYLEKKNEKH

SEQ ID NO: 105621 - protein, 65 aa, Unknown
  Bacterial polypetide isolated from the Sargasso Sea
ENGLLEYPQYTKPQIWEKQSVPDVLLSGDHAKIKDWRLSQSRDITRRQRPDLWEKYLNKKKNEKY

SEQ ID NO: 105622 - protein, 194 aa, Unknown
  Bacterial polypetide isolated from the Sargasso Sea
MLKARIFTLYPDFFPGYLGQGIFGKALSENKWKIDTVDIREYAFDKHKTVDDTPYGGGEGMLMKADVLAKSIDMNVKDGEKIIYLSPKGKLFNHQLAKQLSQEKTINIICGHFEGVDERLLKTRNIEEVSIGDFVLSGGEGASFVILDAILRFIPGILGNTNSAKEESFENGLLEYPQFTKPQIWEEKSVPDVL

SEQ ID NO: 105623 - protein, 76 aa, Unknown
  Bacterial polypetide isolated from the Sargasso Sea
MSSFNFDVITLFPKAFELINNLGVITKALDKSLINVNLHDLREYGEGSYRQVDDRPYGGGAGMVLKPEPIYKAHES

SEQ ID NO: 105624 - protein, 227 aa, Unknown
  Bacterial polypetide isolated from the Sargasso Sea
VKIFTLYPETFPGPLAGGIYGKAMRNGLWSLKTVNIRDYADDKHKTVDDTVFGGGSGMLMKPDIVANSLDKNISKGEKIFYLSPKGKKFNQSFANSLSKQNGINLICGHFEGVDDRLLSTRNIEEISIGDYVLSGGETAAFVILDAVLRLIPGVLGNKDSIKDETFENSLLEYPQFTKPKIWEGKSVPDVLFSGDHAKIKSWRLSQSEDITRRQRPDLWEKYLKDKK

SEQ ID NO: 105625 - protein, 227 aa, Unknown
  Bacterial polypetide isolated from the Sargasso Sea
MFLSRVFTLYPEYFPGYLSKGLFGKSKGKEWDLETVNIRDYALDKHKTVDDTPYGGGNGMIMKADVLANSLDANIKAKEKTLYLSPRGKVFNSKLAREFSSEKTINLICGHFEGVDERILESRDIEEISIGDFILSGGEVAAFVVTDSILRFIPGILGNINSSRDESFENGLLEYPQFTKPQVWEEKKVPNVLISGDHAKIKDWRLSQSEAITRDRRPDLWQKYKKN

SEQ ID NO: 105626 - protein, 231 aa, Unknown
  Bacterial polypetide isolated from the Sargasso Sea
QIAIITPVPDMIESVVQNSMLRQAIEREKVDFHIINLRDFGEGNYHQIDDKPYGGGPGMVLMAGPLFKAIEDAIEKVGGEDDLRVIFPSPQGIQWSHTVAEENSKITRLIVICGHYKGIDERVIEKYVTHEYSIGDFVVTSGEIPTMIIIDSIVRLVPGVMNNLESALSDSFAENLLDSPFYTQPREIEGLTVPKVLLSGNHKEIDLWRKDHRLKRTKKNRPDLMEKNKKK

SEQ ID NO: 105627 - protein, 229 aa, Unknown
  Bacterial polypetide isolated from the Sargasso Sea
MWVARVFTLYPELFPGPLGSGLYKKALEKKLWSLEIVNIRDYATDKHKTVDDTPFGGGSGMLMRADVIANSLDKNISDKNEPIIYLSPKGKKFDQSYAKKILDKNINIICGHFEGVDERLLETRNIEEVSVGDFILSGGEIGAFVFIDTVVRLISGVLGNSNSLTDETFEKNLLEYPQYTKPQKWEKSDVPDVLLTGDHAKIKGWRLRQSEDITRRRRPDLWEKYKKNK

SEQ ID NO: 105628 - protein, 236 aa, Unknown
  Bacterial polypetide isolated from the Sargasso Sea
MLDVKILTAYPNMFPGTLNYSLIGSALKEKKWTLEVINLHNFGYDNNKSIDDEPFGGGPGMIIRADVVEKALLSIEYPNNIKRKLIYLTPSGKPLKQANLLEFSRFDQLIILCGRFEGVDQRAINVLDFSEISIGDYILMGGETAAQVLVEGCIRLLPGVLGQPKSLLEESFSNDLLEYPHYTRPKVWKDTNNNNHEIPEVLISGHHEKIKEWRLKKSIERTKITRPDLLIKDKKV

SEQ ID NO: 105629 - protein, 65 aa, Unknown
  Bacterial polypetide isolated from the Sargasso Sea
MFQVKIFTLYPDFFPGILSKGIYGRAIEKSLWNLDVINIRDYAKDKHKTVDDTPYGGGEGMVLKP

SEQ ID NO: 105630 - protein, 220 aa, Unknown
  Bacterial polypetide isolated from the Sargasso Sea
MYPEIFPGPLSKGLYGKALTKKIWNLKIVDIRDSAKDKHKTVDDTPFGGGSGMLIKPDILARSIDQNYKEGERIFYLSPKGKKFDQKLAKELSKQKSINLICGHFEGIDERVLNTRNIEEISIGDFVLSGGETAAFIVIDSILRLLPGILGNNKSQIEESFENGLLEYPQYTKPQIWEGKSVPAVLLSGDHAKIKDWRLSQSEAITRDRRPDLWQKYKKN

SEQ ID NO: 105631 - protein, 48 aa, Unknown
  Bacterial polypetide isolated from the Sargasso Sea
YRTVDDRPYGGGPGMVMLARPLEAAIDAAKAAQAEQGIASTRVVMMSP

SEQ ID NO: 105632 - protein, 238 aa, Unknown
  Bacterial polypetide isolated from the Sargasso Sea
MIDVKILTAYPEMFPGILEHSVIGKALKENIFKIDTINLHEFGIDDRMSIDDEPFGGGPGMVLRPDVVEKALKSISEKHNKESKKIYLTPSGTLLNQEKLGNLSKLEKITILCGRFEGVDQRAIDVLGFEEVSIGNYVLAGGEIAAQVLLEGCIRLIPGVLGHPESLLEESFSNNLLEYPHYTRPQVWVDSLGNKHDVPEVLTSGHHSNIKKWRLNKSIEKTKNIRPDMYINKEQKQD

SEQ ID NO: 105633 - protein, 105 aa, Unknown
  Bacterial polypetide isolated from the Sargasso Sea
NIEEVSVGDFILSGGEVAAFLIIDTIVRLIPEVLGNSNSLIEETFERSLLEYPQYTKPQKWEKKDVPDVLLSGDHAKIKDWRLVQSEDITRRRRPDLWKKYKKKK

SEQ ID NO: 105634 - protein, 141 aa, Unknown
  Bacterial polypetide isolated from the Sargasso Sea
GKKFDQKYAKKIIKKKDLNIICGHFEGIDERLIENRNIEEISIGDFILSGGETATFVFLDAIIRLLPGVLGNIDSLKEETFENYLLEYPQYTKPQKWEKKEVPSVLLSGDHAKIKGWRLSKSQDITRRRRPDLWEKYKKNN

SEQ ID NO: 105635 - protein, 164 aa, Unknown
  Bacterial polypetide isolated from the Sargasso Sea
FSNNHNLKSTKIYLTPSGSLLNQEKIGILAKLEEIIILCGRFEGVDQRAIDVLGFEEISIGDYVLSGGEIAAQVLLEGCIRLIPGVLGHPKSLLEESFSNNLLEYPHYTRPKVWEDSLGEKHDVPEVLTSGHHNNIKKWRLDKSVEKTKKIRPDLYIKKEQEQD

SEQ ID NO: 105636 - protein, 126 aa, Unknown
  Bacterial polypetide isolated from the Sargasso Sea
MFQAQVFTLYPEVFPGPLSKGLYGKALSNKLWNLSIINIRDSATDKHKTVDDTPYGGGTGMLLKADVLASSLDQKVKKGERVFYLSPKGKKFDQKLAQDLSKEKSISLICGHFEGVDERVLATRNI

SEQ ID NO: 105637 - protein, 228 aa, Unknown
  Bacterial polypetide isolated from the Sargasso Sea
MFQAKIFTLYPEYFPGPFEIGICKKAFEKKLWDLKLINIRDYADDKHKTVDDTPYGGGVGMLMRPDVVAKSLDANLEEKETVYYLTPKGKIFNQDIAKDIVKKNKVNILCGHFEGVDQRVLDSRNIEEISIGDFILSGGEMASFVVLDTVLRLVPGVLGNLNSTKDESFENGLLEYPQYTKPQIWEKLSVPDILLSGDHNKIKSWRLSQSEAITRLRRPDLWQKYKKD

SEQ ID NO: 105638 - protein, 187 aa, Unknown
  Bacterial polypetide isolated from the Sargasso Sea
YALDKHKTVDDTPYGGGNGMIMKADVLANSLDANIKAKEKTLYLSPRGKVFNSKLAREFSSEKTINLICGHFEGVDERILENRDIEEISIGDFILSGGEVAAFVVTDSILRFIPGILGNINSSRDESFENGLLEYPQFTKPQVWEEKKVPNVLISGDHAKIKDWRLSQSEAITRDRRPDLWQKYKKN

SEQ ID NO: 105639 - protein, 118 aa, Unknown
  Bacterial polypetide isolated from the Sargasso Sea
MDKEFRTDLLDIEAAKAWKATVLTLYPEMFPGTLDHALAGRALEHNIWQLDVVNIRDFATDKHRTVDDTPLGGGPGMILRPDVIDAALGATTEAPGPRFYPSPRGRRLTQSDVRALSK

SEQ ID NO: 105640 - protein, 139 aa, Unknown
  Bacterial polypetide isolated from the Sargasso Sea
MFEARIFTLYPDLYPGPLGEGLYGKALNEKKWNLEIVNIRDSAKDKHKTVDDAPYGGGSGMLIRPDVIANSLDQKINPDEKVIYLSPKGKLFNQDVAKELSKKKKLNLICGHFEGIDQRVIDTRNIEELSIGDFILSGG

SEQ ID NO: 105641 - protein, 105 aa, Unknown
  Bacterial polypetide isolated from the Sargasso Sea
MRIDIISVLPELMESPFKTSILKRAVDKGIVEVHFHQLRDWSVNKHRQIDDEPYGGGAGMVMMVEPLDKCISELKSQRNYDEIIYLTPDGETLNQKMANSLSIKK

SEQ ID NO: 105642 - protein, 227 aa, Unknown
  Bacterial polypetide isolated from the Sargasso Sea
MFLSRVFTLYPEYFPGYLSKGLFGKSKGKEWDLETVNIRDYALDKHKTVDDTPYGGGNGMIMKADVLANSLDANIKAKEKTLYLSPRGKVFNSKLAREFSNEKTINLICGHFEGVDERILESRDIEEISIGDFILSGGEIAAFVVTDSILRFIPGILGNINSSRDESFENGLLEYPQFTKPQVWEEKKVPNVLISGDHAKIKDWRLSQSEAITRDRRPDLWQKYKKN

SEQ ID NO: 105643 - protein, 172 aa, Unknown
  Bacterial polypetide isolated from the Sargasso Sea
LLRPDILASALDKNIKKGEKIIYLSPRGKKFDQNVARSLSKEKNLNLICGHFEGVDQRILETRNIEEYSLGDFVLSGGEPASFVLVDALIRLLPGVLGNKDSVKEESFENHLLEYPQYTKPREWEGKSPPEVLFSGDHAKIKGWRLSQSEAITRRQRPDLWKKYLEKKNEKH

SEQ ID NO: 105644 - protein, 203 aa, Unknown
  Bacterial polypetide isolated from the Sargasso Sea
MTWKANILTLYPEIYPGYLSYSLLGKALEKKIWELNIYNLRDFGEGKHKTIDDKPFGGGAGMIIKPDILGNAIEETLIKNHDRQSLVYLSPKGRPFKQIDAKNFSQSSGVSILCGHFEGIDQRVLDIYEIEEISMGDYILSGGEVASFTFLDSILRLLPGVLGNEASIEDESFSDDLLEYPQYTKPQEYKNIKVPEYITIWQS

SEQ ID NO: 105645 - protein, 129 aa, Unknown
  Bacterial polypetide isolated from the Sargasso Sea
SPNGNNFDEKKVLELSKKESVYILCGRYEGVDQRVNELVVDEEISVGNFIVSGGEVPAMIISDSIIRKIPGILGSSESNKNETFSIYNDYSKKEPVYTKPRLFMGAEVPNVLLSGDHSKIDQWKKDNRF

SEQ ID NO: 105646 - protein, 168 aa, Unknown
  Bacterial polypetide isolated from the Sargasso Sea
RKSSKSKTLLMTPQGKVLQQKDLARWTTLDQIIIICGQYEGFDERVRCLADEEISIGDYVLSGGEIPAISIINGLTRLLPGTLGDPDSLINESHNSPLLEYPHYTRPQVFRDMKVPDVLISGNHKEIEFWREEQMLKRTLKRRKDLIKSEFRDLQIDKYDPDDWLWDL

SEQ ID NO: 105647 - protein, 69 aa, Unknown
  Bacterial polypetide isolated from the Sargasso Sea
MKKIFIITPTPEIIASVMQNSIVIKAKNNNIVDFEIINLRDYSDKKYKKVDDNPYGGGAGMVMMAEPFF

SEQ ID NO: 105648 - protein, 138 aa, Unknown
  Bacterial polypetide isolated from the Sargasso Sea
MFLSRVFTLYPEYFPGYLSKGLFGKSKGKEWDLETVNIRDYALDKHKTVDDTPYGGGNGMIMKADVLANSLDANIKAKEKTLYLSPRGKVFNSKLAREFSSEKTINLICGHFEGVDERILENRDIEEISIGDFILSGG

SEQ ID NO: 105649 - protein, 195 aa, Unknown
  Bacterial polypetide isolated from the Sargasso Sea
MYAVKIFTLYPETFPGPLAGGIYGKAMRNGLWSLKTVNIRDYADDKHKTVDDTVFGGGSGMLMKPDIVANSLDKNISKGEKIFYLSPKGKKFNQSFANSLSKQNGVNLICGHFEGVDDRLLSTRNIEEISIGDYVLSGGETAAFVILDAVLRLIPGVLGNKDSIKDETFENSLLEYPQITNLKFGKAKVFQMYYF

SEQ ID NO: 105650 - protein, 127 aa, Unknown
  Bacterial polypetide isolated from the Sargasso Sea
EMLILCGRFEGVDQRAIEILGFQEISIGDYVLSGGEIASQVLVEGCIRLIPGVLGHPQSLLEESFSNNLLEYPHYTRPKVWEDKQGNKHEVPDVLTSGHHEKIDKWRKEKSVEKTKNIRPDLLKKGI

SEQ ID NO: 105651 - protein, 87 aa, Unknown
  Bacterial polypetide isolated from the Sargasso Sea
YEISIGQSVVSGGEVPALYLLEALIRKIPDVLGNPESLISETFTDNKIDHPVYTRPEIFKNKEVPEVLLSGNHQKIDEWKKNNLKDI

SEQ ID NO: 105652 - protein, 73 aa, Unknown
  Bacterial polypetide isolated from the Sargasso Sea
SNESFQNELVEHDQFTRPNPWLAPDHTDIEVPAVLLSGNHADIDLWKHQNSKENTEKNRPDLFKKYLKKNKNE

SEQ ID NO: 105653 - protein, 92 aa, Unknown
  Bacterial polypetide isolated from the Sargasso Sea
MKFNIITIFPNELMRSLNYGVIGNAINDNKIRIDCHDPRIHADNKHNSIDDKPYGGGPGMVMQAEPVLKSIQQARNGDINIPVVFLSPQGKT

SEQ ID NO: 105654 - protein, 161 aa, Unknown
  Bacterial polypetide isolated from the Sargasso Sea
MFEARIFTLYPDLYPGPLGEGLYGKALNEKKWNLEIVNIRDSAKDKHKTVDDAPYGGGSGMLIRPDVIANSLDQKINPDEKVIYLSPKGKLFNQDVAKELSKKKKLNLICGHFEGIDQRVIDTRNIEELSIGDFILSGGETAAFVVLDVILRLLPGVIGNK

SEQ ID NO: 105655 - protein, 222 aa, Unknown
  Bacterial polypetide isolated from the Sargasso Sea
QTLLKKKQKQKLKQKKQKRKQKQKLLKKKQKQTLLKKRKNNMFLSRVFTLYPEYFPGYLNKGVFGKAMGKIWNLEIVNIRDYANDKHKTVDDTPYGGGNGMIIKPDVLAKSLDENIKKKEKIVYLSPRGKLFNYKNAKEFANEKSINFICGHFEGVDERVIKSRNIEEFSIGDFVLSGGETAAFVILDSILRFVPGILGNENSSKEESFENGLLEYPHFTKP

SEQ ID NO: 105656 - protein, 222 aa, Unknown
  Bacterial polypetide isolated from the Sargasso Sea
MLKIKIITAYPEMFPGNLGFSLIGKALKEKKFLLETINLHNFGIDNRRTIDDEPFGGGPGMVIRPDVVEKALLSIKSNSPDNKKLQRIYLTPSGKPLNQHKLTKLANLDELIILCGRFEGVDQRAIDVLGFEEISIGDYILSGGEIAAQVIVEGCIRLIPGVLGQPESLLEESFSDNLLEYPHFTRPKVWTDAKKANHEVPEVLISGHHEKIKEWRKKKICR

SEQ ID NO: 105657 - protein, 100 aa, Unknown
  Bacterial polypetide isolated from the Sargasso Sea
GDFILSGGESASFVVIDSILRLLPNVLGNDMSKNDETFESGLLEYPQYTKPQIWEKKSVPDVLLSGDHNKIKDWRLSQSEDITRRRRPDLWKKYIEKDKK

SEQ ID NO: 105658 - protein, 177 aa, Unknown
  Bacterial polypetide isolated from the Sargasso Sea
FGGGSGMLLKPDVLGKSIDSNIKKGERIFYLSPKGKKFDQKIAKELSKEKTINLVCGHFEGVDERILDTRNIEEISIGDYILSGGESASFVVIDAVLRLLPNVIGNDISKNEESFENGLLEYPQYTKPQIWEKKSVPEVLLSGDHAKIKDWRLSQSKDITRRRRPDLWKKYLNKDKK

SEQ ID NO: 105659 - protein, 104 aa, Unknown
  Bacterial polypetide isolated from the Sargasso Sea
MSGFNFDVITLFPKAFELINNLGVITRALDKNMIDVNLHDLREYGEGSYRQVDDKPYGGGAGMVLKPEPIYKAYESIRKSPRSKTLLMTPQGKVLKQKDLMRWS

SEQ ID NO: 105660 - protein, 97 aa, Unknown
  Bacterial polypetide isolated from the Sargasso Sea
MLKKIRVLTIFPKFFDQFSEYGVVGKAIKSKKIDFSTFDIRSHGIGNNKSVDDTPYGGGPGMVMRPEPFVNSVLELKESDQYTPYVIMTSPNGNNFD

SEQ ID NO: 105661 - protein, 83 aa, Unknown
  Bacterial polypetide isolated from the Sargasso Sea
VLDSVLRLLPEVLGNEKSVSEETFENGLLEYPQYTKPQIWEQKSVPDVLLSGDHAKIKDWRLSQSEAITRVRRPDMWQKYKKN

SEQ ID NO: 105662 - protein, 138 aa, Unknown
  Bacterial polypetide isolated from the Sargasso Sea
SSNAEVNVFLTPSGEQLDETLLIKLLSFNSINLIAGRYEGFDQRILDIHADYKISVGHAVISGGEIPAMYILEALIRRIPGVLGNPDSLKFETFTDNKYDFPVYTRPETFNDLSVPEVLLSGNHKDIEEWKKNNLKDI

SEQ ID NO: 105663 - protein, 198 aa, Unknown
  Bacterial polypetide isolated from the Sargasso Sea
MVKQAKSHGLKRISLSEKPTSLITNNEVINGSWNVQIITLFPEAFPGVLGLSLTGKALQQRVWTLSTINLRDFGIGKHKKVDDTPSGGGPGLVIRADVLGPAIEKALSRAGASTPLVYLSPRGKTFNQSLAQNWSKTEGIILICGRFEGIDQRVIDHYGVEEVSMGDFVMTGGEIAAQAMIDTTVRLLPNVIGNQDSL

SEQ ID NO: 105664 - protein, 111 aa, Unknown
  Bacterial polypetide isolated from the Sargasso Sea
LKTRNIEEVSIGDFVLSGGEGASFVILDAILRFIPGILGNTNSAKEESFENGLLEYPQFTKPQIWEEKSVPDVLLSGDHAKIKDWRLSQSEAITRDRRPDLWQLYKKTKEN

SEQ ID NO: 105665 - protein, 38 aa, Unknown
  Bacterial polypetide isolated from the Sargasso Sea
PDVLLSGDHSKIKDWRLSQSEAITRDRRPDLWEKYKKN

SEQ ID NO: 105666 - protein, 59 aa, Unknown
  Bacterial polypetide isolated from the Sargasso Sea
ENGLLEYPQYTKPQIWEEKAVPDVLLSGDHNKIKDWRLSQSEAITRDRRPDLWEKYKKD

SEQ ID NO: 105667 - protein, 188 aa, Unknown
  Bacterial polypetide isolated from the Sargasso Sea
MPEDKHKTVDDTPYGGGSGMLIKPDVIGNALDKNTKKGEKIIFLTPRGKVFNHEYAKKLSKEKIINIICGHFEGIDQRVIDSRNIEEISIGDFVLSGGETASYVFLDAILRLIPGVIGNENSIAEESFENGLLEYPQYTKPQIWEKKSVPNVLLSGDHAKIKDWRLLQSEAITRDRRPDLWQKYNKKN

SEQ ID NO: 105668 - protein, 146 aa, Unknown
  Bacterial polypetide isolated from the Sargasso Sea
WSHSKAMENSNFENLIFICGHYKDIDQRVIDKYVTNEYSIGDYVVTNGEIPAMIMIDSIVRLIPGVLNNYDSVKTDSFFTGSELDGPYYTKPSEIDNLRVPEVLLSGDHKKINKWRKFERSLRTKNKRPDLWLKRTKEFESLEDKS

SEQ ID NO: 105669 - protein, 86 aa, Unknown
  Bacterial polypetide isolated from the Sargasso Sea
ALVVLDSILRLLPGVLGNEKSSIDETFENGLLEYPQYTKPQIWEEKSVPEVLLSGDHAKIKDWRLSQSEAITRVRRPDLWQKYKKD

SEQ ID NO: 105670 - protein, 222 aa, Unknown
  Bacterial polypetide isolated from the Sargasso Sea
MINVKILTGYPEMFPGGLAHSLMGKALKENIFTIETINLHDFGIDNRKSVDDEPFGGGPGMILRPDVVEKAILSISINKNIKSTKIYLTPSGSLLTQEKLGILAKLDEIIILCGRFEGVDQRAIDVLGFEEVSIGDYVLAGGEIAAQVLLEGCIRLIPGVLGHAESLSEESFSGNLLEYPHYTRPKTWEDSLGNKHDVPDVLISGHHSNIKKWRLDKSVEKT

SEQ ID NO: 105671 - protein, 157 aa, Unknown
  Bacterial polypetide isolated from the Sargasso Sea
KGERIFYLSPKGKKFDQKIAKELSKEKTINLICGHFEGVDDRILNTRNIEEISIGDYILSGGESASFVVIDTILRLLPNVLGNDMSKKDESFENGLLEYPQYTKPQIWEKKSVPEVLLSGDHAKIKDWRLAQSEAITRRQRPDLWEKYTKEKKNEKY

SEQ ID NO: 105672 - protein, 98 aa, Unknown
  Bacterial polypetide isolated from the Sargasso Sea
YLSPKGRPFKQIDAKNFSQSSGVSILCGHFEGIDQRVLDIYEIKEISMGDYILSGGEVASFTFLDSILRLLPGVLGNEASIEDESFSDDLLEYPQYTK

SEQ ID NO: 105673 - protein, 231 aa, Unknown
  Bacterial polypetide isolated from the Sargasso Sea
MLTVKVFTLYPEIFPGPLKKGLFGKALTKKLWDLKVIDIRDFAEDKHKTVDDKPFGGGSGMLLRADVLSKSIDKNVKQKEKIFYLSPKGKIFDQKKAKQLSNEKVINLICGHFEGIDERVLEARNIDQISIGDYILSGGESASFVIIDAVLRLLPGVIGNSSSKIDESFENDLLEYPQYTKPQIWEKRSVPKVLLSGDHKQIKDWRLSQSEDITRRLRPDLWKKYLDKDKK

SEQ ID NO: 105674 - protein, 51 aa, Unknown
  Bacterial polypetide isolated from the Sargasso Sea
EISLGDFVLSNGDFASIVFIDALSRLIKGVAKEENSILNDSFYNGLLKGPV

SEQ ID NO: 105675 - protein, 222 aa, Unknown
  Bacterial polypetide isolated from the Sargasso Sea
MWTARVFTLYPELFPGPLDIGLYKKAREKKLWSLEVVNIRDYATDKHKTVDDTPFGGGSSMLMRADVIANSLDKNISNKNEPIIYLTPKGKKFDQIYAKKAMQKNINIICGHFKGVDQRLLETRNIEEVSIGDYILSGGEIGAFVLIDAIVRMIPGVIGNSKSLPEETFEKNLLECPQYTKPQKWEKKEVPDVLISGDHAKIKDWRLVQSEDITRRRRPDLW

SEQ ID NO: 105676 - protein, 48 aa, Unknown
  Bacterial polypetide isolated from the Sargasso Sea
PQKWEEKEVPDVLLSGDHAKIKDWRLSQSEDITRRRRPDLWEKYKKNK

SEQ ID NO: 105677 - protein, 55 aa, Unknown
  Bacterial polypetide isolated from the Sargasso Sea
LKYPHIPNPQIWEQKSVPDVLLSGDHAKIKDWRLSQSEAITRDRRPDLWHKYKKN

SEQ ID NO: 105678 - protein, 150 aa, Unknown
  Bacterial polypetide isolated from the Sargasso Sea
MWQAQVFTLYPEVFPGPLSKGLYGKALSKNLWNLKIINIRDAADDKHKTVDDTPYGGGSGMLLKADVLAKSLDQNKIKDHKIIYLSPRGKKFDQDYAQQLSKEKSISLICGHFEGVDERILSTRNIEEISVGDYVLSGGETAAFVILIQF

SEQ ID NO: 105679 - protein, 190 aa, Unknown
  Bacterial polypetide isolated from the Sargasso Sea
MHIYSIISLFPGMFDPLKNLGISGRVIKKDIAKLNFFNPRDYADDKYKTVDDSPFGGGPGMVMKAEPLFLAHKDACNSILNSSYNLKNKKIKTIYFSPQGKVLSQKKICDYANSGDNLILVCGRYEGVDQRFIDTCVDEVVSVGDYVLSGGEIPAMTMLDGVFRLLPGSLKGESVNNDSFSDNLLGLLRL

SEQ ID NO: 105680 - protein, 122 aa, Unknown
  Bacterial polypetide isolated from the Sargasso Sea
IICERFEGIDQRVIETRNIEEYSLGDFVLSGGETASFVFIDAILRLIPGIIGNENSIKDESFENGLLEYPQYTKPQIWEKKEVPNVLLSGDHAKIKHWRLSQSEAITRDRRPDLWQKYNKKN

SEQ ID NO: 105681 - protein, 87 aa, Unknown
  Bacterial polypetide isolated from the Sargasso Sea
MFQVKIFTLYPDFFPGILSKGIYGRAIEKSLWNLDVINIRDYAKDKHKTVDDTPYGGGEGMVLKPDVVAKALDQNLKKNEKIIYLTP

SEQ ID NO: 105682 - protein, 121 aa, Unknown
  Bacterial polypetide isolated from the Sargasso Sea
MWQAQVFTLYPEVFPGPLSKGLYGKALSNNLWKLKVVNIRDAADDKHKTVDDTPYGGGSGMLLKADVLAKSLDENKNESERILYLSPKGKKFDQNLAKELANEKSLSLICGHFEGVDERIL

SEQ ID NO: 105683 - protein, 101 aa, Unknown
  Bacterial polypetide isolated from the Sargasso Sea
ISIGDYIISGGETACYIVLDSVLRLLPGVLGNKDSIVDESFENGLLEYPQYTKPQIWQKNKVPEVLLSGDHAKIKDWRLSQSEAITRDRRPDLWQKHNKKN

SEQ ID NO: 105684 - protein, 119 aa, Unknown
  Bacterial polypetide isolated from the Sargasso Sea
MLQAQIFTLYPEIFPGPLDKGLYGKAMAKKLWSLNVINIRDAAKDKHKTVDDTPYGGGTGMLLKPDVLANSIDQNVSKRERIFYLSPKGKKFDQKLAQDLSKEKSFSLICGHFEGVDER

SEQ ID NO: 105685 - protein, 153 aa, Unknown
  Bacterial polypetide isolated from the Sargasso Sea
MTPKGQIFTQEIAEAFSKTSGINILCGRFGGVDERVIQHYKPIEISIGDFILSGAEVAAQVLIDSIVRLLPGTLGNIDSTYKESFSQNLLEHPQYTKPNVWNNTEVPKVLLSGNHKEIEFWRSEQSKRITKERRSDLWQKYLNSDIEARKLKK

SEQ ID NO: 105686 - protein, 141 aa, Unknown
  Bacterial polypetide isolated from the Sargasso Sea
MLQVQLFTLYPEVFPGPMNKGLYGKALAKKLWSLNVVNIRDAAKDKHKTVDDTPYGGGSGMLLKPDVLANSMDENVKKGERIFYLSPKGKKFDQKLAQDLSKENSFSLICGHFEGVDERILSTRNIEEISIGDYILSGGET

SEQ ID NO: 105687 - protein, 134 aa, Unknown
  Bacterial polypetide isolated from the Sargasso Sea
MLQAQVFTLYPDIFPGPLGKGLYGKAMSKKLWSLNVINIRDAATDKHKTVDDTPYGGGTGMLLKPDVLANSIDRNINKGDRILYLSPKGRVFNQKLAHDLSFEKSFSLICGHFEGVDERVLSTRNIEEISVGDY

SEQ ID NO: 105688 - protein, 50 aa, Unknown
  Bacterial polypetide isolated from the Sargasso Sea
YTKPQIWEEKTVPDVLLSGDHAKIKDWRLSQSEAITRDRRPDLWQKYKKN

SEQ ID NO: 105689 - protein, 229 aa, Unknown
  Bacterial polypetide isolated from the Sargasso Sea
MFTARIFTLYPDMFPGPLNEGLFRKAMEKNIWNLEKVDIRKYAADKHTTVDDTPYGGGSGMLMKPDVVASAIDKNVKKGEKVIFLTPRGKIFNQNIAKELSLEKTINIICGRFEGIDQRVVETRNIQEYSLGDFILSGGETAAFVFIDAIIRLLPGILGNENSIKDESFENGLLEYPQYTKPQIWEEKEVPNVLLSGDHAKIKHWRLSQSEAITRDRRPDLWQKYNKKN

SEQ ID NO: 105690 - protein, 150 aa, Unknown
  Bacterial polypetide isolated from the Sargasso Sea
YLSPRGKKFDQNVARSLSKETNLNLICGHFEGVDQRLLETRNIEEYSLGDFVLSGGEPASFVFVDALIRLLPGVLGNDDSTKEESFENHLLEYPQYTKPREWEGKSPPEVLFSGDHAKIKGWRLSQSEAITRRQRPDLWKKYLEKKNEKH

SEQ ID NO: 105691 - protein, 151 aa, Unknown
  Bacterial polypetide isolated from the Sargasso Sea
MQNFSNTVRSEISQAKLNNLSKHDEMLILCGRFEGVDQRAIEILDFQEISIGDYVLSGGEIAAQVLVEGCIRLIPGVLGQPQSLLEESFSNNLLEYPHYTRPQTWEDIQGNKHEVPDVLTSGHHEKIDKWRKEKSVEKTKELRPDLYKKEI

SEQ ID NO: 105692 - protein, 245 aa, Unknown
  Bacterial polypetide isolated from the Sargasso Sea
MNFNIVTIFPNELSQALSFGVIGNAIRDDIIKINYFDPRIHADNKHNSIDDKPYGGGPGMVIQAKPVLESIDQARDGNSDIPVFFLSPQGKKFNQEKAKEISMLDQIIIVSSRYEGLDQRAMDQTDNHEEISIGDFILSGGETACTVVIDSVARLIPGVLGDDDSVVEESFSNGLLEYPHYTRPSEVHGQGVPEILLSGDHEKIKDWRKIQSLRNTFIKRPDLIDESKLTVEELKVIDDIKNDLE

SEQ ID NO: 105693 - protein, 134 aa, Unknown
  Bacterial polypetide isolated from the Sargasso Sea
MLQAQVFTLYPDLFPGPLDKGLYGKAMSKKLWSLNVINIRDAATDKHKTVDDTPYGGGTGMLLKPDVLANSIDKNVNKGERILYLSPKGKVFNQKLAQDLSLEKSFSLICGHFEGVDERVLSTRNIEEISIGDY

SEQ ID NO: 105694 - protein, 87 aa, Unknown
  Bacterial polypetide isolated from the Sargasso Sea
AFVFIDAILRLLPGVLGNDNSTKDESFENGLLEYPQYTKPQIWEEKEVPNVLLSGDHAKIKHWRLSQSEAITRDRRPDLWQKYNKKN

SEQ ID NO: 105695 - protein, 151 aa, Unknown
  Bacterial polypetide isolated from the Sargasso Sea
KLETIIYLTPRGKLFNHKIAKDLSNKKVINLICGHFEGVDERVLEKKNIQEISIGDFVLSGGETAAYAVLDATLRYIPGILGNKNSIEDESFENGLLEYPQFTKPQIWQEMEVPEVLLSGDHAKIKDWRLSKSEDITRDRRPDLWKKYKRN

SEQ ID NO: 105696 - protein, 93 aa, Unknown
  Bacterial polypetide isolated from the Sargasso Sea
AGGEIASQVLVESIVRLLPGTLGDVNSASSETFSKDLLEYPQYTRPKKWKNLTIPDILLSGNHRNISEWRLKQSEKLTQKVRPDIWKNYKKSK

SEQ ID NO: 105697 - protein, 145 aa, Unknown
  Bacterial polypetide isolated from the Sargasso Sea
MWTVRVFTLYPDIFPGPLNKGLYGKALQKKLWDLKVINIRDSASDKHKTVDDKPFGGGTGMLIKPDVLGKSIDKNVKKSERIFYLSPKGKKFDQKFAKELVKEKAINLVCGHFEGVDERILSSRNIEEISIGDYILSGGESASIV

SEQ ID NO: 105698 - protein, 101 aa, Unknown
  Bacterial polypetide isolated from the Sargasso Sea
LALIDALSRKIPGVLGNQESFKNDSFENNLLKGPVYTRPQIFEEKDVPEILLSGNHEKINDWKILSSLQRTIERRPDLLDGVKLTKKQKKLLDNLLSKRIL

SEQ ID NO: 105699 - protein, 190 aa, Unknown
  Bacterial polypetide isolated from the Sargasso Sea
MFLSRVFTLYPDYFPGYLDKGLFGKSKGKEWNLEIINIRDYALDKHKTVDDTPYGGGNGMIMKADVLASSLDANVKSGEKTIYLSPRGKVFNSKLAREFSNENSINLICGHFEGVDERILESRNIEEISIGDFILSGGEVAAFVVIDSILRFIPGILGNLNSSRDESFENGLLEYPQFTKPQIWEEKKVP

SEQ ID NO: 105700 - protein, 124 aa, Unknown
  Bacterial polypetide isolated from the Sargasso Sea
MYRVKIITLFPNSFPGLLNTGVVGKALKKKIWSLKTIDPRKYSKGNYKKVDDTTAGGGPGMVLKADVIGKSVDACYKNIKSKDSYPMIYLSPRGTPLTQSKVINFSKMKGINILCGRYEGIDQR

SEQ ID NO: 105701 - protein, 116 aa, Unknown
  Bacterial polypetide isolated from the Sargasso Sea
GIDQRLLDAREIEEISLGDYVLSGGESASFVFLDSILRLLPNVLGNKESLIEESFEKGLLEHPHYTKPEKWEKKRPPDVLLSGDHAKINDWRLSQSEDITRRQRPDLWKKYLEKKK

SEQ ID NO: 105702 - protein, 143 aa, Unknown
  Bacterial polypetide isolated from the Sargasso Sea
MKFNIVTIFPNELMRSLNYGVIGNAINDNKIRIDCHDPRIHADNKHKSIDDKPYGGGPGMVMQAEPVLKSIQQARNGEINIPVVFLSPQGKTFNQDKAKELSKLDEIIIVSSRYEGLDQRAIDQTDNHEELSIGEYILSGGET

SEQ ID NO: 105703 - protein, 42 aa, Unknown
  Bacterial polypetide isolated from the Sargasso Sea
KKAVPDVLLSGDHNKIKHWRLSQSEAITRDRRPDLWEKYKKN

SEQ ID NO: 105704 - protein, 202 aa, Unknown
  Bacterial polypetide isolated from the Sargasso Sea
KKIWDLKIIDIREYANDKHKTVDDTPYGGGSGMLLKPDVIAKSLDINTTKNEKIFYLSPRGKIFNQNIAKNLSKEKKINIICGHFEGIDQRVLDHRNIEEISIGDFVLSGGETASYVFLDAILRLIPGVIGNENSKNEESFENGLLEYPQYTKPQIWEEKSVPNVLLSGDHAKIKDWRLSQSEAITRVRRPDLWQKYNNKKN

SEQ ID NO: 105705 - protein, 215 aa, Unknown
  Bacterial polypetide isolated from the Sargasso Sea
GPLAGGIYGKAMRNGLWGLKTVNIRDYADDKHKTVDDTVFGGGSGMLMKPDIVANSLDKNISKGEKIFYLSPKGKKFNQSFANSLSKQNGINLICGHFEGVDDRLLSTRNIEEISIGDYVLSGGETAAFVILDAVLRLIPGVLGNKDSIKDETFENSLLEYPQFTKPKIWEGKSVPDVLFSGDHAKIKSWRLSQSEDITRRQRPDLWEKYLKDKK

SEQ ID NO: 105706 - protein, 205 aa, Unknown
  Bacterial polypetide isolated from the Sargasso Sea
MESQKEKEWDLETVNIRDYALDKHKTVDDTPYGGGNGMIMKADVLANSLDANIKTKEKTLYLSPRGKVFNSKLAREFSNEKTINLICGHFEGVDERIIESRDIEEISIGDFILSGGEVAAFVVIDSILRFIPGILGNINSSRDESFENGLLEYPQFTKPQVWEEKKVPNVLISGDHAKIKDWRLSQSEAITRDRRPDLWQKYKKN

SEQ ID NO: 105707 - protein, 97 aa, Unknown
  Bacterial polypetide isolated from the Sargasso Sea
MGFEEVSIGDYVLNGGEVAAQVLLEGCIRLIPGVLGHPESILEESFSEELLEHPHYTKPQVWIDENKTKHNVPDILLSGHHEKIKEWRLKKSVKKQR

SEQ ID NO: 105708 - protein, 230 aa, Unknown
  Bacterial polypetide isolated from the Sargasso Sea
MYEVKIFTLYPEIFPGPLAGGIYGKAMSKGLWNLKTVNIRDYADDKHKTVDDTVFGGGSGMLMKPDIVANSLDKNISKGEKIYYLSPKGKKFNQSFANSLSKQNGINLICGHFEGVDDRLLSTRNIEEISIGDYILSGGETAAFVILDAVLRLIPGVLGNKDSIKDETFENSLLEYPQFTKPKIWEGKSVPDVLFSGDHAKIKSWRLSQSEDITRRQRPDLWEKYLKDKK

SEQ ID NO: 105709 - protein, 64 aa, Unknown
  Bacterial polypetide isolated from the Sargasso Sea
MQINIVSIFPGFFDGPLGLSIPARAEAAGLVEYQMVDLRDYTYDRHKTVDDLPYGGGAGMVMKP

SEQ ID NO: 105710 - protein, 199 aa, Unknown
  Bacterial polypetide isolated from the Sargasso Sea
MLSVKVFTLYPEFFPGPLGHGLYKKAMENKIWSLKTINIRDFSLDKHKAVDDTPFGGGSGMVMRCDVLANAIDKNVKGKNEQIIYLSPKGKKFDQKYAKKIIKKNNLNIICGHFEGIDERLIENRNIEEVSIGDFILSGGETATFVFLDAIIRLLPGVLGNTDSLKEETFENNLLEYPQYTKPQKWEKKEVPSVLLSGD

SEQ ID NO: 105711 - protein, 229 aa, Unknown
  Bacterial polypetide isolated from the Sargasso Sea
MFKVNIFTLYPEFFPGPFDKGIYGNGLRKKIWDINIVNIRDFADDKHKTVDDTPYGGGSGMVMRADVIANSLDSNLHKNEKVYYLSPRGKLLNQEIVKKISKEKSLNILCGHFEGVDQRVLDNRNIEEISIGDYIISGGETASYVVLDSVLRLIPGMIGNEESIIEESFENGLLEYPQYTKPQIWQENKVPEVLLSGDHAKIKHWRLSQSEAITRDRRPDLWHKHNKKN

SEQ ID NO: 105712 - protein, 208 aa, Unknown
  Bacterial polypetide isolated from the Sargasso Sea
YGKAMRNGLWSLKTVNIRDYADDKHKTVDDTVFGGGSGMLMKPDIVANSLDKNISKGEKIFYLSPKGKKFNQSFANSLSKQNGINLICGHFEGVDDRLLSTRNIEEISIGDYVLSGGETAAFVILDAVLRLIPGVLGNKDSIKDETFENSLLEYPQFTKPKIWEGKSVPDVLFSGDHAKIKSWRLSQSEDITRRQRPDLWEKYLKDKK

SEQ ID NO: 105713 - protein, 173 aa, Unknown
  Bacterial polypetide isolated from the Sargasso Sea
MWTARVFTLYPEVFPGPLSKGLYGKALAKKIWNIKVVNIRESAEDKHKTVDDTPFGGGKGMLMKADVLSKSLDKNVSKSERIIYLSPKGKKFDQDIAKELSKEKILNLVCGNFEGVDERILETRNIEEISIGDYILSGGESASFVIIDAILRLLPGVIGNEESKNEESFENGL

SEQ ID NO: 105714 - protein, 62 aa, Unknown
  Bacterial polypetide isolated from the Sargasso Sea
PQYTRPKNWIDDEGNEHKVPEVLLSGNHEKIIEWKKNQSIEITKKNRPDIIKKKLKESKNNE

SEQ ID NO: 105715 - protein, 244 aa, Unknown
  Bacterial polypetide isolated from the Sargasso Sea
MYRTQLSAKVITLFPELFPGPLSASVTGRALENKLWSLETIDLKKYGKGRHKKVDDKPISGGPGMILMPDVLDEAILKANSLISGKNKLIVCMSPKGIPLNQNLVKNMLQYNEIIIVCGRFEGIDQRVIDKHKMKEISIGDFILTGGELGAMVLLDTLVRLLPGTLGNAESIISESFTDELLEAPQFTKPIDWNGMKVPEILQTGNHKRILEWKNTASEQITKKNRPDLFIKYIEKNKKKIKRK

SEQ ID NO: 105716 - protein, 142 aa, Unknown
  Bacterial polypetide isolated from the Sargasso Sea
SSLDQIIIICGQYEGFDERIRCLADEEISIGDYVLSGGEIPAITIINGLTRLLPGTLGDPDSLVDESHNSNLLEYPHYTRPKVFKRMCVPDVLISGDHKEIEVWRKKQMLKRTFKRRKDLINNGNLTFEQNNYDENSWFWDI

SEQ ID NO: 105717 - protein, 170 aa, Unknown
  Bacterial polypetide isolated from the Sargasso Sea
RPLFLLDPVGSPFDQSMARDLAALSGFSLLCGRYEGVDQRIREELVDATISIGDFVMAGGEFAAMVIVETVARLIPGVLGNDISIEDESFGDGLLEYPQWTRPAEFREMAVPEVLRSGDHARIERWRRAASIERTATLRPDLLDQRGVSPEEIALLKEFNISIDDRFLSD

SEQ ID NO: 105718 - protein, 232 aa, Unknown
  Bacterial polypetide isolated from the Sargasso Sea
MRFIILTSYPQMFPGSLGHSVIGNALDSKKFNLEIINLHDFGIDQRGSIDDEPFGGGPGMVIRPDVVENAMESISLKSNNVSKVFLTPSGEKLTQNKLEDLSQFDEIVILCGRFEGVDQRVIEILGFQEVSIGDYVLSGGEIAAQVLVEGCIRLIPGVLGQPQSLLEESFSNNLLEYPHYTRPKVWEDKKGNKHEVPDVLVSGHHEKIGRWRKDKALEKTKNLRPDLLKKGL

SEQ ID NO: 105719 - protein, 118 aa, Unknown
  Bacterial polypetide isolated from the Sargasso Sea
LIILCGHNKGVDQRVRDHLITHEISVGDFVLSGGELAAAVLCDSIIRLIPGVLGDESSALSDSFQDGLLAPPIYTRPSDYNGWKVPEILTSGNTYKINEWRDEKALERTQLRRPDLLK

SEQ ID NO: 105720 - protein, 158 aa, Unknown
  Bacterial polypetide isolated from the Sargasso Sea
PNNIKRKLIYFTPSGRPLKQANLLEFSRFDQLIILCGRFEGVDQRAINVLDFTEISIGDYILMGGETAAQVLVEGCIRLLPGVLGQPKSLLEESFSNDLLEYPHYTRPKVWKDTNNNNHEIPDILISGHHEKIKEWRLKKSIERTKITRPDLIKDKKA

SEQ ID NO: 105721 - protein, 227 aa, Unknown
  Bacterial polypetide isolated from the Sargasso Sea
MFLSRVFTLYPEYFPGYLKKGLFGRAMNKIWNLETVNIRDYAIDKHKTVDDTPYGGGSGMIIKADVLARSIDENVKSNEKIIYLSPKGKLFNYEYAKKLSKEKSINIICGHFEGVDERVLEARNIEEISIGDFILSGGEVAAFVILDSTLRFIPGILGNINSPIEESFENGLLEYPQFTKPQIWEEKSVPNVLISGDHAKIKDWRLSQSEAITRDRRPDLWQKYKKN

SEQ ID NO: 105722 - protein, 50 aa, Unknown
  Bacterial polypetide isolated from the Sargasso Sea
TWKNMTIPDVLLSGNHKNISKWRLDMSEKITKKMRPDIWKNYKKNKTSKK

SEQ ID NO: 105723 - protein, 154 aa, Unknown
  Bacterial polypetide isolated from the Sargasso Sea
MRTFNFITIFPDIINNFLKYGLVNRAIEKKIIEINTIYLRDFSDDSNLRIDDKSYGGGPGMVMRYKPVEDALKSITRKSYVIYLSPHGSKLDQHKISELTKAQNLTFLCGRYEGYDQRVVDDLVDEQISLGDYVISGGELPSLILSEGITRLLP

SEQ ID NO: 105724 - protein, 142 aa, Unknown
  Bacterial polypetide isolated from the Sargasso Sea
GKKFNQSFANSLSKQNGINLICGHFEGIDDRLLSTRNIEEISIGDYVLSGGETAAFVILDAVLRLIPGVLGNKDSIKDETFENSLLEYPQFTKPKIWEGKSVPDVLFSGDHAKIKSWRLSQSEDITRRQRPDLWEKYLKDKK

SEQ ID NO: 105725 - protein, 81 aa, Unknown
  Bacterial polypetide isolated from the Sargasso Sea
MTSGEKKDHKIWIISLFPDFFKAFLETGLSGRALKGERESGLSVHLVQLRDYSSNSYKGVDDSPYGGGPGMVMRPDTLQKA

SEQ ID NO: 105726 - protein, 155 aa, Unknown
  Bacterial polypetide isolated from the Sargasso Sea
MWQAQIFTLYPEFFPGPLSRGLYGKALEKKIWNLKVVNIRDAAEDKHKTVDDTPFGGGAGMLLKADILARSIDKNLVEKSRIFYLSPKGKKFDQKLAKELSKEKSINLICGHFEGVDERLLSTRNIEEISIGDFILSGGESAAFVIIDSILRLLP

SEQ ID NO: 105727 - protein, 236 aa, Unknown
  Bacterial polypetide isolated from the Sargasso Sea
MWTARVFTLYPELFPGPLDSGLYKKALEKKLWSLKVVNIRDYALDKHKKVDDTPFGGGSGMLMRADVIANSLDKNVFDKNEPVIYLSPKGKSFDQTYAKQMVKKNINIICGHFEGIDQRILEKRNIEEVSVGDFILSGGEIGAFIVIDTIVRLIPGVLGNANSLTEETFENNLLEYPQYTKPTKWEEINVPDVLLTGDHAKIKDWRLSQSEDITRRRRPDLWEKYKKKNEKYRRNK

SEQ ID NO: 105728 - protein, 263 aa, Unknown
  Bacterial polypetide isolated from the Sargasso Sea
MTKKYAFISVFPEIFVPFSQSGIVKKATDSGLIQIKSFNPRDFLSNKDRIDDKVYGGGPGMVFKSEPIQKCINHAKDTFSGLSKVIHLSASGETFSAQTARELSKEDSLIFLSSRYEGLDQRVIDAEVDMEISIGDYVLTGGEIPSMVLLEAIIRFIDGVVGDEESVKNDSFENALLEHPQYTRPEKNELGEVPETLLSGNHDQIEKWKRKHSLGKTFLRRQDLIKQHDLNQQDTDLIKDFLSDLGYESDRIAELLSIINDEN

SEQ ID NO: 105729 - protein, 160 aa, Unknown
  Bacterial polypetide isolated from the Sargasso Sea
MFKVKIFTIYPQFFPGPFDTGIYGNALEKKIWDLKTVNIRDFAEDKHKTVDDTPYGGGSGMVMRADVIANSLDKNLDTGEKVYYLSPRGKLFNQEIAKKISKEKSLNILCGHFEGVDQRVLDNKNIEEISIGDYVISGGETASYVVLDSVLRLIPWSIRK

SEQ ID NO: 105730 - protein, 228 aa, Unknown
  Bacterial polypetide isolated from the Sargasso Sea
MWTAKIFTLYPEMFPGPLSKGLYGKALSKKIWELKIVNIRNFATDKHKTVDDSPFGGGSGMLLKPDILAKSIDANYEFGEKIFYLSPKGKKFNQKLAKELSMEKSINLICGHFEGVDERVLNTRNIEEISIGDFILSGGESAAFVVIDSILRLLPGVIGNKESKLDESFENGLLEYPQYTKPQIWEEKSVPKVLLSGDHAKIKDWRLSQSEAITRDRRPDLWQKYKKN

SEQ ID NO: 105731 - protein, 236 aa, Unknown
  Bacterial polypetide isolated from the Sargasso Sea
MLDVKILTAYPNMFPGTLNHSLIGSALKEKKWTLEVINLHNFGYDNTKSIDDEPFGGGPGMIIRADVVEKALLSIEYPNNIKRKLIYLTPSGTPLKQANLLEFSRFNQLIILCGRFEGVDQRAINVLDFSEISIGDYILMGGETAAQVLVEGCIRLLPGVLGQPKSLLEESFSNDLLEYPHYTRPKVWRDTNNNNHEIPEVLISGHHEKIKEWRLKKSIERTKIIRPDLLIKDKKA

SEQ ID NO: 105732 - protein, 214 aa, Unknown
  Bacterial polypetide isolated from the Sargasso Sea
MSCFNFDVITLFPKAFELINNLGVITRALDKNLIDVNLHDLREYGEGSYRQVDDKPYGGGVGMVLKPEPIYKAYESIRKLPKSKTLLMTPQGKVLKQKDLVRWSTLDQIIIICGQYEGFDERIRFLADEEISVGDYVLSGGEIPAISIINGLTRLLPGTLGDPDSLVDESHNSSLLEYPHYTRPQVFRNMKVPDILTNGNHKQIELWREKQMLK

SEQ ID NO: 105733 - protein, 227 aa, Unknown
  Bacterial polypetide isolated from the Sargasso Sea
MFLSRVFTLYPEYFPGYLNKGLFGRAMGKFWNLETVDIRNYATDKHKTVDDTPYGGGNGMIIKADILARSIDENVKDNEKIIYLSPRGKLFNYEYAKKLSNEKTLNLVCGHFEGVDERVLETRNIEEISIGDYILSGGEAAAFVVLDSILRFVPRILGNANSSIDETFENGLLEYPQFTKPQIWEGKSVPNVLISGDHAKIKDWRLSQSEAITRDRRPDLWQKYKKN

SEQ ID NO: 105734 - protein, 228 aa, Unknown
  Bacterial polypetide isolated from the Sargasso Sea
MFVARIFTLYPEFFPGPLAKGLYGKALVEKIWKLETVNIRDYAEDKHKTVDDTTYGGGSGMLMKPDVLAKSLDQNIKSSEKIIYLSPKGKLFNQNLAKKLAKEKTLNLICGHFEGVDERVINSRNIEEVSIGDFVLSGGESAAIVLLDSVLRLLPKVLGNELSNKEESFENGLLEYPQYTKPQIWEEKPVPNVLLSGDHAKIKDWRLSQSEAITRDRRPDLWQKYKKN

SEQ ID NO: 105735 - protein, 207 aa, Unknown
  Bacterial polypetide isolated from the Sargasso Sea
MKFNIITIFPNELSQALSYGVIGNAIRDNIIKINYLDPRTHSDNKHDSIDDKPYGGGPGMVMQAKPVLESIKQARDGNNDIPVYFLSPQGKIFNQEKAKELSELDQIIIVSSRYEGLDQRAMDQTDNHEEISIGDFVLSGGETACAVVIDSVARLIPGVLGDDESVIEESFSNALLEYPHYTRPSEVNGQGVPEILISGDHEKIKEW

SEQ ID NO: 105736 - protein, 147 aa, Unknown
  Bacterial polypetide isolated from the Sargasso Sea
YDEIIYLTPDGELLNQKESNYLSTLKNIIIICGHYKGVDHRVREHIVTKEISIGDYVLSGGELPAAVLCDSIIRLLPGIIGDESSALSDTFQDNLIAPPIYTRPEIYKGLKVPKVLLSGNQSEIQKWNDDKSLERTKLLRPNLFDNE

SEQ ID NO: 105737 - protein, 231 aa, Unknown
  Bacterial polypetide isolated from the Sargasso Sea
MWTARVFTLYPEVFPGPLSKGLYGKALAKKIWNIKVVNIRESAEDKHKTVDDTPFGGGKGMLMKADVLSKSLDKNVSKSERIIYLSPKGKKFDQDIAKELSKEKILNLVCGNFEGVDERILETRNIEEISIGDYILSGGESASFVIIDAILRLLPGVIGNEESKNEESFENGLLEYPQYTKPQIWEKKSVPNVLISGDHSKIKDWRLSQSKDITRRRRPDLWKKYLDKEKK

SEQ ID NO: 105738 - protein, 229 aa, Unknown
  Bacterial polypetide isolated from the Sargasso Sea
MFTARIFTLYPDMFPGPLNEGLFRKAMEKNIWNLEKVDIRKYATDKHTTVDDTPYGGGSGMLMKPDVVASAIDKNVKKGEKVIFLTPRGKIFNQNIAKELSSEKTINIICGRFEGIDQRVVETRNIQEYSLGDFILSGGETAAFVFIDAILRLLPGILGNENSIKDESFENGLLEYPQYTKPQIWEEKEVPNVLLSGDHAKIKHWRLSQSEAITRDRRPDLWQKYNKKN

SEQ ID NO: 105739 - protein, 245 aa, Unknown
  Bacterial polypetide isolated from the Sargasso Sea
MKFNIVTIFPNELMRSLNYGVIGNAINDNKIRIDCHDPRIHADNKHNSIDDKPYGGGPGMVMQAEPVLKSIQQARNGDINIPVVFLSPQGKTFNQDKAKELSKLDEIIIVSSRYEGLDQRAIDQTDNHEELSIGEYILSGGETACAVVIDSISRLIPGVLGDRESILEESFSDGLLEYPHYTRPPEVNGDKVPEILLSGDHQKINQWRRMQSLKNTYLKRPDLIDRSNLSEDEIEIIDAIKNDPE

SEQ ID NO: 105740 - protein, 228 aa, Unknown
  Bacterial polypetide isolated from the Sargasso Sea
MFKAQVFTLYPEVFPGPLNKGLYGNALKKNLWSLKIVNMRDYAEDKHKTVDDTPYGGGSGMIIKPDVVAKSLDFNLEKGEKIYYLSPKGKVYDQKIANEISKKKYINLLCGHFEGIDQRVIEARKIEELSIGDFILSGGETAALVVIDSILRLIPGIIGNEKSIKEETFENGLLEYPQFTKPKIWEKMSVPDVLLTGDHGKIKHWRLAQSEAITRALRPDLWQKYKKN

SEQ ID NO: 105741 - protein, 227 aa, Unknown
  Bacterial polypetide isolated from the Sargasso Sea
MEVYIITPFPDSINILIENNIANQGVKKGLLTIETVNLRDFTKDNYKKIDDEPYGGGSGMVMMCEPLFSAIEYCISKSQKKPKIIFPSPKGKVLNHKISSNLSNENSLIFICGHYKGIDERVIEKYVDLEISIGDFIISNGELSTMIIFDSIARLVPGVLNDLNSAMTDSFVDDLLDAPYFTRPNEIDGLKVPEVLLSGDHKAIEKWRNDKKLEITKDRRPDLLEKK

SEQ ID NO: 105742 - protein, 72 aa, Unknown
  Bacterial polypetide isolated from the Sargasso Sea
MKILTEEESFENGLLEYPQYTKPQIWEDKSVPDVLLSGDHAKIKDWRLTQSEAITRDRRPDLWQKYKKFKKN

SEQ ID NO: 105743 - protein, 229 aa, Unknown
  Bacterial polypetide isolated from the Sargasso Sea
MFIAKVFTLYPDYFPGPLNKGLYGKAMEKKIWGLKTVDIREYALDKHKTVDDTPYGGGSGMLLKPDVIAKSIDANTKNGEKIYYLSPRGKVFNQNIAKEISKENKVNIICGHFEGIDQRVLDNRKIEEISIGDFILSGGETASYVFLDSILRLIPGVIGNEDSKNEESFENGLLEYPQYTKPQIWEEKSVPNVLLSGDHAKIKDWRLTQSKAITRDRRPDLWQKYNKKN

SEQ ID NO: 105744 - protein, 142 aa, Unknown
  Bacterial polypetide isolated from the Sargasso Sea
MLEVKIFTLYPDLFPGPLNIGIFKKARENKIWNLKVINIREYSKDNHGTVDDTPFGGGNGMLLRPDILASALDKNIKKGEKIIYLSPRGKKFDQNVARSLSKEKNLNLICGHFEGVDQRLLETREIEKGSLGDFVLSVVILK

SEQ ID NO: 105745 - protein, 207 aa, Unknown
  Bacterial polypetide isolated from the Sargasso Sea
MFIAKVFTLYPDFFPGPLDKGLYGKAMEKKIWDLKTVNIREYALDKHKTVDDTPYGGGSGMLLKPDVVAKSLDANIKNGEKIFYLSPRGKVFNQNIAKEISKENKVNLICGHFEGIDQRVLDNREIEEISIGDFVLSGGETASYVFLDAILRLIPGVIGNEESKNEESFENGLLEYPQYTKPQIWEEKSVPNVLLSGDHAKIKDWRL

SEQ ID NO: 105746 - protein, 199 aa, Unknown
  Bacterial polypetide isolated from the Sargasso Sea
MKENIIDCFIDLGKLFNDLGLNTSYEDSNKNCSKDEYQKFNEVINSHKASNPWFTEKYIRKSILSLASMCHKNELNSFISDYNIGQKSTNRIAIIMAGNIPLVGFHDFLCVLLSGNHAKIKLSSDDKILLPLFLNFLSDKYTFFKNKYEFVNSKMKDVDAVIATGSDNSNLYFKKYFGHLPHIFRKNRTSIAVISENGI

SEQ ID NO: 105747 - protein, 93 aa, Unknown
  Bacterial polypetide isolated from the Sargasso Sea
MSGGETAAYVILDSILRLVPGVLGNENSYKDESFENGLLEYPQYTKPQIWEKTPVPEVLLSGDHSKIKDWRLSQSEAITRHRRPDLWQKYKKN

SEQ ID NO: 105748 - protein, 241 aa, Unknown
  Bacterial polypetide isolated from the Sargasso Sea
MKTISIITPIPNMINSIVEQSILHKAIDNDSVKLHVVDLREFGLGNYRQIDDTPYGGGGGMILMAEPLFAALDQVINNLKDNDNTRIIYPSPQGQLWSHNKAIENRNFDNLIFICGHYKDIDQRVIDKYVTNEYSIGDYVVTNGEIPAMIMVDSIVRLIPGVLNNYDSVKTDSFYSGLELDAPYYTKPSEIDNLSVPNVLLSGNHEKINKWRMKERRQRTKNKRPDIWSKRIEKLESLEDK

SEQ ID NO: 105749 - protein, 232 aa, Unknown
  Bacterial polypetide isolated from the Sargasso Sea
MRVIILTSYPKMFPGSLGHSIIGNALENQKFTLETINLHDFGIDSRGSIDDEPFGGGPGMVIRPDVIERAINSIQKIDDNVLKIFLTPSGKKLTQTKLEEFSKCSEMIILCGRFEGVDQRAIEILGFQEISIGDYVLSGGEIAAQVLLEGCIRLIPGVLGHPKSLLEETFVNELLEYPHYTRPKIWVDKEGNNHEVPDVLTSGHHEKIEIWRKKKAIEKTKSIRPDLLKKGL

SEQ ID NO: 105750 - protein, 137 aa, Unknown
  Bacterial polypetide isolated from the Sargasso Sea
MWKARVFTLYPEIFPGPLSKGLYGKALQKKIWDLEVIDIRDSAEDKHKTVDDTPFGGGSGMLLKPNVLGKSLDSKLKNNERVFYLSPKGKKFDQKFAKNLTKEKTINLICGHFEGIDARIISTRNIEEISIGDYVLS

SEQ ID NO: 105751 - protein, 212 aa, Unknown
  Bacterial polypetide isolated from the Sargasso Sea
EGAERKKFSMDIINLHDFGISQRKNIDDIPFGGGPGMVIRPDVIEKAILSININPKLLSHRIYLTPAGKSLNQEKLGKMAKFDELIILCGRFEGVDKRAIDVLNFEEISIGDYVLSGGEIAAQVLVEGCIRLIPGVLGQPESLLQESFSENLLEYPHFTRPRVWTDSKQKKHEVPEVLTSGNHKKIEEWRYKQSVEKTKSIRPDLYIREQGK

SEQ ID NO: 105752 - protein, 78 aa, Unknown
  Bacterial polypetide isolated from the Sargasso Sea
LRLLPDVLGNEKSIEEESFENDFLEYPQYTKPQIWEEKTVPDVLLSGDHAKIKDWRLSQSEAITRVRRPDLWQKYKKN

SEQ ID NO: 105753 - protein, 92 aa, Unknown
  Bacterial polypetide isolated from the Sargasso Sea
MLSKYNVITLFPNLFDEWMKTGIISNGLDKNILQFQTTNLRDFGIGNYKQTDDAPYGGGPGMVMMVEPLDNAILNNKADINVFLTPSGSKLD

SEQ ID NO: 105754 - protein, 251 aa, Unknown
  Bacterial polypetide isolated from the Sargasso Sea
MRSNKSMKFNIVTIFPNELSQSLSYGVIGNAIRDNIIKINYFDPRIHADNKHDSIDDKPYGGGPGMVMQAKPVIESIEQARDGNSDIPVFFLSPQGKRFNQEKAKELSELDQIIIVSSRYEGLDQRAIDQTDNHEEISIGDFVLSGGETACAVVVDAVTRLIPGVLGDDESVIEESFSNGLLEYPHYTRPSEVNGQDVPGILLSGDHEKIKEWRKIQSLRNTFIKRPDLIDESKLTDDEIKVIDDIKNDPE

SEQ ID NO: 105755 - protein, 227 aa, Unknown
  Bacterial polypetide isolated from the Sargasso Sea
MFLSRVFTLYPEYFPGYLSKGLFGKSKGKEWDLETVNIRDYALDKHKTVDDTPYGGGNGMIMKADVLANSLDANIKTKEKTLYLSPRGKVFNSKLAREFSNEKTINLICGHFEGVDERILESRDIEEISIGDFILSGGEVAAFVVTDSILRFIPGILGNINSSRDESFENGLLEYPQFTKPQVWEEKKVPNVLISGDHAKIKDWRLSQSEAITRDRRPDLWQKYKKN

SEQ ID NO: 105756 - protein, 227 aa, Unknown
  Bacterial polypetide isolated from the Sargasso Sea
MFLSRVFTLYPEYFPGYLSKGLFGKSKGKEWDLETVNIRDYALDKHKTVDDTPYGGGNGMIMKADVLANSLDANIKAKEKTLYLSPRGKVFNSKLAREFSSEKTINLICGHFEGVDERILESRDIEEISIGDFILSGGEVAAFVVTDSILRFIPGILGNINSSRDESFENGLLEYPQFTKPQVWEEKMVPNVLISGDHAKIKDWRLSQSEAITRDRRPDLWQKYKKN

SEQ ID NO: 105757 - protein, 157 aa, Unknown
  Bacterial polypetide isolated from the Sargasso Sea
MLEVKIFTLYPDLFPGPLDIGIFKKARENKIWNLKVINIREYSKDNHGTVDDTPFGGGSGMLLRPDILASALDKNIKKKEKIIYLSPRGKKFDQNVARSLSKEKNLNLICGHFEGVDQRLLETRNIEEYSLGDFVLSGGEPASFVLVDALIRLLPGV

SEQ ID NO: 105758 - protein, 44 aa, Unknown
  Bacterial polypetide isolated from the Sargasso Sea
WEQKSVPDVLLSGDHAKIKDWRLSQSEAITRVRRPDMWQKYKKN

SEQ ID NO: 105759 - protein, 227 aa, Unknown
  Bacterial polypetide isolated from the Sargasso Sea
MKNIDIVSLFPEIIDLYIKNSPITKSLDDKDLLISTHQLRNFSLDKHKRVDDKQYGGDPGMVLMAEPLIKSIDHISELRGSKPLTILMSPQGKKLDPELLYEILDRDFIAVICGRYEGVDERFIEEKVDIEISIGDFIVSGGELPSLILIESLLRFLPGIIGNEMSLDNDSFGINFQNLLKGPVYTRPKIINGREVPEILLSGDPKKISKWRENISKKRTQERRKDL

SEQ ID NO: 105760 - protein, 227 aa, Unknown
  Bacterial polypetide isolated from the Sargasso Sea
MFLSRVFTLYPDYFPGYLNKGLFGKSKGKEWNLEIINIRDYALDKHKTVDDTPYGGGNGMIMKADVLASSLDANVKSGEKTIYLSPRGKVFNSKLAREFSNENSINLICGHFEGVDERILESRNIEEISIGDFILSGGEVAAFVVIDSILRFIPGILGNLNSSRDESFENGLLEYPQFTKPQIWEEKKVPNVLISGDHAKIKDWRLSQSEAITRDRRPDLWQKYKKN

SEQ ID NO: 105761 - protein, 228 aa, Unknown
  Bacterial polypetide isolated from the Sargasso Sea
MFKAKIFTLYPEYFPGPFDIGICKKAFEKKLWDLKLINIRDYADDKHKTVDDTPYGGGVGMLMRPDVVAKSLDANLEEKETVYYLTPKGKIFNQNIAQDIVKKNKVNILCGHFEGVDQRVLDSRNVEEISIGDFILSGGEMASFVVLDTVLRLVPGVLGNLNSTKDESFENGLLEYPQYTKPQIWEKLSVPDILLSGDHNKIKSWRLSQSEAITRHRRPDLWQKYKKD

SEQ ID NO: 105762 - protein, 230 aa, Unknown
  Bacterial polypetide isolated from the Sargasso Sea
MFIFQIFTLYPEFFPGPFKDGLYGKALEKKIWEFKIVNIREYANDKRKTVDDTPYGGGSGMLLKPDVIASALDQNTSINEKIFYLSPRGKVFNQNLAKDLSKQKKVNVICGHFEGIDQRVLDHRKIEEISIGDFILSGGETASYVFLDAILRLIPGVIGNENSKNEESFENGLLEYPQYTKPQIWEKISVPNVLLSGDHAKIKDWRLSQSEAITRVRRPDLWQKYNNKKN

SEQ ID NO: 105763 - protein, 152 aa, Unknown
  Bacterial polypetide isolated from the Sargasso Sea
MPKVKKLTQKKLTNYNLNKDFILLNGRYEGIDQRVIDYYEFQEISVSDVILNGGEIASLLFIEALMRLQPGVLGNNDTHTIESFQNGLVEHDQFTRPNPWITPDHSEIEVPSILVSGKHADIDLWKHQNSLENTEKNRPDLFKNYLKKNKNE

SEQ ID NO: 105764 - protein, 178 aa, Unknown
  Bacterial polypetide isolated from the Sargasso Sea
QAEPIINTVEEIKKQSDTHVVLVSPHGIPFNQEKAKELQSKNNITIVCGRYEGIDYRFENYYADEVISVGDYVLNGGELPALVIVESIARLVEGFIGHKDSLEDSFMNGLLEHPQFTRPEKSEFGDVPEILLSGDHKKISRWKLKESLRATLLRRPDMLEKRILTELEEELIIEIKDE

SEQ ID NO: 105765 - protein, 95 aa, Unknown
  Bacterial polypetide isolated from the Sargasso Sea
MNFNIVTIFPELVDNFVSYGILSHAIAKKKISIKTWNPRDFSENKSGRIDDKPYGGGPGMVLQSDPLIKTIDTIKEKSETYVMCMAPHGKPLNQN

SEQ ID NO: 105766 - protein, 143 aa, Unknown
  Bacterial polypetide isolated from the Sargasso Sea
MFKARIFTLYPELFPGPFNEGLFGKALKEKIWELEKVNIRDYATDKHKTVDDTPYGGGSGMLMRPDIISRAIEDNIKKSEKIIYLSPRGKLFNHEIAKDLSNQKVINLLCGHFEGIDERVLVKKNIEEISIGDFVLSGGETAA

SEQ ID NO: 105767 - protein, 238 aa, Unknown
  Bacterial polypetide isolated from the Sargasso Sea
MLDVKILTAYPEMFPGSLEHSLIGKALKENIFKISTIDLHQFGIDERMSIDDEPFGGGPGMVLRPDVVEKALNSIPKTHNIKSTKIYLTPSGAPLNQEKLGNLAKMEKITILCGRFEGVDQRAIDVLGFEEISIGDYVLAGGEIAAQVLLEGCIRLIPGVLGHPKSLLEESFSNNLLEYPHYTRPKSWEDSLGKKHDVPEVLTSGHHGNIKTWRHNKSVEKTKNIRPDLFNKKEKKQD

SEQ ID NO: 105768 - protein, 142 aa, Unknown
  Bacterial polypetide isolated from the Sargasso Sea
MFLSRVFTLYPEYFPGYLSKGLFGKSKGKEWDLETVNIRDYALDKHKTVDDTPYGGGNGMIMKADVLANSLDANIKAKEKTLYLSPRGKVFNSKLAREFSSEKTINLICGHFEGVDERILESREIEEISIGDFILSGGEVAA

SEQ ID NO: 105769 - protein, 221 aa, Unknown
  Bacterial polypetide isolated from the Sargasso Sea
MKIIDIISATPELLKSPFSGSIMSRAIEKGIVQVNIHDLKDFSNNNKKQIDDYQYGGGSGMVLMIEPIDNCISHLKKFNDYSEVIFMTPDAKKLTQKISNKLSISGNLIILCGHYKGIDQRVRDNLVTMELSIGDYVLSGGELPAAVLCDSIIRLIPGVLNDETSALEDSFQDGLIAPPVYTRPSKYKNLKVPEILLSGDPKKVKEWREKKSDEKTKVIKP

SEQ ID NO: 105770 - protein, 228 aa, Unknown
  Bacterial polypetide isolated from the Sargasso Sea
MFQAKIFTLYPEYFPGPFEIGICKKAFEKKLWDLKLINIRDYADDKHKTVDDTPYGGGVGMLMRPDVVAKSLDANLDEKETVYYLTPKGKIFNQDIAKDIVKKNKVNILCGHFEGVDQRVLDSRNVEEISIGDFILSGGEMASFVVLDTVLRLVPGVLGNLNSTKDESFENGLLEYPQYTKPQIWEKLSVPDILLSGDHNKIKSWRLSQSEAITRHRRPDLWQKYKKD

SEQ ID NO: 105771 - protein, 156 aa, Unknown
  Bacterial polypetide isolated from the Sargasso Sea
MWKARIFTLYPEMFPGPLGRSLYAKALKKKLWDLEVINIRDSALDKHKTVDDNPFGGGSGMLLKPDVLSKSLDSNIIKGEKVFYLSPRGKIFDQKIAKKFSNEKIINLVCGHFEGVDERILKTRNIEEISIGDYILSGGETAAFVILDSVIRLCPG

SEQ ID NO: 105772 - protein, 211 aa, Unknown
  Bacterial polypetide isolated from the Sargasso Sea
GAIWKTLAKKIWSLEVINIRDSAKDKHKTVDDTPFGGGSGMVLKPDILGKSIDKNTKKSERIFYLSPKGKSFNQSIAKELSKEKIINLLCGHFEGVDDRILSTRNIEEISIGDYILSGGETASFVIIDAVLRLLPGILGNDLSKEEESFENGLLEYPQYTKPQIWEKKTVPEVLLSGDHAKIKDWRLSQSKDITRRRRPDLWKKYLKKDKK

SEQ ID NO: 105773 - protein, 122 aa, Unknown
  Bacterial polypetide isolated from the Sargasso Sea
CGHFEGVDERLLKTRNIEEVSIGDFVLSGGEGASFVILDAILRFIPGILGNTNSAKEESFENGLLEYPQFTKPQIWEEKSVPDVLLSGDHAKIKDWRLSQSEAITRDRRPDLWQLYKKAKEN

SEQ ID NO: 105774 - protein, 155 aa, Unknown
  Bacterial polypetide isolated from the Sargasso Sea
KNINANEKIFYLSPRGKIFDQKIAKQISKENGINLICGHFEGVDERILNTRNIEEISIGDYVLSGGETAAFVIIDSILRLLPGVIGNDMSKNEESFENGLLEYPQFTKPQIWEEKTVPEVLLSGDHGKIKDWRLSQSEAITRDRRPDLWQKYKKN

SEQ ID NO: 105775 - protein, 121 aa, Unknown
  Bacterial polypetide isolated from the Sargasso Sea
MKKLVIDEVISIGDYVLNGGELAALVLMEAIARQHKDFIGNEESLNDSFSDGLLEHPQYTRPKKTPYGNVPEILLSGNHEKINRWKLKESLRITLKNRPDLIKSKDLSNLEIELLNEINDE

SEQ ID NO: 105776 - protein, 77 aa, Unknown
  Bacterial polypetide isolated from the Sargasso Sea
RLLPGVLGNENSKLDETFENGLLEHPQYTKPQIWEKKAVPDVLLSGDHNKIKHWRLSQSEAITRVRRPDLWEKYKKN

SEQ ID NO: 105777 - protein, 152 aa, Unknown
  Bacterial polypetide isolated from the Sargasso Sea
KKGDKIFYLSPKGKKFDQKLAQDISKKKSISLICGHFEGVDERVLTTRNIEEISIGDYVLSGGETAALVVLDSILRLLPGVLGNNKSSIEETFENGLLEYPQYTKPQIWEKKTVPEVLLSGDHSKIKDWRLSQSEAITRDRRPDLWQKYKKD

SEQ ID NO: 105778 - protein, 242 aa, Unknown
  Bacterial polypetide isolated from the Sargasso Sea
MKKVSIITPTPEIITSVMQNSIVAKAKNSNIVDFKIINLRDYSDKKYKKVDDNPYGGGAGMVMMAEPLFKAIDDVLKKINSDKNFKIIYPSPQGKTWDHNKALSFSSSNENLIFICGHYKGIDERVVEKYVTDEYSLGDYVISNGELSSLVIIDSIVRLMPGVLNQISSAQTDSFYNNLLDAPYYTNPRELDGMKVPDVLLSGDHKKITSWKNKNRKLRTMTNRPDLWNRYINENKSEIRNE

SEQ ID NO: 105779 - protein, 234 aa, Unknown
  Bacterial polypetide isolated from the Sargasso Sea
MHFNLITIFPELVENYVSHGIIAKAIEAKKLSIMAWNPREFSADKNKRIDEKPYGGGPGMVLQPEPLIETINHIKKKNKTYVVSMAPHGRVLNQKKLSELSKKKNLTIISGRYEGIDNRVEETSVDEVCSLGDYVLNGGELPSLILLEGIARLIEGVLGDDNSLSEESFNHGLLEFPQYTRPENSKYGNVPEVLLSGNHAEIKRWRLKESLRRTLSFRPDLIELRNLTVEEKEL

SEQ ID NO: 105780 - protein, 228 aa, Unknown
  Bacterial polypetide isolated from the Sargasso Sea
MWQAQVFTLYPEVFPGPLSKGLYGKALSNNLWKLKVVNIRDAADDKHKTVDDTPYGGGSGMLLKADVLAKSLDENKNKSERILYLSPKGKKFDQNLAKELANEKSLSLICGHFEGVDERILSTRNIEEISIGDYVLSGGESAAYVVIDSILRLLPGVLGNENSKLDETFENGLLEYPQYTKPQIWEEKAVPDVLLSGDHNKIKHWRLSQSEAITRVRRPDLWEKYKKN

SEQ ID NO: 105781 - protein, 190 aa, Unknown
  Bacterial polypetide isolated from the Sargasso Sea
IIQFSNNKNGKVDEVPFGGGPGMVINPEVLDKALKSVAKAVGRRIYLTPRGKKFDQEFAKILSQEKGAVFICGRYEGVDERFLIHNEIEEVSVGDFVLSGGEIGAQLIMDATIRLIPEVIGNAAGLVDESFERHLLEYPLYTHPRVWKDIEVPEVLLSGNHKKIQMWKLKKSEKLTKFRRPDLWSKYIKS

SEQ ID NO: 105782 - protein, 241 aa, Unknown
  Bacterial polypetide isolated from the Sargasso Sea
MNFNLVTIFPEITKLLDFGVIGKAIEKDLISINGLNPRDFSKNINKNVDDAPYGGGEGMVMMAEPLALAIKSIKNKGKVLLMSPQGEHLSNAHIDNLLDEKSITIICGRYEGIDERFIENYVDQEFSIGDFVLSGGEIPALALIDALSRKIPGVLGNQESFKNDSFENNLLKGPVYTRPQIFEEKDVPEILLSGDHEKINDWKILSSLQRTIERRPDLLDGVKLTKKQKKLLDNLLSKRIL

SEQ ID NO: 105783 - protein, 152 aa, Unknown
  Bacterial polypetide isolated from the Sargasso Sea
NKGDRILYLSPKGKVFNQKLAQDLSLEKSFSLICGHFEGVDERVLSTRNIEEISVGDYVLSGGETAALVVLDSVLRLLPGVLGNDKSASEETFENGLLEYPQYTKPQIWEEKSVPDVLLSGDHAKIKDWRLSQSEAITRDRRPDLWHKYKKN

SEQ ID NO: 105784 - protein, 71 aa, Unknown
  Bacterial polypetide isolated from the Sargasso Sea
TRPAVLADKEVPPVLLSGHHENIRRWRLKQALGRTWLRRPDMLNALALTKEQRKLLDEFQLEHQALQQHDS

SEQ ID NO: 105785 - protein, 214 aa, Unknown
  Bacterial polypetide isolated from the Sargasso Sea
MTWKANILTLYPEIYPGYLSYSLLGKALEKKIWEMNIYNLRDFGEGKHKTVDDKPFGGGAGMIIKPDILGNAIEETLIKNHAQQSLVYLSPKGRPFKQIDAKNFSQSSGVSILCGHFEGIDQRVLDIYEIEEISMGDYILSGGEVASFTFLDSILRLLPGVLGNEASIEDESFSDDLLEYPQYTKPQEYKNIKVPDVLLYGNHEEIEKWRKEKS

SEQ ID NO: 105786 - protein, 228 aa, Unknown
  Bacterial polypetide isolated from the Sargasso Sea
MLQAQVFTLYPDIFPGPLGKGLYGKAMSKKLWSLNVINIRDAATDKHKTVDDTPYGGGTGMLLKPDVLANSIDQNINKGDRILYLSPKGKVFNQKLAQDLSLEKSFSLICGHFEGVDERVLSTRNIEEISVGDYVLSGGETAALVVLDSVLRLLPGVLGNDKSASEETFENGLLEYPQYTKPQIWEEKSVPDVLLSGDHAKIKDWRLSQSEAITRDRRPDLWHKYKKN

SEQ ID NO: 105787 - protein, 206 aa, Unknown
  Bacterial polypetide isolated from the Sargasso Sea
MFLSRIFTLYPEYFPGYLNKGLFGKAMNEKIWNLETVNIRDYTFDKHKTVDDTPYGGGSGMIIKADVLAKSLDENIKEKEKIIYLSPKGKLFDHKYAKELSTEKTLNLICGHFEGIDERIIQNRNIEEVSIGDFVLSGGEVATFVVLDAILRFIPGVLGNENSTQDESFENGLLEYPQYTKPQNWEDKSVPDVLLSGDHAKIKDWR

SEQ ID NO: 105788 - protein, 59 aa, Unknown
  Bacterial polypetide isolated from the Sargasso Sea
DQRVPDVLLSGNHAHIRRWRLQQSLGRTYERRADLLESRSLSGEEKKLLEEYILARDDS

SEQ ID NO: 105789 - protein, 231 aa, Unknown
  Bacterial polypetide isolated from the Sargasso Sea
MYKNQLSVKVITLYPELFPGPLSASVTGRALDKNIWSLETVDLKQFGKGKHKKVDDKPISGGPGMILMPDVMDEAIINANSSVSSENKLIICMSPKGIPLSQNVVKNMLQYNEIIIVCGRFEGIDQRVVDKHNMKEISIGDFILTGGELGAMVLLDTVVRLLPGTLGNPESLVSESFTDDLLEAPQFTKPIDWNGMKVPEILQTGDHQKILKWKNKTSQQITKKNRPDLFI

SEQ ID NO: 105790 - protein, 246 aa, Unknown
  Bacterial polypetide isolated from the Sargasso Sea
MKLYNLLTVYPEFFESFKSHGLIKKGLDRGLISINVINLRNYTNDKHKRVDFKPFGGGPGMIIQYTPVKEALKKIKSSKTILLSPQGKLLKQSKLNELSAENSITFICGRYEGFDERILDNLVDEEISIGDYVLSGGEIPAAVIIEGLTRLIPGIPENMESINNDSFCDHLLDHPHYTKPSEIDGFSVPDILLSGNHSEIKLWRRKQSLGITYLKRPDLLKNVNLTEEDDRLLQEFIAEYQEKKSD

SEQ ID NO: 105791 - protein, 144 aa, Unknown
  Bacterial polypetide isolated from the Sargasso Sea
KGINFNQKKAKEISKEKVINLICGHFEGVDERILNTRNIEQLSIGDYVLSGGESASFVVIDTVLRLLPGVLGNNNSKDDESFEHDLLEYPQYTKPQIWEKKSVPEVLLSGNHSKIKDWRLSQSKDITRRQRPDMWKKFLEKEKK

SEQ ID NO: 105792 - protein, 203 aa, Unknown
  Bacterial polypetide isolated from the Sargasso Sea
GPGMLMKANPLVDSIDFCKAKAEKKTKVIYVSPQGKLFDQSLSKELANEKDLIFLCGRYEGIDNRVLDSRVDLEISLGNFILSGGELAALAIHDSICRHYEGFLGDQESLVEETFVNNLLEYPQYTKPRQSEHGNVPEVLLSGDHKKISNWRKKQALGKTFLNRRDLLERSKLKSEDIEILEEFLSELGYDSDRIIDLLNEIR

SEQ ID NO: 105793 - protein, 184 aa, Unknown
  Bacterial polypetide isolated from the Sargasso Sea
DKHKTVDDTPYGGGTGMLIKADVLANSLDKNVKKGERIFYLTPKGKKFDQKFAQDLSKEKSISLICGHFEGVDERVLRTRNIEEISIGDYVLSGGETAALVVLDSILRLLPGILGNDKSSINETFENGLLEYPQYTKPQIWEKKSVPDVLLSGDHSKIKDWRLSQSEAITRDRRPDLWQKYKKN

SEQ ID NO: 105794 - protein, 165 aa, Unknown
  Bacterial polypetide isolated from the Sargasso Sea
MWQAQVFTLYPEVFPGPLSKGLYGKALSNNLWKLKVVNIRDAAGDKHKTVDDTPYGGGSGMLLKADVLAKSLDENKNESERILYLSPKGKKFDQNLAKELANEKSLSLICGHFEGVDERILSTRNIEEISIGDYVLSGGESAAYVVIDSILRLLPGVLGNENSKL

SEQ ID NO: 105795 - protein, 182 aa, Unknown
  Bacterial polypetide isolated from the Sargasso Sea
MWQAQVFTLYPEVFPGPLSKGLYGKAMSKNLWDLKVVNIRDAAEDKHKTVDDTPYGGGSGMLLKADVLAKSIDQNKNEGETILYLSPRGKKFDQSYAKKLAREKSLSLICGHFEGVDERVLSTRNIEEVSIGDYILSGGETAAYVVIDSVLRLLPGVLGNDNSKMEETFENGLLEYPQYTKP

SEQ ID NO: 105796 - protein, 228 aa, Unknown
  Bacterial polypetide isolated from the Sargasso Sea
MWQAQVFTLYPEIFPGPLSKGLYGKALSNNLWKLKVVNIRDAADDKHKTVDDTPYGGGSGMLLKADVLAKSLDENKNESERILYLSPKGKKFDQNLAKELANEKSLSLICGHFEGVDERILSTRNIEEISIGDYVLSGGESAAYVVIDSILRLLPGVLGNENSKLDETFENGLLEYPQYTKPQIWEEKAVPDVLLSGDHNKIKHWRLSQSEAITRDRRPDLWEKYKKN

SEQ ID NO: 105797 - protein, 208 aa, Unknown
  Bacterial polypetide isolated from the Sargasso Sea
LGVSLLGKALEKKIWQISTINIRDFAFNKQKSVDDTPYGGGAGMVMRPDVISLALESLSNINLPRICLSAKGSKLTQSRAIQLSKERGLILLCGRYEGIDQRVIDHNKFEEISIGDYVLPGGESAAIVLLESVVRLLPNVLGGENTLNEESFNNEMLLEYPHYTKPKEWKGMLVPEILVSGDHKKIQNWRNEKRLEITKKKRPDLLNR

SEQ ID NO: 105798 - protein, 173 aa, Unknown
  Bacterial polypetide isolated from the Sargasso Sea
REFARDKHRTVDDAPLGGGVGMVLKPDVVAAAVSAAASCPGPRIYLSPRGRLLDQALVRELAVASGAVFLCGRYEGVDQRVIDATDMMEVSIGDYVLSGGELAALTVMDAVIRLLPGVIGKEAGHLEESFETGLLEHSHYTQPRLWNGIDAPAVLASGHHRKIAEWRQAEAEK

SEQ ID NO: 105799 - protein, 201 aa, Unknown
  Bacterial polypetide isolated from the Sargasso Sea
MWNANIMTLFPEAYPGLLGMSLVGKALVNKIWSLNVINLRDFSNKKGKIDDIPFGGGSGMIIKPEIIDAAITSIQHDNFPKYYLSPRGVKFNQDIAFEMSKKKGAIFICGRYEGVDERVIKHHNLKEISIGDYVLSGGDLACMVVLDTVIRLIPKVVGNDKSLQEESFNNDLLEYPLYTQPRKWKNLQVPNVLVSGDHKKI

SEQ ID NO: 105800 - protein, 228 aa, Unknown; identical to SEQ ID NO: 105796
  Bacterial polypetide isolated from the Sargasso Sea

SEQ ID NO: 105801 - protein, 228 aa, Unknown
  Bacterial polypetide isolated from the Sargasso Sea
MLQAQVFTLYPEIFPGPLGKGLYGKAMAKKLWSLNVINIRDAATDKHKTVDDTPYGGGTGMLLKPDILAKSIDQNINKGEKIFYLSPKGKIFDQKLAQDLSKEKSLSLICGHFEGVDERVLSTRNIEEISIGDYVLSGGETAALVILDSILRLLPGVLGNDKSVSEETFENGLLEYPQYTKPQIWEEKSVPDVLLSGDHAKIKDWRLSQSEAITRVRRPDLWQKYKKN

SEQ ID NO: 105802 - protein, 93 aa, Unknown
  Bacterial polypetide isolated from the Sargasso Sea
MSGGETAAFVVLDSVLRLLPGVLGNEKSVSEETFENGLLEYPQYTKPQIWEQKSVPDVLLSGDHAKIKDWRLSQSEAITRDRRPDMWQKYKKN

SEQ ID NO: 105803 - protein, 233 aa, Unknown
  Bacterial polypetide isolated from the Sargasso Sea
MTWKANILTLYPDIYPGYLGYSLLGKALEKKIWELNIYNLRDFGEGKHKTVDDKPFGGGAGMIIKPDILGDAIEETLIKNHDQQKLVYLSPKGKPFKQVDAEKFSQSNGVSILCGHFEGIDQRVIDIYEVEEISMGDYVLTGGEVASFAFLDAIVRLLPGVLGNEISIKDESFSDNLLEYPQYTKPQEYKNIKVPDVLLSGNHEKIAEWRREKSIEITEKNRPDLLKDKNTKK

SEQ ID NO: 105804 - protein, 190 aa, Unknown
  Bacterial polypetide isolated from the Sargasso Sea
MWTAQIFTLYPDLFPGPLNHGIYGRALKKKIWKLKIIDIRKYAFDKYKTVDDTPYGGGAGMLMKADVLANSIDQNLKKKDKIYYLSPKGKKFSQSFAKKLSKKKTLNLICGRFEGVDDRLLNSRNIEEISIGDYILSGGETAALVILDTTLRLLPGVLGNNSSKKEESFESGFVEYPQFTKPSNLGEKKG

SEQ ID NO: 105805 - protein, 139 aa, Unknown
  Bacterial polypetide isolated from the Sargasso Sea
MAPYRLDVVSLAPQAFAPLLELGVIGRAFGSGIAELHLHNPRDFATDRYRKVDDEPYGGGAGMVLKPEPVFAAVESIPRRSGARVLLMSPQGRPLQQADLQRWAHDHDQLVLLCGHYEGFDERIRSLVDEEVSAGDFVL

SEQ ID NO: 105806 - protein, 179 aa, Unknown
  Bacterial polypetide isolated from the Sargasso Sea
DDAPFGGGSGMLLKPDVVASALDKNIKSKEKIIYLSPKGKRLDQKKVKLLSKLKKINILCGHFEGVDQRLLETRNIEEYSIGDFILSGGESASFVFVDALVRLLPGVLGNINSIKEESFENNLLEYPQYTKPRDWEGKKVPEVLFSGDHAKIKGWRLSQSEAITRRQRPDLWKKYLDKK

SEQ ID NO: 105807 - protein, 170 aa, Unknown
  Bacterial polypetide isolated from the Sargasso Sea
MFQLDVVTLFPEIFHSSLDKGVIGRAIKNNLVKFRSWNPRDFTKDKHKTVDARPYGGGPGMVMMYEPVCAAINKAKEKQKNAKVIFLSPQGKKLEQAGVIEFSKLDGMILLCGRYEGIDERVIQSEIDEECSIGDYVLSGGEFPALVLIDSICRLLPGVLGGENSANQDS

SEQ ID NO: 105808 - protein, 228 aa, Unknown
  Bacterial polypetide isolated from the Sargasso Sea
MWQAQVFTLYPEVFPGPLSKGLYGKALSKGLWNLKVVNIRDSALDKHKTVDDTPYGGGSGMLLKADILANSLDQNKIEDEKIIYLSPKGKKFDQLYARELSKEKSVSLICGHFEGVDERVLSSRNIEEISIGDYILSGGETAAFVIIDSILRLLPGILGNENSKINESFENGLLEYPQYTKPQIWEEKAVPEVLLSGDHNKIKDWRLSQSEAITRDRRPDLWQKYKKD

SEQ ID NO: 105809 - protein, 198 aa, Unknown
  Bacterial polypetide isolated from the Sargasso Sea
PRDFSKGNYQQIDDTPFGGGPGMVMMAEPLFKAIDFVIDKFCGADGMRILYPSPQGALWTQSDAEESMDIEKIIIICGHYKGVDQRVIDKYVTHEYSMGDFVLSCGEIPALMIVDSIVRLLPGVLNDINSSKTDTFSSELLDSPHYTQPREIGGMNVPEVLLSGNHKRIRNWKKKVQIETTKLKRPDIWKKYLNNKSE

SEQ ID NO: 105810 - protein, 181 aa, Unknown
  Bacterial polypetide isolated from the Sargasso Sea
KTVDDTPYGGGSGMLLKAYVLAKSLDENKNESERILYLSPKGKKFDQNLAKELANEKSLSLICGHFEGVDERILSTRNIEEISIGDYVLSGGESAAYVVIDSILRLLPGVLGNENSKLDETFENGLLEYPQYTKPQIWEEKAVPEVLLSGDHNKIKHWRLSQSEAITRDRRPDLWEKYKKN

SEQ ID NO: 105811 - protein, 273 aa, Unknown
  Bacterial polypetide isolated from the Sargasso Sea
MIDVNLYDLRKYGEGSYRQVDDKPYGGGAGMVLKPEPIYKAYESIRKLPKSKTLLMTPQGKVLKQKDLARWSTLDQIIIICGQYEGFDERIRCIADEEISIGDYVLSGGEIPAISIINGLTRLLPGTLGDPDSLVDESHNSSLLEYPQYTRPLTFKDMKVPDILVSGNHEEIKAWRRRKSFERTLERRSDLISNENYKKSPQSKRIIKENNQFMKFRIGNGYDIHRLVEDRDLIIGGVKLCHPENLGLDGHSDADVLSHSIMDALLGALSLGD

SEQ ID NO: 105812 - protein, 163 aa, Unknown
  Bacterial polypetide isolated from the Sargasso Sea
AIKSLKNNVHPKILLSPRGEVFNQNLAKEFAKLDELTFICGRYEGIDQRVIEKYNLMEVSLGDYILSGGEIACQVLLDVIIRLLPGVINNEQSVKNESFENGLLEYPQYTKPRIWEGIETPKILLSGHHEKIKKWRIEQSLKITEKRRPDLWIKYLERQNKDI

SEQ ID NO: 105813 - protein, 225 aa, Unknown
  Bacterial polypetide isolated from the Sargasso Sea
MWQAQVFTLYPEVFPGPLSKGMYGKAMSKDLWNLKVVNIRDAAEDKHKTVDDTPYGGGSGMLLKPDVLAKSLDQNKVEGERILYLSPKGKKFDQNYAKRLAKEKSISLICGHFEGVDERVLSTRNIEEISIGDYVLSGGETAAYVVIDSVLRLLPGVLGNDNSKIEETFENGLLEYPQFTKPQIWEEKAVPDVLLSGDHSKIKDWRLSQSEAITRDRRPDLWENI

SEQ ID NO: 105814 - protein, 235 aa, Unknown
  Bacterial polypetide isolated from the Sargasso Sea
MSNVTWKISIITTTPELFPGPLQYSNIGKSLAEGKWSLEIIPLEKRQSNKKVKIDGSPAGGGPGMIMRADIVLPIIANMRQNGDTRPLIVPAARGIKYDQKITKDLVKNEGLIFLCGRFEGIDQRIIESTGALELSIGDYILTNGDVAAINIIDSCVRLLDGVLSSKASTKNESYEDGLLEYPQYTLPREYGGLKIPDVLLSGDHGAISKWRFNQSLLATEKNRPDLYEKYKKKT

SEQ ID NO: 105815 - protein, 128 aa, Unknown
  Bacterial polypetide isolated from the Sargasso Sea
DQRVIDKYVDEEISIGDFILSGGEYAAVCLIDAITRHIPGTLGNKDSYLKDTFSNGLLKGDVYAKPESFESMKVPDVLLSGNHKEIDSWREQNSLLKTFIKRPELLNDVKLTKKQKKLLEEWASKDIL

SEQ ID NO: 105816 - protein, 222 aa, Unknown
  Bacterial polypetide isolated from the Sargasso Sea
FTLYPEVFPGPLGKGLYGKALSNNLWNLDVINIRDAATDKHKTVDDTPYGGGSGMLLKADVLAKSLDQKVNKGERVFYLSPKGKKFDQKLAQELSKEKSISLICGHFEGVDERILTTRNIEEISIGDYVLSGGEAAALVVLDSILRLLPGVLGNNKSSLDETFENGLLEYPQYTKPQIWEEKPVPEVLLSGDHSKIKDWRLSQSEAITRDRRPDLWQKYKKN

SEQ ID NO: 105817 - protein, 178 aa, Unknown
  Bacterial polypetide isolated from the Sargasso Sea
MMAEPLFKAIDFVIDKFCGADGMRILYPSPQGALWTQSDAEESMDIEKIVIICGHYKGVDQRVIDKYVTHEYSMGDFVLSCGEIPALMIVDSIVRLLPGVLNDINSSKTDTFSSGLLDSPHYTQPREIAGMNVPEVLLSGNHERIRDWKKKVQIETTKFKRPDIWKKYINNKSEQKDE

SEQ ID NO: 105818 - protein, 221 aa, Unknown
  Bacterial polypetide isolated from the Sargasso Sea
MINNNAFEVKILTLFPEMFSGVLDHSLAGKALKKNIWKLNTVNIRDYATDNYRRVDDVPYGGGPGMIMRPDILSKAYDANKPSSDWSKIVLTPRGKPLNQNMVKNMASKSGILMVCGRYEGIDERFIQSRSLEEISVGDYILSGGEPAAIIILDSIIRLLAGTAGSADSLKEESFENNILEYPQYTRPYDWEGMKPPEVLVSGNHKEIEKWKKEVSINDTK

SEQ ID NO: 105819 - protein, 101 aa, Unknown
  Bacterial polypetide isolated from the Sargasso Sea
IGDYILSGGESAALVLIDSVIRLLPGVLGNDASKNDESFENGLLEYPQYTKPQIWEKKSVPEVLLSGDHGKIKDWRLSQSEAITRRQRPDLWKKYISKKKK

SEQ ID NO: 105820 - protein, 233 aa, Unknown
  Bacterial polypetide isolated from the Sargasso Sea
MLEVQIFTLYPDLYPGLLDIGIYKKAQEKQKWNLKIIDIRDYAFDDNGTVDDTPFGGGSGMLLKPDVVASALDKNIKGKEKIIYLSPKGKRLDQKEMKYLSKLNKINILCGHFEGIDQRLLETRNIEEYSIGDFILSGGESASFVFVDALVRLLPGVLGNANSAKDESFENNLLEYPQYTKPRDWEGKKVPEVLLSGDHAKIKGWRLSQSEAITQRQRPDLWKKYLEKKNEKY

SEQ ID NO: 105821 - protein, 141 aa, Unknown
  Bacterial polypetide isolated from the Sargasso Sea
MSKLRFDVVSLFPEAFKNFFNHGLIKKAFEEKIASIHIHNPRDHAMDNYRKVDDEPYGGGAGMVLKPEPYFSVFDQIPKLNKKRILLMTPQGRKISQPDFSRWSKEDQLILICGSYEGFDERIRSLADEEISIGDFVLTGE

SEQ ID NO: 105822 - protein, 203 aa, Unknown
  Bacterial polypetide isolated from the Sargasso Sea
QLILVSIRKTNIKKIDDTTAGGGPGMIFKPDIMGKAIDACYRNIKSKEKYPLIYLSPRGKPLTQKKVVKLSKMKGINLLCGRYEGIDQRLLDYYAIEELSIGDYILAGGELAAQVLVESIVRLLPGTLGHRESTETESFNNDLLEYPQYTRPKTWKNMTIPGVLLSGNHKNISKWRLDMSEKITKKMRPDIWKNYKKNKTSKK

SEQ ID NO: 105823 - protein, 179 aa, Unknown
  Bacterial polypetide isolated from the Sargasso Sea
PYGGGPGMVLRPDVLDRTLEAISGVPGRRICLSPRGRRFDQAFAKELAHEPGVVLVCGRYEGIDQRVIEAREMEEVSLGDFVLTGGEIAAQALLDATVRLLPGVIGSEQGLDEESFEDGLLEYPQYTHPKIWKGRSVPEVLLSGNHKKIAEWKKQQSELVTRNYRPDLWEAYESVKVQI

SEQ ID NO: 105824 - protein, 195 aa, Unknown
  Bacterial polypetide isolated from the Sargasso Sea
LKTVNIREFANDKHKTVDDTPYGGGSGMLIRPDVLASSIDQNVHSKETIIYLTPKGKLFNQSLAKKLSNTPVVNLICGSFEGIDQRIIDSRGIVEISVGDFILSGGETAAFILLDSILRLIPGVLGNNSSIDEETFENGLLEYPQYTKPQIWEEKSVPDVLLSGDHAKIKHWRLSQSEAITRDRRPDLWQKYKKD

SEQ ID NO: 105825 - protein, 175 aa, Unknown
  Bacterial polypetide isolated from the Sargasso Sea
GGEGMLMKADVLAKSIDMNVKDGEKIIYLSPKGKLFNHQLAKQLSQEKTINIICGHFEGVDERLLKTRNIEEVSIGDFVLSGGEGASFVILDAILRFIPGILGNTNSAKEESFENGLLEYPQFTKPQIWEEKSVPDVLLSGDHAKIKDWRLSQSEAITRDRRPDLWQLYKKTKEN

SEQ ID NO: 105826 - protein, 214 aa, Unknown
  Bacterial polypetide isolated from the Sargasso Sea
MNFNLVTIFPEITKLFDFGVIGKAIEKNLISMNSLNPRDFSKNTNKNVDDAPYGGGEGMVMMAEPLALAMKSIKNKGKVLLMSPQGERLSNKHIDGLLDEKSITIICGRYEGIDERFIENYVDQEFSIGDFVLSGGEIPALALIDALSRKIPGVLGNQESFKNDSFENNLLKGPVYTRPQKFEGKDVPEILLSGDHKKINDWKILSSLQRTIER

SEQ ID NO: 105827 - protein, 244 aa, Unknown
  Bacterial polypetide isolated from the Sargasso Sea
MSKPTKSHGRISIGASLRPRELMSDTPDLAGVWKAKILTLFPEAFPGVLGESLTGKALQQGLWQLETVDLRPFGIGKHKNVDDTPAGGGAGMVLRADVLGEAIEHAMQGTRGNWPLIYLSPRGRRMDQKMMQNFARCDGMTLLCGRFEGVDERVLEHYGIQEVSLGDFVMTGGELAAQALIDATVRLIPGVLGNQASTEEESFSSGLLEHPQYTRPAEWKGRAIPEVLMSGHHVKIAQWRQDMS

SEQ ID NO: 105828 - protein, 231 aa, Unknown
  Bacterial polypetide isolated from the Sargasso Sea
IISPVPNMIESVIENSMIRKAVTNGILDIHIVNPRDFSKGSYQQIDDTPFGGGPGMVMMAEPLFKAIDFVIDKFCGEDGMRILYPSPQGALWTQSDAEETMDIEKIVIICGHYKGVDQRVIDKYVTHEYSMGDFVLSCGEIPALMIVDSIVRLLPGVLNDINSSKTDTFSSGLLDSPHYTQPREIRGMNVPEVLLSGNHERIRTWKKKVQIETTKLKRPDIWKKYLNNKSE

SEQ ID NO: 105829 - protein, 103 aa, Unknown
  Bacterial polypetide isolated from the Sargasso Sea
IEEISIGDFILSGCESAAFVIIDSILRLIPGVLGNDLSKEDESFENGLLEYPQYTKPQIWEKKAVPDVLLSGDHAKIKDWRLSQSEAITRVRRPDLWEKYKKN

SEQ ID NO: 105830 - protein, 141 aa, Unknown
  Bacterial polypetide isolated from the Sargasso Sea
KGKLFNHQYAKKLSNEKSINFICGHFEGIDERIIKTRDIEEVSIGDFILSGGEVATFVVLDAILRFIPGVLGNENSTEEESFENGLLEYPQYTKPQIWEDKGVPEVLLSGDHAKIKDWRLSQSEAITRVRRPDLWQKYKKN

SEQ ID NO: 105831 - protein, 168 aa, Unknown
  Bacterial polypetide isolated from the Sargasso Sea
MLIKPDVLANSLDKNLNSKEKIIYLSPKGKLLNQKLAKELSKEKTINLICGHFEGVDQRVIESRNIEEVSIGDFVLSGGESAAFVMLDAIIRLLPGVLGNETSVEEESFENGLLEYPQYTKPQIWEEKTVPDVLLSGDHAKIKDWRLSQSEAITRDRRPDLWQKYKKN

SEQ ID NO: 105832 - protein, 124 aa, Unknown
  Bacterial polypetide isolated from the Sargasso Sea
GEVLLMVCGRYEGFDERVRELVDEEVSGGDYVCLGGEVIAMLIIESVSRLVPGVLGNSDSSETESFAASTLEYPQYTRPRIYKGMEVPEELLSGNHGLIEAWRKNRALERTRQRRPDLITRNIE

SEQ ID NO: 105833 - protein, 229 aa, Unknown
  Bacterial polypetide isolated from the Sargasso Sea
MWKVRIFTLYPEMFPGPLDIGLNKKALDKKLWSLEVINIRDYSLDKHKTVDDTPFGGGSGMLMRADVIARSLDKNIPNKNEQIIFLSPKGKKFDQSYARKMLNKNVNIICGHFEGVDQRLLETRNIEEVSVGDFVMSGGEIGAFILIDSVVRLIPGAIGNSDSLNEESFEKNLLEYPQYTKPQIWEEKSVPEVLLSGDHAKIKDWRLTQSKDITRRRRPELWEKYKKNK

SEQ ID NO: 105834 - protein, 200 aa, Unknown
  Bacterial polypetide isolated from the Sargasso Sea
KKFGILKTINIREFANDKHKTVDDTPYGGGSGMLIRPDVLASSIDKYIKSDEKIIYLTPKGKLFNQSIAKKLSTAQNVNLICGSFEGIDQRIIDSRGIEEISVGDYILSGGETAAFILLDSILRLIPGVVGNNSSINDETFENGLLEYPQYTKPQIWEEKRVPEVLLSGDHAKIKHWRLSQSEAITRDRRPDLWQKYKKD

SEQ ID NO: 105835 - protein, 218 aa, Unknown
  Bacterial polypetide isolated from the Sargasso Sea
MLEVKIFTLYPDLFPGPLDIGIFKKAKENKIWNLKVINIRDYSKDSHGTVDDTPFGGGSGMLLRPDILASALDDNIKKGEKIIYLSPRGKKFDQNEARFLSKEKNLNIICGHFEGVDQRLLETRNIEEYSLGDFVLSGGEPASFVLVDALVRLLPGVLGNKDSVKEESFENHLLEYPQYTKPREWEGKSPPEVLFSGDHAKIKGWRLSQSEAITRRQR

SEQ ID NO: 105836 - protein, 217 aa, Unknown
  Bacterial polypetide isolated from the Sargasso Sea
MRTFNFITIFPDIINNFLKYGLVNRAIEKKIIEINTIYLRDFSDDSNLRIDDKSYGGGPGMVMRYKPVEDALKSITRKSYVIYLSPHGSKLDQHKISELTKAQNLTFLCGRYEGYDQRVVDDLVDEQISLGDYVISGGELPSLILLEGITRLLPNVANDLDSILNDSFTDNLLDYPHYTRPESINGHEVPDVLLSGNHSEIAKWRRKQSLGITWKNR

SEQ ID NO: 105837 - protein, 169 aa, Unknown
  Bacterial polypetide isolated from the Sargasso Sea
MDINIVTLFPDFFRSPLKSSILARAISRDLVRVNTFDPREFALGKHRNVDDEPYGGGGGMVFKPEPFFRMWESMKFKEAHCVYLTADGAKLDHQLCIELSRKSNIVLLCGHYKGIDQRIREDLIDQEVSVGDFVLTGGEPAAVLTIDAIVRLLPGVLGNFCSAIGRFFS

SEQ ID NO: 105838 - protein, 157 aa, Unknown
  Bacterial polypetide isolated from the Sargasso Sea
GYHRQLGRKVRKILLTPQGSPFDQKKAREWSQCGEVLLMVCGRYEGFDERVRELVDEEVSGGDYVCLGGEVIAMLIIESVSRLVPGILGNPDSSETESFAVGALEYPQYTRPRMYKGMEVPEELLSGNHGRIEAWRKNRALERTRQRRPDLITRNIE

SEQ ID NO: 105839 - protein, 202 aa, Unknown
  Bacterial polypetide isolated from the Sargasso Sea
LRNNLWSLKTVYIRHFSNDKNGKVDKVPFGGGPGMVINPEVLDKALKSVSEAKGRRIYLSPRGKKFDQEFAKKLSQEKGAVFICGRYEGVDERFLIYNEIEEVSVGDFVLSGGEIGAQLIMDATVRLIPDVIGNAKGLMDESFERHLLEYPLYTHPRVWNDMEVPEILLSGNHKKIQMWKLKMSEKLTKLRRPDLWSKYIKS

SEQ ID NO: 105840 - protein, 228 aa, Unknown
  Bacterial polypetide isolated from the Sargasso Sea
MFTARVYTLYPDLFPGHLNKGLFGNALENKIWNLNIINIRNYAEDKHKTVDDTPYGGGSGMLMRPDVLASSIDKNILSGEKIIYLSPRGKLFNQDIAKNLAKEKTLNIICGHFEGVDQRVIEARNIEEISIGDFILSGGEAATFVILDSILRLLPGVVGNQNSIIEESFENGLLEYPHYTKPQIWEKKRVPDVLLSGDHAKIKDWRLSQSESITRVRRPDLWEKYKKN

SEQ ID NO: 105841 - protein, 198 aa, Unknown
  Bacterial polypetide isolated from the Sargasso Sea
MRIDILTLFPELFDNLNSFSIIEKAIKSKKVKIITHNLRDYAENSRHVDDSPYGGDAGMIIKIEPIDNCISKLKKENNYDEIIYLTPDGEVLNQKKSNYLSTKKNLILLCGHYKGVDHRVREYLITKEISIGNYVLSGGELPAAILCDSIIRLIPGVIGDESSALSDSFQDNIVSAPIYTRPANYKGLKVPDVLISGN

SEQ ID NO: 105842 - protein, 139 aa, Unknown
  Bacterial polypetide isolated from the Sargasso Sea
KKFDQRYAKKLAREKSLSLICGHFEGVDERVLSTRDIEEVSIGDYVLSGGETAAYVVIDSVLRLLPGVLGNDNSKMEETFENGLLEYPQYTKPQIWDKKTVPDVLLSGDHSKIKDWRLSQSEAITRDRRPDLWEKYKKS

SEQ ID NO: 105843 - protein, 195 aa, Unknown
  Bacterial polypetide isolated from the Sargasso Sea
IWDLQITDIKNFTNKSNNIDDKPYGGGPGMILRPDIMQNAYEEAVSTIEKSTKKYQKIMLTPRGERLNQDIVKELSKTEGLIIICGRYEGIDQRFVDYNGLREISVGDFVLSGGEPAAVTLIDAIVRLLPNVLGNPSSLLEESFNDNLIEYLQYTKPRVWKNIKVPDVLLSGDHKKIKDWRLKNSIIFKKKKKDR

SEQ ID NO: 105844 - protein, 100 aa, Unknown
  Bacterial polypetide isolated from the Sargasso Sea
FILSGGETASFVFIDSVIRLLPGVLGNDNSTKEESFENYLLEYPQYTKPQNWEGKSTPDVLLSGDHAKIKDWRLSQSEAITRRQRPDLWKKYLNKKNEKH

SEQ ID NO: 105845 - protein, 311 aa, Unknown
  Bacterial polypetide isolated from the Sargasso Sea
EKNITIVCGRYEGYDQRIIDEYCDLEISIGDYILTGGELAACVLIDSVARMIKGVVGNENSVKSDSLMNSILKGPVYTRPKIYKGKKVPNILLSGNHENIKKYLRETSLAATLNKREDLLENANLSQDEVSQLKSSKKSTINKNIYIALVHYPIENIKGEIIKTSLTNLDIQDIARSANTYGINKYFITHPVKEQRMLAEKVIKYWSNEKVRKNDNTKHSSINKIIVKNSLNSAIREIKKKHGTKPITIATDARMVHNMTSYSTLRDRILNIDEPVLIIFGTGWGLPKNTLESADCILKPVGGYHEYNHCQ

SEQ ID NO: 105846 - protein, 243 aa, Unknown
  Bacterial polypetide isolated from the Sargasso Sea
MYENHTWTANVITLFPEMFPGALSYSLIGKALKKNLWNLKTFNLREFATDTRKTIDGPPVGGGAGQILKADVLDSAISYIIKKNSDYKRDDWPIIALSPRGKIFNQTEALKFSKCKGITIICGRYEGFDERALELHKIPELSLGDFILSGGEIAAQLLIDSVVRLIPHVIGNHKSLEEESFTNYLLEYPQYTKPISWKNLSIPNELLSGHHQNIKKWRLNKSEELTKQRRPDLWKKYKSKGNK

SEQ ID NO: 105847 - protein, 243 aa, Unknown
  Bacterial polypetide isolated from the Sargasso Sea
RSKERRKKIMWKARVFTLYPEIFPGPFEKGLYGKALKKKNWDLEIVNIRESAEDKHKTVDDTPFGGGNGMLLKPNVLGKSIDSKIKKNERVLYLSPKGKKFDQMMAKDLSKEKTINLICGHFEGVDERLLSTRNIELISIGDYILSGGETASFVIIDAILRLLPGIIGNEKSKEDETFENDLLEYPQYTKPQIWEKQSVPDVLLSGDHAKIKDWRLSQSKDITRRQRPDLWKKYLNNKKNEKY

SEQ ID NO: 105848 - protein, 148 aa, Unknown
  Bacterial polypetide isolated from the Sargasso Sea
YLSPKGKLFNHQLAKQLSQEKTINIICGHFEGVDERLLKTRNIEEVSIGDFVLSGGEGASFVILDAILRFIPGILGNTNSAKEESFENGLLEYPQFTKPQIWEEKSVPDVLLSGDHAKIKDWRLSQSEAITRDRRPDLWQLYKKTKEN

SEQ ID NO: 105849 - protein, 193 aa, Unknown
  Bacterial polypetide isolated from the Sargasso Sea
VINIRDSADDKHKTVDDTPFGGGLGMLMRPDTLAKSIDKNTKKKEKIFYLSPKGKLFNQKKAKLLSKESCVNLICGHFEGVDERLLKTRNIEEISIGDYILSGGETAALTIIDSILRLLPGVLGNKQSITDETFENNLLEYPQYTKPQIWEEKSVPEVLLSGDHAKIKDWRLSQSEAITRDRRPDLWQKYKKN

SEQ ID NO: 105850 - protein, 237 aa, Unknown
  Bacterial polypetide isolated from the Sargasso Sea
EIFDSLKYGVVEKAITKKLITIKLIDLKEFSLNSYGSLDDSPYGGGAGMVMSPEPISNALKGINKSSHIIYLSPQGKTLDQKKAKQLSRKKEMTLICGRYEGIDQRIINNYVDEEISIGDYVLSGGEIAGCVLIDCIARNIKDVLGNEESLEKDSLSNGRLKGHLFTRPDKFMKCEVPKVLMSGDHKKIEEWRIGNSLWVTKQKRPDLFQDLQLSEKEMILLRQYEAGIANQETKDD

SEQ ID NO: 105851 - protein, 228 aa, Unknown
  Bacterial polypetide isolated from the Sargasso Sea
MLRFEILTLFPEIFSSFLEESLIKRAIEKELLSVSLVNFRKNGLGKHLQVDDSPYGGGPGMVLRIEPVYLTLEEQKNFHQSQGRKTHTILVSPQGQPFTQKKAKEMSHNDSVLTLVCGRYEGFDERIRSLVDEEISGGDFVCLGGEVISMVIIESVSRLLPDFLGNKKSSEQESFSKSLLEYPQYTRPANYAGMGVPEELLSGNHGKISQWRQQQALSRTKKRRPDLI

SEQ ID NO: 105852 - protein, 146 aa, Unknown
  Bacterial polypetide isolated from the Sargasso Sea
MLQAQVFTLYPEIFPGPLDKGLYGKARAKKLWSLNVINIRDAATDKHKTVDDTPYGGGTGMLLKPDVLANSIDQNLNKGDRIFYLSPKGKIFDQKLAQDLSKEKSFSLICGHFEGVDERVLSTRNIEELSIGDYVLSGGETAAFVV

SEQ ID NO: 105853 - protein, 126 aa, Unknown
  Bacterial polypetide isolated from the Sargasso Sea
MWTAQIFTLYPDLFPGPLNHGIYGRALKKKIWKLKVIDIRKYAFDKYKTVDDTPYGGGAGMLMKADVLANSIDQNLKKKDKIYYLSPKGKKFSQSFAKKLSKKKTLNLICGRFEGVDERLLNFRNI

SEQ ID NO: 105854 - protein, 156 aa, Unknown
  Bacterial polypetide isolated from the Sargasso Sea
MWQAQVFTLYPEIFPGPLSKGLYGKALSNNLWKLKVVNIRDAADDKHKTVDDTPYGGGSGMLLKADVLAKSLDENKNESERILYLSPKGKKFDQNLAKELANEKSLSLICGHFEGVDERILSTRNIEEISIGDYVLSGGESAAYVVIDSILRLLPG

SEQ ID NO: 105855 - protein, 300 aa, Unknown
  Bacterial polypetide isolated from the Sargasso Sea
NFEIITLFPKAFELINNLGVITKALEKKLINVNLHDLREYGKGSYKQVDDKPYGGGSGMVLKPEPIYKAHDSIKKLPKSKTLLMTPQGKVLKQKDLLRWSSLDQLIIICGQYEGFDERVRYLADEEVSIGDYVLSGGEIPAISIINGLTRLLPGTLGDPRSLIDESHNSSLLEYPHYTRPPIFREMKVPDILVSGNHEEIKLWRKQKMLERTLDRRNDLISNEDYKKVPKSKRINKDSNEMMKFRIGNGYDIHRLVEGRDLIIGGVKLNHPDNLGLDGHSDADVLSHSIMDALLGALSLG

SEQ ID NO: 105856 - protein, 124 aa, Unknown
  Bacterial polypetide isolated from the Sargasso Sea
CGHFEGIDQRLLEKRNIQEYSIGDYILSGGETASFVLIDSIIRLLPGVLGNENSSKDESFENNLLEYPQYTKPQNWEGKSTPEVLLSGDHAKIKDWRLSQSEAITRRQRPDLWKKYLEKKNEKY

SEQ ID NO: 105857 - protein, 172 aa, Unknown
  Bacterial polypetide isolated from the Sargasso Sea
RPYGGGPGMVMLARPLEAAIDAAKAAQAEQGIASTRVVMMSPQGAPLTHDRAVRMAQEPGVVVLCGRYEAIDQRLLDRCVDEEISLGDFVLSGGELPAMAMMDAVVRLLPGVLNDSLSAVQDSFADGLLDCPHYTRPEEYDGVRVPDVLLGGHHAEIESAYHSESLSRGHYR

SEQ ID NO: 105858 - protein, 130 aa, Unknown
  Bacterial polypetide isolated from the Sargasso Sea
DFSKKKSISLICGHFEGVDERVLTTRNIEEISIGDYVLSGGETAALVVLDSILRLLPGVLGNNKSSVEETFENGLLEYPQYTKPQIWEKKTVPEVLLSGDHSKIKDWRLSQSEAITRVRRPDLWQKYKKD

SEQ ID NO: 105859 - protein, 225 aa, Unknown
  Bacterial polypetide isolated from the Sargasso Sea
MNFYTLSLFPNLINDSLKEGIIKNAIKNKHIKLYNYDLREFGVGKHKQLDDTSYGGGPGMILKPEPIFEAVQHIKHSNNITNCPIILMSPQGKVLKQSIAKNFITETDLIIISGRYEGVDQRVISNLITHEISIGDYILSGGELPTAIFIEVLSRTIPGVLGNKESLSDESLNNNKIKYPVYTKPKSFKGMDVPEVLLSGNHEQISKWRLKNSDINTKIKRPDLI

SEQ ID NO: 105860 - protein, 157 aa, Unknown
  Bacterial polypetide isolated from the Sargasso Sea
KKGEKIIYLSPRGKKFDQNVARSLSKEKNLNLICGHFEGVDQRLIETRNIEEYSLGDFVLSGGEPASFVFVDALVRLLPGVLGNKDSVKEESFENHLLEYPQYTKPREWEGKSPPEVLFSGDHAKIKGWRLSQSEAITRRQRPDLWKKYLEKKDEKH

SEQ ID NO: 105861 - protein, 155 aa, Unknown
  Bacterial polypetide isolated from the Sargasso Sea
NPRDFTTDNYRTVDDRPYGGGPGMVMLARPLEAAIDAAKAAQAEQGIASTRVVMMSPQGAPLTHDRAVRMAQEPGVVVLCGRYEAIDQRLLDRCVDEEISLGDFVLSGGELPAMAMMDAVVRLLPGVLNDSLSAVQDSFADGLLDCPHYTRPEEY

SEQ ID NO: 105862 - protein, 258 aa, Unknown
  Bacterial polypetide isolated from the Sargasso Sea
GFIFDVITLFPKAFELLNNLGVITKALDKSLINVNLHDLREYGEGSYRQVDDKPYGGGAGMVLKPEPIYKAHESIRKLPKSKTLLMTPQGKVLKQKDFARWSTLDQIIIICGQYEGFDERIRFLADEEISIGDYVLSGGEIPAISIINGLTRLLPGTLGDPDSLVDESHNSSLLEYPQYTRPLTFKDMKVPDILVSGNHEEIKSWRIRKSFERTFERRSDLISNENYKKYPQSKRIIKENNQFMKFRIGNEYDIYPDW

SEQ ID NO: 105863 - protein, 187 aa, Unknown
  Bacterial polypetide isolated from the Sargasso Sea
MVMEAEPIIKAVENAKKQSNNSHVIYLSPQGQLFNQEKAKELSNKSDIILISGRYEGIDQRVVDHIVDEEISIGDYVISGGEIASLILIDSISRQIEGVVGDFQSVEDDSLYDGLLKHPQYTRPEESEYGIVPKTLLSGNHKSIRSWKLRKSISNTLTKRPDLLEKANLDMEKKKILEEIKKDEEKT

SEQ ID NO: 105864 - protein, 229 aa, Unknown
  Bacterial polypetide isolated from the Sargasso Sea
MLNIKILTAYPEMFPGILEHSLIGKALKENIFKIETIDLHKFGFDDRMSIDDEPFGGGPGMVLRPDVVEKALNSIPKTHNINSTKIYLTPSGTPLNQEKLGNLANLEKMTILCGRFEGVDQRAIDVLDFEEISIGDYVLAGGEIAAQVLLEGCIRLIPGVLGHPKSLLEESFSNNLLEYPQYTRPKSWEDSLGKKHDVPEVLTSGHHENIKKWRLNKSVKKQKIFDLIC

SEQ ID NO: 105865 - protein, 211 aa, Unknown
  Bacterial polypetide isolated from the Sargasso Sea
SIIERACEKGLLDIRVHDLRDYTLNKHRKVDDTPFGGGVGMIMNVEPIDLALKAIKKEVPKARTILLSPSGSTLSQKKANELSNHESLILICGRYEGIDERVRLHFADEEISIGDYILTGGEIPAMVLVEAVSRLIPGVLGDSESILEESFSEGILEYPQYTRPREYKGFKVPDVLVSGDPKKIREWQKAEALKKTASVRPDLLEKMKRSR

SEQ ID NO: 105866 - protein, 205 aa, Unknown
  Bacterial polypetide isolated from the Sargasso Sea
MWQAQVFTLYPEVFPGPLSRGLYGKALSSDLWKLKVVNIRDSADDKHKTVDDTPYGGGSGMLLKADVLAKSLDENKNENERILYLSPKGKKFDQNLAKELANEKSLSIICGHFEGVDERILSTRNIEEVSIGDYVLSGGESAAYVLIDSILRLLPGVLGNENSKLDETFENGLLEYPQYTKPQIWEEKAVPDVLLSGDHNKIKHW

SEQ ID NO: 105867 - protein, 166 aa, Unknown
  Bacterial polypetide isolated from the Sargasso Sea
DACYKNIKSKDSYPMIYLSPRGTPLTQSKVINFSKMKGINILCGRYEGIDQRILDFYPIEEISIGDYILAGGEIASQVLVESIVRLLPGTLGDMKSASSETFSKDLLEYPQYTRPKKWKNLTIPDILLSGNHRNISEWRLKQSEKLTQKVRPDLWKNYKKSKTRKK

SEQ ID NO: 105868 - protein, 202 aa, Unknown
  Bacterial polypetide isolated from the Sargasso Sea
LEKKIWKLETVNIRDYATDKHKTVDDTTYGGGSGMLIKPDVLANSLDKNLKSKEKIIYLSPKGKLFNQQLAKELSKEVTINLICGHFEGVDQRVIESRNIEEISIGDFVLSGGESAAFVMLDSIIRLLSGVLGNETSMEEESFENGLLEYPQYTKPQIWEEKTVPDVLLSGDHAKIKDWRLSQSEAITRDRRPDLWQKYKKN

SEQ ID NO: 105869 - protein, 137 aa, Unknown
  Bacterial polypetide isolated from the Sargasso Sea
KKAKALSKEKIVNLICGHFEGVDERILETRNIEEISIGDYILSGGETASFVLIDAVLRLLPGVLGNETSKEEESFENGLLEYPQYTKPQIWEKKSVPDVLLSGDHAKIKDWRLSQSKDITRRRRPDLWKKYLEKDKK

SEQ ID NO: 105870 - protein, 231 aa, Unknown
  Bacterial polypetide isolated from the Sargasso Sea
TWTARVFTLYPEIYPGPLNKGLYGKALKKKLWELEIIDIRDSATDKHKTVDDTPFGGGSGMLLKPDVLGKSIDENTKKGEKIFYLSPKGKRFDQKIAKEISREKVINLLCGHFEGVDERILETRNIEEISIGDYILSGGESASFVVIDTVLRLLPNILGNNLSKNEESFEGELLEYPQYTKPQIWEKKSVPKVLLSGDHAKIKDWRLSQAKDITRRRRPDLWKKYLNKNKK

SEQ ID NO: 105871 - protein, 162 aa, Unknown
  Bacterial polypetide isolated from the Sargasso Sea
MSCFNFDVITLFPKAFELINNLGVITRALDKNLIDVNLHDLREYGEGSYRQVDDKPYGGGAGMVLKPEPIYKAYDSIRKSPKSKTLLMTPQGKVLKQKDFARWSTLDQIIIICGQYEGFDERIRCLADEEVSIGDYVLSGGEIPAISIINGLTRLLPGTLGD

SEQ ID NO: 105872 - protein, 235 aa, Unknown
  Bacterial polypetide isolated from the Sargasso Sea
MKFKILTLFPEMFPGPLAHSISGKALSKKLFEIEVINIRDFSDNKSNSVDEKPFGGGAGMIIKPDVMQNALDYATKDNIKNKKIIFLSPGGQTVNTDVVNKLVTFDELVIICGRYEGIDERFLKYNAIEEYSIGDFILSGGEIPSIILIDTCVRLIPEVLGNKNSLKFESFQNHLLEYPQYTKPSNWKGLSVPDVLLSGNHKKISDWRLIKSIEKTKNVRPDLYKLYCKMNKGEK

SEQ ID NO: 105873 - protein, 122 aa, Unknown
  Bacterial polypetide isolated from the Sargasso Sea
MRIDILTLFPEMFKSFLEGSLIGSARNKGILDIRVTNIRDFARGVHRQVDDRPFGGGPGMLLMPGPIVEGVESIQGDGEPGHLVMLTPAGRPLTQESVEALAKQERIVLICGRYEGFDERVK

SEQ ID NO: 105874 - protein, 134 aa, Unknown
  Bacterial polypetide isolated from the Sargasso Sea
YAKELSTKKSLNIICGHFEGIDERIIQSRNIEEISIGDFVLSGGEAATFVILDAILRFIPGVLGNYKSIQEESFENGLLEYPQYTKPQIWESQSVPEVLLSGDHAKIKGWRLSQSEAITRDRRPDLWQKYKKLK

SEQ ID NO: 105875 - protein, 182 aa, Unknown
  Bacterial polypetide isolated from the Sargasso Sea
HKTVDDTLYGVGSGMLLKADVLAKSIDQNRIEGEKILYLSPKGKKFDQSYAKKLATTKSVSLICGHFEGVDERVLSTRNIEEISIGDYVLSGGETAAYVVIDSVLRLLPGVLGNNNSKIEETFENGLLEYPQYTKPQIWEEKSVPDVLLSGDHSKIKDWRLSQSEAITRDRRPDLWEKYKKN

SEQ ID NO: 105876 - protein, 194 aa, Unknown
  Bacterial polypetide isolated from the Sargasso Sea
MFEVKIFTLYPDLYPGPFNTGIYKKALQNKIWNLKVINIRDYSTDKHSSVDDKPFGGGSGMLLRPDVVASALDANLKSDEITIYLSPKGKRFDQKVAKEFSKKKKLNLLCGHFEGIDQRLLETRNIEEYSIGDFILSGGETASFVFIDTVVRLLPGVLGNDNSAKEESFEDYLLEYPQYTKPKDWEGKSTPEVL

SEQ ID NO: 105877 - protein, 165 aa, Unknown
  Bacterial polypetide isolated from the Sargasso Sea
MWQAQVFTLYPEVFPGPLSKGMYGKAMSKDLWNLKVVNIRDAAEDKHKTVDDTPYGGGSGMLLKPDVLAKSLDQNKIEGERILYLSPKGKKFDQNYAKRLAKEKSISLICGHFEGVDERVLSTRNIEEISIGDYVLSGGETAAYVVIDSVLRLLPGVLGNDNSRI

SEQ ID NO: 105878 - protein, 215 aa, Unknown
  Bacterial polypetide isolated from the Sargasso Sea
MFLSRIFTLYPEYFPGYLSKGLFGKALNEKIWNLETVNIRNYSSDKHKTVDDTPYGGGNGMLIKADVLAKSLDENIKEKEKIIYLSPKGKLFNHKYAKELSSEKSLNLICGHFEGIDERIIESRNIEEISIGDFVLSGGEAAAFIILDAVLRFLPGVLGNENSTEEESFENGLLEYPQYTKPQIWEDKSVPDVLLSGDHAKIKDWRLTQSEAITR

SEQ ID NO: 105879 - protein, 230 aa, Unknown
  Bacterial polypetide isolated from the Sargasso Sea
MRKNSQTFNVNILTLFPEIFPGSLDVSLLGKALRKKVWQINTINIRDFAINKQKSVDDTPYGGGAGMVMRPDIISLALESISNLDLPKICLSAKGSKLTQSMAVKLSKESGLILLCGRYEGIDQRVIDYNNFEEISIGDYVLPGGESAAIVLLESVLRLLPNVLGGENTLDEESFNSEMLLEYPHYTKPKEWKGIHVPEILVSGDHKKIQTWRNEKRLEITKKKRPDLIN

SEQ ID NO: 105880 - protein, 115 aa, Unknown
  Bacterial polypetide isolated from the Sargasso Sea
EGVDDRVLSTRNIEEVSIGDYVLSGGETAAYVVIDSVLRLLPGVLGNDNSKIEETFENGLLEYPQYTKPQIWEEKSVPDVLLSGDHSKIKDWRLSQSEAITRVRRPDLWEKYKKD

SEQ ID NO: 105881 - protein, 233 aa, Unknown
  Bacterial polypetide isolated from the Sargasso Sea
MLEVKIFTLYPDLFPGPLNTGIFKKAKENKIWNLKVINIRDYSKDNHGTVDDTPFGGGSGMLLRPDILASALDNNIKKGEKIIYLSPRGKKFDQNVARTLSKEKNLNLICGHFEGVDQRLLETRNIEEYSLGDFVLSGGEPAAFVLVDALIRLLPGVLGNKDSVKEESFENHLLEYPQYTKPREWEGKSPPEVLFSGDHAKIKGWRLSQSEAITRRQRPDLWKKYLEKKNEKH

SEQ ID NO: 105882 - protein, 189 aa, Unknown
  Bacterial polypetide isolated from the Sargasso Sea
MFRAQVFTLYPEVFPGPLAKGLYGKALANKLWDLKVINIRDSATDKHKTVDDTPYGGGSGMLLKADVLAKSLDQNIKKGERIFYLSPKGKKFDYKIAQDLSKEKSISIICGHFEGVDERVLSTRNIEEVSIGDYVLSGGETAALVVLDSVLRLLPGVLGNDKSSIDETFENSLLEYPQYTKPQIWEKKS

SEQ ID NO: 105883 - protein, 185 aa, Unknown
  Bacterial polypetide isolated from the Sargasso Sea
MVMMAEPIINTLKEINNKNTGKIIYLSPQGKKLNQEKVKSLSKLKNITLICGRYEGIDQRVIDEYVDEELSIGDFILSGGEYAAICIIDAISRHIPGTLGNKNSYLKDTFSNGLLKWDIYAKPEKLGSLKVPDVLLSGNHKEISKWREENSLLKTFLKRPDLFEKIKLSKKQKKLLEELASKAIL

SEQ ID NO: 105884 - protein, 231 aa, Unknown
  Bacterial polypetide isolated from the Sargasso Sea
MWKARVFTLYPEIFPGPLNKGLYGKALEKKLWNLEVINIRDSAEDKHKTVDDTPFGGGSGMLLKPDVLGKSIDNNIKKGERIFYLSPKGKKFDQQIAKDLSNEKTINLVCGNFEGVDQRILDTRNIEEISIGDYILSGGESASFVVIDAVLRLLPNVLGNEKSKSDESFENGLLEYPQYTKPQIWEKKSVPEVLLSGDHSKIKDWRLSQSKDITRRRRPDLWKKYLDKEKK

SEQ ID NO: 105885 - protein, 193 aa, Unknown
  Bacterial polypetide isolated from the Sargasso Sea
IVNIRDYATDKHKTVDDTPFGGGSSMLMRPDVVANSLDKNITNKNEPIIYLTPKGKKFDQTYAKKIMNKNLNIICGHFKGVDQRLLETRNIEEVSIGDYILSGGEIGALVLIDTIVRLIPGVIGNSRSLPEETFEQNLLECPQYTKPQKWEEKEVPDVLLSGDHKKIKDWRLSQSEAITRDRRPDLWQKYKKK

SEQ ID NO: 105886 - protein, 210 aa, Unknown
  Bacterial polypetide isolated from the Sargasso Sea
MFNAQIFTLYPDFFPGFLSKGLYGKAMSENKWKLKIVNIRDYASDKHKTVDDSPYGGGSGMLIRPDVISKAIDSNIKTDEKIIFLSPKGKLFNQEKAREFSKEKKINLLCGHFEGIDQRVIDNRNIEELSVGDYILSGGETAAMIVMDSIIRLLPGVLGNESSISEETFENGLLEYPQYTKPQIWENKEVPNILLSGDHAKIKDWRLSQS

SEQ ID NO: 105887 - protein, 159 aa, Unknown
  Bacterial polypetide isolated from the Sargasso Sea
APYGGGPGMVLMPEPLDKAITSSKADINVFLTPSGQQLTENLVSELLEYKSINLVCGRYEGFDQRILEIHSDYEISIGQSVVSGGEVPALYLLEALIRKIPDVLGNPESLISETFTDNKIDYPVYTRPEIFKNKEVPAVLLSGNHQKIDDWKKNNLKDI

SEQ ID NO: 105888 - protein, 131 aa, Unknown
  Bacterial polypetide isolated from the Sargasso Sea
SDLSKEKSISLICGHFEGVDERVLTTRNIEEISVGDYVLSGGETAALVVLDSILRLLPGVLGNEKSSIDETFENGLLEYPQYTKPQIWEEKSVPEVLLSGDHAKIKDWRLSQSEAITRVRRPDLWQKYKKD

SEQ ID NO: 105889 - protein, 157 aa, Unknown
  Bacterial polypetide isolated from the Sargasso Sea
MWQAQVFTLYPEVFPGPLSKGLYGKALSNDLWKLKVVNIRDSADDKHKTVDDTPYGGGSGMLLKADVLAKSLDENRNENERILYLSPKGKKFDQNLAKEIANEKSLSIICGHFEGVDERILSTRNIEEVSIGDYVLSGGESAAYVVIDSILRLLPGV

SEQ ID NO: 105890 - protein, 174 aa, Unknown
  Bacterial polypetide isolated from the Sargasso Sea
MVGGTGMLLKADVLANALDQKVKKGERVFYLSPKGKKFDQKLAQDLSKEKSISLICGHFEGVDERVLSTRNIEEISIGDYVLSGGETAALVVLDSILRLLPGVLGNDKSSLDETFENGLLEYPQYTKPQIWEEKSVPEVLLSGDHNKIKDWRLSQSEAITRDRRPDLWQKYKKN

SEQ ID NO: 105891 - protein, 205 aa, Unknown
  Bacterial polypetide isolated from the Sargasso Sea
CCWYHKSTDDSPFGGGPGMVMRPEPIYAALNSLGLQPGTPVIALSAQGKLFNQREAERLAQNDRVVLLCGRYEGIDERVLQNYITEEISVGDYVVSGGEIPAMLLIDSLIRLLPGALGHGENAISDDSHTSGILQFPQYTRPAVFQGLKVPDILLSGDHNAIAQWRRNEALKRTLERRPELLDSASLDENDKKNLGAIYKEKGII

SEQ ID NO: 105892 - protein, 191 aa, Unknown
  Bacterial polypetide isolated from the Sargasso Sea
MLQAQVFTLYPDIFPGPLGKGLYGKAMSKKLWSLNVINIRDAATDKHKTVDDTPYGGGTGMLLKPDVLANSIDQNINKGDRILYLSPKGKVFNQKLAQDLSLEKSFSLICGHFEGVDERVLSTRNIEEISVGDYVLSGGETAALVVLDSVLRLLPGVLGNDKSASEETFENGLLEYPQYTKPQIWEEKSVP

SEQ ID NO: 105893 - protein, 116 aa, Unknown
  Bacterial polypetide isolated from the Sargasso Sea
FEGIDQRVIDSRNIIELSVGDFILSGGESAAFVIIDSILRLIPGVIGNNHSVDEETFENGLLEYPQYTKPQIWEEKSVPDVLLSGDHAKIKDWRLSQSEAITRDRRPDLWQKYKKN

SEQ ID NO: 105894 - protein, 212 aa, Unknown
  Bacterial polypetide isolated from the Sargasso Sea
MKNIDIITLFPEIIEGYILSQPFAKNISPEVNIEPHQLRDFSPYKHRQVDDKQYGTDPGMVLMPEPLSNAVDFIEKKRKSNCYKILLSPQGKLIDSELINNIYKKPNLIFVCGRYEGVDERFIEEKIDLEISIGDFVLSGGELPALLILEAMSRLSPGFLGNEKSLLNDSFGNNFKSSLKGPVYTKPNDYKGRKVPEVLLSGDHKKILEWRK

SEQ ID NO: 105895 - protein, 182 aa, Unknown
  Bacterial polypetide isolated from the Sargasso Sea
RAQETGRLELAVHNLRDWTHDRYRKVDDEPYGGGPGMVLKPEPIFEAIEELTEDTTQVVMLCPQGEPFRQAKAKELAGHEHLLLLCGSYEGFDERVRSLVHHELSIGDYVLTNGALPAMVVIDAVTRLLPGVLGDDSSSAEESFSEASLEYPQYTRPAEYRGMKVPEVLLSGNHAAVEAWRR

SEQ ID NO: 105896 - protein, 239 aa, Unknown
  Bacterial polypetide isolated from the Sargasso Sea
MNINILTIFPDIFNVLNSGVVSKAIKQKLITINLSDIRKNAINKHNQVDSKPYGGGEGMVMMAEPLIKTIKNINTSKRGHIVYMSPQGTKLNQDKVISLSKLENLTIICGRYEGIDQRVIDNYVDEEISIGDFVLSGGEYAAICLIDSISRHIPGTLGNKNSYLKDTFSNGLLKEDVYTKPEIYDSFKVPDVLLSGNHEKIEAWKSDMSLIKTYSKRPDLLKNRKLTKKQKKLWKNGHL

SEQ ID NO: 105897 - protein, 140 aa, Unknown
  Bacterial polypetide isolated from the Sargasso Sea
MLHARIFTLYPEMFPGPLDKGLYGKALSNKTWDLDVINVRDFSEDKHKTVDDTPFGGGSGMLIKADVLARSIDKHTNKTEKIFYLSPKGKLFDQETARLLSKEKCINLICGHFEGVDQRLLETRNIQEISIGDYVLSGGE

SEQ ID NO: 105898 - protein, 166 aa, Unknown
  Bacterial polypetide isolated from the Sargasso Sea
ALTFAKKGFKKNCKIFSLSPSGKKITQSFIKNLVTSKEIILICGRYEGIDQRFIDYNHIEEISVGDYILSGGELASFILIDACVRLIPEVLGNSESLRSESFHDYLLEYSQYTKPSIWKKLKVPEVLLTGNHKKISDWRLKNSLEKTKKIRPELYNLFVKEKKRKL

SEQ ID NO: 105899 - protein, 204 aa, Unknown
  Bacterial polypetide isolated from the Sargasso Sea
MLRFEVLTLFPEIFSSFLDESLIKRGIENRLLSVSLVNFRKHGLGKHLQVDDSPYGGGPGMILRIEPVNLTLEEQKNFHQSQGLETHTILVSPQGQPLTQKKAKELSQNSSVLTLVCGRYEGFDERIRSLVDEEISGGDFVCMGGEVITMAIIESVSRLLPGFLGNQESSKQESFSQSLLEYPQYTRPASYAGMGVPEECYRGT

SEQ ID NO: 105900 - protein, 156 aa, Unknown
  Bacterial polypetide isolated from the Sargasso Sea
MREFFICSPKGKKFDQKFAKDLTKERTINLICGHFEGIDARILSTRNIEEISIGDYILSGGESASFVVLDSVLRLLPGVLGNEKSKDDESFENGLLEYPQYTKPQIWEKKSVPEVLLSGDHAKIKDWRLSQSKDITRRQRPDLWEKYLNNKKNEKY

SEQ ID NO: 105901 - protein, 192 aa, Unknown
  Bacterial polypetide isolated from the Sargasso Sea
NKKVKIDGSPAGGGPGMIMRADIVLPIIANMRQNGDTRPLIVPAARGIKYDQKITKDLVKNEGLIFLCGRFEGIDQRIIESTGALELSIGDYILTNGDVAAINIIDSCVRLLDGVLSSKASTKNESYEDGLLEYPQYTLPREYGGLKIPDVLLSGDHGAISKWRFNQSLLATEKNRPDLYEKYKKKTRDSGS

SEQ ID NO: 105902 - protein, 132 aa, Unknown
  Bacterial polypetide isolated from the Sargasso Sea
AKGLSKEKTVNLICGHFEGIDQRVIEARNIEEVSIGDFVLSGGESAAIVMLDAIIRLLPGVLGNEKSVEEESFENGLLEYPQYTKPQIWEEKTVPDVLLSGDHAKIKDWRLSQSEAITRDRRPDLWQKYKKN

SEQ ID NO: 105903 - protein, 228 aa, Unknown
  Bacterial polypetide isolated from the Sargasso Sea
MLKAQVFTLYPENFPGPLDKGLYGRAMAKNLWSLNVINIRDAATDKHKTVDDTPYGGGTGMLLKPDVLAKSIDENINEGERIFYLSPKGKKFEQNLAMELSKEKSFSLICGHFEGVDERVLATRNIEEISIGDYVLSGGETAAIVVLDSVLRLLPGVLGNEKSTNEETFHNGLLEYPQYTKPQIWEQKSVPEVLLSGDHAKIKDWRLSQSEAITRDRRPDLWQKYKKN

SEQ ID NO: 105904 - protein, 229 aa, Unknown
  Bacterial polypetide isolated from the Sargasso Sea
MFKVKIFTLYPEFFPGPFKKGIYRKAIEKKIWDMNVINIRDYADDKHKTVDDTPYGGGSGMVMRADVIANSLDKNLESNEKVYYLSPRGKLLNQDIAKKISNEKCLNILCGHFEGVDQRVLDNRNIEEISIGDYIISGGETASYIVLDTVLRLLPGVLGNKDSIVDESFENGLLEYPQYTKPQIWQKNEVPEVLLSGDHAKIKGWRLSKSEAITRDRRPDLWHKHNKKN

SEQ ID NO: 105905 - protein, 179 aa, Unknown
  Bacterial polypetide isolated from the Sargasso Sea
FGGGSGMLLRPDVVASALDTNLKSDEISIYLSPKGKKFDQKVAKEFSKQKKLNLLCGHFEGIDQRLLETRNIKEYSIGDFVLSGGEIASFVLIDSVIRLLPGVLGNHNSTKEESFEDYLLEYPQYTKPQNWEGKSTPEVLLSGDHAKIKDWRLSQSEAITRRERPDLWKKYLNKKNEKH

SEQ ID NO: 105906 - protein, 257 aa, Unknown
  Bacterial polypetide isolated from the Sargasso Sea
YRKVDDEPYGGGAGMVLKPEPVYAAVESIPRSRRSRVLLMTPQGRPFQQADLQRWATEHDQLLLLCGHYEGFDERIRALADEEVSAGDFVLTGGELPAMTVINGVVRLLPGTVGTAHSLVEESHSIGLLEHPHYTRPAEFRGLRVPDVLRSGDHGAIEAWRQHQREERTRARRPDLYARWRMADDVSDQAMQIRIGNGYDIHRLVVGRPLILGGVTLEHPDGLGLDGHSDADVLVHAVMDALLGALSLGDIGKYFPP

SEQ ID NO: 105907 - protein, 228 aa, Unknown
  Bacterial polypetide isolated from the Sargasso Sea
MWQAQVFTLYPEIFPGPLSKGLYGKALSNNLWKLKVVNIRDAADDKYKTVDDTPYGGGSGMLLKADVLAKSLDENKNESERILYLSPKGKKFDQNLAKKLANEKSLSLICGHFEGVDERILSTRNIEEISIGDYVLSGGESAAYVVIDSILRLLPGVLGNENSKLDETFENGLLEYPQYTKPQIWEEKAVPDVLLSGDHNKIKHWRLSQSEAITRDRRPDLWEKYKKD

SEQ ID NO: 105908 - protein, 199 aa, Unknown
  Bacterial polypetide isolated from the Sargasso Sea
DRNGRLDDKPYGGGPGMILQPDPIIKTVEAIKKKDETYVISMAPHGKVLNQQKLLDLSQKKNITIISGRYEGIDNRVEESCVDEVCSVGDYILNGGELPALILLEGISRLVEGILGDENSALEESFNDGLLEFPQYTRPENSKYGNVPEVLLSGNHSDIRRWRLKESLRRTLSLRPDLIESRQLTSEEKELIDEIKGEG

SEQ ID NO: 105909 - protein, 228 aa, Unknown
  Bacterial polypetide isolated from the Sargasso Sea
MWTANILTLFPDLYPGPLGSSILGEARKNGKWDLNITDLKLFSEKNKRVDDSPFGGGPGMVIKPDVIDRALVSLKSNDFPIYYLSPRGVKLDAQISNSISKLDGMTLVCGKYEGLDERVIKHYNMIEISIGDYILSGGDLAAMVLIDSVVRCLPNVLGNPLTLNEESFTNHLLEYPLYTQPRVWKNYKVPDVLLSGDHKKINNWKIKQSEDITMKRRPDLWKKYLKLK

SEQ ID NO: 105910 - protein, 219 aa, Unknown
  Bacterial polypetide isolated from the Sargasso Sea
MWKVKVFTLYPEVFPGHLDGGLYKKAIENKIWSIEVINIRDYAKDKHKTVDDTPFGGGSGMVMRADILASSLDKNITKNNEPIIYLSPKGKKFDQVYAKKISNKNLNIICGHFEGVDQRILETRNIEEVSVGDFVLSGGEVAALLIIDTVVRLLPGVLGNPDSLAEESFEKNLLEYPQYTKPQKWEKKEVPEVLLKGDHKKIKDWRLAQSEDITRRRRP

SEQ ID NO: 105911 - protein, 238 aa, Unknown
  Bacterial polypetide isolated from the Sargasso Sea
MLDIKILTAYPEMFPGILEHSLIGKAFKENIFKIETIDLHQFGIDDRMSIDDEPFGGGPGMVLRPDVVEKALNSIPNAHNQNSAKIYLTPSGTPLNQKKLVNLAKLQKMTILCGRFEGVDQRAIDVLDFEEISIGDYVLAGGEIAAQVLLEGCIRLIPGVLGHPKSLLEESFSNNLLEYPQYTRPKCWEDSLGKKHDVPEILTSGHHENIKTWRLSKSVEKTKNIRPDLFVKKEKKQD

SEQ ID NO: 105912 - protein, 121 aa, Unknown
  Bacterial polypetide isolated from the Sargasso Sea
YEGIDQRLLDYYTIEELSIGDYILAGGELAAQVLVESVVRLLPGTLRHRESSEMESFNNDLLEYPQYTRPKTWKNMTIPDVLLSGNHKNISKWRLDMSEKITKKMRPDIWKNYKKNKTSKK

SEQ ID NO: 105913 - protein, 103 aa, Unknown
  Bacterial polypetide isolated from the Sargasso Sea
DEISLGDFVLSGGETATYVFLDAILRLIPGVLGNEKSTSEESFENGLLEYPQYTKPQIWEEKSVPNVLLSGDHAKIKDWRLSQSEAITRDRRPDLWQKYNKKN

SEQ ID NO: 105914 - protein, 250 aa, Unknown
  Bacterial polypetide isolated from the Sargasso Sea
MYVGVVSIFPEIIKDYFAIGIVGRATREGLVDLNIFDVRDYANDVHKTVDDRPYGGGPGMVLMYEPLSLAVKAAKRRAPSDTKVGLVSPQGEIFEQRTAIDKSQMDGIIVVCGRYEGFDERFIEEFVDFEWSIGDYIVSGGELPALTCLDAIIRNLPTVVNNAQSILDESFLDGMLDYPQYTRPELVDSSEVPSVLLSGNHSAINSFRKAESLRKTYERRPDLLVGRTFSEDERKLLAKYFSGEDEQRKR

SEQ ID NO: 105915 - protein, 149 aa, Unknown
  Bacterial polypetide isolated from the Sargasso Sea
MNFNLVTIFPEITKLLDFGVIGKAIEKDLISMNSLNPRDFSKNTNKNVDDAPYGGGEGMVMMAEPLALVMKSIKNKGKVLLMSPQGERLSNTHIDGLLDEKSITIICGRYEGIDERFIENYVDKEFSVGDFVLSGGEIPALALIDALSR

SEQ ID NO: 105916 - protein, 114 aa, Unknown
  Bacterial polypetide isolated from the Sargasso Sea
GVDERVLSTRNIEEVSVGDYVCQGGETAALVVLDSVLRLLPGVLGNDKSASEETFENGLLEYPQYTKPQIWEEKSVPDVLLSGDHAKIKDWRLSQSEAITRVRRPDLWHKYKKN

SEQ ID NO: 105917 - protein, 201 aa, Unknown
  Bacterial polypetide isolated from the Sargasso Sea
MNINVLTLFPEIFDIFESGVISKAIKKKFLLLNILDVRKNSINKHFHVDSKPYGGGEGMVMRAEPIVRTLSEIKNLKENLVIYLSPQGKKLNQKKVINLSNLKDITLICGRYEGIDQRVIDKYVDEEISIGDFVLSGGEYAALCIIDAIARHIPGTLGNQDSYKKDTFSDGLLKGGVYTKPEIFEEMSVPTRTFIRKSSRN

SEQ ID NO: 105918 - protein, 295 aa, Unknown
  Bacterial polypetide isolated from the Sargasso Sea
EGSYKQVDDKPYGGGAGMILKPEPIYKAYELIRKSPKSKTLLMTPQGKVLKQKYLARWSTLDQIIIICGQYEGFDERIRCLADEEISIGDYVLSGGEIPAISIINGLTRLLPGTLGDPDSLVDESHNSSLLEYPQYTRPLTFKDMKVPDILLSGNHEEIKSWRRRKSFERTLERRSDLISNENYKKSPQSKRIIKENNQFMKFRIGNGYDIHRLVEDRDLIIGGVKLHHPENLGLDGHSDADVLSHSIMDALLGALSLGDIGKYFPPSDEKWKNADSLFLLSKVIDLIRQDGLGK

SEQ ID NO: 105919 - protein, 228 aa, Unknown
  Bacterial polypetide isolated from the Sargasso Sea
MWQAQVFTLYPEVFPGPLSKGLYGKALSNNLWKLKVVNIRDAAGDKHKTVDDTPYGGGSGMLLKADVLAKSLDENKIENERILYLSPKGKKFDQNLAKELANEKSLSLICGHFEGVDERILSTRNIEEISIGDYVLSGGESAAYVVIDSILRLLPGVLGNENSKLDETFENGLLEYPQYTKPQIWEEKAVPDVLLSGDHNKIKHWRLSQSEAITRVRRPDLWEKYKKN

SEQ ID NO: 105920 - protein, 127 aa, Unknown
  Bacterial polypetide isolated from the Sargasso Sea
NILCGRYEGIDQRILDFYPIEEISIGDYILAGGEIASQVLVESIVRLLPGTLGDMKSASSETFSNDLLEYPQYTRPKKWKNLTIPDILLSGNHRNISEWRLKQSEKLTQKVRPDLWKNYKKSKTRKK

SEQ ID NO: 105921 - protein, 236 aa, Unknown
  Bacterial polypetide isolated from the Sargasso Sea
MKVHIITPFPEMVKSIINCSILAKSQQKGYVEYYTYNLFDFAENSTNNRIDDYPFGGGAGMILKPEPIFEIFGSIKKSLNENSKIIYPTPDGQLLNHNLSKELSHLDDLVIINGHYKGIDQRIRDHIITDEISIGDYVLTGGELAGMIILDSVVRLMPGVINSKESSDLDSFSHPLLDGPHYTRPARYKDIDVPEILLSGNHKEIEKWFNKKREEKTKLRRPDLWDEYKKLKKSKE

SEQ ID NO: 105922 - protein, 213 aa, Unknown
  Bacterial polypetide isolated from the Sargasso Sea
MGSWVLMTQTSSLWVGVISLFPDMFDAITQQGVTGRAVKNGLIDFNCWNPRDYALDKHRTVDDRPYGGGPGMLMMVKPLEKAILDAKKAAGDGAKVIYMSPQGRKLDQQGASELANSDKLILIAGRYEGIDERIIESYVDEEWSIGDFILSGGELPAMTLIDAVARLVPGVLGHNQSAEQDSFSDGLLDCPHYTRPETLDDKQVPAVLLSGNH

SEQ ID NO: 105923 - protein, 161 aa, Unknown
  Bacterial polypetide isolated from the Sargasso Sea
LMSPQGEHLSNAHIDGLLDEKSITVICGRYEGIDERFIENYVDQEFSIGDFVLSGGEIPALALIDALSRKIPGVLGNQESFKNDSFENNLLKGPVYTRPQKFEGKDVPEILLSGDHEKINDWKILSSLQRTIERRPDLLDSVKLTKKQKKLLDNLLSKRIL

SEQ ID NO: 105924 - protein, 207 aa, Unknown
  Bacterial polypetide isolated from the Sargasso Sea
TCLRKGLLDIRVHDLRDYTLNKHRKVDDTPFGGGVGMVMNVEPIARALELLKKEVPKARTILLSPGGRPFDQGKANELSHQESLILVCGRYEGVDERVRLHFVDEEISIGDYILTGGELPAMVLVETVSRLIPGVLGDSASIIEESFSEGMLEYPQYTRPRDYKGFKVPEVLVSGDPKKISAWQKKEALNKTERVRPDLLEKIKRSN

SEQ ID NO: 105925 - protein, 230 aa, Unknown
  Bacterial polypetide isolated from the Sargasso Sea
IKMFQTRIFTLYPDVFPGPLNKGLYGKALSKKIWDLKVINIRDYASDKHKTVDDTPFGGGSGMLIKPDVIAKSLDANVSLGEKIFYLTPKGNLFNQDYAKKLSKEKNINLVCGHFEGIDQRVIDSRKIEELSIGDFVLSGGEAAAFVIIDAILRLIPGVIGNKNSTKEESFENGLLEYPQYTKPQIWEKKSVPDVLLSGDHAKIKDWRLSQSEAITRDRRPDMWQKYKKD

SEQ ID NO: 105926 - protein, 151 aa, Unknown
  Bacterial polypetide isolated from the Sargasso Sea
MWQAQVFTLYPEIFPGPLSKGLYGKALLNNLWKLKVVNIRDAADDKHKTVDDTPYGGGSGMLLKADVLAKSLDENKNESERILYLSPKGKKFDQNLAKELANEKSLSLICGHFEGVDERILSTRNIEEISIGDYVLSGGESAAYVVIDSIL

SEQ ID NO: 105927 - protein, 180 aa, Unknown
  Bacterial polypetide isolated from the Sargasso Sea
MLQAQVFTLYPDNFPGPLGKGLYGKAMSKKLWSLNVINIRDAATDKHKTVDDTPYGGGTGMLLKPDVLANSIDQNINKGDRILYLSPKGKVFNQKLAQDLSLEKSFSLICGHFEGVDERVLSTRNIEEISVGDYVLSGGETAALVVLDSVLRLLPGVLGNDKSASEETFENGLFEYPQYT

SEQ ID NO: 105928 - protein, 162 aa, Unknown
  Bacterial polypetide isolated from the Sargasso Sea
VLANSIDSNLNSNEKIIYLSPKGKLFNQELAKKLSKEKTINLICGHFEGVDQRVIESRKIEEVSIGDFVLSGGESAAFVMLDSIIRLLPGVLGNEISVEEESFENGLLEYPQYTKPQIWEEKTVPDVLLSGDHAKIKDWRLSQSEAITRDRRPDLWQKYKKI

SEQ ID NO: 105929 - protein, 94 aa, Unknown
  Bacterial polypetide isolated from the Sargasso Sea
MFIWRESAAYVVIDSILRLLPGVLGNENSKLDETFENGLLEYPQYTKPQIWEEKAVPDVLLSGDHNKIKHWRLSQSEAITRDRRPDLWEKYKKN

SEQ ID NO: 105930 - protein, 253 aa, Unknown
  Bacterial polypetide isolated from the Sargasso Sea
MTNGEKKDHKIWIISLFPDFFRAFLETGLSGRALKGERESGLSVHLVQLRDYSSNSYKGVDDAPYGGGPGMVMRPDTLQKALVDGVVGPGGYGDNWKEKLHIVFPGPRGRVWNQKSCQEFSQRAWGENGHGKDLVFICGRYEGIDERFIQKYVDEQLSLGDYVLTGGELAVMAIIDSAIRFKPGVLGNRESFQKESFQGGLLEHPQYTRPRVFEDLEVPEVLLSGNHKKIEEFEKLESIRITQAERPDLLEEL

SEQ ID NO: 105931 - protein, 186 aa, Unknown
  Bacterial polypetide isolated from the Sargasso Sea
ATDKHKTVDDTPYGGGTGMLLKPDVLANSIDQNMNKGDRILYLSPKGKVFNQKLAQDLSSEKSFSLICGHFEGVDERVLSTRNIEEISVGDYVLSGGETAALVVLDSVLRLLPGVLGNDKSASEETFENGLLEYPQYTKPQIWEEKSVPDVLLSGDHAKIKDWRLSQSEAITRDRRPDLWHKYKKN

SEQ ID NO: 105932 - protein, 237 aa, Unknown
  Bacterial polypetide isolated from the Sargasso Sea
IFSEWNNKGRAINENLIDIHIHNIRDFSNDKHLSVDDFPYGGGPGMLMKPEPVFNAVNKIKNDYQIGNTSPIILTSPQGDKLTHNIALHFSEFDEMIIICGRYEGFDERIRQNLATHEISLGDFVLSGGEIPAMAIVDSISRLIPNVLGSDESARNDSFYENFLQFPQYTRPENFQGMTVPKILLSGNHQDIEKWRKTESIRKTLKRRPDLINFNQLNEEEKEIYYQILDENSKELE

SEQ ID NO: 105933 - protein, 121 aa, Unknown
  Bacterial polypetide isolated from the Sargasso Sea
ICGRFEGLDQRLIDARNLEEISLGDYVLSGGEIAGLAVLDACVRLLPGVLGSEEGLKEESFTKGLLEYPLYTQPREWKGKTVPEVLLSGHHGDIKTWQREQAEMVTRDRRPDLWARYREKS

SEQ ID NO: 105934 - protein, 123 aa, Unknown
  Bacterial polypetide isolated from the Sargasso Sea
HFEGIDERVLSTRNIEEISIGDYVLSGGESAAIVFIDCVVRLLPNVLGNSDSRVEETFENGLLEYPQYTKPKIWEGKGVPEVLLSGDHAKIKGWRLTESEAITRRQRPDLWKKYLNNKKNEKH

SEQ ID NO: 105935 - protein, 167 aa, Unknown
  Bacterial polypetide isolated from the Sargasso Sea
LLKPDVIANSLDQNVIKGEKIIFLTPRGKVFNQKIAKEISKEKTINIICGHFEGIDQRVIESRKIEEYSLGDFVLSGGETATFVFLDAVLRLVPGIIGNYNSIDEESFQNGLLEYPQYTKPQIWEQKSVPDVLLSGDHAKIKDWRLSQSEAITRVRRPDLWQKYKKD

SEQ ID NO: 105936 - protein, 172 aa, Unknown
  Bacterial polypetide isolated from the Sargasso Sea
LRPDVMGRAIDEARSSMPPAAPILYLSPRGRPFDQAMARDLATTPGATLICGRFEGLDERVIQHYGIQEVSLGDFVLTGGEIAAQALIDATVRLIPGVLGNADSTEEESFSDGLLEHPQYTRPPEWKGHTIPDVLMSGHHGEIAKWRHEQAKQITKTRRPDLWAAYQKRNKE

SEQ ID NO: 105937 - protein, 261 aa, Unknown
  Bacterial polypetide isolated from the Sargasso Sea
MSQQAGLWVGVITLFPQMFDAITKFGVTSRAVKQGLLQVECWNPRDYTSDKHNTVDDRPFGGGPGMLMMVQPLTDAIRAAKQAAGGNVHTVYLSPQGRKLDQKGVQELSRYPKLLLVAGRYEGIDERVIETEIDEEWSIGDYVLSGGELPAMTLIDAVSRLVPGVLGHEESAEQDSFATGLLDCPHYTRPAVLADKEVPPVLLSGHHENIRRWRLKQALGRTWLRRPDMLNALALTKEQRKLLDEFHWNTRRCSNTIVNSR

SEQ ID NO: 105938 - protein, 250 aa, Unknown
  Bacterial polypetide isolated from the Sargasso Sea
MSSFNFDVITLFPKAFKSIKNLGVITRALHKNLIDVNLHDLREYGEGSYRQVDDKPYGGGAGMVLKPEPIYKAYESIRKSPKSKTLLMTPQGRVLKQKDLARWSTLDQIIIICGQYEGFDERIRCLADEEISIGDYVLSGGEIPAISIINGLTRLLPGTLGDPESLVDESHNNSLLEYPQYTRPLTFKDMQVPDILVSGNHEEIKSWRRQKSIERTMERRSDLISNENYKKSPQSKRIITEYNQFMKFRI

SEQ ID NO: 105939 - protein, 228 aa, Unknown
  Bacterial polypetide isolated from the Sargasso Sea
MFQVRIFTLYPDLFPGPLKEGLYGKALSNKIWNLKIINMRDYSLDKHKTVDDTPFGGGSGMVIKPDIVAKSFDENILPGEKAYYLTPKGKTFNQKIAKKLSRKKVLNLICGHFEGIDQRVIDKREIEELSIGDFILSGGESAAFVVIDSILRLLPGVIGNNNSVIEESFENGLLEYPQYTKPQIWEENKVPDVLLSGDHAKIKDWRLSQSEAITRDRRPDLWQKYKKD

SEQ ID NO: 105940 - protein, 160 aa, Unknown
  Bacterial polypetide isolated from the Sargasso Sea
PVQPRRRVLLMTPQGQPLQQADLRRWADDYEQLVLLCGHYEGFDERIRSLADEEVSLGDFVLTGGELPAMTIINGTVRLRPGTVGTADSLVEESHSAGLLEHPHYTRPATFREMDVPAVLRSGDHGAIARWRAQQQKERTQKRRPDLWAQWQAEHPSEEG

SEQ ID NO: 105941 - protein, 231 aa, Unknown
  Bacterial polypetide isolated from the Sargasso Sea
MFNSRIFTLYPDYFPGYLEKGLFGKAMMEKIWSLEIVDIRNYAEDKHKTVDDTPYGGGDGMIMKADVLARSLDKNLPQDEKIIYLSPKGKVFDHNCAKRFSEFESINFICGHFEGIDQRIIDSRNIEEISIGDFVLSGGETAVFVVLDAILRFVPGVLGNVNSSKNESFENGLLEYPQYTKPQIFEQKGVPEVLLSGDHAKIKDWRLSQSEAITRVRRPDLWEKYKKTKKN

SEQ ID NO: 105942 - protein, 249 aa, Unknown
  Bacterial polypetide isolated from the Sargasso Sea
MWIGVISLFPEMFRAITEHGVTGRAVKSGLLQIECWNPRDFTHDKHRTVDDRPYGGGPGMLMMVQPLRDAIHAAKQAAGDGAKVIYLSPQGRKLTQAGVTELATNQKLILVAGRYEGIDERVIQTEVDEEWSIGDYVLSGGELPAMTLIDAVSRLVPGVLGDQASAEQDSFTDGLLDHPHYTRPELLDGLAVPEALTSGNHEVIRRWRLKQSLGRTWQRRPELINNLALTDEQESLLAEYVREVRDSVK

SEQ ID NO: 105943 - protein, 228 aa, Unknown
  Bacterial polypetide isolated from the Sargasso Sea
MWQAQVFTLYPEVFPGPLSKGLYGKAMSKKLWNLKVVNIRDAAEDKHKTVDDTPYGGGSGMLLKADVLAKSLDQNRIEGEKILYLSPKGKKYDQSYAKKLATAKSLSLICGHFEGVDERVLSTRNIEEVSIGDYVLSGGETAAYVVIDSVLRLLPGVLGNDNSKIEETFENGLLEYPQYTKPQIWEEKSVPDVLLSGDHSKIKDWRLSQSEAITRDRRPDLWEKYKKN

SEQ ID NO: 105944 - protein, 225 aa, Unknown
  Bacterial polypetide isolated from the Sargasso Sea
MNIDIITLFPELLKGPFSASIIKRAIKEKRVEINFHNPRDFSSSKYKQVDDYQYGGGAGMVMMIDPIAKCIKKLKLKRDYDEVIYLTPDGEKLSQSISNQLSNKKNLILLCGHYKGVDQRVRDLYITREISIGDFVLSGGELAAAVLCDSIIRLIPGVLGDGCSALYDSFQDDILAPPIYTRPSKYDGLSVPKVLLSGDKNKIDLWREQKSIDRTKKNRPDLYKN

SEQ ID NO: 105945 - protein, 211 aa, Unknown
  Bacterial polypetide isolated from the Sargasso Sea
MNTYNVITLFPNLIEEWKNIGIVRQAIKNQLVNIQTTNLREFGIGEYKQVDDAPYGGGPGMVLMPEPLDNAINSSNSDVNVFLTPSGEQLDETLLIKLLSFKSINLIAGRYEGFDQRILDMHADYKVSIGHTVISGGEVPAMYMLEALIRRIPGVLGNPDSLKYETFNDNKYDFPVYTRPEIFKNLSVPEVLLSGNHKDIEEWKKNNLKDI

SEQ ID NO: 105946 - protein, 123 aa, Unknown
  Bacterial polypetide isolated from the Sargasso Sea
LNILCGHFEGIDQRVIDNRNIEEISLGDFILSGGETASLVFLDSILRLIPGVLGNEKSTEDETFENGLLEYPQYTKPQIWEEKSVPDVLLSGDHAKIKHWRLSQSEAITRDRRPDLWKKYKKN

SEQ ID NO: 105947 - protein, 233 aa, Unknown
  Bacterial polypetide isolated from the Sargasso Sea
MFEVKIFTLYPDLYPGPLNTGLYKKAQENKIWSLNVVNIRDYAVDKKGTVDDTPFGGGSGMLLRPDVVASALDQNIKSNETIIYLSPRGKRFDQTTAHKFSKLKKLNLLCGHFEGIDQRLLETRNIQEYSIGDFILSGGETASFVFIDSIIRLLPGVLGNANSTIEESFENDLLEYPQYTKPQKWEGKSTPEVLLSGDHAKIKDWRLSQSEAITRRQRPDLWKKYLNKKNEKH

SEQ ID NO: 105948 - protein, 213 aa, Unknown
  Bacterial polypetide isolated from the Sargasso Sea
MKINVLAVFPQILDSLNYGVTGTAIEKNILEIHRIDLKDYPLNSYGSIDDKPFSGSEGMIISPLPISKAMNLVKSKGKVIYLSPQGKTLNQKKVKELATLNDLTIICGRYEGIDQRIIDEYVDEEISIGDYVLSGGEIAATVLIDSIVRNLPGALGNEKSLTNDSFSDGRLKGHSYTRPRDFEGRKVPDELVSGNHELVKEWKIANSLWVTKQ

SEQ ID NO: 105949 - protein, 213 aa, Unknown
  Bacterial polypetide isolated from the Sargasso Sea
MLHFDLLTLFPDFFGSFLSESLIGKSIEKELLQVELNNFREYGIGSHRKVDDEPYGGGPGMLLRVEPIAEALETRVGYHRQLGREVRKILLTPQGSPFDQKKAREWSQCGEVLLMVCGRYEGFDERVRELVDEEVSGGDYVCLGGEVIAMLIIESVSRLVPGVLGNPDSSETESFAAGTLEYPQYTRPRIYKGMEVPEELLSGNHGRIEAWKK

SEQ ID NO: 105950 - protein, 228 aa, Unknown
  Bacterial polypetide isolated from the Sargasso Sea
MWQAQVFTLYPEVFPGPLSKGMYGKAMSKDLWNLKVVNIRDAAEDKHKTVDDTPYGGGSGMLLKPDVLAKSLDQNKVEGERILYLSPKGKKFDQNYAKRLAKEKSISLICGHFEGVDERVLSTRNIEEISIGDYVLSGGETAAYVVIDSVLRLLPGVLGNDNSKIEETFENGLLEYPQFTKPQIWEEKAVPDVLLSGDHSKIKDWRLSQSEAITRDRRPDLWEKYKKN

SEQ ID NO: 105951 - protein, 212 aa, Unknown
  Bacterial polypetide isolated from the Sargasso Sea
MLSNFNVITLFPEIFQKWINVGVLSHGIEEKLFEFSSTNLRDYGIGSYKQVDDAPYGGGPGMVLMVEPLDNAIKESKKDINIFLTPSGQQLNEDLIQDLHGYESANIICGRYEGFDQRIIEMHSDYEIAIGQTVVSGGEIPAMFLIEALVRKIPGILGNSESLTNESFTNNKSDFPVYTRPEIYENLNVPEVLLSGDHKRIEEWKKNNLKDI

SEQ ID NO: 105952 - protein, 228 aa, Unknown
  Bacterial polypetide isolated from the Sargasso Sea
MWQAQVFTLYPEVFPGPLSKGLYGKALSKKLWNLNIVNIRDAAEDKHKTVDDTPYGGGSGMLLKPDVLAKSLDQNEIKGGRIIYLSPRGKKFDQNYARELSDEKSISLICGHFEGVDERVLATRNIEEISIGDYVLSGGETAAFVVIDSVLRLLPGILGNENSKVDESFENGLLEYPQYTKPQIWEEKAVPEVLLSGDHSKIKDWRLSQSEAITRVRRPDLWEKYKKN

SEQ ID NO: 105953 - protein, 231 aa, Unknown
  Bacterial polypetide isolated from the Sargasso Sea
MKVNILTLYPELFPGPLGIGLYKKAMEKKIWKLNVVNIRDYAGDKHKTVDDNPFGGGNGMLMRADVIALALDKNIDSKTSNKNIYLSPKGKTFDQNYAKKLCKEKNLNIICGHFEGVDQRLLESRDIEEISVGDYILSGGETASFVFLDAIIRLLPGVLGNKLSIEDESFEKGLLEYPQFTKPQKWEKKSVPDVLLSGDHAKIKHWRLSQSEAITRRQRPDLWEKYKNKKK

SEQ ID NO: 105954 - protein, 228 aa, Unknown
  Bacterial polypetide isolated from the Sargasso Sea
MFQAQVFTLYPEFFPGPLAKGLYGKALSNKLWNLNVVNIRDAATDKHKTVDDTPYGGGTGMLLKPDILAKSIDQRVKKDERIFYLSPRGKKFDQKFARDLSKEKSISLICGHFEGVDERILDTRNIEEISIGDYVLSGGETAALVVLDSILRLLPGVLGNEKSAINETFENGLLEYPQYTKPQIWEEKSVPEVLLSGDHAKIKDWRLSQSEAITRDRRPDLWQKYKKN

SEQ ID NO: 105955 - protein, 233 aa, Unknown
  Bacterial polypetide isolated from the Sargasso Sea
MLEVKIFTLYPDLFPGLLDVGIYKKAKEKQKWSLKIIDIRDYAFDDNRTVDDTPFGGGNGMLLKPDVVASALDKNIKDKEKIIYLSPKGKRLDQKEVKSLSKLKKINILCGHFEGVDQRLLETRNIEEYSIGDFILSGGESASFVFVDALVRLLPGVLGNANSAKDESFENNLLEYPQYTKPRDWEGKKVPEVLFSGDHAKIKGWRLSQSEAITQRQRPDLWKKYLVKKNEKH

SEQ ID NO: 105956 - protein, 241 aa, Unknown
  Bacterial polypetide isolated from the Sargasso Sea
MKKNFKVKVITIFPDVFPGILKIGVIGKALKSKIWSLKMINPRDFSKGVHKSVDDTTAGGGPGMILKSDILGKAINNAYKNIKDRKKFPLIYLTPRGKQLTQNKISQLSKKDGMILLCGRYEGIDQRVSDYYKIEEYSIGDFILAGGEIAAQALIESTVRLLPGTLGHKNSSTEESFNNDLLEFPQYTRPKIWNNLEIPKVLTSGDHKKIALWRKDMAEKLTKKIRPDLWKKYKKNKTIKK

SEQ ID NO: 105957 - protein, 214 aa, Unknown
  Bacterial polypetide isolated from the Sargasso Sea
LDLWKKGLYGKALSKNIWNLKVINIRDYSIDKHKTVDDTPYGGGSGMLIKPDVVAKSLDDNIGLNEKIFYLTPRGKTFDQKIAKSIVREKKINLLCGHFEGIDQRVIDSRKIEELSIGDYILSGGETAAIVVLDSILRLIPGIIGNENSAKEESFENGLLEYPQYTKPKIWEKLSVPEVLLSGDHDKIKDWRLSKSEAITRVRRPDLWQKYKKN

SEQ ID NO: 105958 - protein, 232 aa, Unknown
  Bacterial polypetide isolated from the Sargasso Sea
MRVVILTCYPEMFPGSLGYSVIGNALNNKKFSLEIVNLHNFGIDKRGSVDDEPFGGGPGMVIRPDVIEKALNSITFKTDNYCKIFLTPSGQKLSQAKLNNLSKHDEMLILCGRFEGVDQRAIEILDFQEISIGDYVLSGGEIAAQVLVEGCIRLIPGVLGQPQSLLEESFSNNLLEYPHYTRPQTWEDIQGNKHEVPDVLTSGHHEKIDKWRKEKSVKKTKELRPDLFKKEI

SEQ ID NO: 105959 - protein, 228 aa, Unknown
  Bacterial polypetide isolated from the Sargasso Sea
MLQAQVFTLYPDIFPGPLGKGLYGKAMSKKLWSLNVINIRDAATDKHKTVDDTPYGGGTGMLLKPDVLANSIDQNINKGDRILYLSPKGKVFNQKLAQDLSLEKSFSLICGHFEGVDERVLSTRNIEEVSLGDYVLSGGETAALVVLDSVLRLLPGVLGNDKSASEETFENGLLEYPQYTKPQIWEKKSVPEVLLSGDHAKIKDWRLSQSEAITRVRRPDLWQKYKKD

SEQ ID NO: 105960 - protein, 228 aa, Unknown
  Bacterial polypetide isolated from the Sargasso Sea
MLRFEVLTLFPEIFSSFLEESLIKRGLEKKLLSISLVNFRKHGLGKHLQVDDSPYGGGPGMILRIEPLVLTLEEKKDFHQSQGRKTHTILVSPQGQPFTQKKAKELSQKNSVLTLVCGRYEGFDERIRSIVDEEISGGDFVCMGGEVISMAIIESVSRLRPGFLGNQESSENESFSQSLLEYPQYTRPASYAGMDVPKELLSGNHEKIDAWRQKQALSRTKKRRPDLI

SEQ ID NO: 105961 - protein, 231 aa, Unknown
  Bacterial polypetide isolated from the Sargasso Sea
MLEARIFTLYPDFFPGYLGQGIFGKALSENKWKIDTVDIREYAFDKHKTVDDTPYGGGEGMLMKADVLAKSIDKNVKDGEKIIYLSPKGKLFNHQLAKQLSQEKTINIICGHFEGVDERLLKTRNIEEVSIGDFVLSGGEGASFVILDAILRFIPGILGNTNSAKEESFENGLLEYPQFTKPQIWEEKSVPDVLLSGDHAKIKDWRLSQSEAITRDRRPDLWQLYKKTKEN

SEQ ID NO: 105962 - protein, 241 aa, Unknown
  Bacterial polypetide isolated from the Sargasso Sea
MITFNILTLFPDAFPGILQHGLLGKALLKNHFKINTINIRDYSDLSANSVDDKPFSGGAGMILRPDIISKAIEANFNKDELNTFTKICFSAKGKNFSQNDLIQNKSNQNFILLNGRYEGIDQRVIDYYEFQEISVSDVILNGGEVASLLFMEAFMRLQPGVLGNEDTHSNESFQNELVEHDQFTRPNPWLAPDHTDIEVPAVLLSGNHADIDLWKHQNSKENTEKNRPDLFKKYLKKNKNE

SEQ ID NO: 105963 - protein, 241 aa, Unknown
  Bacterial polypetide isolated from the Sargasso Sea
MNFNLVTIFPEITKLFDFGVIGKAIEKDLISMNSFNPRDFSKNTNKNVDDAPYGGGEGMVMMAEPLALAMKSIKNKGKVLLMSPQGERLSNTHIDDLLDEKSITIICGRYEGIDERFIENYVDKEFSIGDFVLSGGEIPALALIDALSRKIPGVLGNQESFKNDSFENNLLKGPVYTRPQKFEGKDVPEILLSGDHEKINDWKILSSLQRTIERRPDLLDSVKLTKKQKKLLDNLLSKRIL

SEQ ID NO: 105964 - protein, 243 aa, Unknown
  Bacterial polypetide isolated from the Sargasso Sea
MNINIITLFPEIFDSLNYGLLGQALDREDIKINIFNLRDHQLNKHGQIDDKPYGGGEGMVLMAEPLENAIKNIPSDNLGIVINLSPQGTIFSQKKAKELSKLKNITIICGRYEGIDERLISQYVDDEISIGDYVLSGGEFAALTLIDTLSRFIPGVIGNKKSVELDSFSQGLLKGPVFTRPETFNSNDVPEVLISGDHNKIKEWRDNQSLIRTFERRPDLLKNAKLTKKQKKLLEELSSKAIL

SEQ ID NO: 105965 - protein, 191 aa, Unknown
  Bacterial polypetide isolated from the Sargasso Sea
MGLGLELIMKICVVSLFPEMVKKILNFGVIGRSEANGIMSLSVINPRDFTYDNHQKVDDKPYGGGPGMVMKYEPLKRSVEMAKEKFSGTAPVILLTPQGARFNQKTAKRFSQYSELIFVCGRYEGIDQRFIDSNVDEEISIGDFVLTGGEIGVMAIIDATVRLLPGALGDESSRTDESFEDGLLEYPHYTR

SEQ ID NO: 105966 - protein, 121 aa, Unknown
  Bacterial polypetide isolated from the Sargasso Sea
MICGHFEGVDERILSTRNIEEISIGDYVLSGGETAALVVLDSVLRLLPGVLGNEKSASDETFENGLLEYPQYTKPQIWEEKSVPDVLLSGDHSKIKDWRLSRSEAITRDRRPDLWQKYKKD

SEQ ID NO: 105967 - protein, 228 aa, Unknown
  Bacterial polypetide isolated from the Sargasso Sea
MLQAQVFTLYPEIFPGPLNKGLYGKAMAKKLWSLNVINIRDAATDRHKTVDDTPYGGGTGMLLKPDVLANSIDQNINKGERIFYLSPKGKIFNQKFAQELSKEKSFSLICGHFEGVDERVLSTRNIEEISIGDYVLSGGETAALVVLDSVLRLLPGVIGNDKSATEETFENGLLEYPQYTKPQIWEKKSVPEVLLSGDHAKIKDWRLSQSKAITRVRRPDMWQKYKKN

SEQ ID NO: 105968 - protein, 243 aa, Unknown
  Bacterial polypetide isolated from the Sargasso Sea
MNINILTIFPEIFDALNFGVVSKSLDKELLKVKTFDIRKNSINKHNQVDSKPYGGGEGMVMMAEPIINTLKEINNKNTGKIIYLSPQGKKLNQEKVKSLSKLKNITLICGRYEGIDQRVIDEYVDEELSIGDFILSGGEYAAICIIDAISRHIPGTLGNKNSYLKDTFSNGLLKWDIYAKPEKLGSLKVPDVLLSGNHKEISKWREENSLLKTFLKRPDLFEKIKLSKKQKKLLEELASKAIL

SEQ ID NO: 105969 - protein, 187 aa, Unknown
  Bacterial polypetide isolated from the Sargasso Sea
MSSFNFDVITLFPKAFELINNLGVITRALDKNLIDVNLHDLREYGEGSYRQVDDKPYGGGAGMVLKPEPIFKAYESIRKLPKSKTLLMTPQGKVLKQEDLARWSTLDQIIIICGQYEGFDERIRCLADEEISIGDYVLSGGEIPALSIINGLTRLLPGTLGDPGSLVYESHNSSLLEYPHYTRPLIL

SEQ ID NO: 105970 - protein, 264 aa, Unknown
  Bacterial polypetide isolated from the Sargasso Sea
MNQVTESAVQFDVVTLFPEMFRALTDWGITSRAVKQGRFGLRTWNPRDFTTDNYRTVDDRPYGGGPGMVMLARPLEAAIDAAKAAQAEQGIASTRVVMMSPQGAPLTHDRAVRMAQEPGVVVLCGRYEAIDQRLLDRCVDEEISLGDFVLSGGELPAMAMMDAVVRLLPGVLNDSLSAVQDSFADGLLDCPHYTRPEEYDGVRVPDVLLGGHHAEIEKWRRQEALRNTLRKRPDLIVRARREKLLSRADEAWLANLAREAKDAS

SEQ ID NO: 105971 - protein, 225 aa, Unknown
  Bacterial polypetide isolated from the Sargasso Sea
MRIDILTLFPEIFDSLNSFSIIDKAIKSKKVNIVTHNLRDYADNSRHVDDSPYGGGAGMIIKIEPIDNCIEKLKEKNDYDDIVYLTPDGEILNQKISNNLSLKKNLILLCGHYKGIDHRVRDHLITKEISIGNYVLSGGELPAAILCDSIIRLIPGVIGDESSALSDSFQDNIVSAPIYTRPANYKGLKVPDILISGNQKEIEKWKDQKSVERTKLLRPKLFDNL

SEQ ID NO: 105972 - protein, 228 aa, Unknown
  Bacterial polypetide isolated from the Sargasso Sea
MWQAQVFTLYPEVFPGPLNKGIYGKALLKKIWNLKVVNIRDYAEDKHKTVDDTPFGGGSGMLLKPDVLAKSIDQNIKNGERIFYLSPKGKKFDQKIAKDLSKEKCINLICGHFEGIDERILTTRNIEEISIGDFVLSGGETAALVLIDSILRLLPGVIGNDMSKKNESFENGLLEYPQYTKPLIWEKKGVPEVLLSGDHAKIKGWRLSQSEAITRDRRPDLWQKYKKN

SEQ ID NO: 105973 - protein, 231 aa, Unknown
  Bacterial polypetide isolated from the Sargasso Sea
MWTARVFTLYPDIFPGPLKKGLYGKAMEKKIWNLKTVNIRDYAKDKHKTVDDTPFGGGSGMLLKPDVLGSSLDNNIKKGERIFYLSPRGKKFNQKIAKELSKESTINLICGHFEGVDERILSTRNIEEISVGDYILSGGETASFIIIDAVLRLLPGVLGNNVSKEEETFENHLLEYPQYTKPQIWEKKSVPEVLLSGDHAKIKDWRLSQSKDITRRRRPDLWKKHLDKEKK

SEQ ID NO: 105974 - protein, 140 aa, Unknown
  Bacterial polypetide isolated from the Sargasso Sea
MAPYRLDVVSLAPQAFAPLLELGVIGRAFNAGIAELHLHNPRDFATDRHRKVDDEPYGGGAGMVLKPEPVFAAMEAIPRSPRSRVLLMSPQGRPLQQADLQRWSCDHDQLVFLCGHYEGFDERIRGLADEEVSMGDFVLT

SEQ ID NO: 105975 - protein, 146 aa, Unknown
  Bacterial polypetide isolated from the Sargasso Sea
MQFDVVTLFPDMFRALTDWGITSRAAKQERYGLRTWNPRDFTTDNYRTIDDRPYGGGPGMVMLAKPLEDAIGAAKAAQAEQGIGAPRVVMMSPQGATLNHDRVMQFAAEPGLILLCGRYEAIDQRLLDRVVDEEVSLGDFVLSGGE

SEQ ID NO: 105976 - protein, 243 aa, Unknown
  Bacterial polypetide isolated from the Sargasso Sea
MNINVLTIFPEIFEILNSGVLSKAMKKDILSIKPFDIRKNATNKHKNVDSKPYGGGEGMVIMAEPLIKTIKSIDKRKLGPVIYMSPQGQLLTQKKVISLSKLKNMTVICGRYEGIDQRVIDNYVDEEVSIGDFILSGGEYAAICLIDAISRHLPGTLGNKDSYLKDTFSNGLLKEDVYAKPEIFDSKKVPEVLLSGNHEKIKAWKSEISLLKTFKKRPDLLKKIKLTKKQKKLLEEWSSKAIL

SEQ ID NO: 105977 - protein, 233 aa, Unknown
  Bacterial polypetide isolated from the Sargasso Sea
MLEVKIFTLYPDLFPGPLDTGIFKKAKDNKIWNLKVINIRDYTKDKHGSVDDTPFGGGSGMLMRPDILASALDENIKKGEKIIYLSPRGKKFDQNVARSLSKEKNLNLICGHFEGVDQRLVETRNIEEYSLGDFILSGGEPASFVFVDALVRLLPGVLGNEDSVKEESFENYLLEYPQYTKPRKWEGKSPPEVLFSGDHAKIKGWRLSQSEAITRRQRPDLWKKYLEKKNEKH

SEQ ID NO: 105978 - protein, 238 aa, Unknown
  Bacterial polypetide isolated from the Sargasso Sea
MYRVKIITLFPNSFPGLLNTGVVGKALKKKIWSLKTIDPRKYSKGNYKKVDDTTAGGGPGMILKADVIGKSIDACYKNIKSKDSYPMIYLSPRGTPLTQSKVINFSKMKGINILCGRYEGIDQRILDFYPIEEISIGDYILAGGEIASQVLVESIVRLLPGTLGDMKSASSETFSKDLLEYPQYTRPKKWKNLTIPDILLSGNHRNISEWRLKQSEKLTQKVRPDLWKNYKKSKTRKK

SEQ ID NO: 105979 - protein, 249 aa, Unknown
  Bacterial polypetide isolated from the Sargasso Sea
MLGNPPRQQALLVSSFRLDVVSLVPEVFDSLRGLGVIGRAFNAGIAELHTHNPRDYATDRYRKVDDEPYGGGAGMVLKPEPVFAAFEAIPVQPRRRVLLMTPQGKPLQQADLRRWATDYEQLVLLCGHYEGFDERIRSLADEEVSLGDFVLTGGELPAMTIINGTVRLRPGTLGTADSLVEESHSAGLLEHPHYTRPANYREMEVPAVLRSGDHGAIARWRAEQQKERTEQRRPDLWAQWQAEHPGEQG

SEQ ID NO: 105980 - protein, 229 aa, Unknown
  Bacterial polypetide isolated from the Sargasso Sea
MFVATVFTLYPDLFPGPFSEGLYGKALEKKIWNLQKVNLRDYAEDKHKTVDDTPYGGGSGMLIKPDVIGRALDKNTKKGEKIIFLTPRGKVFNHECAKKLSKEKIINIICGHFEGIDQRVIDSRNIEEISIGDFVLSGGETASYVFLDAILRLIPGVIGNENSIAEESFENGLLEYPQYTKPQIWEKKSVPDVLLSGDHAKIKDWRLLQSEAITRDRRPDLWQKYNKKN

SEQ ID NO: 105981 - protein, 231 aa, Unknown
  Bacterial polypetide isolated from the Sargasso Sea
MFLSRIFTLYPDYFPGYLNKGLYGKAMSEKIWNLETVNIRDYSSDKHNTADDTPYGGGNGMIMKADVLAKSLDENIKEKEKIIYLSPKGKLFDHKYAKQLSKEKSLNLICGHFEGIDERIIQSRNIEEISIGDFILSGGEAAAFIILDAVLRFLPGVLGNENSTEDESFENGLLEYPQYTKPQIWEDKSVPDVLLSGDHAKIKDWRLSQSEAITRDRRPDLWEKYKKIKKN

SEQ ID NO: 105982 - protein, 64 aa, Unknown
  Bacterial polypetide isolated from the Sargasso Sea
SFEHDLLEYPQYTKPQIWEKKSVPDVLLSGNHSKIKDWRLSQSKDITRRQRPDMWKKFLKKEKK

SEQ ID NO: 105983 - protein, 188 aa, Unknown
  Bacterial polypetide isolated from the Sargasso Sea
KHGSVDDAPFGGGSGMLLRPDVVASALDTNVKKNEKIIYLSPKGKRLDQKEVRSLSKLNKVNILCGHFEGIDQRLLETRNIEEYSLGDFVLSGGETASFVFVDALVRLLPGVLGNKESIKEESFENDLLEYPQYTKPKDWEGKSPPEVLFSGDHAKIKGWRLSQSEAITRRQRPDLWKKYLNKKNEKH

SEQ ID NO: 105984 - protein, 211 aa, Unknown
  Bacterial polypetide isolated from the Sargasso Sea
MNSYNVITLFPHLIEEWKNTGIINQALKNNLVAINSTNLRDFGIGTYKKVDDAPYGGGPGMVLMPEPLDKAITSSKADINIFLTPSGQQLNENLISELLEYKSINLVCGRYEGYDQRILEIHSDYEISIGQSVVSGGEIPALYLLEALIRKIPDVLGNPESLKSETFTDNKIDYPVYTRPEIFKNKKVPEVLLSGNHQKIDEWKKNNLKDI

SEQ ID NO: 105985 - protein, 243 aa, Unknown
  Bacterial polypetide isolated from the Sargasso Sea
MNINILTIFPDIFNVLNLGVVSKAIKQNLITINLSDIRKNAINKHNQVDSKPYGGGEGMVMMAEPLIKTIKNINTSKRGHIVYMSPQGTKLNQDKVISLSKLENITIICGRYEGIDQRVIDNYVDEEISIGDFVLSGGEYAAICLIDSISRHIPGTLGNKNSYLKDTFSNGLLKEDVYTKPEIYDSFKVPDILLSGNHEKIEAWKSDMSLIKTYSKRPDLLKNRKLTKKQKKLLEECSSKAIL

SEQ ID NO: 105986 - protein, 227 aa, Unknown
  Bacterial polypetide isolated from the Sargasso Sea
MLARIFTLYPEFFPGPLGKGLYGKALAANIWELETVNIRNYATDKHKTVDDTTYGGGSGMLIKPDVLANSLDKNLNSKERIIYLSPKGKLFNQKLAKELSKERSINLICGHFEGVDQRVIESRNIEEVSIGDFVLSGGESAAFVMLDSIIRLLPGVLGNETSAEEESFENGLLEYPQYTKPQIWEEKTVPDVLLSGDHAKIKDWRLSQSEAITRDRRPDLWQKYKKN

SEQ ID NO: 105987 - protein, 122 aa, Unknown
  Bacterial polypetide isolated from the Sargasso Sea
SLICGHFEGVDERILSTRNIEEISIGDYVLSGGESAAYVVIDSILRLLPGVLGNENSKLDETFENGLLEYPQYTKPQIWEEKPVPDVLLSGDHNKIKHWRLSQSEAITRVRRPDLWEKYKKN

SEQ ID NO: 105988 - protein, 286 aa, Unknown
  Bacterial polypetide isolated from the Sargasso Sea
MSGFNFDVITLFPKAFELINNLGVITRALDKNLIDVNLHDLREYGEGSYRQVDDKPYGGGAGMVLKPEPIYKAYESIRKLPKSKTLLMTPQGKVLKQKDLARWSTLDQIIIICGQYEGFDERIRCLADEEISIGDYVLSGGEIPAISIINGLTRLLPGTLGDPDSLVDESHNSSLLEYPQYTRPLTFKDMKVPDILVSGNHEEIKSWRKRKSFERTLERRSDLISNENYKKSPQSKRIIKENNQFMKFRIGNGYDIHRLVENRDLIIGGVKLHHPENLGLDGHSDA

SEQ ID NO: 105989 - protein, 212 aa, Unknown
  Bacterial polypetide isolated from the Sargasso Sea
MLSNFNVITLFPEIFQKWINVGVLSHGIEEKLFEFSSTNLRDYGIGSYKQVDDAPYGGGPGMVLMVEPLDNAIKESKKDINIFLTPSGQQLNEDLIQDLHGYESANIICGRYEGFDQRIIEMHSDYEIAIGQTVVSGGEVPAMFLIEALVRKIPGILGNSESLTNESFTNNKSDFPVYTRPEIYGNLNVPEVLLSGDHKRIEKWKKNNLKDI

SEQ ID NO: 105990 - protein, 248 aa, Unknown
  Bacterial polypetide isolated from the Sargasso Sea
MIYQIDVVTLFPDIISSALTHGVIGRAKGNGLIELRNWNPRNYAQDKHKTVDDRPYGGGPGMVLKHQPLSAAIKKAKEKQPKTKVILLSPQGTQLKQSSVAEFSKRKGMIIVCGRYEGVDERIIMSEIDEEWSIGDYVLSGGEFAALVLIDSVCRLLPGVLGDNNSANEDSFVDGLLDYPHYTRPDDINGLTVPEILQSGNHEEIRRWRLKQAIGKTWRIRPDLIESIELNEEQKLLLQEYIDEIKKN

SEQ ID NO: 105991 - protein, 241 aa, Unknown
  Bacterial polypetide isolated from the Sargasso Sea
MNFNLLTIFPEITKLLDFGVIGKAIEKDLISINGLNPRNFSKNINKNVDDAPYGGGEGMVMMAEPLALAIKSIKNKGKVLLMSPQGEHLSNAHIDNLLDEKSITIICGRYEGIDERFIENYVDQEFSIGDFVISGGEIPALALIDALSRKIPGVLGNQESFKNDSFENNLLKGPVYTRPQIFEEKDVPEILLSGNHEKINDWKILSSLQRTIERRPDLLDGVKLTKKQKKLLDNLLSKRIL

SEQ ID NO: 105992 - protein, 243 aa, Unknown
  Bacterial polypetide isolated from the Sargasso Sea
MNINVLTIFPEIFEILNSGVISKAMKKDILSIKALDIRKNTTNKHKNVDSKPYGGGEGMVIMAEPLIKTIESIDKRKLGPVIYMSPQGQLLTQKKVISLSKLKNMTVICGRYEGIDQRVIDNYVDEEVSIGDFILSGGEYAAICLIDAISRHLPGTLGNKDSYLKDTFSNGLLKEDVYAKPEIFNSYKVPEILLSGNHEKIKAWKSEISLLKTSKKRPDLLKKIKLTKKQKKLLEEWSSKAIL

SEQ ID NO: 105993 - protein, 228 aa, Unknown
  Bacterial polypetide isolated from the Sargasso Sea
MWQAQVFTLYPEVFPGPLSKGLYGKALSSDLWKLKVVNIRDSADDKHKTVDDTPYGGGSGMLLKADVLAKSLDENRNENERILYLSPKGKKFDQNLAKELADEKSLSIICGHFEGVDDRILSTRNIEEVSIGDYVLSGGESAAYVVIDSILRLLPGVLGNENSKLDETFENGLLEYPQYTKPQIWEEKAVPDVLLSGDHNKIKHWRLSQSEAITRDRRPDLWEKYKKN

SEQ ID NO: 105994 - protein, 243 aa, Unknown
  Bacterial polypetide isolated from the Sargasso Sea
MNINILTIFPEIFNVLESGVVSKPIKNKLLSIQALDIRKNSVNKHNHVDSKPYGGGEGMVMMAEPIVKTLKEIDKKKRGRVIFMSPQGKRLNQQKIISLSKLKNITLICGRYEGIDQRIIDKYVDEEISIGDFILSGGEYAAICLVDAISRYLPGTLGNKDSYLNDTFSNGLLKGDVFTKPEIFESMKVPDVLLSGNHKKIETWRSEISFVRTLMKRPDLLDGIKLTKKQKKLLEEWTSKAIL

SEQ ID NO: 105995 - protein, 229 aa, Unknown
  Bacterial polypetide isolated from the Sargasso Sea
MNIANNLKYNVKILSIFPEVFPGPLGVSLIGNALKKKIWNLDIINIRDFAKDKHKSVDDTPYGGGAGMIMKPDIIGLSIDSLKDNRSKRICLTPRGKLLNQDKVKELSTEDGLILLCGRYEGIDQRVIDFYDFEEVSIGNYVISGGESATFVLLESVLRLLPGVLGGNETLNEESFSDKDLLEYPQYTKPRDWNGICVPEVLTSGNHNEIKNWRDKQRIEITKSRKLDT

SEQ ID NO: 105996 - protein, 206 aa, Unknown
  Bacterial polypetide isolated from the Sargasso Sea
YGRAMVKKLWSLNVINIRDAATDKHKTVDDAPYGGGTGMLLKPDVLAKSIDQNINKGERIFYLSPKGKKFDQNLATELSKEKSFSLICGHFEGVDERVLTTRNIEEISIGDYVLSGGETAALVVLDSVLRLLPGVLGNEKSASEETFENGLLEYPQYTKPQIWEEKSVPDVLLSGDHAKIKDWRLSQSEAITRDRRPDLWQKYKKN

SEQ ID NO: 105997 - protein, 198 aa, Unknown
  Bacterial polypetide isolated from the Sargasso Sea
IWNLKVVNIRDAAEDKHKTVDDTPYGGGTGMLMKPDVLAKSLDQNKNEGEKILYLSPRGKKFDQNYAKELSKEKSISIICGHFEGVDERVLSTRNIEEVSIGDFILSGGESAAFVVIDSILRLLPGVLGNENSTINESFENGLLEYPQFTKPQIWEEKAVPEVLLSGDHSKIKHWRLSQSEAITRVRRPDLWEKYKKN

SEQ ID NO: 105998 - protein, 205 aa, Unknown
  Bacterial polypetide isolated from the Sargasso Sea
MNEKIWNLETVNIRNYSSDKHKTVDDTPYGGGNGMLIKADVLAKSLDENIKEKEKIIYLSPKGKLFNHKYAKELSSEKSLNLICGHFEGIDERIIESRNIEEISIGDFVLSGGEAAAFIILDAVLRFLPGVLGNENSTEEESFENGLLEYPQYTKPQIWEDKSVPDVLLSGDHAKIKDWRLTQSEAITRDRRPDLWQKYKGFKKN

SEQ ID NO: 105999 - protein, 155 aa, Unknown
  Bacterial polypetide isolated from the Sargasso Sea
SILSQKKAMELSTQKNITILCGRYEGIDERFISQYVDDEISIGDYILSGGEFAALTLIDTLARFIPGVIGNKKSVEQDTFSQGLLKGPVFTRPENFNSDEVPEVLLSGDHNRIREWRDNQSLIRTFKRRPDLLKDIKLTKKQKKLLEELSSKAIL

SEQ ID NO: 106000 - protein, 110 aa, Unknown
  Bacterial polypetide isolated from the Sargasso Sea
RIIQSRDIEEVSIGDFILSGGEVATFVILDAILRFLPGVLGNENSSEEESFENGLLEYPQYTKPQIWEDKGVPDVLLSGDHAKIKDWRLSQSEAITRDRRPDLWQKYKKN

SEQ ID NO: 106001 - protein, 246 aa, Unknown
  Bacterial polypetide isolated from the Sargasso Sea
MWLGVITLFPDMFRAVTDFGVTGRAVKNGLLELHTWNPRDFTHDRHSTVDDRPYGGGPGMLMMVQPLRDAIHAAKAAAGEEAKVIYLSPQGRKLDQQGVTELAESSRLILVCGRYEGIDERIIQTEVDEEWSVGDYVLSGGELPAMTLIDAVSRLVPGVLGKQASAEQDSFSDGLLDCPHYTRPESLDGLDVPAVLLSGNHEQIRLWRLQQSLGRTFLRRPELFENLALTDEQSTLLAQFVEAMDK

SEQ ID NO: 106002 - protein, 248 aa, Unknown
  Bacterial polypetide isolated from the Sargasso Sea
MWLGVITLFPDMFRAVTDFGVTGRAVKNGLLELHTWNPRDFTHDRHSTVDDRPYGGGPGMLMMVQPLRDAIHAAKAAAGEEAKVIYLSPQGRKLDQQGVTELAKSSRLILVCGRYEGIDERIIQTEVDEEWSVGDYVLSGGELPAMTLIDAVSRLVPGVLGKQASAEQDSFSDGLLDCPHYTRPESLDGLDVPAVLLSGNHEQIRLWRLQQSLGRTFLRRPELFENLALTDEQSTLLAQFVEAMDKHA

SEQ ID NO: 106003 - protein, 206 aa, Unknown
  Bacterial polypetide isolated from the Sargasso Sea
YGKALSNKLWNLNVVNIRDAATDKHKTVDDTPYGGGTGMLLKPDILAKSLDQRVKKDERIFYLSPKGKKFDQKFAKDLSKEKSISLICGHFEGVDERVLDTRNIEEISIGDYVLSGGETAALVVLDSILRLLPGVLGNEKSAIDETFENGLLEYPQYTKPQIWEEKSVPEVLLSGDHAKIKDWRLSQSEAITRDRRPDLWQKYKKN

SEQ ID NO: 106004 - protein, 228 aa, Unknown
  Bacterial polypetide isolated from the Sargasso Sea
MWQAQVFTLYPEVFPGPLSKGLYGKAMSKKLWDLKVVNIRDAAEDKHKTVDDTPYGGGSGMLLKADVLAKSLDQNRIEGEKILYLSPKGKKFDQSYAKKLATAKSLSLICGHFEGVDERVLSTRNIEEVSIGDYVLSGGETAAYVVIDSVLRLLPGVLGNDNSKIEETFENGLLEYPQYTKPQIWEEKSVPDVLLSGDHSKIKDWRLSQSEAITRDRRPDLWEKYKKN

SEQ ID NO: 106005 - protein, 237 aa, Unknown
  Bacterial polypetide isolated from the Sargasso Sea
MKQKIAIITPVPDMIESVIQNSMTRKAIEKGILDIHIVNPRDFTSDSYRQIDDTPYGGGPGMVMMAEPLFKAIDFVIEKFCGDDGMRVLYPSPQGIAWSQDSAEENKSVEKIVIICGHYKGVDQRVIDKYVTHEYSMGDFVLSCGEIPALMIIDSIVRLLPGVLNNINSSKTDTFSSELLDAPYYTQPREINGMQVPDVLLSGNHSKITDWKKEQQIEITKSRRPDIWKKYLNNKSE

SEQ ID NO: 106006 - protein, 243 aa, Unknown
  Bacterial polypetide isolated from the Sargasso Sea
MRINVITIFPEIFDILNVGVISKSLKNKIIKLDVRDLRKNATNKHNNIDSKPYGGGEGMVMMAEPIVKTLKQIKKKERGPVIFMSPQGEKLDQKKVKSFSKLKNITIICGRYEGIDQRVIDKYVDEEISIGDFILSGGEYAAVCLIDAITRHIPGTLGNKDSYLKDTFSNGLLKGDVYAKPESFESMKVPDVLLSGNHKEIDSWREHNSLLKTFIKRPDLLNDVKLTKKQKKLLEEWASKDIL

SEQ ID NO: 106007 - protein, 206 aa, Unknown
  Bacterial polypetide isolated from the Sargasso Sea
YSKSPSKRVDDKPFGGGSGMVMEAGPIIKAVEEAKKKSIDAHVIYLSPQGKLFNQEKAKELADKSNIILISGRYEGVDQRVVDHIVDEEISIGDYVLSGGEIASLILIDSISRQIEGVVGDFQSVEDDSLYDGLLKHPQYTRPEESEYGVVPKILLSGNHESIRSWKIKKSLENTMMKRPDLLEKANLDKEKKKVLGQIKKDEEKT

SEQ ID NO: 106008 - protein, 228 aa, Unknown
  Bacterial polypetide isolated from the Sargasso Sea
MLKTQVLTLYPEIFPGPLNKGLYGKAMAKKIWSLNIVNIRDAATDKHKTVDDTPYGGGSGMLLKPDILAKSIDKNIRKGERIFYLSPKGKKFDQRLAQDLSKEKSFSLICGHFEGVDERVLSTRNIEEISIGDYVLSGGETAALVVLDSVLRLLPEVLGNDKSSSEETFENGLLEYPQYTKPQIWEEKSVPDVLLSGDHSKIKDWRLSQSEAITRVRRPDLWQKYKKD

SEQ ID NO: 106009 - protein, 228 aa, Unknown
  Bacterial polypetide isolated from the Sargasso Sea
MFNAQIFTLYPDFFPGFLSKGLYGKAMSENKWKLKIVNIRDYASDKHKTVDDSPYGGGSGMLIRPDVISKAIDSNIKTDEKIIFLSPKGKLFNQEKAREFSKEKKINLLCGHFEGIDQRVIDNRNIEELSVGDYILSGGETAAMIVMDSIIRLLPGVLGNESSISEETFENGLLEYPQYTKPQIWENKEVPNILLSGDHAKIKDWRLSQSKVITRDRRPDLWQKYKKD

SEQ ID NO: 106010 - protein, 218 aa, Unknown
  Bacterial polypetide isolated from the Sargasso Sea
MNINVLTIFPEIFEILNSGVISKAMKKDILSIKAFDIRKNTTNKHKNVDSKPYGGGEGMVIMAEPLIKTIKSIHKRKLGPIIYMSPQGQLLTQKKVISLSKLKNMTVICGRYEGIDQRVIDNYVDEEVSIGDFILSGGEYAAICLIDAISRHLPGTLGNKDSYLKDTFSNGLLKEDVYAKPEIFDSNKVPEILLSGNHEKIKAWKSEISLLKTFKKRP

SEQ ID NO: 106011 - protein, 243 aa, Unknown
  Bacterial polypetide isolated from the Sargasso Sea
MNINIITLFPEIFDVFETGIISKAIKQKLLLLNIFDIRKNSINKHFHVDSKPYGGGEGMVMMAEPIVKTLLEIKNLKKNSVIYLSPQGKKIDQKKVVDLSKLKNITLICGRYEGIDQRVIDKYVDEELSIGDFVLSGGEYAALCLIDAISRHIPGTLGNKDSYMKDTFSNGLLKGSVYTKPEIFEEMSVPKVLLSGNHKEIEEWRANNSLKQTFLRRPDLLNNVKLTKKQKKLLEEWASKDIL

SEQ ID NO: 106012 - protein, 233 aa, Unknown
  Bacterial polypetide isolated from the Sargasso Sea
MTWKANILTLYPEIYPGYLSYSLLGKALEKKIWELNIYNLRDFGDGKHKTVDDKPFGGGAGMIIKPDILGNAIEETLIKNHARQSLVYLSPKGRPFKQIDAKNFSQSSGVSILCGHFEGIDQRVLDIYEIEEISMGDYILSGGEVASFTFLDSILRLLPGVLGNEASIEDESFSDDLLEYPQYTKPQEYKNIKVPDVLLSGNHEEIEKWRKEKSIEITKKNRPDMLKHEKSKK

SEQ ID NO: 106013 - protein, 231 aa, Unknown
  Bacterial polypetide isolated from the Sargasso Sea
MEVFIITPFPSTINVLIENNIANQGIKKNLLNVEVVNLRDFTNDNYKKIDDEPYGGGSGMVMMCQPLFSAIDYCIDKSQKKPKVIFPSPKGEVLSHKMSSDLSNENSLIFICGHYKGIDERVIDKYVDLEVSIGDFVISNGELSTMIIFDSIVRLLPGVLNDLNSAMTDSFVDDLLDAPYFTRPNEIDGLKVPEVLLSGDHKAIEKWRNDKKLEITKDRRPDLLKEEKNYE

SEQ ID NO: 106014 - protein, 231 aa, Unknown
  Bacterial polypetide isolated from the Sargasso Sea
MWKARVFTLYPEIYPGPLNKGLYGKALEKKVWNLEVVNIRDSAEDKHKTVDDKPFGGGSGMLLKPDVLGKSIDANVKKGEKIFYLTPKGINFNQKKAKEFSKEKVINLICGHFEGVDERILNTRNIEQLSIGDYILSGGESASFVVIDTVLRLLPAVLGNNNSKDDESFEHDLLEYPQYTKPQIWEKKSVPDVLLSGNHSKIKDWRLSQSKDITRRQRPDMWKKFLKKEKK

SEQ ID NO: 106015 - protein, 125 aa, Unknown
  Bacterial polypetide isolated from the Sargasso Sea
MQYFSIISLFPEFVETYKHMGVVGKAIGNHLIDIKALNPRDFAEKERRVDDAPYGGGPGMVMMIEPIVKSIRFAKKSVNGSCCVINLTPQGVPFGQCHVAELLSFEHLVFVSGRYEGIDERVQHY

SEQ ID NO: 106016 - protein, 174 aa, Unknown
  Bacterial polypetide isolated from the Sargasso Sea
YGGGSGMLLKPDVLAKSLDQNKIEGERILYLSPKGKKFDQNYAKRLAKEKSISLICGHFEGVDERVLSTRNIEEISIGDYVLSGGETAAYVVIDSVLRLLPGVLGNDNSRTEETFENGLLEYPQFTKPQIWEEKAVPDVLLSGDHSKIKDWRLSQSEAITRDRRPDLWEKYKKN

SEQ ID NO: 106017 - protein, 230 aa, Unknown
  Bacterial polypetide isolated from the Sargasso Sea
MGVTGRAVKNGLLELHTWNPRDFTHDRHSTVDDRPYGGGPGMLMMVQPLRDAIHAAKAAAGEEAKVIYLSPQGRKLDQQGVTELAESSRLILVCGRYEGIDERIIQTEVDEEWSVGDYVLSGGELPAMTLIDAVSRLVPGVLGKQASAEQDSFSDGLLDCPHYTRPESLDGLDVPAVLLSGNHEQIRLWRLQQSLGRTFLRRPELFENLALTDEQSTLLAQFVEAMDKNA

SEQ ID NO: 106018 - protein, 227 aa, Unknown
  Bacterial polypetide isolated from the Sargasso Sea
MEVYIITPFPDSIKTLIDNNIANQGLKKGHLSIEIVNLRDFTTDNYKKIDDEPYGGGSGMVMMCEPLFGAIEYCISKSEKKPKIIFPSPKGKVLNHSLSSNLSTESSLIFICGHYKGVDERVIEKYVDFEISIGDYIISNGELSTMIIFDSIVRLVPGVLNDINSALTDSFVDDLLDAPYFTRPSEIDGLKVPDVLLSGDHKAIEKWRNDKKLELTKDRRPDLLEKD

SEQ ID NO: 106019 - protein, 212 aa, Unknown
  Bacterial polypetide isolated from the Sargasso Sea
MLSKYNVITLFPNLFDEWIKTGIISNGLDKNILKFQTTNLRDFGIGNYKQTDDAPYGGGPGMVMMVEPLDNAILNNKADINVFLTPSGSKLDEKTIKDLLAYESINIICGRYEGFDQRIIDMHSDYEVSIGDAVVSGGEVPAMFLMEALMRRVPGVLGNSESLVNESFTDGTYDFPVYTRPETYKEMTVPEVLLSGNHKEIDNWKNNKLKDI

SEQ ID NO: 106020 - protein, 228 aa, Unknown
  Bacterial polypetide isolated from the Sargasso Sea
MLIARIFTLYPEFFPGPLGKGLYGKALAEKIWKLETVNIRDYTNDKHKTVDDTTYGGGSGMLIKPDVLANSLDKNLKSKEKIIYLSPKGKLFNQQLAKELSKEKTVNLICGHFEGIDQRVIEARNIEEVSIGDFVLSGGESAAFVMLDAIIRLLPGVLGNEKSVEEESFENGLLEYPQYTKPQIWEEKTVPDVLLSGDHAKIKDWRLSQSEAITRDRRPDLWQKYKKN

SEQ ID NO: 106021 - protein, 134 aa, Unknown
  Bacterial polypetide isolated from the Sargasso Sea
TIVCGRYEGIDKRIEETCIDEVISIGDYVLNGGELAALVLMEAIARQHKDFIGNKESLNDSFSDGLLEHPQYTRPEKTPHGNVPEILISGNHEKINRWKLKESLRITLKNRPDLIKSKDLSDLEIELLNEIKDE

SEQ ID NO: 106022 - protein, 243 aa, Unknown
  Bacterial polypetide isolated from the Sargasso Sea
MNINILTIFPEIFDALNFGVVSRSLDKDLLKVKTFDIRKNSINKHDQVDSKPYGGGEGMVMMAEPIISTLKEIDNKNTGKIIYLSPQGKRLNQEKVKSLSKLKNITLICGRYEGIDQRVIDQYVDEELSIGDFILSGGEYAAICIIDAISRHIPGTLGNKNSYLKDTFSNGLLKWDTYAKPEKLGSLKVPEVLLSGNHKEIIKWREENSLLKTFLKRPDLFEKIKLSKKQKKLLEELASKAIL

SEQ ID NO: 106023 - protein, 164 aa, Unknown
  Bacterial polypetide isolated from the Sargasso Sea
MYKVKIISIFPDSFPGILGQGVIGKAHSKKIWSLETIDPRKYTKDKHKKIDDTTAGGGPGMIFKPDIMGKAIDACYRNIKSKEKYPLIYLSPRGKPLTQKKVSKLSKMKGINLLCGRYEGIDQRLLDYYEIEELSIGDYILAGGELAAQVLVESIVRLLPGTLG

SEQ ID NO: 106024 - protein, 114 aa, Unknown
  Bacterial polypetide isolated from the Sargasso Sea
GVDERVLSTRNIEEISIGDYVLSGGETAALVVLDSILRLLPGVLGNDKSSADETFENGLLEYPQYTKPQIWEEKSVPDVLLSGDHNKIKDWRLSQSEAITRDRRPDLWQKYKKN

SEQ ID NO: 106025 - protein, 135 aa, Unknown
  Bacterial polypetide isolated from the Sargasso Sea
SLSKEKNVNFICGHFEGVDQRLLETRNIEEYSLGDFVLSGGEPASFVIIDALVRLLPGVLGNKDSVKEESFENHLLEYPQYTKPREWEGKSPPEVLFSGDHAKIKGWRLSQSEAITRRQRPDLWKKYLEKKNEKH

SEQ ID NO: 106026 - protein, 228 aa, Unknown
  Bacterial polypetide isolated from the Sargasso Sea
MWQAQVFTLYPEVFPGPLSKGLYGKALSNNLWKLKVVNIRDAADDKHKTVDDTPYGGGSGMLLKADVLAKSLDENKNESERILYLSPKGKKFDQNLAKELANEKSLSLICGHFEGVDERILSTRNIEEISIGDYVLSGGESAAYVVIDSILRLLPGVLGNENSKLDETFENGLLEYPQYTKPQIWEEKAVPDVLLSGDHNKIKHWRLSQSEAITRDRRPDLWEKYKKN

SEQ ID NO: 106027 - protein, 167 aa, Unknown
  Bacterial polypetide isolated from the Sargasso Sea
MWQAQVFTLYPEVFPGPLSKGMYGKAMSKDLWNLKVVNIRDAAEDKHKTVDDTPYGGGSGMLLKPDVLAKSLDQNKVEGERILYLSPKGKKFDQNYAKRLAKEKSISLICGHFEGVDERVLSTRNIEEISIGDYVLSGGETAAYVVIDSVLRLLPGVLGNDNSKIEE

SEQ ID NO: 106028 - protein, 186 aa, Unknown
  Bacterial polypetide isolated from the Sargasso Sea
MENNKIFKVSILTLFPEIFPGPLGVSLLGNALQNKLWELNLINIRDFAKDRHKSVDDTPYGGGAGMVMKPDVIEMALNSISDFPGQRVCLTPRGKRLSQQKVKKLSLEDGLVLLCGRYEGIDQRVIDYYNFDEISIGDYVVTGGESAAIVLLESVLRLLPNVLGGNETLKEESFSDTSLIEYPPIY

SEQ ID NO: 106029 - protein, 212 aa, Unknown
  Bacterial polypetide isolated from the Sargasso Sea
MLSNFNIITLFPEIFKNWLDIGILSSGFEKNLFELTTTNLRDFGIGNYKQVDDAPYGGGPGMVLMIEPMDNAISQSKKDVNIFLTPDGQELNEDLIEELHTYKSANIICGRYEGFDQRIIELHSDYEISIGKTVVSGGEVPAMFLMEALLRKLPGILGNSESLKYESFVNDKYDHPTYTRPEVYKGLKVPDVLLSGDHKKIDEWKKNNLKDI

SEQ ID NO: 106030 - protein, 243 aa, Unknown
  Bacterial polypetide isolated from the Sargasso Sea
MNINILTIFPEIFDIFNVGLISKSIKKKIIKINTFDIRENSVNKHNHVDSKPYGGGEGMVMMAEPLVKTLSSIKKRQLGKVIYLSPQGKQLDQKRVKSLATRKNITLICGRYEGIDQRVIEKYVDEEISIGDFVLSGGEYAAICLIDAISRHIPGVLGNKDSYLKDTFSDGLLKGNVYTKPEIFEDMQVPEVLLSGNHKEIQKWKLENSLLQTFLKRPDLLAKKKLSKKHKKLLEELASKAIL

SEQ ID NO: 106031 - protein, 228 aa, Unknown
  Bacterial polypetide isolated from the Sargasso Sea
MLQAQVFTLYPDIFPGPLGKGLYGKAMSKKLWSLNVINIRDSAKDKHKTVDDTPYGGGTGMLLKPDVLANSIDQNINKGDRILYLSPKGKVFNQKLAQDLSLEKSFSLICGHFEGVDERVLSTRNIEEISVGDYVLSGGETAALVVLDSVLRLLPGVLGNDKSASEETFENGLLEYPQYTKPQIWEEKSVPEVLLSGDHAKIKDWRLSQSEAITRDRRPDLWQKYKKN

SEQ ID NO: 106032 - protein, 247 aa, Unknown
  Bacterial polypetide isolated from the Sargasso Sea
MNINVISVFPEIIEASMHGLTGKAFKDKKAKLELFDLKKFSKTEYGSVDDSPYGGGEGMVISAEPLVDCIKEINTPGHVIYLTPQGKSFNQKKSLELSKYKDITFVCGRYEGIDQRFINKYVNEELSIGDYVLSGGEIAACVVIDSILRNVEGVIGNKESVSRDSFSDGKLKGHVYTRPKEFEGDHVPEILLSGDHKKIEEWKLANSLWVTKQKRPDLFKQIQLSEKEMILLRQYEDQINEKTNTNG

SEQ ID NO: 106033 - protein, 243 aa, Unknown
  Bacterial polypetide isolated from the Sargasso Sea
MNINVISVFPEIIEASMHGLTGKAFKEKKASLELFDLKKFSKTEYGSVDDSPYGGGEGMVISAEPLADCFKKIDTPGHVIYLTPQGKNFNQKKSLELSKHENLTFVCGRYEGIDQRFINNFVNEELSIGDYVLSGGEIAACVVIDTILRNIEGVIGNKESVSRDSFSDGKLKGHVYTRPKEFKGEHVPELLLSGNHKKIEEWKLANSLWVTKQKRPDLFKQIQLSEEEMILLRQYEDQVNKKT

SEQ ID NO: 106034 - protein, 150 aa, Unknown
  Bacterial polypetide isolated from the Sargasso Sea
DVLNNKKYCFIGIEPYKKGFARAVEFYEKEKPENLFLYNGDAREFLEIIDYEVSFVRIHFPDPWPKKKHIKRRLISQNFLHLLDQKISKKGKIEIITDSKIYQDHIEEILGEQKIFKQTDSFEISYEVSTFHRKGLKKGHEVKRYVLTKI

SEQ ID NO: 106035 - protein, 137 aa, Unknown
  Bacterial polypetide isolated from the Sargasso Sea
MSGIGTLVSSIKENKINNIKIFSDDIRILLDQSPKIVFDSVIIICPDPWPKEKHHKRRLINKSFLEMVHDFMKDDSNIYISTDWENYAESISELFVKNKLFKPSSNKSFQKDSLSKFERRGKDEGRELFEFNYKKVS

SEQ ID NO: 106036 - protein, 141 aa, Unknown
  Bacterial polypetide isolated from the Sargasso Sea
KPGIGKVLKGIEKQGIKNLKLICHDATEVFNHAFEDETLDRVLVFFPDPWPKKKHAKRRIIQPEFVSKVSEKLKNNGCLHLATDWSPYAEHMIEVIDKIPSLSNAIAPKVFWENPERPETKFEKRGKKLGNRIWDLLYQKA

SEQ ID NO: 106037 - protein, 233 aa, Unknown
  Bacterial polypetide isolated from the Sargasso Sea
MLDLKSKYPDFYRFYGRRVAKKLSDKSIESINCYFKNSSFDEEVINSFNERKSLKIDKKFQKISLEVGFGNGEFLIKQSNLNKDSLFIGCEVYLNGFSKVLNKINDRKINNIKICSINFIYLVQVLKNETIDQIYFINPDPWPKARHNKRRVINIENLNLMASKLKKNCSIVVTTDSLDYYEYIVSIFKNKDLFFHKMDHEELKTTDQLYGISSYQRKAINRNAKIYKVEIFK

SEQ ID NO: 106038 - protein, 152 aa, Unknown
  Bacterial polypetide isolated from the Sargasso Sea
MRQHVNPLSSNFNQIERIPSLSDMFGNSKLNLHLDIGCAAGEFLFDLALVNTSWNYLGIEIREKLVKNAKLKVIEKEIKNLYFLFGNANNILSDVQSKFIIKNLKSISFNFPDPWFKKRHFKRRVIQPELINILSKSLQTGTLIYKNRCKGS

SEQ ID NO: 106039 - protein, 122 aa, Unknown
  Bacterial polypetide isolated from the Sargasso Sea
MRQHVNPLSSNFNQIERIPSLSEMFDDSKSNLHLDIGCAAGEFLFDLALVNNSWNYLGIEIREKLVKNAKLKVIEREIKNLYFIFGNANNILNDVQNKFIIKNLKSISFNFPDPWLKRDIIK

SEQ ID NO: 106040 - protein, 130 aa, Unknown
  Bacterial polypetide isolated from the Sargasso Sea
MRYNFLPSFARRKGRITKLQEKNLSFLANYSLDDPNTLNNDPSFDKIALEIGFGNGEDFFSFAKEKNNTLFLASEVYKSGIGNLIGKIREYSLENIYIHEGDIRDLIFEEKGFKFDEVYIICPDPWPKDR

SEQ ID NO: 106041 - protein, 156 aa, Unknown
  Bacterial polypetide isolated from the Sargasso Sea
MKLFGRKKGRKLSLRKQSLLNILLPNISLENESIFQKISNSNSQKFLEIGFGHGENLIRLSKERPEWTFLGVEPFTNGVATLLERIDNEKISNIYVLIGDGRHFLTKLSKDAISEACILFPDPWQKSRHVSRRIIQQEFLNDMSKILKKNSTLHLS

SEQ ID NO: 106042 - protein, 206 aa, Unknown
  Bacterial polypetide isolated from the Sargasso Sea
MRQHVNPLSSFFQLPLELPGPEQLFQRPEQPIHLDIGCARGRCILALAELNPDWNHLGVEIRRSLVASADRVAQASEHGNVRVLFCNANISLAQWLQALPPGRLQRVSIQFPDPWFKRRHRKRRVVQPELILAIAAALPTDGDLFLQSDVLNVIEPMVALTELCGGFSRPEADARPWRDANPLAVPTERERYVTEQGLPIYRVLFK

SEQ ID NO: 106043 - protein, 121 aa, Unknown
  Bacterial polypetide isolated from the Sargasso Sea
MRQHVNPLSSNFNQIERIPSLSEMFGDSKLNLHLDIGCAAGEFLFDLALVNTSWNYLGIEIREKLVKNAKLKVIEREIKNLNFIFGNANNILNDVQNKFIIKNLKSISFNFPDPWFKKRHY

SEQ ID NO: 106044 - protein, 222 aa, Unknown
  Bacterial polypetide isolated from the Sargasso Sea
MTTQESHIKSFVKRSGRLTQSQKTFLNNKDNNVNFFSPKEMINFEELFENNKNCILDIGFGDGKLLIHLARKFPELNFIGLEVYESGIGSILKQISSDNLINIKISCMDAINFLKNHTKNDSFYGITLFFPDPWPKKKHYKRRIINKTFLDLISKKISKNGFIKVVTDWSNYSDYIVEVFNENNQFERTSDIYIFKNRCLTKFEKKGIAVGHKISEFTYKLK

SEQ ID NO: 106045 - protein, 207 aa, Unknown
  Bacterial polypetide isolated from the Sargasso Sea
MRIFGRKKGRKLSYTKQKLVEGFLPNISLDNDENLSHILSLKKKLFLEFGFGHGENVIKLSENRPNWVFIAIEPFLNGVASLLEKIKIKNISNIYIYHGDGRLFLKELPRNSISESCILFPDPWPKFKHKSRRIIQREFLNKLSEVMFPNSFVYVASDDYIAQTWMLKIFLYNENFEWIVKDINQIYAKPDFFEDSKYFKKSLKEGR

SEQ ID NO: 106046 - protein, 111 aa, Unknown
  Bacterial polypetide isolated from the Sargasso Sea
STGEYFDLIWIFFPDPWPKKKHFKRRLITSIFFKKLYQFIKKNGELCIVTDSTSYSRFILKNIHNSKNQYLWINQNEFYLDLKDYYDLETKFYKKAIISGRKPSLFILKKI

SEQ ID NO: 106047 - protein, 189 aa, Unknown
  Bacterial polypetide isolated from the Sargasso Sea
MPQAHKVTFSKKPKSFVTRRGRITSNQRNALDSLWNQYIVSEVSDIKEFISGKYTLLDIGFGAGETLISLAESRKDFRVLGAEVYLSGIGSVLSKADNLKLNNIRIVNEDAKDLLQQKIPDHSIDVVLMFYPDPWPKRKHHKRRLIKKEFIKLLNSKLKTGGIFYFKTDWKDYFNEVSCLFKEDSDGKN

SEQ ID NO: 106048 - protein, 204 aa, Unknown
  Bacterial polypetide isolated from the Sargasso Sea
RGRSKKKIDLKKYYQTVEKYKFKNCDEKVNYILDIGTGYGETSIFLANQFLDKVIISCEKYIDGNIILLKNIEKNEIKNILLHNGNVYDVLECTHRECFDLVWIFFPDPWPKNRHAKRRLVTSDFLVKLHKNMKENSEIYIATDSVIYVRFILNSIYKCKDYFLWVNQSKINLGVKDYFDIETKYYKKAIKSQIKPSLFILRKL

SEQ ID NO: 106049 - protein, 169 aa, Unknown
  Bacterial polypetide isolated from the Sargasso Sea
GFGMGDFLFEKALANPNVGFVGCEVFENGVASLLAKIIKFKISNIRIHFGNCLDLIHNFNCLTLNKIYILFPDPWPKNKHKKRRFFNENNSTYLCSLLKKNGTIFIATDIEDYANQILGIMQSKDDFNYIDSNFVQTEKKIKKNLDTKYQQKALKFGRKINYLNFKKND

SEQ ID NO: 106050 - protein, 143 aa, Unknown
  Bacterial polypetide isolated from the Sargasso Sea
MHLIHDEDANTDGLSAKSLFTSFRGRITSAQKSAIERYGRQYFITDLAKHVDLASAASRQKLKIEIGFGMGVELARWAIESPDALMLGIELYRPGIGSLFSKLVNEGIDNVRVIEAPAQIAIGELSNNSVDEIRILFPDPWPK

SEQ ID NO: 106051 - protein, 161 aa, Unknown
  Bacterial polypetide isolated from the Sargasso Sea
MFESKNKYFGRKKGKSFVRLEHLQNRLKLPTKKIFENILAPRVLEIGIGDGEKISEDAKNQDHINFIGCDIFADGVLRAIRNSLDHNLNNLLVFHLNIQDILPFIPDNYLQGIRVYFPDPWPKTKHKKRRTFNDELVEILTKKLTKNGFIHFATDNSDYFL

SEQ ID NO: 106052 - protein, 157 aa, Unknown
  Bacterial polypetide isolated from the Sargasso Sea
MRSIRSFAKARSRLSANHKKILNQENDFLFSANTKSAFEETLRSTNNKILEIGFGEGDSLFEMAINNPELNFFGIEVYETGVARTCSKIEDSGIKNLKIYLGDVVDLMLDKDIETTFDLLLFLFPDPWHKRKHNKRRLLGSDNLNKFRSYLSKEGFI

SEQ ID NO: 106053 - protein, 219 aa, Unknown
  Bacterial polypetide isolated from the Sargasso Sea
MHKQSTQYRLYGRTRGRSNKNINIDKYLNLLKKYKINKLNKNNRYILDIGSGYGETTIYLASKYNNSKIISCEKFIDGNINLIKKIQDHKLKNIYIYDGNANKILDEIEKKEYFEIISIFFPDPWPKKKHFKRRLIKEIFFKKIYQYLKYKGKIYIATDSESYIKDILKSIYETRYLFKWENQGTIYKSIKDYLNIETKFYRKAIISGKKPSLFILEKI

SEQ ID NO: 106054 - protein, 114 aa, Unknown
  Bacterial polypetide isolated from the Sargasso Sea
YGDGVEIIENVFPDKSLDEVLIFFPDPWPKSKHNKRRIINEYTISLIFNKLKKGGLFHFTTDHINYAYDVKSMLQHFFNKSIIFNSNRNNRPITNYEKRALKRKNFIFDINLIK

SEQ ID NO: 106055 - protein, 179 aa, Unknown
  Bacterial polypetide isolated from the Sargasso Sea
MEELFVTPQPAELEIGCGDGGFLLEHAQRHPERNFLGVERLLGRVRKLSKNGQRVDLTNLRLLRIEARYVLDYLLPERAFSAAHIYFPDPWPKDKHARHRLIQPDFLPRIRRVLAPGGVLYLRTDDLPYFEQMQETFRGADGFTEEPTPAALSEISTEFERQWLAEGKRTHYAAYRLNG

SEQ ID NO: 106056 - protein, 132 aa, Unknown
  Bacterial polypetide isolated from the Sargasso Sea
ILKYNIKNIVIWPDDVRKILMFFPNNSISEIKILFPDPWPKKKHKKRRLIQEEFIKILYQIIKHQGTITIATDHDLLKKWVLDKFQNYTEFEWLAESSNDWRLRPKDCFQTKYELKSINKQRKPSWFIFKKK

SEQ ID NO: 106057 - protein, 209 aa, Unknown
  Bacterial polypetide isolated from the Sargasso Sea
MRQHVNPLSKNFNEMERIPSLIEMFGDPKLNLHLDIGCAAGEFLFDLALVNTSWNYLGIEIREKLVKTAKLKVREREIKNLYFVFGNANNIFNDVQSKFFIENVKSISFNFPDPWFKKRHYKRRVIQKEFINTLSNSLQKGSLIFIKTDVKDLFDYMDCTISGNSNFKKMDKKDFNYSESFNPNKFKTNREKYVIINQLDIFDRIYIKI

SEQ ID NO: 106058 - protein, 209 aa, Unknown
  Bacterial polypetide isolated from the Sargasso Sea
MRQHVNPLSSNFNQMERIPSLSEMFDDSKLNLHLDIGCASGDYLFDLALVNKNWNYLGIEIREKLVENAKLKLLEREVKNLYFVFGNANNILIDVQSKFIIKNLKSISFNFPDPWFKKRHYKRRVIQPEFINILSNLLQKGTLIFIKTDVEDLFDYMDWTISSNFHFKTIDKKDFNFSESFNPNRVKTNRERYVIVNQLDIFERIYIKI

SEQ ID NO: 106059 - protein, 126 aa, Unknown
  Bacterial polypetide isolated from the Sargasso Sea
FRENDVENMILFNGDVRELLEKVKFCFDFIRIHFPDPWPKKKHIKRRLIAKEFLIYLSNKLSGNGLIQIITDSQKYQDHIEEEIKLQNKLSLSKRLFPITYNQSSFYKKALIKKNKIKEFILQKSS

SEQ ID NO: 106060 - protein, 213 aa, Unknown
  Bacterial polypetide isolated from the Sargasso Sea
MINNSHYRLYGRTKGRKNNKNNISFLRIKLINIDHNKYNILDIGSGFGESTIKIAKKDKKKIVICCEKYIDGLNNLFKEVQKEQLDNVYIYQGNVYQMLDEYCSKNSLSEVWILFPDPWPKKKHFKRRLIDKYFFHKIKTYLKYGSTINIASDSQSYISQILRTIYEVKADFLWVNQSKSEWEYDSGILPETKYYKKALKNGLKPFYVKLEKL

SEQ ID NO: 106061 - protein, 187 aa, Unknown
  Bacterial polypetide isolated from the Sargasso Sea
MRQHVNPLSSNFNQIERIPSLNEMFDDSKSNLHLDIGCAAGEFLFDLALVNNSWNYLGIEIREKLVKNAKLKVIEREIKNLHFIFGNANNILNDVQNKFIIKNIKSISFNFPDPWFKKRHYKRRVIQPGFINMLSNSLQKGTLIFIKTDVKDLFDYMDCTISSNFHFKTINKKDFNCSESFNPIKVK

SEQ ID NO: 106062 - protein, 220 aa, Unknown
  Bacterial polypetide isolated from the Sargasso Sea
MRIFGRKKGRRLSYTKQKLVEDFLPNISLDDDKKLRHLLSLKKHLLLEFGFGHGENIVKLSLNRPDWVFIAIDPFLNGVASLLEKIKTKSISNIYIYHGDGRLFLKGMPKNSVSETCILFPDPWPKFKHESRRIIQREFLNKLSEVMASNSFVYTSSDNHIAQTWMLKTFLYNKNFEWIVKDINQIYTKPEFFEDTKYFKKSLKEGRQVSWFKFKNIKEH

SEQ ID NO: 106063 - protein, 142 aa, Unknown
  Bacterial polypetide isolated from the Sargasso Sea
MIKTFSSRAGRLSPKNKKFLSTESECLLNAGEKPITQNPIALDIGFGDAQSFSEDVTANETVTFIGIEPYKKGFARAVEFFEETKPTNLYLYNGDAREFIELMDFPVNFIRIHFPDPWPKKKHTKRRLISKQFLKTLSRILA

SEQ ID NO: 106064 - protein, 209 aa, Unknown
  Bacterial polypetide isolated from the Sargasso Sea
MRQHVNPLSSNFNQIERIPSLREMFGDSKSNLHLDIGCAAGEFLFDLALVNTSWNYLGIEIREKLVKNAKLKVIEREIKNLYFIFGNANNILNDVQNKFIIKNLKSISFYFPDPWFKKRHYKRRVIQPGFINMLSNSLQKGTLIFIKTDVKDLFNYMDFTLSSNFHFKTIEKKDFNYSESFNPIKFQTDRERYVIVNQLEIYEKIYIKV

SEQ ID NO: 106065 - protein, 155 aa, Unknown
  Bacterial polypetide isolated from the Sargasso Sea
MRIFGRKKGRRLSYTKQKLVEDFLPNISLDNDEKLRQVLSLKKQLFLEFGFGHGENIIKLSVNRPDWVFIAIDPFLNGVASLLEKIKTKNISNIYIHHGDGRLFLKELPQNSISETCILFPDPWPKLKHESRRIIQREFLNKLSEVMSSNLCIHF

SEQ ID NO: 106066 - protein, 94 aa, Unknown
  Bacterial polypetide isolated from the Sargasso Sea
MKYNVVDIGPGYGESTIEIAKTNNSKIVIACEKYIDGINNLIKEIDRNSLKNVYIFDGNANQFLDEYCTTQSISELWILFPDPWPKKKHFKRRL

SEQ ID NO: 106067 - protein, 207 aa, Unknown
  Bacterial polypetide isolated from the Sargasso Sea
KKPRRPLSKKQKSILNCSLKKFLLNKNHLDKKKKFLEIGFGYGENLINLSKKNKEKLIIGCEIYEPGITNLVENIERINLKNIKIYPKNIFSLFNILKKNSIEKIFILYPDPWPKKKHFKRRLISKNLLKKLNKVLKLNGEIFISTDSEDYLYKILFEFFLNKNFFWINNKVTNCYKRPNEIVETKYEKKANLKKNKKFYLKFKKIC

SEQ ID NO: 106068 - protein, 134 aa, Unknown
  Bacterial polypetide isolated from the Sargasso Sea
KLSKLDLTNVRIYPGDVRDLFDVLPDASIDNVFLLYPDPWPKKRHHRRRFVTSEYLIELQRVMKTGASLRLATDISDYVRQALQEVLKHRFSWTASEPQDWRECWSDWIPTRYEKKALQEGRKPYYLTFEKRES

SEQ ID NO: 106069 - protein, 186 aa, Unknown
  Bacterial polypetide isolated from the Sargasso Sea
EVSDIKEFISGKYTLLDIGFGAGETLISLAESRKDFRVLGAEVYLSGIGSVLSKAYNLKLKNIRIVNEDAEDLLQQKIPDHSIDVVLMFYPDPWPKRKHHKRRLIKKEFIKLLNSKLKTGGIFYFKTDWKDYFNQVSCLFKEDSDWKELSLQELGEHLINMPSTSFEKKAIKAKRLLNTKIVKKVN

SEQ ID NO: 106070 - protein, 92 aa, Unknown
  Bacterial polypetide isolated from the Sargasso Sea
KRHHKRRLINQTFFKFIHGFLKKSGYLMIATDSESYLQSILTSISEVQKKFLWENHRFELWDYKNLNLPLTKFYKKSLKSNRNSMFLKLKRI

SEQ ID NO: 106071 - protein, 149 aa, Unknown
  Bacterial polypetide isolated from the Sargasso Sea
FQEKHLIATEVYLSGIGSLIGLINKYKISNISIFDEDVRLLMDQMPKKFLDSVNILFPDPWQKAKHHKRRLIGEDFLYQLHPLLKPNAKIFVRTDWEDYAEQISELAEVVGSHFRLERTQNIEFEFETRFHQRAIKEGREISSFLFTKL

SEQ ID NO: 106072 - protein, 183 aa, Unknown
  Bacterial polypetide isolated from the Sargasso Sea
MQENKLPLQDRLKSFVLRRGRLTSNQSRALSEHWDKYILDNEEKLSNIWNQDPSILDIGFGSGETTAYLAKTNPEMLILGAEVYLSGIGSLLSKANEESLNNVKILNSDIVPFLEDKVSDNCFDLILMFYPDPWPKRKHHKRRLLQKDFIDLVNKKLKQNGIFYFKTDWVHYFDEQRSWLIMI

SEQ ID NO: 106073 - protein, 179 aa, Unknown
  Bacterial polypetide isolated from the Sargasso Sea
DKKINYILDIGTGYGETSIFLANQFLDKVIISCEKYIDGNLILLKNIEKNEINNILLHNGNVYDVLECAHRECFDLVWIFFPDPWPKNRHAKRRLITSDFLIKLHKTLKEDSEIHIATDSTIYVRFILNSIYSCRDYFVWMNQSEMNLHIKDYFDIETKYYKKAINSQRKPSLFILRKL

SEQ ID NO: 106074 - protein, 188 aa, Unknown
  Bacterial polypetide isolated from the Sargasso Sea
RRLSPDELFTTEAPLEVDLGCGDGTFALAMARQFPERNFLAVERLLGRVRKVCRRASEADLENLRVLRLEARYTVEWLLPHASVSRLHLLFPDPWPKARHHRRRLVQQDFLKALGKILVPGGEFLFKTDHEEYFEWAREELELFGSFEPLPWDERCEDLSFYPETDFEAQWRAEGRAVHQLRMRNPAT

SEQ ID NO: 106075 - protein, 104 aa, Unknown
  Bacterial polypetide isolated from the Sargasso Sea
MYLILMFYPDPWPKRKHHKRRLLQKDFIDLINKKLKLNGTFYFKTDWIHYFDETKKLLINNPNWRVLQKENLEEYLVNLPRTSFENKALQAKRKLNELILQKTC

SEQ ID NO: 106076 - protein, 229 aa, Unknown
  Bacterial polypetide isolated from the Sargasso Sea
MELNHQPLPYFKHDNPYHDKLKSFENFVLRDEEGENYKGQWNQNAFKRKAPLILEIGSGYGHFMRDYCSKNPSVNFIGMDYKFKRSFNLAKKLSALQKENFFYLRANAARVDCLFDESEIDKVLYFFPDPWPKNKHKKKRLFQEEFLKKIHKVLKPNGKFFIKTDHSEYAEWMKSILLESNLFKIEMMSFDVRTDFPDHFLSSFKTKFERIFLQKGLPIKGFELTCLKD

SEQ ID NO: 106077 - protein, 188 aa, Unknown
  Bacterial polypetide isolated from the Sargasso Sea
MRQHVNPLSSNFNQIERIPSLSEMFDDSKSNLHLDIGCAAGEFLFDLALLNTSWNYLGIEIREKLVKNAKLKVIEREIKNLYFIFGNANNILNDVQNKFIIKNLKSISFNFPDPWFKKRHYKRRVIQPGFINMLSDSLQKGTLIFIKTDVKDLFDYMDWTISSNFHFKTIDKKDFNCSESFNPIKVKN

SEQ ID NO: 106078 - protein, 133 aa, Unknown
  Bacterial polypetide isolated from the Sargasso Sea
MSVLSTKECPRFYGRRIGRKLSTSGILALKAGSKYILQYDKFSEDFLNFNKKIVLEIGFGDGRNLINSAKQNPGILYLGADPFLNTTVKCIKQILENNINNIKIWPDDIRKILDLFPSKSISEVKLLFPDPWA

SEQ ID NO: 106079 - protein, 127 aa, Unknown
  Bacterial polypetide isolated from the Sargasso Sea
KNIRLHNENVYDVLDSTHRKCFSLVWIFFPDPWPKNRHAKRRLITSDFLIKLHNILKDNSEIHIVTDSTIYVRFILNSIYNCKDYFIWLNQSKMNLLIKDYYNIETKYYKKAINSQRKPSLFILRKL

SEQ ID NO: 106080 - protein, 162 aa, Unknown
  Bacterial polypetide isolated from the Sargasso Sea
MGENLLNLADKNKEKIFIGIDPFQNGLANIAKEVFKKKIKNIYIFPYVLEKFFDKYNKIEFNEIYVLFPDPWPKKKHKKRRLVNENLLTNILSKLRKKGKFFFRTDNLEYYNNVIKIIRKIIREEKKYILKKHISKNLVQTKYHKKAHKFLNEIKSLELTKK

SEQ ID NO: 106081 - protein, 230 aa, Unknown
  Bacterial polypetide isolated from the Sargasso Sea
MQHKKRFYGRRLIRSLRQKEKILMETFLPEIELVPSPDGTFLDLSAHFGESKKEFWLEVGFGKGEHLLWQAQNNKEIGLIGAEPFQNGVASILSKIKEKNISNIRIFPDVVSQILHSLPSQSINRIFVLFPDPWPKSRHQKRRLINIETLDLFARIMIDSAELRLATDDSEYASWMLRLGLSHASFEWTARRPDDWRIRPDDWPVTRYEEKNRSGGLGPVYLRFVRLPRN

SEQ ID NO: 106082 - protein, 221 aa, Unknown
  Bacterial polypetide isolated from the Sargasso Sea
MLIQDRLKSFVLRKGRITSNQKRAINELWGKFVIDGSRDLESSWAEKPSALDIGFGAGETTIHLAKRKPEMSVLGAEVYLSGIGSLLSKADEESLNNISILNEDVVPFLKERVPDDCFNLILMFYPDPWPKRKHHKRRLLQKDFIDLLNKKLKVGSVFYFKSDWEHYFQEVSKLLFNNNDWRVIERRELENYLVDLPQTSFERKALASGRKLNELILEKII

SEQ ID NO: 106083 - protein, 1974 aa, Unknown
  Bacterial polypetide isolated from the Sargasso Sea
MANSFRRAGKLSSSNLIRIRGARQHNLKNLDLDLRTGEMTVVTGPSGSGKSSLVFDTLYAEGQRRYVETFSAYARQFLDRMDRPQVERVDGVPPAIAIDQTNPVRSSRSTVGTMTELNDHLKLLYARAAELFDRKTARQVRHDTPETIYAELVERTRADDPRVVVTFPVELPEAVSDEEIAQWLSASGYTRVQAQREVASATGPRKVLDVVADRFRVQGADKVRVVEAIEASLKRGGGRVNVYVLPADAENAVAEPLVWRFSTGLHDPDSDLRYAEPQAALFSFNSAYGACETCRGFGRVIGVDLGLVIPDARKTLRGGAIKPMQTPAWKECQDDLMRYAAKAGIPRDTPWSELSDAQRDWVVNGSPDWNGKWQSQWYGVKRFFGYLESKAYKMHIRVLLSKYRSYTPCDVCGGARLKTESLQWRLGSKENADAVLAPAGRFMPRGVDWSRAQLEALPGLTVHDLMLLPIERIRRFFDDITLPSALLDDALKLLLAEVRTRLKYLCDVGLGYLTLDRQSRTLSGGEVQRINLTTALGTSLTKTLFVLDEPSIGLHPRDLTRIVEAMQRLRDAGNTLVVVEHDPSVMLAADRLIDMGPGPGERGGTIVYDGTPGDIRSAHTLTGEYLGGRKHVAHASNWARRVVDANTPRIVLEGATEHNLRDVTVEIPLQRLVCVTGVSGSGKSTLLQDVLYPAMARHHGKATESPGAYRGLTGADQVGDVVFVDQSPIGKTTRSNPASYVGAFDEIRKLFAKAPLALQRGYGAGTFSFNSGDGRCPTCGGSGFEHIEMQFLSDVYLRCPDCDGSRYRAEILEVRIERDGRALSIADVLDLTVSEAAAFFATDAEVLRVLQPIVDVGLEYVKLGQPVPTLSGGEAQRLKLAGFLAESAAAVNGRRVVTEEARIARAKLFMFDEPTTGLHFDDIAKLMQAFGKLLAAGHSLIVIEHNLDVIRAADWLIDLGPEGGDGGGLVLCAGTPDDVKACAESHTGVALLQYDRAMDAELALADEGKPLQAVLNAARERRAIEGEDVVRIVNAREHNLKALDVDIPHGKFNVITGVSGSGKSTLAFDILFHEGQRRYLESLNAYARSIVQPAGRPEVDAVYGIPPTVAIEQRLSRGGRKSTVATTSEVWHFLRLLYVKLGLQHCIHDGTPVTSQSVESIAAQLLRDHRGEHVGLLAPLVVNRKGVYTDLAKWAKARGSTHLRVDGEFVQVDPWPKLDRFREHTIELPVADIVVSPDNEAELRRVLDETLELGKGVMHLLAPLDGLHDAMQNDHSTARVGTVKVLSVKRACPVCGTSYPELDPRMFSYNSKHGWCTTCVGTGVTLTREQRAAYDDTVLAGDDRGREQTLPSDEQEPEGVGNEPCPDCNGTRLNPSARAVTFDAHPIVEVAQWTVSDTRRWIDGLELTGRDAQIARDIVSEIGSRLAFLEEVGLGYLSLDRAAPSLSGGEAQRIRLAAQLGSNLQGVCYVLDEPTIGLHPRDNQILLDALRKLGDKGNTLVVVEHDEDTIRRADHIIDVGPGAGKRGGTLVAQGAVADLAAQSDSVTGRLLAQPMTHPLQPRRSVSPPGKKGGAAVPEAWLTVHGARLHNLRDVTVGIPLARLVAVTGVSGSGKSTLARDVLMTNLLDAVGRSVLSSPATRRARKAAQQDAPATNRRSSVLARSAPRPSLNVTHAWQGCESLSGWEQIDRVLEVDQTPIGKTPRSCPATYIGVWDTIRKLFADTLEARARGYTASRFSFNTGDGRCPACEGQGVRTIGMSFLPDVKVPCDVCHGQRFNPETLAVTWRGRNIGDVLTMEIDEAVEFFAPISNIAHPLQLMKDVGLGYLTLGQPSPTLSGGEAQRIKLVTELTKVRDDITRRGQKAPHTLYVLDEPTVGLHMADVAKLIRVLHRLVDAGHSVVVIEHDLDVIAEADWIIDLGPEGGVGGGTIVAAAPPEALVQVSASHTGQALKPVLARTGSDEGEAEREGEARVG

SEQ ID NO: 106084 - protein, 209 aa, Unknown
  Bacterial polypetide isolated from the Sargasso Sea
MRQHVNPLSRNFNQIESIPSLAEMFSDSKLNLHLDIGCASGDFLFDLALVNTSWNYLGIEIRERLVKTAKSKVREREINNLYFVFGNAINILNDVQSKFIIKNLKSISFNFPDPWFKKRHYKRRVVQPEFINKLSNSLPKGSLIFIKTDVKDLFDYMDCAISSNFNFQEIDKKDFNVSKSFNPNNLKTNREKYVIVNQLDIFERIYRKT

SEQ ID NO: 106085 - protein, 222 aa, Unknown
  Bacterial polypetide isolated from the Sargasso Sea
MLKKRTIKSFVNRKGRESSSDIEAIQKAKDAGVLIFPKGNIIRFKKNFKNENDVVIDIGFGNGNLLYEIAKKNSDINFVGIEVYKHGVGKLLKKIIQTNIKNINVINDDANEILEKNIEDNSVKGISIFFPDPWPKKKHKKRRLVNSTFLELMISKVKEGGFIKVVTDIEDYAKDMKSIFNYSNGIQQINELKLFNNRDVTKYELKGIEKGHSIFDLSYKIL

SEQ ID NO: 106086 - protein, 210 aa, Unknown
  Bacterial polypetide isolated from the Sargasso Sea
MRRGRLTSNQSRALSEHWDKYILDNEEKLSNIWNQDPSILDIGFGSGETTAYLAKTNPEMLILGAEVYLSGIGSLLSKANEESLNNIKILNSDIVPFLEDKVSDNCFDLILMFYPDPWPKRKHHKRRLLQKDFIDLVNKKLKQNGIFYFKTDWVHYFDETKKLVNNDINWRVLQKENLKEYLVNLPKTSFEKKALQAKRKLNELILQKSC

SEQ ID NO: 106087 - protein, 236 aa, Unknown
  Bacterial polypetide isolated from the Sargasso Sea
MRQHVNPLSRFFQLPLQLPSPGELFDHPEQPIHLDIGCARGRCILGLAELNPGWNHLGVEIRRPLVTAADRDALNSGSGNVRVLFCNANISLESWLAALPDDRLQRVSVQFPDPWFKRRHRKRRVLQPALLLAIAAALQPGRELFLQSDVLAVIEPMVALTELSGCFTRPDSDARPWRADNPLPVPTEREQYVLEKNLPVYRVLYRRNASPLTDPEALESRWQELDNPAETVFTDV

SEQ ID NO: 106088 - protein, 214 aa, Unknown
  Bacterial polypetide isolated from the Sargasso Sea
MFESKNKYFGRKKGKSFLRLEQYTKYLVEPKKTLFNKIKTPRILEIGIGDGEKISEDAKSNSKVNFIGCDIFADGVLRAIRNSVDHKLKNLQVFHLNIQELLPLMPDNYFEEIRIYFPDPWPKNRHKKRRTVNQTLVKDLTKKLKKKGFILFATDHGDYFIEALALMKKFKYTMPNISPKSWEYSDSNALHTKFEKKALDKNHKLFYFSVLKNY

SEQ ID NO: 106089 - protein, 205 aa, Unknown
  Bacterial polypetide isolated from the Sargasso Sea
MIKTFSSRAGRLSETNKFYLHKKSKCIFSEKKLIIHEQKVLDVGFGDSDSFCKDIIENDDFLFFGAEPYKKGFSRAVEFYEKNNVENMILFNGDVRDLLEKVKFCFDFIRIHFPDPWPKKKHIKRRLVTKEFLIYLSNKLSDNGLVQIITDSQKYQDHIEEEIKLQNKLSLSKKLFPIKYNESSFYKKALIKKNNIKEFILQKSG

SEQ ID NO: 106090 - protein, 242 aa, Unknown
  Bacterial polypetide isolated from the Sargasso Sea
MLSSNYSNRLFGRTRGRSKKKINLKNYYETVDKYKFQNFNEETEYILDIGTGYGETSIFLAKQFPDDVIISCEKYIDGNIILLKNIENNKIKNILLHNGNVYEVLERANKKYFHLVWIFFPDPWPKNRHAKRRLITSDFLIKLHKILKENSEILIATDSKIYLRFILNSIYNCKEFFLWLNQSEMNLHIKDYYDIETKYYKKAINSQRKPSLFILRKYKLEIFQYYIRTIIRWVSHLFLYYG

SEQ ID NO: 106091 - protein, 215 aa, Unknown
  Bacterial polypetide isolated from the Sargasso Sea
MRSIRSFAKARSRLSANHKKILNQENDFLFSAITKSAFEETLRSTKNKILEIGFGEGDSLFEMAVNNPDLNFFGIEVYETGVARTCSKIEESSIKNLKIYLGDVVDLMLDKDIETTFDLLLFLFPDPWHKRKHNKRRLLSSDNLNKFRSYLSKEGFIFFRTDWKEYADSVKKICNDQKVEFQDLEKLSFLNQLTLTKYQRKGIEAGRSITSLLFK

SEQ ID NO: 106092 - protein, 218 aa, Unknown
  Bacterial polypetide isolated from the Sargasso Sea
MNDNLYKFYGRRKGRGYKRINQQSPFFLDYFLKGNQFKNYKSYSKNILEIGFGNAENLIKMSARYSNINFIGAEPYLNSCLKLSKVIAKNNIKNIKIWSDDIRKLIEFSSNNIFDLILILHPDPWPKKKHSKRRLIQQNFIDFLEKILKKNGQIIISTDVDIMKSWILEQFHIRKDFEWHIKNINICSKKPLCLVNSKYSKKAISMRNKNSWFIYRKL

SEQ ID NO: 106093 - protein, 164 aa, Unknown
  Bacterial polypetide isolated from the Sargasso Sea
GETLISIAQKNKEIRLLGVEVYLSGIGSVLSKINEYNLCNVRVVSADAEELLQTKIPNSSLDAVIMFYPDPWPKRKHHKRRLIKEEFLELLNKKLKINGIFYFKTDWKDYFDDVSDLLIEDPSWIEVDYKALDDHLRDIPSTSFEKKAKQSNRALNTKILKKIK

SEQ ID NO: 106094 - protein, 158 aa, Unknown
  Bacterial polypetide isolated from the Sargasso Sea
SAKQNPETFFLGADPFLNTNAKCIREILNNKLMNVKIWPDDIRQIINLFPSNSISEVKLLFPDPWPKLKHKKRRIVQNEFIDILYRILIPNGKVILGTDHSIMKSWILEIFQNNLGFIWKAEVANDWRVRPIECFQTKYEKKSLIEKRSPNWFVFVKK

SEQ ID NO: 106095 - protein, 218 aa, Unknown
  Bacterial polypetide isolated from the Sargasso Sea
MISNNYSNRLFGRTRGRSKKKIDLKNYHQKIDKYKFHNCDKKKNYILDIGTGYGETSIFLANQFLDKVIISCEKYIDGNIILLKNIEKNKIKNILLHNGNVYDVLESTHRECFDLVWIFFPDPWPKNRHAKRRLITSDFLIKLHNTLKENSEIHIATDSTIYVRFILNSIYNCKDYFVWMNQSEMNLHIKDYFDIETKYYKKAINSQRKPSLFILRKL

SEQ ID NO: 106096 - protein, 209 aa, Unknown
  Bacterial polypetide isolated from the Sargasso Sea
MRQHVNPLSSNFNQIERIPSLSDMFENSKLNLHLDIGSAAGEFLFDLALVNTSWNYLGIEIREKLVKNAKLKVIEKEIKNLYFLFGNANNILNDVQSKFIIKNLKSISFNFPDPWFKKRHFKRRVIQPEFINILSNSLQKGTLIFIKTDVKDLFDYMDSTISSNFYFKKIDKKDFNYSESFNPSKVKTDREKYVIVNQLEIFERIYIKN

SEQ ID NO: 106097 - protein, 277 aa, Unknown
  Bacterial polypetide isolated from the Sargasso Sea
MINSNNNPRGILLILIGMAMFSVQDALIKFIYQHSALYELYFGRTLTALILLLLYIFYSKEKLILKTSYPFLTCIRVIFFFFGFSFFYVSLTYMSLAMANALFFSSPFFVSILAIIFLKEKIGIRRWMAIFVGFIGVFIVLDPDFDNFNYMKLAPVACALCYSISMTITKITSDKDNVYTQMIHLYIGALTISFLFFIFTGKGQFNNFSDPTFQFILREWFTNTSYAWPFIIGMGFVATVSFYCVFSAYSIASPSAVSLFEYSLIIWSIITGYLLFQ

SEQ ID NO: 106098 - protein, 218 aa, Unknown
  Bacterial polypetide isolated from the Sargasso Sea
MISNNYSNRLFGRTRGRSKKKIDIKKYHQTLDKYKFQNCDKKINYILDIGTGYGETSIFLANQFLDKVIISCEKYIDGNIILLKNIEKNEIKNILLHNGNVYDVLECTHRECFDLVWIFFPDPWPKNRHAKRRLITSDFLIKLHNTLKESSEIHIATDSTIYVRFILNSIYNCKDYFVWLNQSEMNLHIKDYFDIETKYYKKAINSQRKPSLFILRKL

SEQ ID NO: 106099 - protein, 164 aa, Unknown
  Bacterial polypetide isolated from the Sargasso Sea
DVGFGDSDSFCKDIIENDDFLFFGAEPYKKGFSRAVEFYEKNNVENMILFNGDVRDLLEKVKFCFDFIRIHFPDPWPKKKHIKRRLVTKEFLIYLSDKLSDNGLIQIITDSQKYQDHIEEEIKLQNKLSLSKTIFPITFNESSFYKKALIKKNKIKEFILQKSS

SEQ ID NO: 106100 - protein, 103 aa, Unknown
  Bacterial polypetide isolated from the Sargasso Sea
ISKVFVLYPDPWPKKRHHRRRFVTQEFLIPLYESMKPGSFLRIATDIEDYVRQALQEVPKAGFEWLANDASDWRTPWQDWVSTRYEIKALKEERTPYYLTFIA

SEQ ID NO: 106101 - protein, 205 aa, Unknown
  Bacterial polypetide isolated from the Sargasso Sea
MIKTFSSRAGRLSETNKFYLHKKSKCMFSEKKLIVHEQKVLDVGFGDSASFCKDIIENNDFLFFGVEPYKKGFSRAVEFFEKNDVENMILFNGDVRELLEKVKFCFDFIRIHFPDPWPKKKHIKRRLVTKEFLIYLSNKLSDNGLIQIITDSQKYQNHIEEEIKLQNKLSLSKRLFPITYNESSFYKKALIKKNKIKELILQKSS

SEQ ID NO: 106102 - protein, 155 aa, Unknown
  Bacterial polypetide isolated from the Sargasso Sea
FPFAKEKTNTLFLASEVYKSGIGNLIGKIREHSLENIYIHEGDIRDLIFEEKSFKFDEVYIICPDPWPKDRHHKRRLLNKDFFERIQPCLKQNSFIFLSTDWKNYAEQIEDVLRAFEDKFSIETIKQIPGRELSKFQRKGIKEGREIYNFKLSLI

SEQ ID NO: 106103 - protein, 183 aa, Unknown
  Bacterial polypetide isolated from the Sargasso Sea
MDDPNTLNNDPSFDKIALEIGFGNGEDFFSFAKEKTNTLFLASEVYKSGIGNLIGKIREHSLENIYIHEGDIRDLIFEEKGFKFDEVYIICPDPWPKDRHHKRRLLNKDFFERIQPCLKQNSFLFLSTDWKNYAEQIEDVLRAFEDKFSIETLKQIPGRELSKFQRKGIKEGREIYNFKLSLI

SEQ ID NO: 106104 - protein, 168 aa, Unknown
  Bacterial polypetide isolated from the Sargasso Sea
FGSGEHLVEQALNNPSIGFIGCEPYINGVARILTSISKFGLSNVRIFRDDARVLLSALPDQSIARAFILFPDPWPKARHHKRRIVGPKTISALRRLMPAGAELRIATDDPNYKEWILRHIQSCAGFEWRARRPKDWQVRLGDWPATRYEMKADAAGRQCSFFLFSREL

SEQ ID NO: 106105 - protein, 163 aa, Unknown
  Bacterial polypetide isolated from the Sargasso Sea
EKLLQSAINYPDNLFIGIEYYKKGIAQLLLNNEKYKLKNIRLFYGDAFDYLKLLKANFLDEVLIMFPDPWPKKRHWKRRIINNASVSEISRSLKSNGRVLFYTDDKGIAFWGLRHFIFNNNFIWAIDKPLDCKNRNSSNYVTKYEHKALENNIQPYYFNFVKK

SEQ ID NO: 106106 - protein, 165 aa, Unknown
  Bacterial polypetide isolated from the Sargasso Sea
MEDPYFLDTREAPDWQRQFGSNHPLNLEIGFGMGDFLIAMAKREPNSNFVGIDFSEDGIQKLLERIHSSQLENIRVVFGDAREKLSYLFHAEELNSIYINLPDPWPKKRHIKRRLIQPELVKQITQKLAPQGKVYLATDSQTYANEMLEYFNAESLLQNINGIFY

SEQ ID NO: 106107 - protein, 183 aa, Unknown
  Bacterial polypetide isolated from the Sargasso Sea
MDDPNTLNNDPSFDKIALEIGFGNGEDFFSFAKDKTNTLFLASEVYKSGIGNLIGKIREHSLENIYIHEGDIRDLIFEEKGFKFDEVYIICPDPWPKDRHHKRRLLNKDFFERIQPCLKQNSFIFLSTDWKNYAEQIEDVLRAFEDKFSIETLKQIPGRELSKFQRKGIKEGREIYNFKLSLI

SEQ ID NO: 106108 - protein, 176 aa, Unknown
  Bacterial polypetide isolated from the Sargasso Sea
MRLKFLPSFVKRRGRITKKQQENLKFLSNFSIKNINDIKNECSRFKSCCLEIGFGNSDNLLNQAIKNPEIFFVGSEVYMSGIGTLIGNIKENSLDNIRIFPDDIRILLDKNSEKIFDIVQILCPDPWPKDRHHKRRLINHNFLGMLSNSMKKNANLYISTDWENYAESIENALRDS

SEQ ID NO: 106109 - protein, 208 aa, Unknown
  Bacterial polypetide isolated from the Sargasso Sea
SFVKRRGRITKKQEENLKNLSNFALEDMNDLQEECIKFSSCCLEIGFGNAENITQQALSNPEVLFIGSEVYMSGIGTLLGNIKESNINNVRIFPDDIRILLDKNSIEIFDAIEIICPDPWPKERHHKRRLINNDFLRMLNNSMKTNAYLFISTDWENYAESIAEILNNSKFFKSSTKKFLEKERLSKFEKRGEDQGRQIFNFNYQKIN

SEQ ID NO: 106110 - protein, 185 aa, Unknown
  Bacterial polypetide isolated from the Sargasso Sea
MTPERSASNRPDPGTPVFYGRRHGRRLRRQPAENLEWGLDHYGIDADTVERAAALPPLALFNDEPDREDRPVFLEIGFGGGEHLAARAEESPGACFIGAEPFMNGVAGLCGHIRQRGLTNIRIWPEDVRLFLPLLPDACLDGAFILFPDPWPKFRHRERRILQPVMIDQLARLIRPGGELLLASD

SEQ ID NO: 106111 - protein, 224 aa, Unknown
  Bacterial polypetide isolated from the Sargasso Sea
MNYSDDFKFKNYFSSRNRSLTEDQKSILDFYQEKVSLESFSELDQLNEYKNISLEIGFGVGDILLHNALNFPNNLFVGIEYYKKGIAQLLLNMEKHNLKNIRLFYGDALDYLKLAKTNYLDEILIMFPDPWPKKRHWKRRIINKDSVNEISRILKSNGRALFYTDNKGIAYWGLRHFILNADFNWEIDMPINCRNKISTYPVSRYEQKALKNNTNPFYFHFIKQ

SEQ ID NO: 106112 - protein, 125 aa, Unknown
  Bacterial polypetide isolated from the Sargasso Sea
FWVKNIILSNLNSFYFFEAIPDKSIDKIFLINPDPWVKKRHHKRRLMSYEILSLLNKITKSKNSIYMTTDSPDYFRDTVSLLNEYKDSFGTFSTSILKKDDELYGISKYQRKALEIGGKIYLLTL

SEQ ID NO: 106113 - protein, 186 aa, Unknown
  Bacterial polypetide isolated from the Sargasso Sea
FSANTKSAFEETLRNTNNKILEIGFGEGDSLFEMAANNPDLNFFGIEVYETGVARTCSKIEESGIKNLKIYLGDVVDLMLDKDIETTFDLLLFLFPDPWHKRRHNKRRLLSSDNLNKFRSYLSKEGFIFFRTDWQEYADSVKKICIDQKVEFQDLEKLSLLNQLTLTKYQRKGIEAGRSISSFLFK

SEQ ID NO: 106114 - protein, 239 aa, Unknown
  Bacterial polypetide isolated from the Sargasso Sea
MDNKESKPKNFRNFYGRLKGKGLRALQQKLLNDQLEKLSIPAVKYEINPDRRLIELSDLFKNVTSFSLEIGFGGGEHLVYQAERNPNIGFIGCEPYINGVAMLAGKLSKLELTNVRIHPGDVRDLFDVLPDDSIDSVFLLYPDPWPKKRHHRRRFVTSEYLIDLQRVMKTGALLKLATDIPDYVRQSLQEVCKHNFSWTATDAQDWRECWSDWMPTRYERKALREGRRPYYLTFEKRES

SEQ ID NO: 106115 - protein, 140 aa, Unknown
  Bacterial polypetide isolated from the Sargasso Sea
FKLAKIVKEKKIKNLYIHNGNVHEFLDKLDKNLYFNSIWILFPDPWPKKRHFKRRLINNLFLVKISKFLKKNAYLNIATDSKSYLNEILFLIFNMKNQFIWENQNKMEWEYKNVYLAETKYFKKAIKNGANPFFIKLRKL

SEQ ID NO: 106116 - protein, 148 aa, Unknown
  Bacterial polypetide isolated from the Sargasso Sea
FVVEQYINGLASLASKIRDNNLTNIKIFSGDVTKILNILPHNFFDSIYLLFPDPWPKSKHHKRRIIQKEIVEIFSKLLVNNGYLWFVSDHVEYSRFALLHFQNDPSFKWTAEKPEDWLKKPISWIDTRYEIKAKKRGISPVFLKFVKS

SEQ ID NO: 106117 - protein, 164 aa, Unknown
  Bacterial polypetide isolated from the Sargasso Sea
GFGNGEFLIKNAVSKPEELFIGVEVYLNGIAKVLKTISDFKLTNILLSNLNCSYFLPAISDKSVDRIFIINPDPWTKKRHHKRRLISYKIIKLLKQIIKTKDSIFITTDSESYLKDIKNLLSSFKETFGDYTVNIMAENDELYGISRYQRKAIEIGGKIYLLKL

SEQ ID NO: 106118 - protein, 171 aa, Unknown
  Bacterial polypetide isolated from the Sargasso Sea
FDKTALEIGFGNGEDFFSFAKERNNTLFLASEVYKSGIGNLIGKIREHSLENICIYEGDIRDLIFEEEGFRFDEVYIICPDPWPKDRHHKRRLLSRDFFERIQSCLKPNSFLFLSTDWENYAFKIQDVLRDFEDKFSIENVKQIPGRELSKFQKKGIKEGRDIYTFKLSLI

SEQ ID NO: 106119 - protein, 125 aa, Unknown
  Bacterial polypetide isolated from the Sargasso Sea
KNDIKNIRIFSEDIRLLLDADPTKIFDSIKIICPDPWPKDRHHKRRLINKDFLSMIHGFIKENGNLFISTDWENYAESIKNLLESGGLFIESEKIYLEKNNLTKFEQRGELEGRRVFKFNYERSS

SEQ ID NO: 106120 - protein, 98 aa, Unknown
  Bacterial polypetide isolated from the Sargasso Sea
DFVQIICPDPWPKDRHHKRRLINEDFLEMLNNSMKKNANLYISTDWENYAQNIEYVLNDSNFFKKTSQIFLKKDCLSKFEKRGRDQGRNIFEFNYQKN

SEQ ID NO: 106121 - protein, 216 aa, Unknown
  Bacterial polypetide isolated from the Sargasso Sea
MRYKFLPSFARRKGRITNAQKKYLLHLDKFLIHSCQDIQTAAAKFEHISLEIGFGNGEDFFKFTQSQPQTLFIAAEVYDAGIGNLLGKIIESNSQNILIFNKDIRELLDDSHPITFYEIFIICPDPWPKDRHHKRRLLQNNFFDMLNKRMTAESRLFISTDWDNYADDISGSLKSKNHNFDSRLISSIPSRDLSKFQKRAVTEGRRLHFFEVQKIR

SEQ ID NO: 106122 - protein, 222 aa, Unknown
  Bacterial polypetide isolated from the Sargasso Sea
KTLSNLQKKNLNKYLKDFSIFSNDNDNIDKLKKINPYNLFHDLKTMDIRLEIGFGMGDFLFDKALSCPKVGFIGCEIFENGVASLLNRIIKFKISNLRIHFGNCLDLIYNLNYSTLNEIYVLFPDPWPKNKHKKRRFFNEKNAFYLCSLLKINGTIKIATDIDDYAAQILGIMEKKKNFDFISSNFFQSEINKKIKFNTKYEKKAIDSGRNTNYFIFKKKYE

SEQ ID NO: 106123 - protein, 220 aa, Unknown
  Bacterial polypetide isolated from the Sargasso Sea
DDFKFKNYFSSRNRSLTKDQKSILDFYQEKISLESFSKLDQINEYNNISLEIGFGVGDILLHNALNFPNNLFVGIEYYKKGIAQLLLNMEKHNLKNIRLFYGDALDYLKLAKTNYLDEILIMFPDPWPKRRHWKRRIINKDSVNEISRILRSNGRALFFTDNKGIAYWGLRHFILNADFNWEIDMPINCRNKISTYPVSRYEQKALKNNTNPFYFQFIKQ

SEQ ID NO: 106124 - protein, 136 aa, Unknown
  Bacterial polypetide isolated from the Sargasso Sea
LKKIDDHGLKNIQIFHGDAHVFIKETSKFFFDEIWIFFPDPWPKKRHEKRRFIQIATIIRLYEILKPNGELYISSDDKNYISWTLSLIFQSDKFEWLAESPFDWKNPYREYYGSRYEQKGMKKNRAPYFLKFKKTD

SEQ ID NO: 106125 - protein, 166 aa, Unknown
  Bacterial polypetide isolated from the Sargasso Sea
MFDLAFANTNWNYLGFEIRERLVKTAKLKVREREIKNLYFVFGNANKIVKNFYTKFINKNLKSISFNFPDPWFKKRHHKRRVVQPELIDILSNYMQKGSLIFVKTDVKDLFDDMDWTISSNFNFKKIDQNYFDYSQSFNPNKVQTNREKFAIINELDIYEGIYMKI

SEQ ID NO: 106126 - protein, 116 aa, Unknown
  Bacterial polypetide isolated from the Sargasso Sea
MFEYLKNTVFTKILILFPDPWPKKRHKKRRLINSNFVSLLELITFEKTKIIVATDHEDYLTQILYEFYKSKSFELSTEVIGYEVYTCFDISLTKYHKKAKKSKKRVYFLLFEKKKS

SEQ ID NO: 106127 - protein, 202 aa, Unknown
  Bacterial polypetide isolated from the Sargasso Sea
MNKTSFNYRIYGRSKGRYKKNIKYDKFNLILSKFAIKDLNTNNHNILDIGSGYGENSLFLAENYSEAKVIACENFFDGNYKLVTESEKKSLENLFIYNGNVNEFLDKLTINKYFNSVWILFPDPWPKKRHLKRRLLNMMFFNKIHKYLKDNGSLNIATDSQPYLLNILYLITHLKKQYIWENQRKLDWDYQNISLVQTKYYK

SEQ ID NO: 106128 - protein, 224 aa, Unknown
  Bacterial polypetide isolated from the Sargasso Sea
MNIHSLIENPQFYGRRRGRKLSKSGQLAIKYGIDYFIKEEEISNIFNYQKHIVLEIGFGDGENLINSAKINSNFLYFGADPFLNTTAKCLSKILKYNLKNIFIWPDDIRKILKFFPDDSVSEIKILFPDPWPKKKHRNRRLIQNEFIKTIYPIMKHQGTITIATDHDLLKKWVLEKFQNYKEFEWVVKSSNDWRLRPKDCFQTKYELKSINQKRKPSWFIFKKK

SEQ ID NO: 106129 - protein, 107 aa, Unknown
  Bacterial polypetide isolated from the Sargasso Sea
FINKYKRLRFDIIYVLFPDPWPKKRHKKRRIVNEEFLKKIFAILKKKGKVFFSTDNLDYFLNVKNIIKKFPNIKVRKINKIVTIKTKFYLKAEKKGNTINSLLFFKY

SEQ ID NO: 106130 - protein, 185 aa, Unknown
  Bacterial polypetide isolated from the Sargasso Sea
MRLKFLPSFVKRKGRITKKQLLNLNYLPHYLVTNIDDVIADSHKYKKCILEIGFGNAENLISQALKNPDYLYVGSEVYMSGIGTLISNLKEQKIANVRIFPNDIRLLLDQESRAVFDYIFIICPDPWPKEKHHKRRLIDSNFLKMLNKFMKKNAQLYISTDWENYAESILCSINEENLFMETNKK

SEQ ID NO: 106131 - protein, 196 aa, Unknown
  Bacterial polypetide isolated from the Sargasso Sea
QTHSLSSLSEFSVKSIQEVEDFSKHFDKCYLEIGFGNAENIIFQAINNPNSLFIGSEVYMSGIGTLVSSIKENNINNIKIFSDDIRLLLDQSPKKVFDAVIIICPDPWPKEKHHKRRLINKSFLKMVHDFMKDDSNVYISTDWENYAKSISELFEKNKLFKLSSNKSFQKESLSKFERRGKDEGRELFEFNYKKVS

SEQ ID NO: 106132 - protein, 135 aa, Unknown
  Bacterial polypetide isolated from the Sargasso Sea
MKKKLYFGRVKSRKISRIKESSFKKYLKTKNINRLNLKKKLILEIGIGMGENLIYLSKKNIKKNIIGVDPFKNGMVNVSDYCINNNIQNIYLYPYVFQKFINKFKKLRFDIIYVLFPDPWPKKRHKKRRIINEEF

SEQ ID NO: 106133 - protein, 151 aa, Unknown
  Bacterial polypetide isolated from the Sargasso Sea
MKLDQFKITERFFGRRKGRKLSKSDELAIVYGNKYILKESKISNYFRNHHKKIILEIGYGDGENLVNSAMKNPRFSFIGADPFINGTAKCLKKLLKYKIKNVTIWSDDVRKIIKLFPNESISEIKVLFPDPWPKEKHKNRRLIQNEFIESI

SEQ ID NO: 106134 - protein, 214 aa, Unknown
  Bacterial polypetide isolated from the Sargasso Sea
MKNNFKYRLYGRSKGRNKNNKINEINSKKKINLINKSKYNIIDIGSGYGESSIELAKLDKQNVVIACEKFIDGINNTLNKIQTDSIENLFIFHGNANQFLDENCVDKSISEIWILFPDPWPKKRHFKRRLINLEFIKKLKKLLKQNAKIHIASDSKSYIAHILDCVHKIKKDFKWINQSKQEWEYASLSLPKTKYYKKALKNGRNSFYIKLMKL

SEQ ID NO: 106135 - protein, 203 aa, Unknown
  Bacterial polypetide isolated from the Sargasso Sea
MQNLNNSNYRLYGRTKGRKKKNSSKEFLKIRLIKIDKKKYNILDVGAGFGESTIKLAKKDKKNTVICCEKYIDGLNSLYNKSKLANLDNINIYQGNVHQMLDEYCKKDSISEVWILFPDPWPKKRHFKRRLIDEYFFTNINKYLKHRATINIASDSKSYISQILRSIYLSKEEFEWLNQSKSEWDYDKDILPETKYYKKALKN

SEQ ID NO: 106136 - protein, 217 aa, Unknown
  Bacterial polypetide isolated from the Sargasso Sea
FKNYLSSRNRSLTQDQKSIFDFYQKKISLESFRELEQLNEYKYISLEIGFGTGDILLHNALNFPNNLFVGIEYYKKGIAQLLLNIEKYNLKNIRIFYGDAFDYLKLVKTNYLDEILIMFPDPWPKRRHWKRRIINKDSVNEISRILKLNGKALFFTDNKDLAYWGLRHFILNTYFNWEIDMPSNCRNKISTHPVSRYELKALENNINPFYFQFIKHS

SEQ ID NO: 106137 - protein, 219 aa, Unknown
  Bacterial polypetide isolated from the Sargasso Sea
MNKLSTSKIYKIFGRKKGRKKNNNSILNNSKYLISNFTKKLQDKEIIIDIGFGNGESTIFLSKKYTDKEIIASDVYNDGNIKLIKKIKENNLKNISIFNQNILMLIDQINFSINLSQVWILFPDPWPKKKHHKRRLVNEDFLQKIANMMKKNGKIVIATDSTQYFFSIICSISNLDCLKWINDIPKKWQYSNQNLPETNFYKKALKNKRIPKIIILSKI

SEQ ID NO: 106138 - protein, 36 aa, Unknown
  Bacterial polypetide isolated from the Sargasso Sea
DGTYVPRPEERPVTKFERRGERLGHGVWDLKFQRQE

SEQ ID NO: 106139 - protein, 183 aa, Unknown
  Bacterial polypetide isolated from the Sargasso Sea
CLLTEETLGDAWASGSSVIVDIGFGSGEPVAAMARSFPEQIILAVDVHTPGIGDLLDRRRVEDIDNVFVIEADALELVPTIPGPVSGVRTYFPDPWPKSRHHKRRLVQTPVIDAVAERVIDGGFWHLATDWAEYAESICAAFDEHTGWQGGVIPRPAWRPVTHYERRAIREGRAVVDMWFTRI

SEQ ID NO: 106140 - protein, 183 aa, Unknown
  Bacterial polypetide isolated from the Sargasso Sea
MDDPNILNNDPSFDKIALEIGFGNGEDFFSFAKEKNNTLFLASEVYKSGIGNLIGKIREHSLENIYIHEGDIRDLIFEEKGFKFDEVYIICPDPWPKDRHHKRRLLNKDFFERIQPCLKPNSFIFLSTDWKNYSEQIKDVLRGFEDKFSIQTLKQIPGRELSKFQKKGIKEGREIYNFKLSLI

SEQ ID NO: 106141 - protein, 188 aa, Unknown
  Bacterial polypetide isolated from the Sargasso Sea
VLFQNIFNSDVQIFLEIGFGHGENLIQLSKERPEWTFLGVEPFINGVASLLERIDTEKISNIYVLNGDGRDFLKKLPKDTISEACVLFPDPWQKSRHVSRRIIQQEFLNDMSKILIKNSTLHLSSDHPKAQEWILRSLTNNKNYDWDIEKIYDCYQKPKIFGETKYMKKSIREMRKAMWFKFRNIKEC

SEQ ID NO: 106142 - protein, 179 aa, Unknown
  Bacterial polypetide isolated from the Sargasso Sea
MRYNFLPSFARRKGRITKLQETNLSFLADYSLDDPNTLNNDLSFDKIALEIGFGNGEDFFSFAKEKTNTLFLASEVYKSGIGNLIGKIREHSLENIYIHEGDIRDLIFEEKGFKFDEVYIICPDPWPKDRHHKRRLLNKDFFELIQPCLKQNSFIFLSTDWKNYAEQIEDVLRAFEDKF

SEQ ID NO: 106143 - protein, 214 aa, Unknown
  Bacterial polypetide isolated from the Sargasso Sea
MRYNFLPSFARRKGRITKLQETNLSFLADYSLDDPNTLNNNPSFEKTALEIGFGNGEDFFSFAKEKTNTLFLASEVYKSGIGNLIGKIREHSLENIYIHEGDIRDLIFEEKGFKFDEVYIICPDPWPKDRHHKRRLLNKDFFERIQPCLKQNSFLFLSTDWKNYAEQIEDVLRAFEDMFSIETLKQIPGRELSKFQRKGIKEGREIYNFKLSLI

SEQ ID NO: 106144 - protein, 184 aa, Unknown
  Bacterial polypetide isolated from the Sargasso Sea
MRQHVNPLSKNFFEIDPIPPLNQVFENPNLPLHLDVGCASGDFLFELSLKNKNWNYLGIEIREKLVLNANLKMKSRENKNLYFSFGNANNIFDHSNNKSIIQFITSISFNFPDPWFKKKHHKRRVIQPKLINLLSNSMKKGSLFFIKTDVRELFDHMELTISESIKFKKLANQDVQFYESFNPN

SEQ ID NO: 106145 - protein, 215 aa, Unknown
  Bacterial polypetide isolated from the Sargasso Sea
MQLKFLPSFVKRKGRITKKQTHSLSSLSEFSVKSIQEVEDFSKHFDKCYLEIGFGNAENIIFQAINNPSYLFIGSEVYMSGIGTLVSSIKENNINNIKIFSDDIRLLLDQSPKKVFDSVIIICPDPWPKEKHHKRRLINKSFLEMVHDFMKDDSNIYISTDWENYAESISELFVKNKLFKPSSNKSFQKDSLSKFERRGKDEGRELFEFNYKKVS

SEQ ID NO: 106146 - protein, 115 aa, Unknown
  Bacterial polypetide isolated from the Sargasso Sea
FPHDARILLDQAGESIFDEVVILCPDPWPKDRHHKRRLLQPEFIEMLLKFLKWNGRLYISTDWQHYADEIKANLNHPSLKKRNSSRESRASTKFEDRGIKEGRKIYRFDYIKTKP

SEQ ID NO: 106147 - protein, 225 aa, Unknown
  Bacterial polypetide isolated from the Sargasso Sea
KDNKGRPVRSYVIRSGRITISQRQAIGRLWNDHVIPFSGGLLDLGEIFQNSLPITVEIGFGMGSSLIDMACKRPDTNFLGIEVHKPGIGKVLKCIEKLGIENLKLICHDAAEVFNNAFEDETLDRVLVLFPDPWPKKRHAKRRIIQPEFVSKVSEKLKNNGCIHLATDWSPYAEHMIEVLDKIPSLSNAIAPKVFWENPERPETKFEKRGKKLGHRIWDLLYQKE

SEQ ID NO: 106148 - protein, 214 aa, Unknown
  Bacterial polypetide isolated from the Sargasso Sea
MRYNFLPSFARRKGRITKLQEKNLSFLADYSLDDPNTLNNNSSFNKIALEIGFGNGEDFFSFAKEKNNTLFLASEVYKSGIGNLIGKIREHSLENIYIHEGDIRDLVFEEKGFKFDEVYIICPDPWPKDRHHKRRLLNKDFFERIQSCLKPNSFIFISTDWKNYSEQIKNVLRGFEDKFSIETVKQIPGRELSKFQKKGIKEGREIYNFKLSLI

SEQ ID NO: 106149 - protein, 224 aa, Unknown
  Bacterial polypetide isolated from the Sargasso Sea
MNYSDDFKFKNYFSSRNRSLTKDQKSILDFYQEKISLESFSKLDQINEYKNISLEIGFGVGDILLHNALNFPNNLFVGIEYYKKGIAQLLLNIEKHNLKNVRLFYGDALDYLKLAKTNYLDEILIMFPDPWPKRRHWKRRIINKDSVNEISRILRSNGRALFFTDNKGIAYWGLRHFILNADFNWEIDMPINCRNKISTYPVSRYEQKALKNNTNPFYFQFIKQ

SEQ ID NO: 106150 - protein, 214 aa, Unknown
  Bacterial polypetide isolated from the Sargasso Sea
MRYNFLPSFARRKGRITKLQEKNLSFLANYSLDDPNILNNDPSFDKIALEIGFGNGEDFFSFAKEKNSTLFLASEVYKSGIGNLIGKIREHSLENIYIHEGDIRDLIFEEKDFKFDEVYIICPDPWPKDRHHKRRLLNKDFFERIQSCLKPNSFIFLSTDWKNYSEQIQDVLRGFEDKFFIETLEQIPGRELSKFQKKGIKEGREIYNFKLSLI

SEQ ID NO: 106151 - protein, 217 aa, Unknown
  Bacterial polypetide isolated from the Sargasso Sea
MRLKFLPSFVKRRGRITKKQEHSLQKLDKYSIKTLSEIISLSEDYNYCVLEIGFGNSEYLQREALENPSTLFIGSEVYLSGIGTLIGAIEENKMNNVRIFPEDARILLDQGDENIFDEVVILCPDPWPKDRHHKRRLLQSEFIEMLLKILKWNGRLYISTDWEHYANEIKINLNHPFLKQRNSSRESRVSTKFENRGIKEGRKVYKFDYIKTKSQSN

SEQ ID NO: 106152 - protein, 212 aa, Unknown
  Bacterial polypetide isolated from the Sargasso Sea
MQLKYLPSFVKRRGRITKRQSKALEQLDNFLVTDVDDISEALKNYSSCHLEIGFGNAKHLCKEAKLNKDTLYIGSEVYLSGIGSLLASIIEEGIQNIRIYDQDIRLLLDNKPKEVFDKVVIICPDPWPKEKHHKRRLINDEFLSIVKRTMKNDSEIYISTDWENYAESIFDSFDRSDFVTKENLKKKNDFSKFEERGIKEGRRIHEFNYIKK

SEQ ID NO: 106153 - protein, 157 aa, Unknown
  Bacterial polypetide isolated from the Sargasso Sea
MRYNFLPSFARRKGRITKLQETNLSFLADYSLDDPSTLNNDLSFDKIALEIGFGNGEDFFSFAKEKTNTLFLASEVYKSGIGNLIGKIREHSLENIYIHEGDIRDLIFEEKGFKFDEVYIICPDPWPKDRHHKRRLLNKDFFERIQPCLKPNSFIFL

SEQ ID NO: 106154 - protein, 224 aa, Unknown
  Bacterial polypetide isolated from the Sargasso Sea
MNYSDDFKFKNYFSSRNRSLTKDQKSILDFYQEKISLESFSKLDQINEYKNISLEIGFGVGDILLHNALNFPNNLFVGIEYYKKGIAQLLLNMEKNNLKNIRLFYGDALDYLKLAKTNYLDEILIMFPDPWPKRRHWKRRIINKDSVSEISRILRSNGRALFFTDNKGIAYWGLRHFILNADFNWEIDMPINCRNKISTYPVSRYEQKALKNNTNPFYFQFIKQ

SEQ ID NO: 106155 - protein, 205 aa, Unknown
  Bacterial polypetide isolated from the Sargasso Sea
MIKTFSSRAGRLSDTNKKFLQLKSKSILKIGEKPKTTKPIVMDIGFGDAQSFVCDVVENKNYVFIGIEPYKKGFARAVQFYEENVPKNMFLFNGDAREFFEETKYKIDFIRIHFPDPWPKKRHAKRRLITKDFLLTSYDLLKKGGSIEIITDSSIYQRHLEELISDQSYFKKIKDFPITCQISTFHKKAIEKGHTVKKYVLKKTS

SEQ ID NO: 106156 - protein, 197 aa, Unknown
  Bacterial polypetide isolated from the Sargasso Sea
MKLKIKELSKYLINYTSIKFSDSLKNYNVILDIGCGEGEFISRLAYQYPKKKFIGIEIKYGRILKSLKKARALNLSNLGFVISDATIFIDKALPDKSINKIFINNPDPWPKDKHHKNRLLNSDFIRMLHRKLKRKGNVYIKTDDIDYFKYIKVNVKNSNFTKDDNKSYIDLFLPSTKFQEFYEKNNKPIYSMKLLKK

SEQ ID NO: 106157 - protein, 215 aa, Unknown
  Bacterial polypetide isolated from the Sargasso Sea
MQLKFLPSFVKRKGRITKKQTHSLSSLSEFSVKSIQEVEDFSKHFDKCYLEIGFGNAENIIFQAINNPSYLFIGSEVYMSGIGTLVSSIKENNINNIKIFSDDIRLLLDQSPKKIFDSVIIICPDPWPKEKHHKRRLINKSFLETVHDFMKDDSNIYISTDWENYAESISELFVKNKLFKPSSNKSFQKDSLSKFERRGKDEGRELFEFNYKKVS

SEQ ID NO: 106158 - protein, 207 aa, Unknown
  Bacterial polypetide isolated from the Sargasso Sea
MKNNSSQEKPKFYNGHRNRKNHEELKISNEDFNQKLNNQNQINILDIGFGSGESIVSQDFEQCNIFGIESYLRGIVKMNKYKNQMNIKNLFLFHGDAVEIIENVIPKKSINVINIFFPDPWPKKKHHKRRLISHYTIGLFRKILRKNGFIHFASDHIDYSYQTKYIFENILNKKLFFSNFRQKRPITKYEQKAIDKKRFIFDLLIEF

SEQ ID NO: 106159 - protein, 224 aa, Unknown
  Bacterial polypetide isolated from the Sargasso Sea
MYNHDLNDSPIFHGRRKGRKLSKSNQSALKIGSRYIINKEDFEAVFLCKKNVILEIGFGDGENLINSAKQNSNFVYIGADPFVNTTAQCLSKLLFHNLKNVLIWPDDVRKILNLFPYNSISEIKILFPDPWPKKKHYNRRLIQNEFIEIIHQILKPKGTITISTDHDMLKNWILEKFQNYRKFEWIVQSSKDWRLRPPDCFQTKYELKSIANKRKPSWFIFQKQ

SEQ ID NO: 106160 - protein, 158 aa, Unknown
  Bacterial polypetide isolated from the Sargasso Sea
SAISYPDNLFIGIEYYKKGIAQLLLNIEKHKLKNIRLFYGDAFDYLKLLKTNFLDEVLIMFPDPWPKKRHWKRRIINNASVSEISRSLKSNGRVLFYTDDKSIAFWGLRHFILDRDFIWAIDKPLDCKNRMSSNYVTKYELKALKNNIQPYYFDFVKQ

SEQ ID NO: 106161 - protein, 231 aa, Unknown
  Bacterial polypetide isolated from the Sargasso Sea
MKNKYPKYYSFQGRKISKKISLPKKNLINKFYDNFSFDQDVIECLNNDKINRKIDIPDRYDITNIEIGFGNGEFLIKNAISRPNELFIGVEVYLNGIAKVLESILDFGLKNIMLSNLNSFYFLEAMPHKSIDKIFLINPDPWVKKRHHKRRLMSYEILSLLNKITKSKNSIYMTTDSSDYLRDTVSLLNEYKDSFGTFSSSILKKNDELYGISKYQRKAIENGGKIHLLTL

SEQ ID NO: 106162 - protein, 217 aa, Unknown
  Bacterial polypetide isolated from the Sargasso Sea
MRLKFLPSFVKRRGRITKKQEHSLRKLDNYSIKNLSEIISLSRAYECCTLEIGFGNSEYLQRQAMENPSTLFIGSEVYLSGIGTLIGAIEEKKLSNVRIFSDDARILLDQGSESIFDEVVILCPDPWPKDRHHKRRLLKPEFIEMLLKTLKWNGRLYISTDWEHYADEIKVNLNHPSLKKRNSLKESRASTKFENRGIKEGRKVYIFDYIKTKPQSN

SEQ ID NO: 106163 - protein, 243 aa, Unknown
  Bacterial polypetide isolated from the Sargasso Sea
MGKHRSRRPFEGLGLNSSGFYGRRKGHRLSARKESLLREVFPKIRVDLDATNILLDPQLLFDFRPKEVWLEIGFGGGEHIAYQSQANPDIGIIGVEPFLNGLVSLVDEIQNKNIKNIRIFDKEISILLERLKPNSLSKVFLLFPDPWPKKKHLKRRILNPNFLNILNKLMLEGGEFRFSSDDASYSRLVVELASLSEDFSWCPISCRDWQFRPERSIETRYERKAIQQGRKNTYISLIKTSTL

SEQ ID NO: 106164 - protein, 186 aa, Unknown
  Bacterial polypetide isolated from the Sargasso Sea
MRYNFLPSFARRKGRITKLQEKNLSFLADYSLDDPNTLNNNSSFDKIALEIGFGNGEDFFSFAKEKNNTLFLASEVYKSGIGNLIGKIREHSLENIYIHEGDIRDLIFEEKGFKFDEVYIICPDPWPKDRHHKRRLLNKDFFERIQPCLKPNSFIFLSTDWKNYSEKIKDVLRGFEDKFSIETVNK

SEQ ID NO: 106165 - protein, 239 aa, Unknown
  Bacterial polypetide isolated from the Sargasso Sea
QDTNTAESAESGAETGHPRRIRSFVRRAGRTSTGQQRAIDELGPRFLLPYAAEPLDWDAAFGRAGAKRIFEIGFGMGETTAHIAQLRPDDDFLGVEVHEPGVGALLKLIGEREIGNIRIVSHDAVEVLAQMIPEGTLDGIHVFFPDPWHKKRHNKRRLIQSPFVARLAAHLKPGGYLHCATDWEEYAHQMLEVLSAEPTLENTADGFAPRPDYRPVTKFEKRGLRLGHGVWDVVFRKRA

SEQ ID NO: 106166 - protein, 41 aa, Unknown
  Bacterial polypetide isolated from the Sargasso Sea
DAVDVLSQCMAPASLDAVHIFFPDPWHKKRHHKRRLIQSFP

SEQ ID NO: 106167 - protein, 220 aa, Unknown
  Bacterial polypetide isolated from the Sargasso Sea
MNKTNIYKIFGRLKSRKKQSKLTEYNLKKLQVNIDIDVNPKHYNILDIGSGSGENAINLSLLNPKAKIITCELFQDGNINLSDSIIKKKISNIRLFIGNVLEFLDIIENKKIFDEIWILFPDPWPKKRHHKRRLINDDFIKKIFSFQKNNGKLFISSDSPNYIESIFYTLYKNKNLYFWKNQKFHDWNYEFLSLPETKYFKKAKKLNKKSIFLELKKINP

SEQ ID NO: 106168 - protein, 172 aa, Unknown
  Bacterial polypetide isolated from the Sargasso Sea
MKDGLAVKKSIKSYVKRERRLTKSQLYGLDNYWIKYGIEFSPKIINFEEIFESYKPLILDIGFGSGESTINHAISHPENNYLAVEVHRPGIGRLLNKIEENTLTNIKIIKHDVIDILKEQIPDCSLTQIFIFFPDPWPKKRHHKRRLINKELIKLIKKKLVLHGRLHIATDW

SEQ ID NO: 106169 - protein, 238 aa, Unknown
  Bacterial polypetide isolated from the Sargasso Sea
MTDTQQPELTEDGRQRRTIKSFVMRAGRMTEGQQRGLDKGWPLFGLELEDGLRDFDQVFGRSAPRTFEIGFGMGHSTLEMAAAAPEQDFIGVEVHKPGVGALLSGAMMQNLHNIRVYSCDALEVLRDCVADASLDRVLLFFPDPWHKSRHHKRRIVQPAFAELVRSKLKVGGVLHMATDWENYAEHMLEVMNAAPGYRNLAADGTYVPRPEERPVTKFERRGERLGHGVWDLKFQRQE

SEQ ID NO: 106170 - protein, 237 aa, Unknown
  Bacterial polypetide isolated from the Sargasso Sea
MSVTQDVFNEDGKFMRKIRSFVRREGRLTKGQEKALEELWPVMGIDFAPEPLDMVALFGREAPVVLEIGFGMGASLVEMAKNAPEKNFIGIEVHSPGVGACLGTAQEAGVTNLRVICHDAVEVLEHMIPNGSLSCLQLFFPDPWHKSRHHKRRIVQPAFAQDIRQKLAIGGVFHMATDWENYAEHMLEVMSAAEGYENTSATGNWVPRPDWRPLTKFEQRGHRLGHGVWDLIFKRVN

SEQ ID NO: 106171 - protein, 239 aa, Unknown
  Bacterial polypetide isolated from the Sargasso Sea
MRQFKSQAEAEAAGVYVSKVKSFVKREGRLTKAQEKALEDHWPTKGIDYAEAPLSLSEIFGRSAPVVVEIGFGMGKSLVEMAANAPEKDFIGIEVHRPGVGACLAEASEQGVENLRVMDHDAVEVLKNMIPDGSLSRLQLFFPDPWHKKRHHKRRIVQPEFVELVRTKLAIGGCFHMATDWEQYAEHMLDVMINADGYTNTATNGDYVPRPDYRPITKFETRGQKLGHGVWDLIFERTK

SEQ ID NO: 106172 - protein, 209 aa, Unknown
  Bacterial polypetide isolated from the Sargasso Sea
TKAQEKALEDYWPTKGIDYAEAPLSLSEIFGRSAPVVVEIGFGMGKSLVEMAANAPEKDFIGIEVHRPGVGACLAEASEQGVENLRVMDHDAVEVLKNMIPDGSLSRLQLFFPDPWHKKRHHKRRIVQPEFVELVRTKLAIGGCFHMATDWEQYAEHMLDVMINADGYTNTATDGDYVPRPDYRPITKFETRGQKLGHGVWDLIFERTK

SEQ ID NO: 106173 - protein, 159 aa, Unknown
  Bacterial polypetide isolated from the Sargasso Sea
MSDHTKRKRTVRSFVRRAGRMTASQQRALELVWPDYGVEADGSLLDLGALFGREADCIFEIGFGNGDTLVQSAAENPEKNYIGVEVHEPGIGHCLIMAREHKVTNLRVMEGDAMEILRDRVTEASLARINLYFPDPWPKKRHHKRRIVQAPFLELAASR

SEQ ID NO: 106174 - protein, 163 aa, Unknown
  Bacterial polypetide isolated from the Sargasso Sea
FGHGEHLLYLSKKLQKKIIIGIDPFQNGLAKVAKYCIQNNIKNLYIFPYVFEKFHKKYQNYIYDDLYILFPDPWPKKRHHKRRLFDENFMRLISKKGRKNSKIFFKTDNYNYYDQVYNIANEFKKRELIRDFYNNLNTKIKTKYHQKAIKNESKIYSLIIENI

SEQ ID NO: 106175 - protein, 198 aa, Unknown
  Bacterial polypetide isolated from the Sargasso Sea
MDIDERPDWQAQFGNTNPLKLEIGFGMGNFLIEMAAKEPGSNFIGIDFYHKGIRKIMTRIKNLQLENVRIVYGDIRSKISILCQDGELETAYINFPDPWPKKRHIKRRLIKPEFINQLAQKLDLEGSVYLATDSESYAHEMLDYFNSETLFQNLDDNQGFIKERIDLPKSKYEKNFINAGEKVFYLEYLRLAEMTSIA

SEQ ID NO: 106176 - protein, 127 aa, Unknown
  Bacterial polypetide isolated from the Sargasso Sea
IEQRKVNNLKLISGDAVEVMKFGIPDNSINQINLFFPDPWPKKRHHKRRIINNEFILLMSKKLAENGIVNISTDWEDYADQIGDLFSKRGEFLEKLSTLRNVSTKFEKRGISLGHDIFNFCYKLISQ

SEQ ID NO: 106177 - protein, 200 aa, Unknown
  Bacterial polypetide isolated from the Sargasso Sea
MTHPEQPNTEPQNEELQENKYLRRIRSFVLREGRLTKGQQRSLDLFWPTMGLEYQTTPYDMQAVFGREADLVLEIGFGMGKSLVQMAKAAPEKDFIGIEVHKPGVGACLGEAETEGVKNLRVFEHDAIEILNDSIADNSLSTVQLFFPDPWHKKRHHKRRIVQAEFAQLLRRKLKIGGVFHMATDWENYAEHMLEVMKVA

SEQ ID NO: 106178 - protein, 162 aa, Unknown
  Bacterial polypetide isolated from the Sargasso Sea
MDKLNDFNFKSLEIGFGTGEKLLQSAISYPDNLFIGIEYYKKGIAQLLLNIEKHKLKNIRLFYGDAFDYLKLLKTNFLDEVLIMFPDPWPKKRHWKRRIINNSSVSEISRSLKSNGRVLFYTDDKSIAFWGLRHFILNRNFIWAVDKPIDCKNRNSSNHITK

SEQ ID NO: 106179 - protein, 182 aa, Unknown
  Bacterial polypetide isolated from the Sargasso Sea
MEKLNDFNLKSLEIGFGTGEKILRNAINYPDNLFIGIEYYKKGIAQLLLNIEKYKLKNIRLFYGDAFDYLKLLKTNFLDEVLIMFPDPWPKKRHWKRRIINNSSVSEISRSLKSNGRVLFYTDDKGIAFWGLRHFIFNSNFIWAIDKPLDCKNRNSSNYITKYEHKALKKNIQPYYFNFVKK

SEQ ID NO: 106180 - protein, 220 aa, Unknown
  Bacterial polypetide isolated from the Sargasso Sea
MSAKSLFTSFRGRITSAQKSAIERYGHQYFITDLAKHVDLARTASRQKLKIEIGFGMGVELTRWAIESPDALVVGIELYRPGIGSLFSKLVNEGIENVRVIEAPAQIAIAELPNNSVDEIRILFPDPWPKKRHHKRRLIQKEFICQVERVLIKGGRLQIATDWKPYADWILSCFEENTGFVKIVEKAALAQIERDRPTKFESRGINLKHKVFDFAYERIS

SEQ ID NO: 106181 - protein, 244 aa, Unknown
  Bacterial polypetide isolated from the Sargasso Sea
MTHPEQPNTEPQDDELQENKYLRRIRSFVLREGRLTKGQQRSLDLFWPTMGLEHQATPYDMTAVFGREADLVLEIGFGMGKSLVQMAKAAPDKDFIGIEVHKPGVGACLGEAETEGVKNLRVFEHDAIEILNDSIADNSLSTVQLFFPDPWHKKRHHKRRIVQAEFAQLLRRKLKIGGVFHMATDWENYAEHMLEVMKVAEGYSNLSETNDYVPRPDHRPLTKFENRGVNLGHGVWDLMFRKES

SEQ ID NO: 106182 - protein, 238 aa, Unknown
  Bacterial polypetide isolated from the Sargasso Sea
MSEVTTAEFNEEGKYLRKIRSFVLREGRLTKGQAQAIETQWPTMGLDYSPTPLNLTEVFGREADTVLEIGFGMGASLVQMAQEAPEQNFIGIEVHKPGVGSCLSDAAAAGVTNLRVYHHDAMEVLEHAIADGSLARVQLFFPDPWHKKRHHKRRIVQAEFAELIRRKLKIGGVFHMATDWENYSEHMLEVMNAANGYKNQSADGTVVPRPDHRPLTKFEARGHRLGHGVWDLMFERIA

SEQ ID NO: 106183 - protein, 193 aa, Unknown
  Bacterial polypetide isolated from the Sargasso Sea
GVDYQTGVMNFKKIFGRYAPIILDIGVGTGDSTVSHALAHPENNYLAVEVHRPGLGQLLKKIESLSLKNIKLINHDVIDVLETQIPNYSLSQAFIFFPDPWPKKRHHKRRLINKKIFKLMKNKLAAYGRLHIATDWKDYADYINELNNHNSELINLAGKNNFSPRPIWRSKTKYERRGLSLSHKIYDFCYGLP

SEQ ID NO: 106184 - protein, 228 aa, Unknown
  Bacterial polypetide isolated from the Sargasso Sea
MISVKNSSTHRPVRSFVRRKGRITSSQKSALKNLLPKYGAVYSSDMGQLSSSLLGNPEFPLIVDIGFGDGELLVATAEDHAESNFIGIEVYDAGIGHCLKLIEQRKVNNLKLISGDAVEVMMFGIADNSINQINLFFPDPWPKKRHHKRRIINNEFILLMSKKLAENGMVNISTDWEDYADQIDDLFSKRGEFLEKSSTARNVSTKFEKRGISLGHDIFNFRYKLISQ

SEQ ID NO: 106185 - protein, 258 aa, Unknown
  Bacterial polypetide isolated from the Sargasso Sea
MSPMMHDDPNEAGLPPHDDAIPDEAAEGADAVNPLHHRRIRSFVTRAGRVSTGQRRAMDELGPRFVVPYAPELPDWNAVFGRSAPRILEIGFGMGASTAEIAANRPGDDFLGVEVHEPGVGALLKLIGEQDLSNIRIIQHDAVEVLEHMLAPESLDGVHIFFPDPWHKARHHKRRLIQPPLVAHLASRLKPGAYIHCATDWQNYAEQMLEVLGAEPTLENTAADYAPRPDYRPVTKFERRGLRLGHGVWDLVFRKRAG

SEQ ID NO: 106186 - protein, 237 aa, Unknown
  Bacterial polypetide isolated from the Sargasso Sea
MPVTQDVFNEDGKFMRKIRSFVRREGRLTKGQEKALEELWPVMGIDFAPEPLDLVALFGREAPVVLEIGFGMGASLVEMAKNAPEKNFIGIEVHSPGVGACLGTAQEAGVTNLRVICHDAVEVLEHMIPNGSLACLQLFFPDPWHKSRHHKRRIVQPAFAQDIRQKLAIGGVFHMATDWENYAEHMLEVMSAAEGYENTSATGNWVPRPDWRPLTKFEQRGHRLGHGVWDLIFKRVN

SEQ ID NO: 106187 - protein, 196 aa, Unknown
  Bacterial polypetide isolated from the Sargasso Sea
MLNNLNEFDFNIKKDLNNKSFNILDIGSGNGENAIYLSKLFPNSRIITCEIFEDGNINLINKINKLHINNIRLFKGNVLQLLDGLKKDIIFNQVWILFPDPWPKKRHHKRRLINNAFLNYIHKFLKDSGRIMIATDSSSYMKLIFNLIYELKHKYEWENQNFQTWNYDFLDLAETKFYKKALNSNRKSTFFSLKKI

SEQ ID NO: 106188 - protein, 238 aa, Unknown
  Bacterial polypetide isolated from the Sargasso Sea
MSEVTTAEFNEEGKYLRKIRSFVLREGRLTKGQAQAIETQWPTMGLDYSPTPLDLAEVFGREADTVLEIGFGMGASLVQMAQEAPELNFIGIEVHKPGVGSCLSDAAAAGVTNLRVYHHDAMEVLEHAIADGSLTRVQLFFPDPWHKKRHHKRRIVQAEFAELIRRKLKIGGVFHMATDWENYSEHMLEVMNVASGYKNQSADGTVVPRPDHRPLTKFEARGHRLGHGVWDLMFERIA

SEQ ID NO: 106189 - protein, 228 aa, Unknown
  Bacterial polypetide isolated from the Sargasso Sea
MISVKNSSTHRPVRSFVRRKGRITSSQKSALKNLLPKYGAVYSSDMGQLSSSLLGNPEFPLIVDIGFGDGELLVATAEDHAESNFIGIEVYDAGIGHCLKLIEQRKVNNLKLISGDAVEVMMFGIPNNSINQINLFFPDPWPKKRHHKRRIINNEFILLMSKKLAENGMVNISTDWEDYADQIDDLFAKRGEFLEKSSTARNVSTKFEKRGISLGHDIFNFRYKLISQ

SEQ ID NO: 106190 - protein, 238 aa, Unknown; identical to SEQ ID NO: 106182
  Bacterial polypetide isolated from the Sargasso Sea

SEQ ID NO: 106191 - protein, 219 aa, Unknown
  Bacterial polypetide isolated from the Sargasso Sea
MSAKTLYTSFRGRITSAQKSAIERYGNQYLITDLANHVDLARTTSRQKLKIEIGFGMGVELARWAIESPDALVLGVELYRPGIGSLFSKLVDEGIENVRVIEAPAQIAIAELPNNSVDEIRILFPDPWPKKRHHKRRLIQKEFICQVERVLIKGGRLQIATDWKPYADWIFSCIEKNTGFVQIVDRTALAQGERDRPTKFESRGINLKHKVFDFTYERT

SEQ ID NO: 106192 - protein, 215 aa, Unknown
  Bacterial polypetide isolated from the Sargasso Sea
MRLDFLPSFVKRKGRITKNQEENLKFLSDLSIKNLKQIREEASNFSYCCLEIGFGNAEHLKFQALKNSDILFIGSEVYMSGIGTLIGAIKKHNIDNIRIFPDDIRILLDDEGGNIFDAVKILCPDPWPKERHHKRRLINNYFLRLLHKSMKDKGNLYISTDWENYAESIKKLLNDSTYFVRSEKFFLKKEHFTKFEQRGLDDGRNIFEFNYQTID

SEQ ID NO: 106193 - protein, 212 aa, Unknown
  Bacterial polypetide isolated from the Sargasso Sea
MRKTTSYQRRSGKLSANSKQQLQKNPHLIRDEIAKSIVNLQKDYDTCIIEMGFGMGDHLLGNVIENSNCLYIGIDIYKPGIARLLSTIEQQSILNCHLIEQDATESVGEIAKNSVDRIDIHHPDPWPKKRHHKRRLISSEFITTLRGLLKKEGYIHIITDDENYFTDIVEILKNTPQTKNNYTLEKDRQPNSKYGKKAQQEGRTINGIIINK

SEQ ID NO: 106194 - protein, 174 aa, Unknown
  Bacterial polypetide isolated from the Sargasso Sea
VVLEIGFGMGKSLVEMAKNAPHLNFIGIEVHRPGVGACLMDADEAGVTNLRVFEHDAVEVLADCLSDESLTTLQLFFPDPWHKKRHHKRRIVQTEFAEKLRSKLKIGGVFHMATDWENYAEHMLEVMQAAPGYKNQSETNDYVPRPDLRPLTKFEQRGHRLGHGVWDLMFERTK

SEQ ID NO: 106195 - protein, 232 aa, Unknown
  Bacterial polypetide isolated from the Sargasso Sea
MNKFSKFCLELSSLSDIKPSIFLSPASGYRARCEFGISKSSYTMIEDGKKIHMDVSKIPHHSIQKIMPKLLKYINKSSILKSKLFQINFRSSGSDILATMIYHKKLKDEWSIEAKVTQAKFKNLSIIGRSKNQKITNDKENLKIICKYKNSSFEILQNDVVFFQPNFYLYSMMISFITDYLKDSKDLLELYCGCGGFTLPLASKFNKVFATENNRHAVQLLLESIKLNGVAN

SEQ ID NO: 106196 - protein, 166 aa, Unknown
  Bacterial polypetide isolated from the Sargasso Sea
MIFKVIDFIENPDDLLELYCGIGTFTIPLSFIFNKVLATENNRNSIKCLNKALKENSISNIHNARLSSDEVSELFKGKIFNRMNSKNISDFNFSHILLDPPRSGLTEDVINLASNFKNIIYVSCNPETYIRDINLIRSHKITNIELFDQFPNKNHLEIVSVLKMIK

SEQ ID NO: 106197 - protein, 222 aa, Unknown
  Bacterial polypetide isolated from the Sargasso Sea
FKKDISSFYSKKININFSPPNSFRQRCEFGYYKNSYIMYENNKKLFLTSFDKAVRPIQALMPKLLKIINSNNQLKTKLFQINFRSNNNNNLMITLVYHKTIDDNLIIVIDEISRLLQINILIRSKNFLYSTNSNYLADYINNEIKIYQTDNCFFQPNKFMLPKMVNKVISLIEEQMDLLELYCGVGTFTLPLSKVFNKILATENNRISIKCLNKALLDNNIN

SEQ ID NO: 106198 - protein, 112 aa, Unknown
  Bacterial polypetide isolated from the Sargasso Sea
MNLAAMDPTTYDAQLTAKRIKLEQTFAQFETPSVEVFASEPAHYRMRAEFRVWHEGDDLYYYMFDKVLNDKVRCDQYLPASALINQMMAALIAELKPNHSIRHKLFQVDFLS

SEQ ID NO: 106199 - protein, 190 aa, Unknown
  Bacterial polypetide isolated from the Sargasso Sea
MSPASGYRARCEFGFSNDSYTMIEDGKKVFMDVSLIPHHSIQKIMPILLTHINKSNILKSRLFQVNFRSSGSDVLATMIYHKHLMEDWNAEAQLIQAKFDNLSIIGRSKNQKIANDKENLKIICKYKNSSFEILQNDVVFFQPNFYLYSMMISFITNYLKDSKDLLELYCGCGGFTLPLASKFNKVFATE

SEQ ID NO: 106200 - protein, 301 aa, Unknown
  Bacterial polypetide isolated from the Sargasso Sea
DHGIKYSMFKDNERVEIDEYPISSESIQTLMKDLLKIVNLEEVLYKKIFQIEFQSSRSKEVMVSLIYHKKLGSDWIEKATLIKDNLKCSVIGRSKKQKLIIGQDYVTEEYKSINQSFKLNLYEQCFSQTNPDVCDQIINWVEEIGKKDSDILELHCGLGTFTIPLSKLFNNVIATENSRPSLLALEHNVNLNKCHNIKYARLSGKETLEAFNGKREFRRLKNKCISFKDFNIRSIFVDPPREGIDANTLRKISQFDEIIYISCGFESLKRDLDILKKTHKIKKVAMFDQFPYTEHMNLASS

SEQ ID NO: 106201 - protein, 222 aa, Unknown
  Bacterial polypetide isolated from the Sargasso Sea
MNKFDRFQDDIKNNYDEKVVINLSPSTSFRSRCEFSYGKNHYVMHDINEKIYIKTFKDASLDIQNLMPVLLKRINENNVVNNKLFQVNFRSNQHNKIMVTMIYHKIINKSLINLVNQISEDLKVNIIIRSKNYKYETRGLYLDDTLIYKNLKIYQTDNTFTQSNKYLVDKMIFKVIDFIENPDDLLELYCGIGTFTIPLSFIFNKVLATENNRNSIKCLNKS

SEQ ID NO: 106202 - protein, 280 aa, Unknown
  Bacterial polypetide isolated from the Sargasso Sea
MPVATVQHLDYQPERCESLFQEKAAKALERLKPLAPPTPQHHASIASGYRLRAEFRIWHDGDELDYVMFPPGEPRNPQIIEAFPIAGPRITEAMAPLREALQGSTELRRKLFQVEFLSTLSGELLITLIYHRPLDDAWHARARALTRSLSCKIIGRSRKQKRVLDTDWVEEVIKVEGRAFCYRQPEQCFTQPNGFINQKMMGWLLDQCDKTDTDLLELYCGIGNFTLPFSQRFRNVLATELSKPATAAARWNAEANRSYNIELARLSAEEMTAAMAGERP

SEQ ID NO: 106203 - protein, 249 aa, Unknown
  Bacterial polypetide isolated from the Sargasso Sea
MPVLLKKINENNEIKHKLFQVNFRSNQHNEIMVTMIYHKIIDKSLINLVNQISEDLKVNMIIRSKNYKYETRGLYLEDILIYKNLKIYQTDNTFTQSNKYLVDRMILKVIDFIENPDDLLELYCGIGTFTIPLSFIFNKVLATENNRNSIKCLNKSLKENNISNINNARLSSDEVSELFKGKIFNRMNSINISDFNFSHILLDPPRSGLTEDVINLASNFKNIIYVSCNADTYIRDINLFRSHKITNIE

SEQ ID NO: 106204 - protein, 294 aa, Unknown
  Bacterial polypetide isolated from the Sargasso Sea
MTLNIVFIRIYYTRNKFDMNKFSKFCDELSSYSDIKPSIFLSPASGYRARCEFGISNSSYTMIEDGKKIFMEVSKIPHHSIQLIMPKLLRHINKSSILKSKLFQINFRSSGSDVLATMIYHKELLDEWIVEAKVIQAKYKNLSIIGRSKNQKIASDKENLKIICKYKNSSFEILQNDVVFFQPNFYLYSMMISFIADYLKDTKDLLELYCGCGGFTLPLASKFKKVFATENNRHAVKLLLESIELNSITNIETARLSDNETALALSNKRIFRRLKNIDLTSYNFSHILVDPPRA

SEQ ID NO: 106205 - protein, 335 aa, Unknown
  Bacterial polypetide isolated from the Sargasso Sea
MNKFNLFEQDLTELYIDKVPINLSPSLSFRSRCEFGYSKNAYTMKDSSKTIYLNKFLYADRSIQELMPKILEIINESQIVKNKLFQINFRTNSKNKILVTLIYHLKVNELLIKTIEEISKKLNVDIIIRSKNFIHATNDNFLEDKLEYSKLNIFQTDNCFYQPNKFLLNRMISKVINFVENPNDLIELYCGVGTFTLPLSKVFKNVFATENNRNAYKCLLKAIQKNDINNIHPARLSSNEVTELECGRKFNRMDGIPFSSFNFSHVLVDPPRSGLTDDVINIISRYKNIIYISCNPKSYLRDIKLLSSHKIKKIELFDQFPNTEHLEIISLLQKK

SEQ ID NO: 106206 - protein, 336 aa, Unknown
  Bacterial polypetide isolated from the Sargasso Sea
MNKFDRFQDDIKNNYDEKVVINLSPSTSFRSRCEFSYGKSHYVMHDINEKIYIKTFKDASLDIQNLMPVLLKRINENNEVNHKLFQVNFRSNQHNKIMVTMIYHKIIDKSLINIVNQISDDLKVNIIIRSKNYKYETRGLYLDDTLIYKNLKIYQTDNTFTQSNKYLVDKMIFKVIDFIENPDDLLELYCGIGTFTIPLSFIFNKVLATENNRNSIKCLKKSLKENNISNIHNARLSSDEVSELFKGKFFNRMNSKSISDFNFSHILLDPPRSGLTEDVINLASNFKNIIYVSCSAETYIRDINLIRSHKITNIELFDPFPNKNHLEIVSVLKMIE

SEQ ID NO: 106207 - protein, 342 aa, Unknown
  Bacterial polypetide isolated from the Sargasso Sea
MDKFKKFKSDISKYYSDNININFSPSSSYRSRCEFTYTNNSYAMHDGKSKIFLKSFINASSSIQKVMPILLYEINNSELLNKKLFQINFRSNSCKEVLATLIYHKHLTDEIKDLRDKLNTKLIDLNVKIILRAKNEIYPEINQFFKDTIRLKNLNLTTYQTDNCFYQPNRFLLTKMIDKVLSYTGFNNTGDLIELYCGVGTFSMPLASCFNRVFVTENNRSSIKCLKQAIIKNNIKNIDFARLSSSEVVELFNGRNFNRMNNKNISEYNFSHILVDPPRSGLTRDVIQLIDKVDNIIYISCNPETYLRDIGLLNNHKIQKIEIFDQFPNTKHLEIVSLLSVN

SEQ ID NO: 106208 - protein, 335 aa, Unknown
  Bacterial polypetide isolated from the Sargasso Sea
MNKFNKFKKDLSDLYTDDVPINLSPSLSYRSRCEFGYYKNCYTMKDNFKTVYLKTFPDACMPIQQIMPKLLNKINSSEIVKFKLFQINFRANSKNKILTTLIYHTKISELLIETISSISQSLDIDIIIRSKNFIHSVNQNYLEDFLEPSNLKIFQTDNCFYQPNKFLLNKMISKVIEFIDNPNDLIELYCGVGTFTLPLSRIFKNVFATENNRNAYKCLLNAIEINNIKNIHAARLSSDEVAQLDTGRKFFRMSNISIDTFDFSHILIDPPRSGLTQNVINIISKYKNIIYISCNPETYMKDIKLLNHHKIKKIELFDQFPNTQHLEIVSLLQKN

SEQ ID NO: 106209 - protein, 234 aa, Unknown
  Bacterial polypetide isolated from the Sargasso Sea
YHKKITDNHIKLIDKLSNELKINIIIRSKNFCYSSQNYFFEYHLKLNNLVLYQTDNCFFQPNKFLLEKMITKVQDFIINPKDLLELYCGVGTFSLPLSSLFSKVLATENNRNAIQCLNKAIIKNSISNISSARLSSNEVYELINGKKFNRMKQNEITDFDFSHVLVDPPRSGLDLNTVNILNNFKNVIYISCNQNTYIRDINLLKSHYIEKIELFDQFPNTKHLEIVSLLHKKN

SEQ ID NO: 106210 - protein, 318 aa, Unknown
  Bacterial polypetide isolated from the Sargasso Sea
TKTPYRVDEFPAASETINALMKRIIELVKPNAVLRKKLFQVDFLSGLSQECVISLLYHRQLDDEWQAQAEALRTELNKEFKVSVIGRARKQKVILGDDFIIEELPADGKTYQFKHIENSFTQPNAYVNTHMIEWAIAQSQVLTGDLLELYCGAGNFSIPLAAHFDHVVGTEIAKPSVEAAQFNIAVNQIDNVQIARLSAEEFVEALAGKRQFERLKGIELAERQFNTVLVDPPRAGLDPATTQMISQFDNIIYISCNPHTLVDNLEALSATHEVSRAALFDQFPFTEHMEIRCVAHPASLRLLCLGLWHGLPVGQTAQ

SEQ ID NO: 106211 - protein, 136 aa, Unknown
  Bacterial polypetide isolated from the Sargasso Sea
MNLAAMDPTTYDAQLTAKRIKLEQTFAQFETPSVEVFASEPAHYRMRAEFRVWHEGDDLYYYMFDKVLNDKVRCDQYLPASALINQMMAALIAELKPNHSLRHKLFQVDFLSTLSGEILVSLLYHRQLDDQWRSEA

SEQ ID NO: 106212 - protein, 291 aa, Unknown
  Bacterial polypetide isolated from the Sargasso Sea
MTATEQQRYQAQLDEKVERLTALLSPFNAPDLTVFPSQPTHYRMRAEFRVWHEGDDLFHIMFNQETKEKYRVDSFPPACKAINDAMALLLEEVRPNEALRKKLFQIDYLSALSGELVISLLYHRQLDEKWQEAAKELKAKLEAHFPKVNIIGRARKQKLIIDNDFVIERLPVNGKEFIFKHIENSFTQPNAEVNCSMIEWALDCVKPLSGDLLEMYCGAGNFSLPLALHFDNVVGTEIAKPSVQAAQFNIEQNQLNNVKIVRLAAEEFTQAMKGERTFSRLEGIDLSTYNF

SEQ ID NO: 106213 - protein, 364 aa, Unknown
  Bacterial polypetide isolated from the Sargasso Sea
MALGQVFPDLYETQLAEKQAGIEQLFASYTLPELELFRSEPSHYRQRAEFRVWHEGDDLFHIMFDSETKQKQRIDYFPVACKQIADFMPVLLEELKKRPALRNKLYQIDYLSGLSGELLVSLIYKKPLSDDWAEQAALLKADLAEQWPLDFIGRSRKQKVLVHRDHIIEKLKVKDRTLSYQQIENSFTQPNAKVNQQMLEWACDISSQLKGDLLELYCGNGNFSLALTPYFRQVVATEIARSSIKSAQLNIEMNQVTNLQVLQMSAEDVSAAMATGKQLKTLDLSELQLDTILVDPPRAGLDPATEAFVSQFNDIIYISCNPVTLEQNLQQLSKTHEIKAFALFDQFPYTHHIESGVWLRKLNL

SEQ ID NO: 106214 - protein, 196 aa, Unknown
  Bacterial polypetide isolated from the Sargasso Sea
ENLKIKCKYKNSSFEILQNDVVFFQPNFYLYSMMISFIANYIKDTKDLLELYCGCGGFTLPLASKFNKVFATENNRHAVKLLLKSIELNGITNIETARLSDNETALALSNKRIFRRLKNIDLTSYNFSHILVDPPRAGLSKEAVNLSNQFKNMVYISCNPETFFRDLKIMKREIESIGLFDQFSNTDHLEVIAVLK

SEQ ID NO: 106215 - protein, 250 aa, Unknown
  Bacterial polypetide isolated from the Sargasso Sea
REHYRMRAEFRLWREDGQRHYAMFAPGDKHTPILLDDFLIASLRINELMPRLRAAWQASEALSFKLFQVEFLTTLAGDALITLAYHRPLDETWQAEAEHLATELNVSLVGRSRGQRLVIGRDYVEEELSVAGRSFRYRQPEGAFTQPNGRVCEKMLGWAYDVLGERDDDLLELYCGNGNFTLPLATRVRRVLATEISKTSVNAALANLADNGVDNVELVRLSAEELTQALNEVRPFRRLAGIDLKSYEFG

SEQ ID NO: 106216 - protein, 239 aa, Unknown
  Bacterial polypetide isolated from the Sargasso Sea
DTWDGPARTLAAQLGVQLIGRSRGQKRVLQTDHVVEVLDVAGRQWQYQQIEGGFTQPNGGVNQHMLGWALNAAGRNSDDLLELYCGNGNFTLPLSTAFRRVMATELAKSSVRAAQENLRLNNVDNVTLVRLASEEVTQALTGVRPFRRLQGINLSGFEFGTVFVDPPRAGLDPATLDLVKDYRRILYISCNPETLADNLQTLTKTHRVVRCALFDQFPYTHHMESGVLLEQNIRAAQSA

SEQ ID NO: 106217 - protein, 138 aa, Unknown
  Bacterial polypetide isolated from the Sargasso Sea
MTPEHLPTEQYDAQLAEKVVRLQSLMTPFYAQAPEVFRSPVSHYRMRAEFRLWHDGDDLYHIMFDSQTKNRIRVDSFPAASELINTLMTAMIDGVRNNHVLRHKLFQIDYLTTLSDQAVVSMLYHKKLDDEWRKEAEA

SEQ ID NO: 106218 - protein, 281 aa, Unknown
  Bacterial polypetide isolated from the Sargasso Sea
MNLAAMDPTTYDAQLTAKRIKLEQAFAQFETPSVEVFASEPAHYRMRAEFRVWHEGDDLYYYMFDKVLNDKVRCDQYLPASVLINQMMVALIAELKPNHSLRHKLFQVDFLSTLSGEILVSLLYHRQLDDQWRSEAAALKAKLSSQFKVNIIGRARKQKIDLDKDFVVESLQVNDKVFHYKQIENSFTQPNAKVAIKMLEWAIDVTQRSQGDLLELYCGNGNFSIALAQNFNKVLATELAKPSVDAAQYNIEVNNIDNLQIIRMSAEEFSDAMAKKRSFRR

SEQ ID NO: 106219 - protein, 101 aa, Unknown
  Bacterial polypetide isolated from the Sargasso Sea
AAEEFTQAMNGVREFNRLQGIDLKSYQCETIFVDPPRSGLDSETEKMVQAYPRILYISCNPETLCKNLETLSQTHNVSRLALFDQFPYTHHMECGVLLTKK

SEQ ID NO: 106220 - protein, 165 aa, Unknown
  Bacterial polypetide isolated from the Sargasso Sea
MNLAAMDPTTYDAQLTAKRIKLEQTFAQFETPSVEVFASEPAHYRMRAEFRVWHEGDDLYYYMFDKVLNDKVRCDQYLPASALINQMMAALIAELKPNHSLRHKLFQVDFLSTLSGEILVSLLYHRQLDDQWRSEAAALKARLSSQFKVNIIGRARKQKIDLDKD

SEQ ID NO: 106221 - protein, 238 aa, Unknown
  Bacterial polypetide isolated from the Sargasso Sea
MTQSQPSSADAQGRRTPADYQTQLDEKRDRLTQLFAPFNPPALELHASPAEHYRMRAEFRIWHEGDDLFHCMYAPATKEIIRVDSFPTASLLINRLMPVLLAGLRPHPVLRKKLFQIDYLSTQSGQICVSLLYHRKLENEWQPAAEALQADLRAKGFELQLIGRAHKQKICLGDDFVIERLTVQGRELVYKQVENSFTQPNAAINEQMLGWALDVTKESEGDLLELYCGNGNFSIALA

SEQ ID NO: 106222 - protein, 278 aa, Unknown
  Bacterial polypetide isolated from the Sargasso Sea
MAALIAELKPNHSLRHKLFQVDFLSTLSGEILVSLLYHRQLDDQWRSEATALKARLSSQFKVNIIGRARKQKIDLDKDFVVESLQVNDKVFHYKQIENSFTQPNAKVAIKMLEWAIDVTQHSQGDLLELYCGNGNFSIALAQNFNRVLATELAKPSVDAAQYNIEVNNIDNLQIIRMSAEEFSDAMAKKRSFRRLEGIDLDSYVCNTIFVDPPRAGIDPATLDLVQGYERILYISCNPDTLKDNLQQLNQTHKVTRFALFDQFPYTDHMETGVLLERR

SEQ ID NO: 106223 - protein, 365 aa, Unknown
  Bacterial polypetide isolated from the Sargasso Sea
MAVIKIDTTQYQAQLSEKEQRITSQFQRFGVEQLEVFSSEPINYRQRAEFRVWHDGDDLFHIMFDQQTKEKIRVDTFDPAAPLVGEIMQVMIENLKPCEVLRRKLFQIDYLSTLSGEILVSLLYHKPLDDEWLREIKSLKAKLSEKYKIDFIGRARKQKEVLGDDFVTEQLTVNGQELIYQQVENSFTQPNAKVNISMLEWAQDLCKPLKNDLLELYCGNGNFSIALAGSFNKVLATEISKSSVHSAQYNIAKNNVDNLDIIRMSSEEFTQAMNGERTFSRLDGIDLKSYDCQTILVDPPRAGMDELTCDLVANYENIIYISCNPDTLERDLDHLTRSHNVKRFAIFDQFPYTHHIESGVFLQRK

SEQ ID NO: 106224 - protein, 365 aa, Unknown
  Bacterial polypetide isolated from the Sargasso Sea
MNLAAMDPTTYDAQLTAKRIKLEQTFAQFETPSVEVFASEPAHYRMRAEFRVWHEGDDLYYYMFDKVLNDKVRCDQYLPASALINQMMAALIAELKPNHSLRHKLFQVDFLSTLSGEILVSLLYHRQLDDQWRSEAAALKARLSSQFKVNIIGRARKQKIDLDKDFVVESLQVNDKVFHYKQIENSFTQPNAKVAIKMLEWAIDVTQRSQGDLLELYCGNGNFSIALAQNFNRVLATELAKPSVDAAQYNIEVNNIDNLQIIRMSAEEFSDAMAKKRSFRRLEGIDLDSYVCNTIFVDPPRAGIDPATLELVQGYERILYISCNPDTLKDNLQQLNQTHKVTRFALFDQFPYTDHMETGVLLERR

SEQ ID NO: 106225 - protein, 377 aa, Unknown
  Bacterial polypetide isolated from the Sargasso Sea
MTQSQQVSADPAPLRTPADYQAQLDEKRERLCGLFADFTLPALEVHASPAEHYRMRAEFRIWHDGDDLYHCMYAPATKEIIRVDQFPTASRLINQLMPVLLEGLRPHPVLRRKLFQIDYLSTQSGQICVSLLYHRKLESEWQQAAEALQADLRAKGFELQLIGRAHKQKICLGEEFVIERLTVQGRELVYKQVENSFTQPNAAINEQMLGWALDVTKGSEGDLLELYCGNGNFSIALAQNFRKVLATEIAKPSVDSAQFNIAANGVDNLIILRMSAEEFTMAMRGEREFNRLKGVDLGAYQCNTIFVDPPRAGLDDATVKLVQDYDNILYISCNPETLQANMAVLGDTHEIARFALFDQFPWTHHMEAGVYLKRKAG

SEQ ID NO: 106226 - protein, 341 aa, Unknown
  Bacterial polypetide isolated from the Sargasso Sea
MRDLLAPFDAPEPQVFDSPLQHFRLRAEFRLWREGGDRHYAMFSQDDKRTPILIEEFPIASQRINQLMPQLKAAWQASAALSHKLFQVEFLTTLAGDAMITLCYHRPLDEHWHTAANTLAAELNVSIIGRSKGKRDVIGHDYVVEKLDVGGRTFSYRQPEGAFTQPNGTVNQKMLNWAYEALGDRPDDLLELYCGNGNFTLPLATRVRKVLATEISKTSVNAALSNLDENGVENVTLVRLSAEELTQALNEVRPFRRLHGIDLKSYEFGSVFVDPPRAGMDPDTCELTRRFDNILYISCNPETLAANIAQLHDTHRITQCAMFDQFPWTHHMESGVLLTRR

SEQ ID NO: 106227 - protein, 255 aa, Unknown
  Bacterial polypetide isolated from the Sargasso Sea
MEERELLTTLLDIYDQKFLANYLNEEVGSSLCRETINRWMKGKAEPSLTHAEYEALFKLIPQPTVTEENCDFRFIDLFAGIGGIRKGFEAQGGMCVFTSEWNKYSVKTYKANFGNANEHKFNEDIRSITLSDDDSVSDEDAYENIKSNIPPHDVLLAGFPCQPFSIAGVSKKNSLGRAHGFECNTQGTLFFDVARIIAAHRPKAFVLENVKNLKSHDKGKTFKVIMETLDELGYEVADRSFDGKDPKIIDGQHFT

SEQ ID NO: 106228 - protein, 259 aa, Unknown
  Bacterial polypetide isolated from the Sargasso Sea
MGFRFIDLFAGIGGFRIAFEAAGGKCVFSSEYDKYAQLTYEAFFGEKPDFAEIKAVDPPGDITQLEPELVPDHDVLVAGFPCQPFSLAGVSKKQSLGRLHGFDDPTQGTLFFNIKEIIKSKRPSAFVLENVKNLRSHDRGRTYKVIIDILRNELEYEVTDEVLDASEWLPQHRERIFIVGFRNRGIISSKLFPPGPEQFDFSQPGRFSFLDIMKNRSQPPCLSEILEPEVDAKYIIGPGTWETLQRHKKKHLEKGQGLA

SEQ ID NO: 106229 - protein, 183 aa, Unknown
  Bacterial polypetide isolated from the Sargasso Sea
MDIKFIDLFCGIGGFRLGFENACKKEKLFPKCVFSSEIKSSAIDVYKSNFGSNFIEGDITKIKAENIPSFDVLLAGFPCQAFSSAGHRHGFSDTRGTLFFEIERILKFHKPKSFILENVEGLVKHDLINKHDDIGYTLKTILDRLRVLGYKVSWKVLNSLDFGLAQSRKRIFIVGSKVEYIPL

SEQ ID NO: 106230 - protein, 281 aa, Unknown
  Bacterial polypetide isolated from the Sargasso Sea
MKRIKALSFFTGAMGLDIGLKKAGIDVILACESEKFIRETIKLNNPKLKVLEDINLYTPEQIKKAAGLKKNEKVDLIVGGPPCQAFSTAGKRLSINENRGVVFIKFLEVIKKLKPTYFVIENVRGLLSVPLKHVPHRKRKGKLKPREEKGGTLKFILDYLNKCGYKVSFNLYNSANFGTPQVRERIVIVGNKKEKLPYLSPTHSEHGNYGLKSWNTFKSAVKGLHNINHDFVKFPEYRIKYYKKIKEGQNWKSLPISLQKEALSSSYFAGGGKTGFLRRLG

SEQ ID NO: 106231 - protein, 74 aa, Unknown
  Bacterial polypetide isolated from the Sargasso Sea
SARYYKDGSEILIDRGKNNEPRKLTPRECANLQGFPRKFIVSESSTQSYKQFGNSVPIPVVKSILIEMIKSIGL

SEQ ID NO: 106232 - protein, 118 aa, Unknown
  Bacterial polypetide isolated from the Sargasso Sea
MTKNFIDLFAGIGGFHLAIHDDEWNCVYASENDKYARETYKKNFEDISPSIFNNQLFNDDILKANPKEIPSHNLLCAGFPCQPFSQAGYKKGFSEDLEKRGNMFFVIRDIIAEKRPDA

SEQ ID NO: 106233 - protein, 154 aa, Unknown
  Bacterial polypetide isolated from the Sargasso Sea
HKKGFEDTRGTLFFDICKIIEKKKPKVVVLENVKHFINHDKKRTLKKVIQSLEHLGYNVVFKLLNAIDFGLPQNRERIFIIASKKGVFDFDLLKKNKSKQLGDFLENKENYEYLKKKEYTMIDKKFVKEQESGLIFVGYRNKNGFSKGIREGTK

SEQ ID NO: 106234 - protein, 136 aa, Unknown
  Bacterial polypetide isolated from the Sargasso Sea
MYYPGKEKNKSNLDKCKVSNHEYMIGGFSTIFMSRNRVRAWDEQSFTIQAGGRHAPIHPQAPEMIFVEKNKRIFVPGKEKLYRRLSVRECARIQTFPDNFIFDYDNIADGYKMIGNAVPVKFAEVLANTIKKDLNL

SEQ ID NO: 106235 - protein, 114 aa, Unknown
  Bacterial polypetide isolated from the Sargasso Sea
FSGGGKTGLARRLSWDEPSLTLTAPPAQKQTERCHPNETRPLTFREYARIQTFPDEWQFCGSLSSIYKQIGNAVPVNLAYAVGRSLINLLNEIENHEMQKTNLKELNFNDLKAS

SEQ ID NO: 106236 - protein, 252 aa, Unknown
  Bacterial polypetide isolated from the Sargasso Sea
NNSCREVYNKNFKKTKAWADIKLIPNKLINKKIPNHDILLAGFPCQPFSQAGIVKRNSLNKSHGFNDKNQGNLFFNILDIINIKKPKAFLLENVKHLANYNEGKVLKKILSSLRKNYFVPDPKILNARDFGLAQKRERIYIVGFLKNLHFNFEYPQPLNTPTKVEDFLEKDINSSFTISDRLWNGHKKRRKRNKKMGKGFGYKLTYPSDSYTRTISSRYYKDGGECLIYRGKGKNPRKLTPRECFNLQGFPK

SEQ ID NO: 106237 - protein, 306 aa, Unknown
  Bacterial polypetide isolated from the Sargasso Sea
MKNLKALSFFTGAMGLDLGLKKAGIEIILACESEKFIRDTIKLNNPKLKVLEDINLYSATDIRKAAGLKKNEKIDLIVGGPPCQAFSTAGKRLSINENRGVVFIKFLDLIKKLNPTYFVIENVRGLLSVPLKHVPHSKRNKKLKTVEEKGGTLQYILSYLKKCGYQVSFNLYNSANFGTPQIRERVVIVGNKKEKLPYLTPTHSENGLFGLKPWNTFKSAVKGLHNIKHEHVNFSKDRLKYFKKIKEGQNWKSLPKSIQKEAMGSSYFAGGGKTGFYRRLGWNKPSPTLVTDPTMPATDLGHPDKN

SEQ ID NO: 106238 - protein, 124 aa, Unknown
  Bacterial polypetide isolated from the Sargasso Sea
MHSAKNHNEKQLSLIDGSKFSYTNKKYDFENRFSFIDLFAGIGGFRLGLEALDINCLFSSEWDLNAKKTYQKNFGELPHGDINDVKIETIPKFDILTAGFPCQPFSKIGMRQGFKHKLKVIYFL

SEQ ID NO: 106239 - protein, 244 aa, Unknown
  Bacterial polypetide isolated from the Sargasso Sea
MFTVGGLFSGIGGIELGFEKAGFKILWSNENDENCNKTYKNNFNHKLYTQSINDINFRKVKPVDLLVGGFPCQAFSVAGYMKGFKDERGNLFFQICRAIEELKKKPKALMLENVKNLTGHDKGKTARVIVNSLRELGYSVFWNVFNTSVHTDIPQNRERTFIICFRDEADWEFSNKVTCSKKLNDQLPLPKNKKKKNFRKLLENREVEDRFYYKQDAYMYKELKKAIVSRDTVYQWRRVYVREN

SEQ ID NO: 106240 - protein, 185 aa, Unknown
  Bacterial polypetide isolated from the Sargasso Sea
MAYKYKTGGLFSGVGGFELSFSQAGFENKWAIENDQNAAKTYRHNFSDHFLLEKDIKSISSKEIKKLTNIDILLAGFPCQAFSVAGYRKGFKDPRGNLFDEIIRFVEELQKKPKILVLENVRNFYGHDGANTWKYVREALQEHNYSQIPMILNTSTSTGIPQNRERAYIVCFINEPQVSYEILEI

SEQ ID NO: 106241 - protein, 198 aa, Unknown
  Bacterial polypetide isolated from the Sargasso Sea
GLRSHDQGRTLNIILEVLRNDLSYFVPDPKILNSKDFGLPQNRERIFIVGFFKKNNFTFPEPLKFKTRVSDILNPGRTPNKYFISQKLWDSHRARKIKNQTAKPKKGFGYKSVISSDEYTSTISARYYKDGAEILIKRKGEPEDIPPRKLTPDESRQLQGFPDGFVLNKSDIQAYKQFGNAVSVPVIREISKSIIKYI

SEQ ID NO: 106242 - protein, 234 aa, Unknown
  Bacterial polypetide isolated from the Sargasso Sea
IGGPPCQSWSEAGALRGIEDKRGQLFFDFIRILKAKKPKFFLAENVSGMLAARHSEALKNIIKLFEKSGYNVTYKLLNTSDFGVPQDRKRVIFVGYRKDLRIKYVHPESTTSSIEKKLTLKDAIWDLRKNALPGKEKNKSNFDKCKVPNHEYMIGGFSTIFMSRNRVRAWDDQSFTIQAGGRHAPIHPQAPEMIFVEKNKRIFVPGKEKLYRRLSVRECARIQTFPDNFIFDYE

SEQ ID NO: 106243 - protein, 193 aa, Unknown
  Bacterial polypetide isolated from the Sargasso Sea
GNTLKTILKVLREDYYVPEPQVLNAKDFGLPQNRERIFIIGFKKKGTFNYPKPNKNKTVLGNILEKNPMEKYTISSRLWSGHKRRKRDHKKKGNGFGYGLFDLKSSYTNTISARYYKDGSEVLISRGKNRNPRKLTERECARLQGFPETFKIPVSTVQAYKQFGNSVPVNVIEAISLKIIEYLTLNKARKKVA

SEQ ID NO: 106244 - protein, 145 aa, Unknown
  Bacterial polypetide isolated from the Sargasso Sea
MKRIKALSFFTGAMGLDIGLKKAGIDVILACESEKFIRETIKLNNPKLKVLEDINLYTPEQIKKAAGLKKNEKVDLIVGGPPCQAFSTAGKRLSINENRGVVFIKFLEVIKKLKPTYFVIENVRGLLSVPLKHVPHRKRKGKLKP

SEQ ID NO: 106245 - protein, 291 aa, Unknown
  Bacterial polypetide isolated from the Sargasso Sea
TDIENVIDDVPEMDIICAGFPCQPFSKSGSQEGFKDQTRGTLFHDICSLAEIHKPAVMFLENVPNLVAHDNGNTMRVIESRITELGYKHWWKILSPHNYGTCQIRKRVYIVCIRDDLVQEFDFSFPKERSFELDIRTVLDESVDAKYDLTEDEIYWLDMWEDFLKNVNTETKLPGHPIWADCFQGKEEIPGDLEQYDENQLLEIGNEWRNYGWVKPVSREMSKEQMIKAINLPLWKQNFISKNRLLFDENKQFISDWLKKWKVLDSDEEGKPFIPVSRTKYEWQAGPESRT

SEQ ID NO: 106246 - protein, 246 aa, Unknown
  Bacterial polypetide isolated from the Sargasso Sea
IAGVSKKNALGKSHGFLDKTQGTLFFDIAKIISKRKPDAFLLENVKNLKYHNKGNTYQTIMDTLDRLHYEVETQIIDAKNFVPQHRERIFIIGFRKKYKHKFTFPEIKQKQYSIIKYLEHDIDKKYTLTSNLWKYLKAYKKKHKAAGNGFGYGLIEPGIDNHTRTISARYYKDGAEALISRGKHARPRRLTPRECANLMGFPKSHNFAGVSDTEAYKQFGNSVVVPVATVLAEAIVDQLKLLQIKT

SEQ ID NO: 106247 - protein, 218 aa, Unknown
  Bacterial polypetide isolated from the Sargasso Sea
GYKVHTNLINSAEYGVPQTRKRFFFVGVKEDYEWLFPPKTHSKENFVTVGDAILGDLPSLENNQSKNSYKDAPKNPLQQTLRKDCKELTNHLSPNHPQATIDMIRNTKPGDPMYKRFKQRIRLNRKCPSPTQVCGGIRPQFQFGHPTQSRGLSIRERARIQTFPDSYVFMGGITQGRVQTGNAVPVLVAKALSKQLKRMFEGKRLKGDKGNLMQGDLF

SEQ ID NO: 106248 - protein, 283 aa, Unknown
  Bacterial polypetide isolated from the Sargasso Sea
FIDLFAGIGGFHLALHSLGAECVYASEIDEYARKTYEANFKRKSPNLFKKNYKRFNKDILTEDYANIPNFDLLCAGFPCQPFSQAGHKRGFAENYESRGNMFFAIRDIIKEKKPKAIFLENVRHLKNHDDGNTFKVIKSTIENDLGYSFNYQIIKASDYGLPQHRPRIYIVGFRDETTDESDFIFPKKIPLKLSMSDIFGAKCNKDIGFTLRVGGGRSAIDDRRNWDGYIVKNKVVRLSSNEGRKMMGLPNNFKFPVTENQAMKQLGNSVAVTAVKHTSKQII

SEQ ID NO: 106249 - protein, 250 aa, Unknown
  Bacterial polypetide isolated from the Sargasso Sea
KIDFKKLKPVDILVGGFPCQAFSVAGYQKGFKDPRGNLFFEICRAITELPKMPKVIMLENVKNIRGHDGGKTAKVITKSLRDLGYSVFWNVFNTSVHTDIPQNRERTFIIGFKDEADWDFEPNKKTSSSIFNSYLPLTKSKTKKKFRDMLEVGEVDERYYYKQNAYMYKDLKKAITSSNTAYQWRRVYVRENKSNECPTLTANMGTGGHNVPLIKNGLGIRKLTPRECLNFQGFPKSFKFPDDMPVSQRY

SEQ ID NO: 106250 - protein, 234 aa, Unknown
  Bacterial polypetide isolated from the Sargasso Sea
MYKVGGLFSGVGGIELGFEKAGFEIAWANEIDKNSCVTYRKNFSHKLYEEDVRKIKGKDLKPVDVLCGGFPCQAFSIAGYRKGFDDDRGNVFFEIIRLINELKRKPKVLFLENVKNFKSHDKGKTFQTVVNIIQDNGYSVFFDVLNTCDYTPIPQNRERTFLICFRGEHNWEFSKKKNLVSREFAKRFPPKRVKNNKGIQEFLESGEVMENFYYRQDKYMYPELRKTMKSKDTL

SEQ ID NO: 106251 - protein, 156 aa, Unknown
  Bacterial polypetide isolated from the Sargasso Sea
MNKKLKFIDLFAGIGGFHLALKSLGMKCVFTSEIDEFARKTYSSNFNDRYLTDPNLFTGDIWKVDFKKIPDFDILCAGFPCQPFSQAGHKRGFKDNKDGNLFFSIEEILRIKKPKAFFLENVRHLKNHDEGRTFKIIYKTLQKLNYSFDYKIIKAS

SEQ ID NO: 106252 - protein, 293 aa, Unknown
  Bacterial polypetide isolated from the Sargasso Sea
KEAPDCDGIMGVPPCQSWSEAGALRGINDSRGQLFFDYIRFIKEKKPKFFLAENVSGILFNRHSEALNNIFDHFLKIGYNVSFKLLDVNDYGVPQSRKRVIIVGYPSSYEDFFTPPEAEDYKPTLKDAIFHLKDNVVPALKKNKTNPKVKIPNHEYMIGDFSSMYMSRNRVRGWDEPSFTIQAGGRHAPCHPQAPTMKKIEKDKCSFVSGKKKLYRRLSVRECAAIQTFPDNFVLEYTQVADGYKMIGNAVPVEFSKKLALKIKKDLKRFDNKPINFKKRGILINLNNPQKRN

SEQ ID NO: 106253 - protein, 101 aa, Unknown
  Bacterial polypetide isolated from the Sargasso Sea
RVRNWDEPSFTIQAGGRHAPIHPDAPKMTKVETDLFQFCKKNLNKYRRLSVRECARIQTFPDEFVFFYEQVADAYKMIGNAVPVKLAESLAVEIKSQLFAS

SEQ ID NO: 106254 - protein, 203 aa, Unknown
  Bacterial polypetide isolated from the Sargasso Sea
MPEITNTNEPLSDQLDLINFTKTSWFKKKLTNPNSLIQIGTLFSGIGAVEHALKRMKINYEVLFAGDVDKKCRESYFSNYKISEADWHCDINEFGAKKFKHKVDLLVGGSPCQAFSTVGNRQGLRDPRGSLFYEFARVVKECLPKIFIFENVKGLVNHDQGATWKTMKEVFKNELKYKINFETLNSKHYGIPQNRERIFVVGF

SEQ ID NO: 106255 - protein, 101 aa, Unknown
  Bacterial polypetide isolated from the Sargasso Sea
MGFRFIDLFAGIGGVRIAFEAAGGKCVFSSEYDKYAQLTYEAFFGEKPDFAEIKAVDPPGDITQLEPELVPDHDVLVAGFPCQPFSCGSFLSLMKSCVIIT

SEQ ID NO: 106256 - protein, 111 aa, Unknown
  Bacterial polypetide isolated from the Sargasso Sea
MKRIRALSFFTGAMGLDIGLKKAGIDVILACESEKFIRETIKLNNPKLKVLEDINLYTPEQIKKAAGLKKNEKVDLIVGGPPCQAFSTAGKRLSINENRGVVFIKFLEVIK

SEQ ID NO: 106257 - protein, 63 aa, Unknown
  Bacterial polypetide isolated from the Sargasso Sea
FVAGKEHLYRRLSVRECARIQTFPDDFIFDYDNVAEGYKMIGNAVPVDFAKILADQIKSDLGL

SEQ ID NO: 106258 - protein, 184 aa, Unknown
  Bacterial polypetide isolated from the Sargasso Sea
MKNKPKVISLFTCGMGMDIGFENSGFQTIYANDITEFAYNTIKKNKKNIACDLGDITNISSNEIKTKSGLKNKLPDVVIGGPPCQSFSTAGLRKGIEDKRGIALFEFIRIIKDLQPKFFVFENVPGLLSIAKKNIGFYDRISMDKSKIPDESKRGSLFEEILKKFYESLENYRISEPTIVNAAD

SEQ ID NO: 106259 - protein, 161 aa, Unknown
  Bacterial polypetide isolated from the Sargasso Sea
MYKVGGLFSGVGGIELGFKNQGFDIRWANDNDIHCSKTYKLNHKHKYILRDIHKLSASELESVDVMTGGFPCQAFSVAGYRKGLKDERGNLFFEILRLIDEFDNPPKVLLLENVKNFSTHDKGRTLKILREQLEGRDYCVFTHVLNTADYTSIPQNRERTF

SEQ ID NO: 106260 - protein, 371 aa, Unknown
  Bacterial polypetide isolated from the Sargasso Sea
MNVLDLFSGCGGMSLGFEWGGFNTVLATDIDINAKETYVFNFPNVPFINKDLKEVLKSDIDKLLQNKKVDVVIGGPPCQGFSLANKKRNKIKDDPRNKLFYEFLKVVNWYKPKAFVMENVKGLLSMKNGNVIKVILKSFEDIGYNSEYKILKASDFGVPQNRERVFVIGYLKKIGLKVEFPKPTVKTYISVEEAISDLPIISAGEGADKVNYSMEPVNSYQEFMRLDSKNVHNHVAMRHTQRLVERFKAITNGKSLVDVWEEHGSVSRGNPSQKSKIKFSQNNYRVHPNKPAPTIAASFQSNFIHPYLHRNFTAREGARLQSFPDCFEFKGMRTKMSWEKGLSQYQQIGNAVPPLLAKAIAKEIYKKIGNV

SEQ ID NO: 106261 - protein, 324 aa, Unknown
  Bacterial polypetide isolated from the Sargasso Sea
MEKRSFIDLFCGVGGFRQALESHGHGCVFSSDVDPDARFTYAENFGEEPAGDLTQIPGKEIPPHDVLCGGFPCQPFSISGNQGGFEDARGTLLYEILRIARHHKPAVLLLENVKNYLGHAKGRTLSITIELLASLGYEVHYSVLNASRYGVAQKRERIYFVCFRKDLGISDYRFPEPSDQDVAVEDVLLPPADPRLKELVIEREDLFLSSEFPQERENRPLRIGTVGKGGQGERVYSPKGHAITLSAFGGGIGAKTGMYLVDGLVRRLHPEECRRLMGFPKGFRLHPRRNVCYKQFGNSVAVPVVREIVATIDRFLDGQSRRAA

SEQ ID NO: 106262 - protein, 270 aa, Unknown
  Bacterial polypetide isolated from the Sargasso Sea
MLKFIDLFAGMGGTRVGFTQACNAYGLKAECVFTSEIKPYAVDLYKHNFNNEEVYGDITQIEAKDIPDFDFLLGGFPCQAFSTAGKRMGFNDTRGTLFFDVARILKEKKPQGFLLENVEGLVTHDRENKTDRTGRTLKVIIATLEELGYHVSWKVLNANDFGVPQNRKRIYITGTLNGTPDLSEFKAFHKTLEDILERGLPCEKTQFREKLLSLYTKEQLYGKAIKDKRGGRDNIHSWDLELKGPVSGVQKQLMGSLLKARRQKKWHKKS

SEQ ID NO: 106263 - protein, 384 aa, Unknown
  Bacterial polypetide isolated from the Sargasso Sea
MSEFDSLAEELVEEARNEEARQQQRDLSLIGKVLEIYDQKFVAELLRKLGNSDWTRETLNRWINGKCGPRSLTVTEASLLERLLPQPPANHPNYAFRFIDLFAGIGGIRHGFEAIGGQCVFTSEWNSYSVKTYKANWYCDPEAHIFNSDIRDVTLSHKENVSEEDAYAHIDKSIPDHDVLLAGFPCQPFSLAGVSKKNSLGRKHGFECDTQGTLFFDVARIIMAKKPAIFVLENVKNLKSHDKGKTFRVIMDTLNELGYDVADAEATGADDPKVIDGKHFIPQHRERIVLVGFRRDLNLSQGFSLADISSLFPERKVLFRELLDSDVDDKYTLTPKLWDYLYKYAKKHQEKGNGFGFGLVKPDDDKAISRTISARYHKDGSESL

SEQ ID NO: 106264 - protein, 343 aa, Unknown
  Bacterial polypetide isolated from the Sargasso Sea
LDLFCGCGGFSLGFKREGFEIIAGVDFDNDSIETYKNNITRNALKLDLSNQDWVNELKDKIQDKQIDILIGGPPCQGFSLTGTRMIDDPRNKLYKAFFDGIKIFNPKAVLIENVKGMSTLFRGEAKKSIITELEKQGYQVSDNILNSAKYGVPQFRERLFILGMKGNEKPTFPLELINPENYISSSMAISDLPHLTDSLGNEKMNYEFQADNYYQRLMRYKSKLIHNHVATSHKSFVIETIKQVPDGGNYKDLPKGVGENRKFNEAWTRYDSKKPSRTIDTGHRNHFHYQYNRVPTVRENARLQSFPDIFIFSGSKTSQNRQVGNAVPVLLSQALASHLLKIL

SEQ ID NO: 106265 - protein, 277 aa, Unknown
  Bacterial polypetide isolated from the Sargasso Sea
MNKNQKLPLAIVADILGTSKKVVDSWSDKKLKAIIDKKTGKKYFHIDELRSFPSASFLFETKWGEEERIKPSRNYKIIELFAGAGGLALGLEKAGFQSLLLNEIDRDACETLKKNRVNWNVKNCDIKEYDFTKFKGEVDLLTGGFPCQAFSYAGKKLGFNDTRGTLFYEFARAVKETNPKVILAENVKGLVSHDSGKTLETIKNIIEEIGYELVEPKILKAIFYKVPQKRERIFLVAIRKDLSRFVSFNYPAKFPKIFTLRDALKKGDLFNKDVPRN

SEQ ID NO: 106266 - protein, 157 aa, Unknown
  Bacterial polypetide isolated from the Sargasso Sea
MSPETEGQIYPQRKKEILSKVPQGGYWRDLPDDLQREYMRGSYFLGGGKTGLARRLSWDEPSLTLTCAPAQKQTERCHPNETRPLTFREYARIQTFPDEWQFCGSLSSIYRQIGNAVPVNLAYAVGRSLVNLLNEIENHEIQKSNLKELNFNDLKAS

SEQ ID NO: 106267 - protein, 221 aa, Unknown
  Bacterial polypetide isolated from the Sargasso Sea
MFSDIVKQKRESMGLSQKDFAKLIGLKDNGERTVRGWENEEHLPSLSKQNAILKLKTNVPFKQVWNDKSLKSIDLFAGIGGMRLAFQRNGVCNVFSSEWDKFAQKTYAANFGEIPEGDITKIASNSIPDHDILLAGFPCQAFSQAGLKQGFMDTRGTLFFDIQRILHAKRPKMFLLENVKQLKGHDKGRTLNIILEILKGNEINIPKKVELSKETKEALGS

SEQ ID NO: 106268 - protein, 286 aa, Unknown
  Bacterial polypetide isolated from the Sargasso Sea
MWIEGKASLTPKETDRVEILRGEFPFQSSAADNIPNFRFIDLFAGIGGLRLPFQQTGGECVFSSEWNAEAKKTYYANFSEYPSGDITEIGVESIPRHDLLVAGFPCQPFSQAGLKQGFSDTRGTLFFDIQRIISHHRPPIVLLENVKQLKGHDQGRTLKTITSVLEGNSVDIATNETTISVDATRAQYHVSWRILNAKDYGVPQNRERIFILALRTDLFSLFDAEAVFSRTKTRTKDSEKLGSILQPTSEVDESYTLSDKLWAGHKRRRDEHANKGYGFGYSLFNN

SEQ ID NO: 106269 - protein, 212 aa, Unknown
  Bacterial polypetide isolated from the Sargasso Sea
MFFDIARILEYHKPKAFLLENVKGLRGHDKGKTLQTIVRVLNNMDYNLSIEVLNAKYFGLPQNRERIFIIGFKDVVDFQFPMPPMTPTRLGKILHKNTSDKYTISDRLWESHQNRKEKAKTKGYGFGYSLFNRDATHTSTMSARYYKDGSEILIEQKNKNPRMLTPREAARLQGFPEDFVIPVSKGQAYKQFGNSVSINVIRALAKEMEKYL

SEQ ID NO: 106270 - protein, 294 aa, Unknown
  Bacterial polypetide isolated from the Sargasso Sea
MRSLFETIKENNTQPSLFTVQNILSNKYSRLPFKFVDLFAGIGGFRSAMTRLGGKCVFSNEWDKYALKTYQNWYRDTDINTTDINEVDIQNEIPDHDILCAGFPCQPFSIAGVSKKKSLGRLHGFRDKKDGNLFYRILDIVKEKRPPVLFLENVKNLRSHDGGKTWLIIENSLEEQEYFVYKNIIDARNWVPQHRERIFIVCFDKLKFGSDVDFEFPSSEKINQPKLGSILDGKPDSKYMLSDKLWKYLQDYAEKHRLKGNGFGYGLFGKDDVARTMSARYYKDGSEILIKQKN

SEQ ID NO: 106271 - protein, 291 aa, Unknown
  Bacterial polypetide isolated from the Sargasso Sea
EKAKIPFEVIGYSENDKFAIEFYENNHPGNKNYGDITKIDPTQIPDFDLFTGGFPCQPFSSVGLGYGEQDTRGTLFHDIIRICDVKRPKHILLENVKGLKTNRHGRTFNTIVNSLARLGYDVTYKVINSKDYGIPQNRERLWIYAYHGVLPLTFNLEPKKLKLKNYFKDLLDKNPAEDLYKNKTQINRLKELYKLDFIVSEPSCADLYNNNIRNDGISVTILEPHHNKMRVVEPPVNGQLKVRKYSIEEHFRFMGIDLNRISFGKLSYQQLCKMASNGWDVNLVSLIYKKI

SEQ ID NO: 106272 - protein, 274 aa, Unknown
  Bacterial polypetide isolated from the Sargasso Sea
EFDKYAQQTYEANFNEMPDGDIKTIDLEQIPKHDLLLAGFPCQAFSHAGLKKGFDDTRGTLFFDIATILKIHKPKAFLLENVKGLKWHDGGYTFKRIIDTLNDIGYQTLEHQVLNARDFGLPQNRERVFIVGFWKSTNFYFPEPPKTETRLGSILEKRVIEDKYTISEKLWTSAIKRRERAISKGNGFSYKLFNRDSPYTSTLSARYYKDGLEILIEQKNKNPRRLTPLEARKLQGFPDDFQIPVSDSQAYKQFGNAVSVSVIREIAKNIIKNL

SEQ ID NO: 106273 - protein, 289 aa, Unknown
  Bacterial polypetide isolated from the Sargasso Sea
AAQHIRDTIPPHDVLLAGFPCQPFSLAGVSKKNALGRAHGFACETQGTLFFDVVRIIAARRPAIFVLENVKNLKSHDKGRTFRIIMQTLDELGYEVSDADHSGADDPKVIDGRHFLPQHRERIVLVGFRRDLQLHDGFTLRDISKFYPTARPTFGDLLEPTVDAKFILTPVLWKYLYHYARKHQALGNGFGYGLVDPRNPQSVARTLSARYYKDGAEILVDRGWDRPLGEQHFDDTQNQLRRPRRLTPRECARLMGFESPQGYRFRIPVSDTQAYRQFGNSVVVPVFAA

SEQ ID NO: 106274 - protein, 296 aa, Unknown
  Bacterial polypetide isolated from the Sargasso Sea
MKKITLFEAFAGYGGASFGLKRSKIPFKTIGFSEIDKLTSEFYEKNHPGIKNFGDIKKINPKDLPDFDLFTGGFPCQPFSQVGMGLGEDDTRGTLFHDIIRICKVKKPQHILLENVKGLKTSKHGRTLKTIIIKLTNLGYDVVTELMNSKDYGIPQNRERVWIYAYKGILPLTFKLAPNTKKLKVNFKDLLDKHPDQSLFKNQKQIKRLKELYNLDFIVKEPSCADLYNKNIRKDGISITILEPHHNKMRVVHPPKNNQLKVRKYSVSEHFRFMGFKNEKIDLCNQSYQQLCKMLA

SEQ ID NO: 106275 - protein, 349 aa, Unknown
  Bacterial polypetide isolated from the Sargasso Sea
DLFAGIGGMRIGFNSFGKCVFTSEWDKFCQRTYAANFGEVPYGDITKIEKDNIPDHDILLAGFPCQPFSQAGLGMGFHDVRGTLFFEIEEILLHKRPKMFLLENVKRLKSHENGETLNTILSALRGGSNSVSIKKRELNRETQQSLGTLNYWCDYRILNSKDFGLPQNRQRIFIVGFNKDFYGDIDFDYTFKWPEPKNKKTLIGSILENDKVIDPKYTISKKLLDGHKRRLREHKKKGNGFGYSVFKSDDSYTNTISARYYKDGSEILIDQTHLNKRPRKLTPKECARLQGFPEKFIIDAVSDNQIYKQFGNSVSVPVIRSISKSMKKCHEEAIVNRKKKSSDIQHAVA

SEQ ID NO: 106276 - protein, 333 aa, Unknown
  Bacterial polypetide isolated from the Sargasso Sea
KLIELFAGAGGLAIGMHKAGFDTVLLNDFDKDSCDTIQRNRNWHVEHDDISNLSFKKYKGKIDVLSGGFPCQAFSYAGKRCGFEDTRGTLFFEFARAVKECKPKVILAENVRGLVSHEKGKTLETISNVIDELGYDLVEPQVLKAIFYQVPQKRERLFLVGVRKNLKAAHLYKYPDPFHRVMTLKDALRKGDLYDKKVPKSHGSEYPDAKKKILDMVPPGGYWRDLPEKYQKEYMGGSFHLGGGKTGMARRLSWEEPSLTLTCAPAQKQTERCHPEETRPLTVREYARIQTFPDNWQFMGSMSSQYKQIGNAVPVNLGYAVARSLIRLLNDIE

SEQ ID NO: 106277 - protein, 351 aa, Unknown
  Bacterial polypetide isolated from the Sargasso Sea
MSYKFIDLFCGLGGFRIGFEKNGYECVFSSDFDKHIQETYEVNFGEKPYGDITRVDPSVDIPDFDVLTGGFPCQPFSISGKKRGFKDTRGTLFFDICRIIDEKKPKVVVLENVKHFIHHDSKRTINTVLGSLIELGYNVSYKVLNLKDFGLPQNRERIFIIGSKNNLFDFGEMKIRKSKPLKDFLDKKGDFEFLKRNEYTLLKKDQIVHQPSGLKFVGYRNKDGFKRGIRPNTEHLNRVHRQPNRIYSVEGYHPTIPSQESSGRFFIYLPDIKKVRKLTINECFKIMGFNSRYKKVSSTGQLYRQIGNSVGVNVVDEISKQIIRQKLLNEPQTKTLRNSPKVINGQTQLNF

SEQ ID NO: 106278 - protein, 156 aa, Unknown
  Bacterial polypetide isolated from the Sargasso Sea
MKLYKVIKSNIDKKGLVAGKNIKSGTRIIRYKGKIISNKQVEENPKFDNSKDIYLFDLNKRFSLDGDFSWNTARLINHSCSPNCEVEGTGFKIWVTAIRDIKKNEELTYDYGFSYDSDYKQFPCKCRSKNCCGYIVREESRWRINKKYKKSLRISR

SEQ ID NO: 106279 - protein, 305 aa, Unknown
  Bacterial polypetide isolated from the Sargasso Sea
DGSFVYIPPGVRCPMELSTYFRINAENTGQFERTLIIADKGSYVSYLEGCTAPKRDTAQLHAAVVEIIVEEDAEVKYSTVQNWFPGDEDGNGGIYNFVTKRADCRGDRSKVMWTQVETGSAVTWKYPSCILRGDHSQGEFYSIAITNNHQQADTGTKMVHLGKNSKSRIVSKGISAGFAQNTYRGLVSMHPKAKSSRNYTQCDSLLIGDKCGAHTVPYIEVKNNSSRVEHEATTSKVDDDQLFYCRQRGMDEEEAVALVVNGFCKDVLQALPMEFAMEAQQLVAISLEEKCWLTTKKLHFKLLNP

SEQ ID NO: 106280 - protein, 148 aa, Unknown
  Bacterial polypetide isolated from the Sargasso Sea
MKSYLNLLSHILENGEKREDRTNVGTISSFGHQLKFDLRDGFPAVTTKKLAWKGVVSELIWFLEGSDDERRLAEIRYNKNRDELTDIDKYPTIWTDNADNQGKNLGYENSSLVKKLGPVYGVQWRNWGDKDQIKELLDSLENNPTSRR

SEQ ID NO: 106281 - protein, 39 aa, Unknown
  Bacterial polypetide isolated from the Sargasso Sea
KLPTLKIKRKVESIFDFKFEDFEIINYDPHPHIKGVVSV

SEQ ID NO: 106282 - protein, 140 aa, Unknown
  Bacterial polypetide isolated from the Sargasso Sea
MKQYLDALKYCYDNGSDVESRAGGVRKSFGYQMHYDLSKGFPAITTKKLAWKSVVSELLWFIEGSDDERRLAEILYNDSRENLKDKKTIWTQNAQADYWKSNARFEGDVGKIYGVQWRNFNGEDQVLNLIKGLKEDPNGR

SEQ ID NO: 106283 - protein, 158 aa, Unknown
  Bacterial polypetide isolated from the Sargasso Sea
MRGLFSFPHPVNEYAARLVAGMVIVLILTILFTNQSVLLWVLLYGFTARVLTGPTLSPMGLIATKIIVPVLGNPNKPVAGPPKRFAQLIGFLLSLLAIIAEFVFSSTNIAYLLISVIGIFAALESILGFCAGCYVFAILMKYGLIPESTCEKCNNINI

SEQ ID NO: 106284 - protein, 131 aa, Unknown
  Bacterial polypetide isolated from the Sargasso Sea
MKAYLDLLQYILENGEERSDRTNTGTISSFGHQFEFDLEKGFPAVTTKSLAWKGVVSELLWFLEGSDDERRLAEIRFNKDRSELTNLEKYSTIWTDNADNQGKELGYENSDTKKILGPVYGVQWRNWCGVD

SEQ ID NO: 106285 - protein, 168 aa, Unknown
  Bacterial polypetide isolated from the Sargasso Sea
NPNSRRMVITAWAPGNAQNSGLPPCHLMFIFNVQYDENNEPRLCVHLTQRSCDVALGVPYNIAGYSFLLHLFAHLSGMKVGTFGHTLVDAHIYTKKADGSMEEYDHIPGLKEQLKRMPKDLPKLVIDPSIKTLEDVMDLLDAETDEILSKFKLKNYIPEAFIPFKVAV

SEQ ID NO: 106286 - protein, 283 aa, Unknown
  Bacterial polypetide isolated from the Sargasso Sea
MTLIDSILLKDEFIIDTQNTNLLNLGNLTANVEYCIYKPIQTAETQYLRLMENIMLNGIEKKGRNGITKSIINQQLTFNISHSFPLLTTKKMYWKGIVEELLFFLRGNTDTKKLEQKKVNIWKGNTNRTFLDENNFVDYPEGQMGPMYGYQWRYFNKLFLPNVKDNDILEYNYEDSGIDQLSDLISNIKTNPTSRRLLMTNYNPLQVNQGVLYPCHSLLLQFFVIEGTLSVSMYQRSADVFLGLPFNISSTSLLLLIISKLTNLKPGNVTINLGDCHIYKEHY

SEQ ID NO: 106287 - protein, 100 aa, Unknown
  Bacterial polypetide isolated from the Sargasso Sea
QRSADVFLAFPYNIASYALLTLMIAKVSGLEPGEFVHSFGDTHIYLNHLEQVNEQLSRDPHSLPKLKIKNNRNSLFEFQINDFELTEYDPHPFISAPISV

SEQ ID NO: 106288 - protein, 60 aa, Unknown
  Bacterial polypetide isolated from the Sargasso Sea
DTHIYLNHLEQVDLQLTREPMKLPKLKLNPLIKKIEDFKYEDIEILDYNSHPSIKGKISV

SEQ ID NO: 106289 - protein, 56 aa, Unknown
  Bacterial polypetide isolated from the Sargasso Sea
EGHERGLEYQLKRGPRPFPRVRITERGQSRIEDYTECDFVIEGYDPHPRIQFPFRA

SEQ ID NO: 106290 - protein, 146 aa, Unknown
  Bacterial polypetide isolated from the Sargasso Sea
MKQYLDALRYCYDNGSDVESRAGGVRKSFGYQMHFDLSKGFPAITTKKLAWKSVVSELLWFIEGSDDERRLAEILYNDSRENLKDKKTIWTQNAQADYWKSNARFEGDVGKIYGVQWRNFNGEDQILNLIKGLKEDPDGRRHIISA

SEQ ID NO: 106291 - protein, 78 aa, Unknown
  Bacterial polypetide isolated from the Sargasso Sea
MIAQVCNFKMGDFIHTFGDAHIYLNHIDQVNLQLSRDFYPLPKMKINPNVSDIFSFQYNDFELLDYKSHPHIKGQVSV

SEQ ID NO: 106292 - protein, 230 aa, Unknown
  Bacterial polypetide isolated from the Sargasso Sea
LNISQLPDILILIVSDAFTPMAGAGAAIGWGVRRGIYSNEAGQGSSVHAAAAAEVDHPAQQGLVQAFSVYIDTLFVCSATAFMILITGAYNVHGEGSQFIIQNIAPTIDANSPAFTQYAMENTIPGLGAPFVAVALFFFAFTTILAYYYQAETNIAYLRRTYKFPGDMLILKIVMLASVFYGSVKTAQVAWGLGDIGIGILTWLNVTSILVIFFMSNPAVKALKDYEEQK

SEQ ID NO: 106293 - protein, 134 aa, Unknown
  Bacterial polypetide isolated from the Sargasso Sea
MKSYLNLLSHILENGEKREDRTNVGTISSFGHQLKFDLRDGFPAVTTKKLAWKGVVSELIWFLEGSDDERRLAEIRYNKNRDELTDIDKYPTIWTDNADNQGKNLGYENSSLVKKLGPVYGVQWRNWGDKDQIK

SEQ ID NO: 106294 - protein, 283 aa, Unknown
  Bacterial polypetide isolated from the Sargasso Sea
ANVTQVIVPFMALAYIIIALTIIGLNISQLPDILILIVSDAFTPMAGAGAAIGWGVRRGIYSNEAGQGSSVHAAAAAEVDHPAQQGLVQAFSVYIDTLFVCSATAFMILITGAYNVHGEGSQFIIQNIAPTIDANSPAFTQYAMENTIPGIGAPFVAVALFFFAFTTILAYYYQAETNIAYLRRTYKFPGDMLILKIVMLASVFYGSVKTAQVAWGLGDIGIGILTWLNVISILVIFFMSNPAVKALKDYEEQKRKKVNVFRFDPVSLDIKNAYFWEDRNKQH

SEQ ID NO: 106295 - protein, 120 aa, Unknown
  Bacterial polypetide isolated from the Sargasso Sea
MKQYLKALKHCYEKGIDVDSRAGRVRKAFGFQMRFDLNKGFPALTTKKLAWKSVISELIWFLEGSDDERRLAEIHYQDDRKNLKDKKTIWTENSQSKYWKERSKFQGDVGRIYGVQWRDF

SEQ ID NO: 106296 - protein, 147 aa, Unknown
  Bacterial polypetide isolated from the Sargasso Sea
IWDKVYEINLKTMVYLSKIIIPKMEKNKFGSMVHISSVDALSGDDKPQDAYGSSKAAMIRLSKSLAIQYANKNIRSNIILPGPIETGMQKRWKKTPMMKKNIEKNIPLRKVGKPEDIANGIMFLLSDQSKYITGTEITIDGGITAKP

SEQ ID NO: 106297 - protein, 312 aa, Unknown
  Bacterial polypetide isolated from the Sargasso Sea
MRILTFFFILMINAFAISQQIALTSQYIINELSINPAVVGLKGHTQIGLSFRRQWSGIDEAPVTQTLWGHAPLRGGFGVGGVLYNDVSGPTRRTGFNPVFGYQMRLNRKYMLSFGGGASLTQYFLDRNQMQTELPNDIAVDENSNNQFVPDANIGFWLTSKNMFAGISAWHLIQSKKDLFHIEAMVKNTLDRTYFFTSGYSFTLSRKAEFTPSFVVRMMRNAPLTFDLNSTFTYQKKYWGGISYRYKDAVSILIGIRSGPVRIGYSYDAGISKLNSFHNGSHELFLGIDAGDLYAKKIPGKDGTRSFHHFQT

SEQ ID NO: 106298 - protein, 319 aa, Unknown
  Bacterial polypetide isolated from the Sargasso Sea
MCFCRSGHLRWNETRAARQRARTVSEMISKSQLIYRGSRMRGTLIAVATVAVLAGCSTYDSLTQRVAQSITPYRITVVQGNFVSKEAAAQMQVGMSRAQVKQLLGTPLLTDMFHADRWDYVFYFKRGSTNVVQQRDFVILFSGDRVASWTGGDDLPSNLELLAEIDGDKLGKKKAAAPNVASAATGASAPVAAAATVDTTRSPSVDGAAAAAALPSTDANAEAAQAANRLTNAVQTPSNAQPSVRSAVPTANGGGIPSQGPTAAGQPQFQFHRPPPPQVQGAQDNPVGPTGSQSGSGGPTLNAPLTASPASPASSGTGN

SEQ ID NO: 106299 - protein, 709 aa, Unknown
  Bacterial polypetide isolated from the Sargasso Sea
MAFETINLGTQPAGTGGDTARSAFEKTNRNFLAVDVLSAAMSQAQFEAIRSQNKERYAASGWVSFGNHESGKQVNECKPGLYTALTTPNTLLIGKAGGVGGSKTDNASVHIDGVVFNLTNQFVLTLPSHPTSTQPERMDMYGVESEKVEISAASPNAYQGGLRGVGAAVNLFTATDQQKKDFFSANANTTYIGTDGKIYQWQLYKISFAGTTDGVPSPSEQGYSLNAFGDLWLKEGKNLLYFGNVLRLNDGGYHPSFNPLGAAKFVGDTFWYNTAASITSRADCFYPANLLAGSGSIASGKSGRPEIGGRYYDAIYASGFGGVCRDMRYPAYGITSEDSDEADQRVKNGAYRGFEKLVFSKVTKATAPSSSSQSQDIFVANASEWTGGDRISLYDGETGTLIFDKQIVTAVGDSFVYCQNAPQYNRVAGRDYYSVQEKYTNVSVGGSFLQTDVVGNPDTILVTQALVNGWHGSWIPLIPAATGIISEELIRKNLGSINVDTTYSLDFGSSFEKTTSDFSIVDNSVVIGQNSNLVSLLQYTAFAKQTENAVNASVYGGIGGLHDMAEYGGYFASIWGGIFFESLLNKVAISDAGGGGVSHLNLTIKLIRPDTFTMNPYSDQTCYHTAISKPSPTNGSSGIKALGYNVNISQQAFIQYAYTELKHNGANWGDDGKVTIVDNQSTKTDLNGNSVLVGTAKLREPIGWIKNKV

SEQ ID NO: 106300 - protein, 1223 aa, Unknown
  Bacterial polypetide isolated from the Sargasso Sea
MIPFLFKCQPHNRLVSSIARASSLISLNTRPQNVRHTLTSFISLILSSVIVSAASLFMAPTHADDTELYVFEASARNGSRPQVLIIFDNSGSMSSLAYDVEAPYENKRAVNYAQSGNLFYSRGSSENAAAPNPNSRREKRKFKGALNGCESSWEYLNRYGTFTGFFREYGFSGSSGSWREFSELNGSSISAVDCFEDIQENKFGNAAGEDQGLPVDSLGTASKPVRYTKASTSSSDSAKSAAKAKAEKTAFGTGKVVTVYTEDYLNWLHGPKTKVNKTRLALAKDAIESVILTTPGVDFGLAIFNMNGPYDGQRDGGRIISGIKPMSAAAKIDLLKGINDINYAQNTPLCETLYEAYRYFGGQSQYFGDDDSDYHYYDQWGRYQGTYQAKRNPFTDPEALVVGTNNYNSPFKRCQNEAYIIYITDGEPTLDNAADGLVEQLTKGVGKHTSSPVSYLSALSGWMRNEDVNPNSAGKQTVRTFTIGFSEGAASAEHLLKQTAENGGGKYFDATDASKLRSSLQTALNNILEKNASFTSPSVASNNFNRTQTFDSAYYSMFLPNKGPRWLGNIKKFKVTSSGDVVDSKGNNAIGEDGNIKAEACSYWTSAEECGASGDGNDVKRGGVLGAMQQASSRTLYSNLSTGLSPFTLSNASRKAGGDARLALYMGVDETELSEHFDWAKGIDVDNDKNQDLSAASGTTPNWRADIMGDALHSKPLALNFGSEDKPDIRIIVGTNHGFLHMFKDEGDSVSETWGFIPYELLPNFRDLKANAPTGVHSVYGIDGSPVAYTKMQGKRIEKAWVFVGMRRGGNAYYALDITSPDNPSFMWRIDASSPGMGELGQSWSTPVVTTIPSATGDKPVLIFGAGYTPATKDGAEIGSDDSQGRGVFIVDAETGALIHQFGGSGANTQLPGIANSIPSSVAVLDGNGDGRTDRIYATDTQGNVWRMDMPSANTSTWSGFKFAALGDRSSVAGDRRFFSGPTVAQTMVTNTFELTQVVNGKSTKTVTKQNIPYDAVVVGSGHRAKPSDASRSDMFFALQDRNIVTQSFQGKPNQKPVPSALTLSDLYDVTTAAPNDKASEIAFGQKRGWYYNFSRKGEKSLSSATIVQGEVYFTSFVPGSDASVNQCLSSGKGYLYKKNLHKGTNGYRTDFLYAGELVLDTPQLVIPPAAQPDDPNAKAPTPDMFLIGIGKAVPEEATCESGNPKCIGSGPKANKIYYYVDQ

SEQ ID NO: 106301 - protein, 382 aa, Unknown
  Bacterial polypetide isolated from the Sargasso Sea
MGNSMQYLGERITLCACATTWIEGEAIRQLEHAATLPGMRRVAGMPDLHPGRGYPVGAAFFSTGQLYPALIGGDIGCGMALWQTALDARRVSASKLASRLGSIDATPDASWQPLIAAAGFADHAYAASLGTIGSGNHFAEAQRIDAMYETEPLAALGLDPDRLLLLVHSGSRGFGQSILEQHMREHGYNGLVDTDAACTAYLVRHDAALRYAIANRDLIARRMLARWRTDGRCVLDVNHNLVSRANVDGEPGWLHRKGATPADAGPVVIPGSRGDYSYLVAPVRPDDAASLASLAHGAGRKWARGDCRGRLERRFTPSQLTRTPLGSHVICEDRELLYEEAPQAYKPIDSVVDALEAAGLLRKLARLAPVLTYKTSGEAGRC

SEQ ID NO: 106302 - protein, 98 aa, Unknown
  Bacterial polypetide isolated from the Sargasso Sea
MYHRFEENKYPSTNIRLDVFKKHINLIKENNLNFYNPGEFSISFKKVKEQKKILLTIDDAFTSFYENAWPILKEEKIPFILFVSTESVGNKGYMSWEQ

SEQ ID NO: 106303 - protein, 144 aa, Unknown
  Bacterial polypetide isolated from the Sargasso Sea
MKSYLDLLSHILENGEKREDRTNVGTISSFGHQLKFDLRDGFPAVTTKKLAWKGVVSELIWFLEGSDDERRLAEIRYNKNRDELTDIDKYPTIWTDNADNQGKKLGYENSTLVKKLGPVYGVQWRNWDDKDQIKELLDSLKNNP

SEQ ID NO: 106304 - protein, 238 aa, Unknown
  Bacterial polypetide isolated from the Sargasso Sea
MDFFINNQELLWFLVVFYDLTLVILLYRFFGKYGLYAAVILGIILGNLQGGKISELQIFGTSINVSMGAILYSGIYFATDLLNEKFGKNEANRAVYLGFFANIAVMITLWLSINFLPSSLSGSALEVHTAISTLAQYSPIFIIGSLMAYLASQTFDVWFFNYLKEKTDGKKLWLRNNLSTMTSQLIDTLIYQFTWVIATDLTFAEAFGLAVVKYIFKFIIAIVDTVFIYIVRGWKVPE

SEQ ID NO: 106305 - protein, 308 aa, Unknown
  Bacterial polypetide isolated from the Sargasso Sea
MAIKYHRFEENKYPSTNIRLDMFKKHINLIKENNLNFYNPGEFSKSFKKVKEKKKILLTVDDAFTSFYENAWPILKEEKIPFILFVSTEAVGNIGYMSWDQIKEVEKENFAYIGNHSHSHDYLTKFTFEKFVKDIEKSINIFNDKLGYNPSFFSYPFGEYNLEQKNYISKNFEFAFGQHSGVIDLNKDRYELPRFPINEKYGETKRFNEVISYLPLQYKIIKPEDKFMNEGENPPKMTIEFFEDQKNLENINCFSNEGSKWRKTKIVLIDNVLKINFSEKFIERRGRINCSLKDENGWRFSGFQFVQN

SEQ ID NO: 106306 - protein, 64 aa, Unknown
  Bacterial polypetide isolated from the Sargasso Sea
FGDAHIYKNSIDQVKEQISRPPKQLPTLVIPELNEFDDLKSCSIDDFILEGYDPHPPIKAKMAV

SEQ ID NO: 106307 - protein, 126 aa, Unknown
  Bacterial polypetide isolated from the Sargasso Sea
MKQYLDALRYCYDNGSDVESRAGVVRKSFGYQMHYDLSKGFPAITTKKLAWKSVVSELLWFIEGSDDERRLAEILYNDSRENLKDKKTIWTQNAQADYWKSNARFEGDVGKIYGVQWRNLMERIKS

SEQ ID NO: 106308 - protein, 140 aa, Unknown
  Bacterial polypetide isolated from the Sargasso Sea
MRENKILSSAALITKVFIFFIIFLNVKAEVVNKKYFKNEQGVLAIMYHRFEENKYPSTNIRLDIFKKHINLIKENNLNFYNPGEFIKNFKKVKEQKKILLTIDDAFTSFYKNAWPILKEKKIPFILFVSTESVGNKGYMS

SEQ ID NO: 106309 - protein, 143 aa, Unknown
  Bacterial polypetide isolated from the Sargasso Sea
MKQYIEALKYCFENGSDVESRAGKVRKNFGFQMRFDLQKGFPAMTTKKLAWKSVVSELLWFLEGSDDERRLAEILYEDKRKNLKHKTTIWTKNANSNYWKNKAKFEGDVGRIYGVQWRDFNGVDQVNNLIKGIKSDPNGRRHI

SEQ ID NO: 106310 - protein, 158 aa, Unknown
  Bacterial polypetide isolated from the Sargasso Sea
MKQYIEALKYCFENGSDVESRAGKVRKNFGFQMRFDLQNGFPAMTTKKLAWKSVVSELLWFLEGSDDERRLAEILYEDKRENLKDKKTIWTQNANSNYWRDKAKFEGDVGRIYGVQWRDFNGVDQVKNLIKGIKSDPNGRRHILSAWNPAELHLMSLP

SEQ ID NO: 106311 - protein, 67 aa, Unknown
  Bacterial polypetide isolated from the Sargasso Sea
MKQYIQALEHILEKGKQRDDRTGVGTRGVFGYQMRFDLRNSFPAVTTKKLAWKSVVSELLWFLEGST

SEQ ID NO: 106312 - protein, 115 aa, Unknown
  Bacterial polypetide isolated from the Sargasso Sea
MKQYIQALEHILEKGKQRDDRTGVGTRGVFGYQMRFDLRNSFPAVTTKRLAWKSVVSELLWFLEGSTDERRLAEIHFGKKREDIFDKKTIWTANANKQGVELGYVNNQTQKELGP

SEQ ID NO: 106313 - protein, 59 aa, Unknown
  Bacterial polypetide isolated from the Sargasso Sea
MRQYLDLLSRILDEGEAKEDRTGTGTLSLFGHQMRFDLKEGFPAITTKRVHWPSVIHEY

SEQ ID NO: 106314 - protein, 96 aa, Unknown
  Bacterial polypetide isolated from the Sargasso Sea
SCDMFLGVPFNIASYSLLIHILAKDCGYQVGEFILSLGDFHIYEEHFDQVKIQLTREPKAQPHLQFEQKKINEYKTSDFELINYEHHPKIVASMNV

SEQ ID NO: 106315 - protein, 207 aa, Unknown
  Bacterial polypetide isolated from the Sargasso Sea
MRTYDYCRSHNIGIFKKSSMKAYLDLLKFILENGQEKEDRTNTGTISSFGHQLEFDLNDGFPAVTTKSLAWKGVVSELLWFLEGSDDERRLAEIRFNKNRDQLKDLDKYSTIWTDNADNQGKQLGYENTDTKKILGPVYGVQWRNWSGRDQLEDLLNNLKNNPDGRRHILSAWNVGEIDKMALPPCHVMSQFYIHENEISCHMYQRS

SEQ ID NO: 106316 - protein, 178 aa, Unknown
  Bacterial polypetide isolated from the Sargasso Sea
MKSYLNLLSHILENGEKREDRTNVGTISSFGHQLKFDLRDGFPAVTTKKLAWKGVVSELIWFLEGSDDERRLAEIRYNKDRDELIDIDKYPTIWTDNADNQGKDLGYENSSLVKKLGPVYGVQWRNWDDKDQIKELLDSLKNNPTSRRHILSAWNVAMIDKMALPPCHLLAQFYVSSD

SEQ ID NO: 106317 - protein, 292 aa, Unknown
  Bacterial polypetide isolated from the Sargasso Sea
MQQYLDVIRRVLESAKRKANRTGVDALSTFNVNYQIDLREGFPLLTTKEISWKNIVVENLWFLSGDTRIDLLRKHGCKFWEPWADDNGLVPSAYGNFWRNFPVHENGQAAFNDQIRYVVDELKARPQSRRLVVSAWAPGNAQTSALPPCHAFWVMNVQQGEHGDPLLCLHLTQRSCDVALGLPYNIAGYAFLLELISRFTGIKPGYFGHTLIDAHIYTAKADGSMAEYDHIPGLREQLAREPRALPRLEISPEIQHLGDISALLEADTESLLQTFRLHDYDPHPALTFKVAV

SEQ ID NO: 106318 - protein, 95 aa, Unknown
  Bacterial polypetide isolated from the Sargasso Sea
MGVPFNIASYSLLVCIFSEILNLVPGEFIWTGGDCHIYNNHFEQVKKQIKRKPMKAPKLKIPKLKSIDDVLKSKPKEYILVDYNPMESIKAPMAV

SEQ ID NO: 106319 - protein, 103 aa, Unknown
  Bacterial polypetide isolated from the Sargasso Sea
MKNYLTALEYCFVSGNFVKSRAGNVKKAFGYQMRFNLEDGFPAVTTKRLAWKAVVSELLWFLEGSNDERRLAEIQYEDKKANLKDKKTIWTQNANARLLEKQI

SEQ ID NO: 106320 - protein, 121 aa, Unknown
  Bacterial polypetide isolated from the Sargasso Sea
MKQYIQALEHILEKGKQRDDRTGVGTRGVFGYQMRFDLRNSFPAVTTKRLAWKSVVSELLWFLEGSTDERRLAEIHFGKKREEIFDKKTIWTANANKQGVELGYINNQTQKELGPVYGKQW

SEQ ID NO: 106321 - protein, 31 aa, Unknown
  Bacterial polypetide isolated from the Sargasso Sea
MKQYLDLMRHVREHGTFKEDRTGTGTYSVFG

SEQ ID NO: 106322 - protein, 52 aa, Unknown
  Bacterial polypetide isolated from the Sargasso Sea
MKQYLDLLKHIKDNGVEKKDRTGTGNIRCFGHQMRFNLSDGFSWVLQRNTFK

SEQ ID NO: 106323 - protein, 197 aa, Unknown
  Bacterial polypetide isolated from the Sargasso Sea
MYSYDDYWIFYVVIFQEKNMKAYLDLLQYILENGEEKSDRTNTGTISSFGHQFEFDLQKGFPAVTTKSLAWKGVVSELLWFLEGSDDERRLAEIRFNKDRSELTDLEKYSTIWTDNADNQGKELGYENSDTKKILGPVYGVQWRDWCGIDQIKDLLKGLKENPDGRRHILSAWNVGEIEKMALPPCHVMSQFYIHNN

SEQ ID NO: 106324 - protein, 100 aa, Unknown
  Bacterial polypetide isolated from the Sargasso Sea
LYQRSCDMFLGVPFNIASYSLLTHIIAKECSLEVGEFIHTLGDFHIYEEHYDKVKIQLERNTKKLPTLFFEKKRLEDYQVDDFILKNYNHHESLIAKMNV

SEQ ID NO: 106325 - protein, 146 aa, Unknown
  Bacterial polypetide isolated from the Sargasso Sea
MKQYLDALKYCFENGTDVESRAGKVRKSFGIQMRFDLQKGFPAITTKKLAWKSVVSELLWFIEGSNDERRLAEILYDDKRENLRDKKTIWTQNAKADYWKPNAKFDGDVGKIYGVQWRDFNGEDQLSNLIDGLKKDPNGRRHIISS

SEQ ID NO: 106326 - protein, 272 aa, Unknown
  Bacterial polypetide isolated from the Sargasso Sea
MKSYLDLVQHVLDNGVLKKNRTGTDTLMSFGYHYKVDLAKGFPLLTTKKVFFNSVIHELLWYLSGETHIRNLRQHTKIWDAWTSEDKNWEVGKMYGYQWVNWEKFNEDKLTGEIHKEYINQIDEALKLIKNNPDSRRIIVSAWNPSVLDQIALPSCHAFFIFSVVNNKLNCHLTQRSGDIALGIPFNLACYATLTQMMAQETNLELGEFSHYINDAHIYVNHIDGMKEQLKRKPYDLPTLIIKDKPFWDLKFEDFELKNYKHHPVIKFPVAV

SEQ ID NO: 106327 - protein, 104 aa, Unknown
  Bacterial polypetide isolated from the Sargasso Sea
MYQRSADMFLGVPFNIASYALLLSIFAEILDLKPKKFVHSFGDAHIYLNSIDQVKEQLERKPKKLPKLILPKLKCIDDLKEYTVNDFKLENYDHHPAIKAKMAI

SEQ ID NO: 106328 - protein, 88 aa, Unknown
  Bacterial polypetide isolated from the Sargasso Sea
MKQYIKALEHILENGKQRDDRTGVGTKGVFGYQMRFDLRNSFPAVTTKKLAWKSVVSELLWFLEGSTDERRLAEIHFGKKRNEIVDKK

SEQ ID NO: 106329 - protein, 42 aa, Unknown
  Bacterial polypetide isolated from the Sargasso Sea
MQAYLDLLNHLLENGVKREDRTGTGTLGCFGYQMRFDLSEGF

SEQ ID NO: 106330 - protein, 176 aa, Unknown
  Bacterial polypetide isolated from the Sargasso Sea
MKQYLELLDYILQHGEDRGDRTGTGVISSFGHQIRFNLEDGFPAVTTKSLAWKGVVSELLWFLEGSDDERRLAEIRFKKDRSELTDLSKFSTIWTDNADNQGVELGYENTETTKKLGPVYGVQWRDWGGVDQIKKLINDLQSNPNGRRHILSAWNVEKIDSMALPPCHVMSQFLFK

SEQ ID NO: 106331 - protein, 133 aa, Unknown
  Bacterial polypetide isolated from the Sargasso Sea
MKQYIKALEHILKNGKQRDDRTGVGTRGVFGYQMRFDLRNSFPAVTTKKLAWKSVVSELLWFLEGSTDERRLAEIHFGKKRDEIVDKKTIWTANANKQGVELGYLNNETQKERGPVYGKPVEVLGQRCWAEKT

SEQ ID NO: 106332 - protein, 166 aa, Unknown
  Bacterial polypetide isolated from the Sargasso Sea
LRQCLDTIMQNPADRRILFHAWNPALLDQIALPACHLLYQFVPNVARREISLCLYIRSNDVGLGTPFNLTEGAALLHLVGRLTGYTPRWFTYFIGDAHIYENQLDMLQQQLTREPYESPAFAISDRVPDYAKTGVYEPEWLEKIEPSDFSLVGYRHHEPLTAPMAV

SEQ ID NO: 106333 - protein, 116 aa, Unknown
  Bacterial polypetide isolated from the Sargasso Sea
QFYIHNNSISCHMYQRSADMFLGVPFNIASYALLLSIFAEILDLQPKRFIHSFGDAHIYKNSIDQVKEQISREPKPLPNLKIPKINSLEDIKKYSVDDFILENYDPHPPIKAEMAV

SEQ ID NO: 106334 - protein, 98 aa, Unknown
  Bacterial polypetide isolated from the Sargasso Sea
ICSYGVPFNIASYALLLSIFAEILGLKPKRFIHSFGDAHIYKNSIEQVKEQISRTPRSLPKLILPELNSIDDLKKYSIDDFILEDYDPHPQIKAEMAV

SEQ ID NO: 106335 - protein, 95 aa, Unknown
  Bacterial polypetide isolated from the Sargasso Sea
LGVPFNIASYSLLVCIFSEILNLVPGDFIWTGGDCHIYNNHFEQVKKQIKRKPMKAPKLKIPKLKSIDDVLKSKPKEYILVDYNPMESIKAPMAV

SEQ ID NO: 106336 - protein, 535 aa, Unknown
  Bacterial polypetide isolated from the Sargasso Sea
MNYGFIIDNRLCIGCHACTVACKSEHDVPIGVNRTHVKYIEKGTFPNSSREFSVHRCNHCADAPCVEICPTTALYTRSDGIVDFDNDRCIGCKSCMQACPYDALYIDPDSHTAAKCNYCAHRLDGGYEPACVIVCPVEAIVSGDMDDPNSKISDLLTSEKVMARKPEKMTQPNLYYINGTNEMLDPNAAKPDWEYVWSEQSKGVGHYAKYADKRVSESDTENLLIQLAMENSARSGKPLDQRSIDQVAKEIQQDVDEKKARRVYDSPSKGVLWGWEVTSYVWTKAIATGTFLMMAIYQFINGPLDHTVEISGLYITLIFMGITGALLIKDLDRPDRFLYVLLRPQWRSWLVRGAYIITVFGGLVTLLLIDHYLDLGFYWVWSLGAVFAILGAIYTAFLFDQARARDLWQTPYIGAIHMLVHAIIAGSVSMIIIDPESIIIMRSILYFSILLNVLIIAKEVLIPHNTPDSKKAIQLMTNGYYSRYFWPGLILGSLLPFMILTANTGFDLVAGLLALIGIFLTEFVRIRVPQMIPLS

SEQ ID NO: 106337 - protein, 142 aa, Unknown
  Bacterial polypetide isolated from the Sargasso Sea
RRHILSAWNVAMIDKMALPPCHLLAQFYVSSDQSLDCHMYQRSADMFLGVPFNIASYSLLMHILGKVLDLTPRYFIHSFGDAHIYLNSVDQVKEQIKRTPRGLPQLKFPDINNLEDLKGLSLDDFVLEGYDPHPAIKAKMAI

SEQ ID NO: 106338 - protein, 195 aa, Unknown
  Bacterial polypetide isolated from the Sargasso Sea
MKQYISLLENVIRNGVQKEDRTGTGTRSIFGWQMRFDLSKGFPLLTTKKLHFKSIAYELLWFIRGDTNIEYLNKNGVSIWDEWADENGDLGPVYGSQWRSWPTRDGGSIDQLLKVVQDIKSNPNSRRMIVSAWNPEYVEEMALPPCHCLFQFYVANNKLSCQLYQRSADIFLGVPFNIASYSLLTEMIAKSCDLE

SEQ ID NO: 106339 - protein, 137 aa, Unknown
  Bacterial polypetide isolated from the Sargasso Sea
SKLSFSDNVANNKAALPPCHAFFQFYVSNDKLSCQLYQRSADVFLGVPFNIASYALLTMMIANVCNYKFGEFIHTFGDVHIYLNHMDQINEQLGRIPKPLPKIKINPGIKNIFDFKYSDFELIGYDPHPLIKGKVAI

SEQ ID NO: 106340 - protein, 252 aa, Unknown
  Bacterial polypetide isolated from the Sargasso Sea
MKQYLDLLDHILKNGEDRGDRTGTGVISSFGHQIRFDLKDGFPAVTTKSLAWKGVVSELLWFLEGSDDERRLAEIRFEKDRSELTDLSKFSTIWTDNADNQGIKLGYENNDITKKLGPVYGVQWRDWGGVDQIKKLLNEIKSNPNGRRHILSAWNVEQLDSMALPPCHVMSQFYVSESGRLSCQMYQRSADMFLGVPFNIASYALLQSILANILNLVPGEFIHTFGDAHIYKNSLEQVKEQLSRVPKKLPKL

SEQ ID NO: 106341 - protein, 62 aa, Unknown
  Bacterial polypetide isolated from the Sargasso Sea
FYISENKLSCQLYQRSCDMFLGVPFNIASYSLLTHMLARECNLEVRKIYSFFGRFPYIRRAF

SEQ ID NO: 106342 - protein, 193 aa, Unknown
  Bacterial polypetide isolated from the Sargasso Sea
LKDNKVTIWDEWADQDGELGPVYGSQWRSWPTHDGKKVDQLTQVIESIKNNPNSRRHIVSAWNVSLIDEMALPPCHILFQFYVADGKISCQLYQRSADVFLGVPFNIASYALLTMMIAQVCNLKPKEFILTLGDAHLYHNHLDQAKLQLEREPKKLPSLEINKDIKNLFDFSYEDFKIQEYYPHPAISAPIAV

SEQ ID NO: 106343 - protein, 47 aa, Unknown
  Bacterial polypetide isolated from the Sargasso Sea
MKQYLDLMKLVKENGTKKEDRTGTGTLSIFGHQMRFDLEEGFPSFNN

SEQ ID NO: 106344 - protein, 180 aa, Unknown
  Bacterial polypetide isolated from the Sargasso Sea
MKQYLDLLRHVREHGTYKEDRTGTGTYAVFGYQMRYDLSQGFPMLTTKKLHLRSIIHELLWFLSGDTNIRYLKENGVSIWDGWATPEGELGPVYGEQWRSWKTADGGVIDQITEVLEEIKRNPDSRRLVVSAWNPAVLPDPSISPDANAAAGKQALPPCHCLFQFYVADGKLSCQLYQRR

SEQ ID NO: 106345 - protein, 262 aa, Unknown
  Bacterial polypetide isolated from the Sargasso Sea
MQEYLDLLEKVKNSGKPKGDRTGTGTISVFGHQMRFNLEDSFPLLTTKKIHFKSVAYELLWFLKGDTNINYLKENGVSIWDEWADKNGDLGPVYGKQWRKWEGKNNIHDQVTEVIKQIKDNPDSRRHIVSAWNVADIPSMALAPCHILFQFYVQDGKLSCQLYQRSADIFLGVPFNIASYSLLTHMIANICDLKVGEFVHTLGDAHLYTNHLEQAEEQLSRKPLDPPQIIVKDKESIDDYEFEDFEIVNYQFHPHIPAKVAI

SEQ ID NO: 106346 - protein, 91 aa, Unknown
  Bacterial polypetide isolated from the Sargasso Sea
MQEYLDLLKKVKETGGHKDDRTGTGTLSIFGHQMRFNLRDSFPLLTTKKIHFHSVAHELLWFLKGETNIKYLKDNSVRIWDEWADDNGDLG

SEQ ID NO: 106347 - protein, 91 aa, Unknown
  Bacterial polypetide isolated from the Sargasso Sea
MKQYLDLVQHVMDNGVSKNDRTGTGTKSIFGYQMRFNLEDGFPLITTKKLHLKSIIYELLWFLKGDTNIKYLQDNGVKIWDGWADKNGDLG

SEQ ID NO: 106348 - protein, 174 aa, Unknown
  Bacterial polypetide isolated from the Sargasso Sea
MKQYLDLLKHIKENGVEKKDRTGTGTISVFGHQMRFNLQDGFPLVTTKKLHLRSIIHELIWFINGETNIKYLKDNGVTIWDEWADRNGDLGPIYGHQWRNWNSDGVDQLNDVINSLKTNPFSRRMIVTAWNPNIIPDSKKSFEENVKNGKAALPPCHAFFSFYVSDNKLSCQMY

SEQ ID NO: 106349 - protein, 265 aa, Unknown
  Bacterial polypetide isolated from the Sargasso Sea
MKAYLDLLKFILENGQEKKDRTNTGTISSFGHQLEFDLSDGFPAVTTKSLAWKGVVSELLWFLEGSDDERRLAEIRFSKHRDQLKDLDKYSTIWTDNADNQGKQLGYENSDTKKILGPVYGVQWRNWSGKDQLENLIHNLKNNPDGRRHILSAWNVGEIDKMALPPCHVMSQFYIHENEISCHMYQRSADMFLGVPFNIASYALLLSIIAEILNLKPKRFIHSFGDAHIYKNSIEQVKQQLSRKPKASPKLKLPNLSSINDLNNC

SEQ ID NO: 106350 - protein, 313 aa, Unknown
  Bacterial polypetide isolated from the Sargasso Sea
SIRFIIEFYRQPDSHMGYIVFDTLSMGQILCIPMIICGLHYIGIFEKSMKAYLDLLKFILENGQEKKDRTNTGTISSFGHQLEFDLSDGFPAVTTKSLAWKGVVSELLWFLEGSDDERRLAEIRFSKHRDQLKDLDKYSTIWTDNADNQGKQLGYENSDTKKILGPVYGVQWRNWSGKDQLENLIHNLKNNPDGRRHILSAWNVGEIDKMALPPCHVMSQFYIHENEISCHMYQRSADMFLGVPFNIASYALLLSIIAEILNLKPKRFIHSFGDAHIYKNSIEQVKQQLSRKPKASPKLKLPNLSSINDLNNC

SEQ ID NO: 106351 - protein, 177 aa, Unknown
  Bacterial polypetide isolated from the Sargasso Sea
DLKKLLGPVYGVQWRHWAGIDQIKELINGLKNNPNSRRHILSAWNVGEIDKMALPPCHVMSQFYINKGYISCHMYQRSADMFLGVPFNIASYALLLSIIAEILDLKPKRFIHSFGDAHIYKNSIEQVKEQVTRKPRTLPKLVIPKLDTIDDLIKCSIDDFILEGYDPHPPIKAKMAV

SEQ ID NO: 106352 - protein, 197 aa, Unknown
  Bacterial polypetide isolated from the Sargasso Sea
NIGYLRDNKVSIWDEWADENGDLGRVYGAQWTDWKKPDGGSVHQIEEVIRSIRENPESRRHLVCAWNPGELHIMALPPCHALFQFYVADGKLSCQLYQRSADLFLGVPFNIASYALLTMMVAKICNLQAYEFVHSFGDLHLYANHKDQAELQLSRDPRPSPKMLIHGDQREISDFVFEDFELTDYSPHPAIKAPIAV

SEQ ID NO: 106353 - protein, 185 aa, Unknown
  Bacterial polypetide isolated from the Sargasso Sea
DLGPVYGFQWRHSGAKYINFETNYEGQGVDQLQKAIEMLKKDPFNRRNIVCAWNPSDLSQMALPPCHLMFQWYVEANNRLSLQMYQRSGDSFLGVPFNIASYSMLIHMVAWVTGLTPGRFIHIIGDFHAYEEHLTAIKEQIERNPYPFPKVQFKRQINEIDDFKLEDIEIIDYKCHQTIKAKMVV

SEQ ID NO: 106354 - protein, 123 aa, Unknown
  Bacterial polypetide isolated from the Sargasso Sea
ALPPCHCLFQFYVADGKLSCQLYQRSCDIFLGVPFNIASYALLTMMVAQVCDLEPGDFVYTMGDAHLYANHLDQADFQMTRERLPLPTLKINPDVNDLFAFTFEDFELVGYEAHPHIAAPIAV

SEQ ID NO: 106355 - protein, 54 aa, Unknown
  Bacterial polypetide isolated from the Sargasso Sea
MKQYHDLVKHVLENGTEKSDRTGTGTKSVFGYQMRFDLQKGFPLVTTKKLHLKS

SEQ ID NO: 106356 - protein, 98 aa, Unknown
  Bacterial polypetide isolated from the Sargasso Sea
KRRHFLGVPFNIASYALLVLMIAKATDLIAGDFVHTLGDAHLYLNHLNQVDEQLAREPNESPRMIISRESKNIFDYKYEDFSLEGYNYHPHISAPIAI

SEQ ID NO: 106357 - protein, 158 aa, Unknown
  Bacterial polypetide isolated from the Sargasso Sea
MKQYLDLMRLVLDTGSEKIDRTGVGTISTFGHQMRFNLEDGFPILTTKKLHLKSIIHELIWFLQGDTNINYLNQHGVRIWNEWADESGELGPVYGEQWRSWPAGDGETIDQISELVLGLKNNPDSRRHLVTAWNPAVLNKMALPPCHCLFPVLCFQRK

SEQ ID NO: 106358 - protein, 172 aa, Unknown
  Bacterial polypetide isolated from the Sargasso Sea
GPVYGVQWRNWSGVDQIKKLLNDIKSNPYGRRHILSAWNVEQLDYMALPPCHVMSQFYVSESGRLSCHMYQRSADMFLGVPFNIASYALLQSILANILNLVPGEFIHTFGDAHIYKNSLEQVKEQLTRTPKKLPKLVMPQLESIDALKNCSVSDFILEGYESHPALKAKMAI

SEQ ID NO: 106359 - protein, 216 aa, Unknown
  Bacterial polypetide isolated from the Sargasso Sea
KIHFPSIVHELLWFLKGDSNIRYLNENGITIWDEWADENGDLGRIYGVQWRSWRNSKGESIDQISNLMNTLKNEPDSRRHIVSSWNVGDLSNMNLPPCHALFQFYVVDNKLSCQLYQRSADVFLGVPFNIASYALLASMIAKTLSFDLGDFIHTLGDAHLYTNHIDQAKLQLTREPKKLPELVILNKRDDIFSYQFDDFKLTNYDSHDHIKAPVSV

SEQ ID NO: 106360 - protein, 230 aa, Unknown
  Bacterial polypetide isolated from the Sargasso Sea
MKQYLDLMRHVREHGTFKTDRTGTGTYSVFGHQMRFDLAEGFPLVTTKKCHLKSIIHELLWFLQGDTNIKYLKENGVRIWDEWADENGELGPVYGYQWRSWPAPNGESIDQIANLLAMIKKNPDSRRLIVSAWNPALVEQMALPPCHALFQFYVADGKLSCQLYQRSADIFLGVPFNIASYALLTLMVAQVCDLQPGEFIWSGGDCHLYANHLEQADLQLTREPLSLPTM

SEQ ID NO: 106361 - protein, 288 aa, Unknown
  Bacterial polypetide isolated from the Sargasso Sea
MKQYIKALEHILKKGKQRDDRTGVGTKGVFGYQMRFDLRNSFPAVTTKKLAWKSVVSELLWFLEGSTDERRLAEIHFGKPREEIVDKKTIWTANANKQGVELGYLNSETQKELGPVYGKQWRSWGKDFGGEDQIKKIILDLKNNPNSRRHIVSAWNVEKIDKMALPPCHTMFQFHIQDKELSCQLYQRSADMFLGVPFNIASYSLLVCIFSEILDLKPGDFIWTGGDCHIYNNHFEQVKEQIQRKPMQLPTLQIPKFNSIEEVLKSTPKDFKLIDYSPMKSINAPMAV

SEQ ID NO: 106362 - protein, 186 aa, Unknown
  Bacterial polypetide isolated from the Sargasso Sea
MKNYLDALKYCYENGDFVKSRAGNVKKSFGYQMRFNLENGFPAVTTKKLAWKAVVSELLWFLEGSNDERRLAEILYDDIRENLEDKKTIWTQNAEADYWKDKSKFIGDVGKIYGVQWRNFNGIDQIQELIEGLKKNPNSRRHILTAWNPSEINEMSLPPCHAFSQFFVSNNKLSCQLYQRSCDMFL

SEQ ID NO: 106363 - protein, 175 aa, Unknown
  Bacterial polypetide isolated from the Sargasso Sea
KARFEGDVGKIYGFQWRNFNGEDQLENLIRGLKNDPNGRRHIISSWNPPELKNMSLPPCHVFSQFFISKNKLSCQLYQRSCDMFLGVPFNIASYSLLTHMLAKECNLEVGTFIHSLGDFHIYEEHFEQVKIQLERLPKKLPILDFETKNFYDYNINDFKLLDYKHDPKIEASMNV

SEQ ID NO: 106364 - protein, 249 aa, Unknown
  Bacterial polypetide isolated from the Sargasso Sea
MKQYLDLCQRIVDEGVWVENKRTGTKCLTVINADLEYDVANNKFPLITTRKSFYKAAIAELLGYLRGYDSAAQFRDIGCMTWNANANENKAWLENPHRRGEDDMGRVYGVQGRSWQRPDGSHLDQLKKVIDNLSKGIDDRGEIVTFYNPGEFELGCLRPCMHTHTFSLLGDTLYLTSYQRSCDVPLGLNFNQIQCFVLLALVAQITGHKPGKAYHKIANAHIYENQLELMRDVQLKREPFASPELKINP

SEQ ID NO: 106365 - protein, 227 aa, Unknown
  Bacterial polypetide isolated from the Sargasso Sea
MKQYIQALEHILEKGKQRDDRTGVGTRGVFGYQMRFDLRNSFPAVTTKRLAWKSVVSELLWFLEGSTDERRLAEIHFGKKREEIFDKKTIWTANANKQGVELGYVNNQTQKELGPVYGKQWRSWGKDVGGEDQIKKIIEDLKNNPNSRRHIVSAWNVDKIEEMALPPCHTMFQFHIQDKELNCQLYQRSADMFLGVPFNIASYSLLVCVFSEILNLVPGEFIWTGGD

SEQ ID NO: 106366 - protein, 251 aa, Unknown
  Bacterial polypetide isolated from the Sargasso Sea
MKNYLDALKYCYENGDFVKSRAGNVKKAFGYQMRFNLEDGFPAVTTKKLAWKAVVSELLWFLEGSNDERRLAEILYDDKRENLEDKKTIWTQNAEADYWKDKSKFIGDVGKIYGVQWRNFNGVDQIHELIDGLKKNPNSRRHILTAWNPSEINEMSLPPCHAFSQFFVSNNKLSCQLYQRSCDMFLGVPFNIASYSLLIHIIAEECKLGVGDFVHSLGDFHIYEEHFDQVKIQLTREPKQLPTLNFLPKKI

SEQ ID NO: 106367 - protein, 156 aa, Unknown
  Bacterial polypetide isolated from the Sargasso Sea
MKQYIEALKDCYQNGVDVDSRAGKVRKSFGYQMRFNLQDGFPAVTTKKLAWKAVVSELIWFLEGSNDERRLAEILYADKRENLSDKKTIWTQNAKADYWKNKANFDGDVGKIYGVQWRNFNGIDQIETLLEQIKKNPNSRRHILTAWNPAELDLMS

SEQ ID NO: 106368 - protein, 153 aa, Unknown
  Bacterial polypetide isolated from the Sargasso Sea
MEQYLDLLKEIKAKGTKKEDRTGTGTISIFGHQMRFNLQDGFPLVTTKKVNFNSILHELLWFVKGDTNIRYLVENNVNIWNEWPFQNWLEETNQIKNLEMHSQEWKDKLIGFIDLIKTDNAFAEQYGDLGPVYGKQWRDFEGIDQLKLVVDDL

SEQ ID NO: 106369 - protein, 181 aa, Unknown
  Bacterial polypetide isolated from the Sargasso Sea
MKQYLEALKYCFENGNDVQSRAGNVRKSFGFQMHYDLSRGFPAVTTKKLAWKSVVSELLWFIEGSDDERRLAEILYEDKRENLKHKNTIWTQNAESEYWKPKAKFEGDVGKIYGVQWRNFNGEDQLVNLINSLKTDPNGRRHILSSWNPPEIKNMSLPACHAFSQFFISNNQLSCQLYQRS

SEQ ID NO: 106370 - protein, 131 aa, Unknown
  Bacterial polypetide isolated from the Sargasso Sea
WNPEYVEEMALPPCHCLFQFYVADNKLSCQLYQRSADIFLGVPFNIASYSLLTEMIAKSCGLEASEFIITLGDAHLYDNHKEQANLQIKRELKNLPILKINKKDNIENYIYDDFEIIDYNPHPHISGKVAV

SEQ ID NO: 106371 - protein, 191 aa, Unknown
  Bacterial polypetide isolated from the Sargasso Sea
MKQYLDLMKYVRESGTEKGDRTGTGTLSVFGYQMRFNLEEGFPLVTTKKVHLKSIIYELLWFLKGSTNIDYLNEHGVSIWDEWADERGELGPVYGAQWRSWPTQDGSSIDQISEVINQITANPDSRRLIVSAWNVSQIDSMALPPCHAMFQFYVADGKLSCQLYQRSADIFLGVPFNIASYALLVLMMAKV

SEQ ID NO: 106372 - protein, 253 aa, Unknown
  Bacterial polypetide isolated from the Sargasso Sea
GTLSVFGRQFRHKLSDGFPLLTTKKLHLKSIINELIWFLNGDTNVGWLNDNGVSIWDEWATEQGDLGPIYGAQWTAWPGREGKLINQIDYVVDCLKNRPNSRRILFHAWNVDYLPDETKSAQENVKAGRMALPPCHLLYQFYVANGELSSQLMIRSSDTFLGLPYNTASLAVLTMMLAQQANLGLGEIIICTGDSHIYNNHLNQAKIQLKREPKNLPKLEILRRPESIYDYRFEDFHLLDYDPYPNISAPIAV

SEQ ID NO: 106373 - protein, 179 aa, Unknown
  Bacterial polypetide isolated from the Sargasso Sea
MQQYLTLLRRILDEGVDRDDRTGTGTRAVFGHQMRFDLADGFPLLTTKKLHIKSIVHELLWFISGSTNIHYLQKNGVSIWDDWADENGDLGPVYGKQWRHWQTPDGRKIDQLADLIEMIKTNPNSRRLLLTAWNPADVPNMALPPCHCLFQFQVANGRLSCQLYQSSADSFLGVPFNIA

SEQ ID NO: 106374 - protein, 232 aa, Unknown
  Bacterial polypetide isolated from the Sargasso Sea
TTKKCHLKSIIHELLWFLKGETNIAYLKEHGVSIWDEWATEEGELGPVYGHQWRSWDRGDGTSVDQIAEVVEQIKNNPDSRRLIVSGWNPAVLPDTSYSPKENAAMGKQALPPCHTLFQFYVLDGKLSCQLYQRSGDIFLGVPFNIASYALLTMMMAQVCDLEPGDFIHTLGDAHLYSNHLEQVELQLSREPFARPTMEINPEVKDIFGFSFDDFTLKNYQSHPHIKAPVAI

SEQ ID NO: 106375 - protein, 235 aa, Unknown
  Bacterial polypetide isolated from the Sargasso Sea
RVILEDGFPLLTTKKVFFKSVLKELLWFIAGKTNINDGLDCGIWDPWADEEGNLGPVYGYQWRNWEKFNWDDRTQSYQKTSVDQLKIAIDMIKQNPDSRRIIVNAWNVGDLDKMALPPCHSFFQFYVINGRLDLQLYQRSADVAIGVPFNIASYSLLLMMVAQECNLKPGFFVHTFGDAHLYLNHIDGVKEQLKREPTELPQIKIAKKPFFELEYEDFELLNYEPAPFIKLPIAV

SEQ ID NO: 106376 - protein, 110 aa, Unknown
  Bacterial polypetide isolated from the Sargasso Sea
FVSNNKLSCQLYQRSCDMFLGVPFNIASYSLLIHIIAEECKLGVGDFVHSLGDFHIYEEHFDQVKIQLTREPKQLPTLKFFPKKMIDYKTSDFELHNYDPHPKILAPMNV

SEQ ID NO: 106377 - protein, 252 aa, Unknown
  Bacterial polypetide isolated from the Sargasso Sea
MRQYQDLLKLLLERGVKKQDRTGTGTISYFGHQMRFKLSEGFPLVTTKKIHFPSIVHELLWFLKGDSNIKYLNENGITIWDEWADENGDLGRIYGVQWRSWRNSKGESIDQISNLMNSLKNEPDSRRHIVSSWNVGDLSDMNLPPCHALFQFYVVDNKLSCQLYQRSADVFLGVPFNIASYALLTLMIAKTLGLGLGDFIHTLGDAHLYINHIDQAKLQITREPKKLPELVILNKRDDIFSYQFDDFKLTNY

SEQ ID NO: 106378 - protein, 108 aa, Unknown
  Bacterial polypetide isolated from the Sargasso Sea
MEQYLNLLTEIKSKGTKKEDRTGTGTISIFGHQMRFDLNDGFPLVTTKKVNFNAILHELLWFIKGETNIEYLVKNNVNIWNEWPFQSWLEKTNQNERLVMHSKEWKEK

SEQ ID NO: 106379 - protein, 115 aa, Unknown
  Bacterial polypetide isolated from the Sargasso Sea
KKELGPIYGKQWRSWGKEGEGVDQIKKIINDIKKDPHSRRHLVSAWNVEKIDQMALPPCHSMFQFYVQGGELSCQLYQRSADMFLGVPFNVASYSLLTHMLSQILDLKPAEFIWT

SEQ ID NO: 106380 - protein, 148 aa, Unknown
  Bacterial polypetide isolated from the Sargasso Sea
AWNVAMIDKMALPPCHLLAQFYVSSDQSLDCHMYQRSADMFLGVPFNIASYSLLMHILGKVLDLTPRYFIHSFGDAHIYLNSVDQVKEQIKRTPRELPQLKFPDINNLEDLKDLSLDDFILEGYDPHPAIKAEDGNLELTLILNIVSS

SEQ ID NO: 106381 - protein, 170 aa, Unknown
  Bacterial polypetide isolated from the Sargasso Sea
GDVGKIYGVQWRNFNGVDQIHELIEGLKKNPNSRRHILTAWNPPELNEMSLPPCHAFSQFFVSNKKLSCQLYQRSCDMFLGVPFNIASYSLLIHIIAEECKLGVGDFVHSLGDFHIYEEHFDQVKIQLTREPKQLPTLKFLPKKMSDYKTADFELHNYDPHPKIIAPMNV

SEQ ID NO: 106382 - protein, 125 aa, Unknown
  Bacterial polypetide isolated from the Sargasso Sea
INEMSLPPCHAFSQFFVSNKKLSCQLYQRSCDMFLGVPFNIASYSLLIHIIAEECKLGVGDFVHSLGDFHIYEEHFDQVKIQIKRKPKQLPILEFSPKKMSDYKTADFELHNYDPHPKIVAPMNV

SEQ ID NO: 106383 - protein, 144 aa, Unknown
  Bacterial polypetide isolated from the Sargasso Sea
IKSDPNGRRHILSAWNPAELHLMSLPPCHAFSQFYVSQNKISCQLYQRSCDMFLGVPFNIASYSLFLHLLAAECSLEVGEFILTLGDYHIYHEHFEAVEEQISRKPKQLPNLEFIKKNIFDYSLRDFTLENYDPHPTIKATMNV

SEQ ID NO: 106384 - protein, 286 aa, Unknown
  Bacterial polypetide isolated from the Sargasso Sea
KQYLRLIGDILSEGTLEEGRNGKTMSIFGSSMHFSLENNVIPLLTTKKVAWKTCLRELLWFMRGDTSNDRLLEKNVKIWSANASRSFLDSRGLTNLRENDLGPVYGHQWRFFNAEYKDCDTDYTGKGVDQLQYIIDQLKNPETRNSRRLVMSAWNPCQLDEMALPPCHVLTQFNVSGGNKLSCALYQRSGDVGLGVPFNIASYSFLTHIIAKHCDLEPYQFIYNLGNAHIYDDHIQQLKEQQQRNCYEFPTITIKNKHENINDYDESDIEIHNYHCHETVKMKMRE

SEQ ID NO: 106385 - protein, 248 aa, Unknown
  Bacterial polypetide isolated from the Sargasso Sea
MNQYLKALNNCLNNGVDVESRAGKVRKAFGYQMRFDLKIGFPIITTKKMAWRSIVSELLWFLEGSNDERRLAEIHYGKPKSELKDKSTIWTRNLQADYWKEKSQFDGDLGKIYGYQWRNFGGIDQIKDLIESLKNNQDSRRHIISSWNPGQLKEMALPPCHILAQFYVANNKISCQLYQRSCDMFLGVPFNISSYSLLTHILAKECNFEIGEFIHTLGDYHIYHAHLKQVKEQLKCDPKKLPSLKFDK

SEQ ID NO: 106386 - protein, 87 aa, Unknown
  Bacterial polypetide isolated from the Sargasso Sea
IASYALLTHMIADITNLDVGFFVHTLGDAHLYLNHQDHAKEQLTRKPRDLPTLVINEKRKSIDEFQFDDFTFQNYAPDPHIKAPIAV

SEQ ID NO: 106387 - protein, 197 aa, Unknown
  Bacterial polypetide isolated from the Sargasso Sea
MKQYISLLENVIRNGVQKEDRTGTGTRSIFGWQMRFDLSKGFPLLTTKKLHFKSIAYELLWFIRGDTNIEYLNKNGVSIWDEWADENGDLGPVYGSQWRSWPTRDGGSIDQLLKVVQDIKSNPNSRRMIVSAWNPEYVEEMALPPCHCLFQFYVANNKLSCQLYQRSADIFLGVPFNIASYSLLTEMIAKSCDLEAT

SEQ ID NO: 106388 - protein, 255 aa, Unknown
  Bacterial polypetide isolated from the Sargasso Sea
MQEYLDLLKKVKDSGKPKGDRTGTGTLSIFGHQMRFDLQDSFPLLTTKKIHFKSVAYELLWFLKGDTNIKYLKDNGVSIWDEWADENGDLGPVYGKQWRDWKGANGFHDQISNVIDQIKNNPNSRRHIVSAWNVAEIPSMALAPCHILFQFYVQEGKLSCQLYQRSADIFLGVPFNIASYALLTHMIANVCDLEVGDFVHTLGDAHLYNNHLTQATEQLSRTPLKPPQIKVAKKNSIDDYVFEDFEIIDYEHHPH

SEQ ID NO: 106389 - protein, 60 aa, Unknown
  Bacterial polypetide isolated from the Sargasso Sea
MKQYLDLMRYVREKGTKKEDRTGTGTLSVFGYQMRFDLEEGFPLITTKKIHLKSIIYELL

SEQ ID NO: 106390 - protein, 266 aa, Unknown
  Bacterial polypetide isolated from the Sargasso Sea
MGETKDDRTGVGTIGIFGAQLKFNLNEGFPAVTTKKLAWKGVVSELLWFLEGSDDERRLAEIRYNKTRSELDDLDKYKTIWTDNADNQGKALGYQNDNLVKKLGPVYGVQWRSWNGIDQVKDLLSNLQTNPHSRRHILNAWNVSEIERMALPPCHVMSQFYVGEDDSLSCHMYQRSADMFLGVPFNIASYALLTHIFASILDLKVGAFVHSFGDCHIYLNAIEQVKEQISRKPLKLPELVMPKIYSIDNIAELRVSEFKLQGYEHH

SEQ ID NO: 106391 - protein, 115 aa, Unknown
  Bacterial polypetide isolated from the Sargasso Sea
MIQYLELLKNVFDNGIIKKDRTGVGTKSIFGWQMRFDLSKGFPLLTTKKLHIKSIVHELLWFVKGDTNIQYLNDNDVHIWDDWADDKGNLGPVYGKQWRSWENNGVEIDQLKNAI

SEQ ID NO: 106392 - protein, 264 aa, Unknown
  Bacterial polypetide isolated from the Sargasso Sea
AYLDLLQYILENGEEKSDRTNTGTISSFGHQFEFDLEKGFPAVTTKSLAWKGVVSELLWFLEGSDDERRLAEIRFNKDRSELTDLEKYSTIWTDNADNQGKELGYENSDTKKILGPVYGVQWRNWCGIDQIKDLLKGLKENPDGRRHILSAWNVGEIEKMALPPCHVMSQFYIHNNSISCHMYQRSADMFLGVPFNIASYALLLSIFAEILDLQPKRFIHSFGDAHIYKNSIDQVKEQISREPKSLPNLKIPKINSLEDIKKIQ

SEQ ID NO: 106393 - protein, 81 aa, Unknown
  Bacterial polypetide isolated from the Sargasso Sea
MKQYLDILSHVLKHGVEKEDRTGTGTLSCFGYQTRFDLDKGFPLVTTKKLHTKSIIYELLWFLKGDNNTQYLKDIWCNNLG

SEQ ID NO: 106394 - protein, 171 aa, Unknown
  Bacterial polypetide isolated from the Sargasso Sea
MKNYLNALQYCFENGDLVKSRAGNVKKAFGYQMRFNLDEGFPAVTTKKLAWKAVVSELLWFLEGSNDERRLAEILYEDKRENLNDKKTIWTQNAEADYWKHKSKFVGDVGKIYGVQWRNFNGVDQIGKLIDGLKKNPDSRRHILTAWNPSELNDMSLPPCHAFSQFFVSNK

SEQ ID NO: 106395 - protein, 240 aa, Unknown
  Bacterial polypetide isolated from the Sargasso Sea
PFNLNDGFPILTTKKIHFKSIVYELLWFLKGDTNIKYLTDNGIRIWNEWADKKGNLGPVYGKQWRNWNNEGIDQIKLAIDTLKKNPDSRRILISAWNPSVLPDNKLSFSENVANNKAALPPCHAFFQFYVSNHQLSCQLYQRSADVFLGVPFNIASYALLTMMIANVCNLRLGEFIHTFGDVHIYSNHMDQINEQLTRKPKPLPKIKINPAVKNIFNFKYTDFELIGYDPHPSIKGKVAV

SEQ ID NO: 106396 - protein, 190 aa, Unknown
  Bacterial polypetide isolated from the Sargasso Sea
MQSFESQYLDLLKDVLSNGSMRSNRTGVGTISAFSREMRADISQDFPVLTTKRIYWPAVVHELIWLLSGNTNIEYLKQHGVRIWDEWADANGNLGPVYGHQWRKWPTSDGKHIDQIANLIENLKNNPYSRRHIINAWNVGAIDEMALPPCHLLFQFYVTNDQKLNCKLFQRSADLFLGVPFNMLPTVYSS

SEQ ID NO: 106397 - protein, 101 aa, Unknown
  Bacterial polypetide isolated from the Sargasso Sea
MKQYLDLIKHVIEKGDEKGDRTGTGTKSVFGYQMRFNLQDGFPLVTTKKLHLKSIIYELLWFINGETNIKYLKENGVKIWDAWADKNGDLGPVYGSQWRNW

SEQ ID NO: 106398 - protein, 160 aa, Unknown
  Bacterial polypetide isolated from the Sargasso Sea
GIKGGIDQIKQIIHLLKTEPTSRRIILSAWNPVDLDKMSLPPCHVMTQFNVDGYYLDAQLYQRSGDMFLGVPFNIASYAFLLHILGKLTGYIPRYLHHVIGDCHIYKSHIDVVDKQLERVPLTMAKIEIGNIKDIDDVMEADIKIVDYKCDNIIKAQMVV

SEQ ID NO: 106399 - protein, 226 aa, Unknown
  Bacterial polypetide isolated from the Sargasso Sea
MLKRLSEHNKINGDCIHDENQYLNLIKDILEHGDMVKGRNGFAKTVIGSSMHFSLENNTIPILTTKKVAWKTCLKELLWFIRGSTSNKELQAENVKIWNGNASREFLDSRNLHHLEENDLGPVYGHQWRHFNAYYKNCEEDYSGEGVDQLQYIIDNLKNPETRTSRRLVMSAWNPVQLDEMALPPCHVLVQFNVTKQNRLSCSLYQRSGDVGLGVPFNIASYSFLT

SEQ ID NO: 106400 - protein, 155 aa, Unknown
  Bacterial polypetide isolated from the Sargasso Sea
DQITNLIADLKSNPDSRRLIVTAWNPSDVSDMALPPCHCLFQFYVARGKLSCQLYQRSADVFLGVPFNIASYALLTIMIAQVVDLCPGEFVHTLGDAHIYKNHIPQAELQLQRLPKKLPQMILDNEVRDIFGFCYESFDIKDYNPDAHIAAKVAV

SEQ ID NO: 106401 - protein, 37 aa, Unknown
  Bacterial polypetide isolated from the Sargasso Sea
MKEYLALMRHVRDTGVKKEDRTGTGTLSVFGYQMRFY

SEQ ID NO: 106402 - protein, 241 aa, Unknown
  Bacterial polypetide isolated from the Sargasso Sea
MKQYIQALEHILEKGKQRDDRTGVGTRGVFGYQMRFDLRNSFPAVTTKRLAWKSVVSELLWFLEGSTDERRLAEIHFGKKREEIFDKKTIWTANANKQGVELGYINNQTQKELGPVYGKQWRSWGKDVGGEDQIKKIIEDLKNNPNSRRHIVSAWNVDKIEEMALPPCHTMFQFHIQDKELNCQLYQRSADMFLGVPFNIASYSLLVCIFSEILDLVPGEFIWTGGDCHIYNNHFEQVKKQ

SEQ ID NO: 106403 - protein, 140 aa, Unknown
  Bacterial polypetide isolated from the Sargasso Sea
MKQYISLLENVIRNGVQKEDRTGTGTRSIFGWQMRFDLSKGFPLLTTKKLHFKSIAYELLWFIRGDTNIEYLNKNGVSIWDEWADENGDLGPVYGSQWRSWPTRDGGSIDQLHKVVQDIKKNPNSRRMIVSAWNPEYVEE

SEQ ID NO: 106404 - protein, 231 aa, Unknown
  Bacterial polypetide isolated from the Sargasso Sea
MHFDLEEGFPLVTTKKVHLKSIIHELIWFLAGSTNIKYLKDNGVSIWDEWADENGDLGPVYGAQWRSWPDSNGGKVDQIKNLVESIKYNPNSTRHIVSAWNPALVDEMALPPCHALFQFFVANKKISCQLYQRSADVFLGVPFNIASYALLTMMIAQVCNLKPGKFVHTLGDAHLYLNHLDQAKLQISRKPFNLPTIKINSEINRLEDFAYEDFEILNYESHPGISAPISV

SEQ ID NO: 106405 - protein, 207 aa, Unknown
  Bacterial polypetide isolated from the Sargasso Sea
AYELLWFLKGDTNINYLKENGVSIWDEWADENGDLGPVYGKQWRKWEGKNNIHDQVTEVITQIKNNPNSRRHIVSAWNVADIPNMALAPCHILFQFYVQDGKLSCQLYQRSADVFLGVPFNIASYSLLTHMIANICDLKVGEFVHTLGDTHLYTNHLEQAEEQLSRKPLTPPKIIVKNKESIDDYEFEDFELINYEFHPHIPAKVAI

SEQ ID NO: 106406 - protein, 242 aa, Unknown
  Bacterial polypetide isolated from the Sargasso Sea
TKRLAWKSVVSELLWFLEGSTDERRLAEIHFGKKREELFDKKTIWTANANKQGVELGYINNQTQKELGPVYGKQWRSWGKDVGGEDQIKKIIEDLKNNPNSRRHIVSAWNVDKIEEMALPPCHTMFQFHIQDKELNCQLYQRSADMFLGVPFNIASYSLLVCIFSEILNLVPGEFIWTGGDCHIYNNHFEQVKKQIKRKPMKAPKLKIPKLKSIDDVLKSKPKEYILVDYNPMESIKAPMAV

SEQ ID NO: 106407 - protein, 143 aa, Unknown
  Bacterial polypetide isolated from the Sargasso Sea
KEDPNGRRHIISAWNPPEIKNMSLPACHAFSQFFISKNKLSCQLYQRSCDMFLGVPFNIASYSLLTHMLARECSLEVGNFVHSLGDFHIYKEHFEQVKIQLERVPKKLPDLQFETKDFFKYNVEDFKLLNYQHHEKIDALMNV

SEQ ID NO: 106408 - protein, 80 aa, Unknown
  Bacterial polypetide isolated from the Sargasso Sea
MKQYLDLLQHIKEKGVKKEDRTGTGTISVFGYQMRFNLQEGFPLVTTKKLHLRSIIHELIWFINGETNIKYLKENGVTIW

SEQ ID NO: 106409 - protein, 131 aa, Unknown
  Bacterial polypetide isolated from the Sargasso Sea
AWNPSELDQKSLPPCHAFSQFFVSNNKLSCQLYQRSCDMFLGVPFNIASYSLLTHIIARECNLEVGDFVHTLGDYHIYHEHFTQVKLQLERSTKDIPSLEFETKKIEEYKTEDFKLINYDPHPSIIAEMNI

SEQ ID NO: 106410 - protein, 250 aa, Unknown
  Bacterial polypetide isolated from the Sargasso Sea
RDGFPAVTTKKLAWKGVVSELIWFLEGSDDERRLAEIRYNKNRDELTDIDKYPTIWTDNADNQGKNLGYENSSLVKKLGPVYGVQWRKWGDKDQIQELLDSIKNNPTSRRHILSAWNVSMIDKMALPPCHLLAQFYVSSDQSLDCHMYQRSADMFLGVPFNIASYSLLMHILGKILGLKPRYFIHSFGDAHIYLNSVDQVKEQIKRDPRPLPTLTFPEINSLEDLKSLNLDDFILDGYDPHPAIKAKMAI

SEQ ID NO: 106411 - protein, 192 aa, Unknown
  Bacterial polypetide isolated from the Sargasso Sea
MDNGVSIWNEWAGPDGDLGPVYGKQWRSWECRDGRSIDQISNLISNLKNSPHSRRHIISAWNVSDIENMALPPCHCLFQFYVSNNKLSCHLYQRSADVFLGVPFNIASYALLTHMIAHVCKYEVGDFVHTLGDAHIYSNHLGQVRVQLDRSPLRLPKLTLNETVTDIFNFKYEDIIISDYEAHPHIKAKVAV

SEQ ID NO: 106412 - protein, 258 aa, Unknown
  Bacterial polypetide isolated from the Sargasso Sea
MKQYLDLMRHVRENGVFKDDRTGTGTYSVFGYQMRFDLSEGFPLVTTKKTFLKGIIHELLWFLSGSTNIKYLVDHDVHIWDEWADEHGELGPVYGSQWRSWPGPDGKTIDQISRVVEDLKTNPDSRRHIVSAWNVAEVDEMALPPCHSLFQFYVADGRLSCQLYQRSADIFLGVPFNIASYALLNMMIAQVVDLEVGDFVHTLGDAHLYSNHIEQADKQLLREPRSLPTIRINPEVKDILGFKISDFELLEYDPHPGI

SEQ ID NO: 106413 - protein, 165 aa, Unknown
  Bacterial polypetide isolated from the Sargasso Sea
MQQYLEALKDCYQNGVDVDSRAGKVRKSFGYQMRFDLNEGFPAVTTKKLAWKAVVSELLWFLEGSDDERRLAEILYNDKRENLNDKKTIWTQNANSSYWKKKAKFEGDVGKIYGVQWRNFNGVDQIKNLIEGLKKEPNSRRHILTAWNPKEIDLMSLPAMSCFFS

SEQ ID NO: 106414 - protein, 223 aa, Unknown
  Bacterial polypetide isolated from the Sargasso Sea
MQEYLLALKHCYENGTDVSSRAGKVRKSFGYQMRFNLNNGFPAITTKKLAWKSVTSELLWFLEGSNDERRLAEILYQDKRENLINKKTIWTENANSDYWKEHSKFKGDVGRIYGVQWRDFNGVDQIKNLIEGIKTNPDGRRHILSAWNPAEIHLMSLPACHSFSQFYIVNNNLSCQLYQRSCDMFLGVPFNIASYSLLTHIIAAECNLNVGEFIHTFGDFHNI

SEQ ID NO: 106415 - protein, 181 aa, Unknown
  Bacterial polypetide isolated from the Sargasso Sea
MRQYLDLLKHIKDNGVKKADRTGTGTISVFGYQMRFNLQEGFPLVTTKKLHLRSIIHELIWFINGETNIKYLKDNGVTIWDEWADIDGNLGPIYGHQWRNWNSDGIDQLQDVIHSLKTNPSSRRMIVTAWNPNIIPDSKKSFNENVENGKAALPPCHAFFQFNVSNNKLSCQMYQRSADVF

SEQ ID NO: 106416 - protein, 185 aa, Unknown
  Bacterial polypetide isolated from the Sargasso Sea
YQDEEFASQYGDLGPVYGKQWRDFEGVDQLNNVIQDIKKSPDSRRLIVSAWNPKDIPVMIKSGLPPCHTLFQFYVSKGKLSCQLYQRSADVFLGVPYNIASYALLTLMIAKVTELEPGEFVHSFGDTHIYLNHLEQVNEQLSRDPHSLPKLEIIKNRSSIFEFDISDFELTEYNPHPFISAPIAV

SEQ ID NO: 106417 - protein, 167 aa, Unknown
  Bacterial polypetide isolated from the Sargasso Sea
WRSWPAPNGESIDQISKLIAMIKSNPDSRRLIVSAWNPALVDQMALPPCHALFQFYVADGKLSCQLYQRSADIFLGVPFNIASYALLTLMVAQVCDLQPGEFIWTGGDCHLYANHIEQTDLQLTREPLPLPTMQLNPEVRDLFAFRFEDFELQGYQAHPHIKAPVAV

SEQ ID NO: 106418 - protein, 112 aa, Unknown
  Bacterial polypetide isolated from the Sargasso Sea
YVADNKLSCQMYQRSADVFLGVPFNIASYALLTFMIAQVCELEIGEFVHTLGDAHIYLNHLEQVDLQLSRDPLELPKLKLNPIIKSIEDFKYEDVEIIDYKFHPPIKGKISI

SEQ ID NO: 106419 - protein, 117 aa, Unknown
  Bacterial polypetide isolated from the Sargasso Sea
MQQYLDLMKHILAEGVDKSDRTGTGTRSVFGYQMRFDLSKGFPLVTTKKCHMRSIIHELLWFLKGDTNIAYLRENKVSIWDEWADENGDLGPVYGAQWRSWPTQSGDAIDQIAQVIA

SEQ ID NO: 106420 - protein, 126 aa, Unknown
  Bacterial polypetide isolated from the Sargasso Sea
MALPPCHVMSHFYISNGTISCHMYHRSADMFLGVPFNIASYSLLLSIFAEILNLKPKKFVHSFGDAHIYLNSVEQVKEQISRKPFSPPKLILPKLNSLEDLSSYSIDDFKLEGYEHHPAIKAKMAV

SEQ ID NO: 106421 - protein, 228 aa, Unknown
  Bacterial polypetide isolated from the Sargasso Sea
WFLKGSTDERRLAEIHFEKPREEIADKKTIWTANANKQGVELGYQNNETQKELGPVYGKQWRSWGEDVGGVDQIKKIISDLKSNPNSRRHIVSAWNVDKIGEMALPPCHTMFQFHIQNKELSCQLYQRSADMFLGVPFNIASYSLLVYILSSILDLNPGSFIWTGGDCHIYNNHLNQVKEQVKREPLEAPTLIMPNFKSIEEVLKSKPTDYELLNYKPMDSIKAPMAV

SEQ ID NO: 106422 - protein, 97 aa, Unknown
  Bacterial polypetide isolated from the Sargasso Sea
CDTFLGLGFNIASYSLLTHMIAQQCDLDVGEFIWTGGDVHLYLNHLEQANEQLQREPYPLPTLKINRKPASIFEYKYEDFELINYESHPHISAPISI

SEQ ID NO: 106423 - protein, 247 aa, Unknown
  Bacterial polypetide isolated from the Sargasso Sea
KGDRTGTGTLSVFGYQMRFDLSEGFPMVTTKKLHLRSIVHELLWFLKGDTNVKYLQENGVRIWNEWADENGDLGPVYGKQWRKWESKDGRIIDQVEQAIEQIKNNPNSRRIIVSAWNVGELDEMALMPCHAFFQFHVADGKLNCQLYQRSADVFLGVPFNIASYALLTHMMAQVCGLEAGTFVHTLGDAHLYMNHLDQAREQISRDPLPLPTLKLDDSIMDIDAFTFESIEVVGYEHHPHISAPISV

SEQ ID NO: 106424 - protein, 93 aa, Unknown
  Bacterial polypetide isolated from the Sargasso Sea
MKQYLTLLKTVREDGVRKADRTGTGTLSVFGHQLRCDLGVGFPVLTTKKLHLRSIIYELLWFLRGETNTKYLTDHDVTIWDEWADEAGELGPI

SEQ ID NO: 106425 - protein, 264 aa, Unknown
  Bacterial polypetide isolated from the Sargasso Sea
MKQYLDLLDYVLKHGNVKDDRTGTGTKSVFGWQMRFDLNKGFPLLTTKKLHLSSIIHELLWFIRGDTNISYLKDNNVSIWDEWADENGDLGPVYGKQWRRWGTPEGRELDQLYDVISEIKNNPNSRRMIVSAWNPSDVGSMALPPCHCLFQFYVADNKLSCQLYQRSADIFLGVPFNIASYAILTHMIANVCDISVGEFVHTLGDAHLYKNHFEQAKKQLSRSIKNKPQIKLLKKHTNINDFVFEDIEIINYDPHPHISAPVAV

SEQ ID NO: 106426 - protein, 198 aa, Unknown
  Bacterial polypetide isolated from the Sargasso Sea
MKQYLDLLQHIKEKGVKKEDRTGTGTISVFGYQMRFNLQEGFPLVTTKKLHLRSIIHELIWFINGETNIKYLKENGVTIWDEWADKKGNLGPIYGHQWRNWNSDGIDQLQDVINSLKNNPSSRRMIVTAWNPNIIPDSSKSFSDNVKNGKAALPPCHAFFQFYVSNNKLSCQMYQRSADVFLGVPFNIASYALLTHMI

SEQ ID NO: 106427 - protein, 96 aa, Unknown
  Bacterial polypetide isolated from the Sargasso Sea
MIYFLGVPFNIASYALLTHMIANICGLEVGDFVHTLGDAHLYTNHLEQAEEQLSRKPLDPPKIIVNSKESIDDYKFEDFEIVNYQFHPHIPAKVAI

SEQ ID NO: 106428 - protein, 264 aa, Unknown
  Bacterial polypetide isolated from the Sargasso Sea
MKQYLDLLRHVLEKGDEKADRTGTGTKSVFGWQMKFDLNDGLPLLTTKKLHLKSIIHELLWFIKGDTNISYLKENNVSIWDEWADENGDLGPVYGKQWRRWDAPDGRKLDQLNDVINEIKNNPNSRRMIVSAWNPAEVGSMALPPCHCLFQFYVAKNKLSCQLYQRSADIFLGVPFNIASYSILTHMIANVTGLSVGDFVYTLGDAHLYMNHFEQTKLQLSRSSKKLPKLKISKKRNDINEFKFEDFEITDYDPYPNIPAPVAV

SEQ ID NO: 106429 - protein, 253 aa, Unknown
  Bacterial polypetide isolated from the Sargasso Sea
LDEGTQKNDRTGTGTLSIFGHQMRFNLQDGFPLVTTKRCHLRSIIHELLWFLQGDTNVAYLHENNVTIWDEWADENGNLGPVYGKQWRAWPTPDGRHIDQITTVLNQLKNDPDSRRIIVSAWNVGELDKMALAPCHAFFQFYVADGKLSCQLYQRSCDVFLGLPFNIASYALLVHMMAQQCDLEVGDFVWTGGDTHLYSNHMEQTHLQLTREPRALPKLVIKRKPDSLFDYRFEDFEIEGYDPHPGIKAPVAI

SEQ ID NO: 106430 - protein, 239 aa, Unknown
  Bacterial polypetide isolated from the Sargasso Sea
MRTYLSQLQQVLENGIEKPDRTGVGTISTFGLQARYDLSEGFPAVTTKKLVWKSMLSELLWFVSGSGNINDLKTIYRHNKLWDGNYKDYLERRGLTRSNGEMGRIYGAQWRKWRSNGKTVDQLQDAIDLINHNPDSRRILVNAWNAAEVSSDDVALPPCHTFFQFYVAKDRLSLQMYQRSCDMFLGVPLNIASYSILLCMVARITNLIPHEFIHTLGDAHIYLNHIDAVKAQLGRPPLP

SEQ ID NO: 106431 - protein, 129 aa, Unknown
  Bacterial polypetide isolated from the Sargasso Sea
MQEYLDLLEKVKNSGKPKGDRTGTGTISVFGHQMRFNLEDSFPLLTTKKIHFKSVAYELLWFLKGDTNINYLKENGVSIWDEWADENGDLGPVYGKQWRKWEGKNNIHDQVTEVIKQIKDNPDSRRHIV

SEQ ID NO: 106432 - protein, 114 aa, Unknown
  Bacterial polypetide isolated from the Sargasso Sea
FSQFFISENRLSCQLYQRSCDMFLGVPFNIASYALLTHIIARECNLDVGKLVHSLGDYHIYHEHFDQVETQLSRSVKQLPSLSFKTKKITEYRTNDFKLLNYDPHPTITASMNV

SEQ ID NO: 106433 - protein, 245 aa, Unknown
  Bacterial polypetide isolated from the Sargasso Sea
QMRFDLSQGFPLVTTKKCHLRSIIHELLWFLKGDTNIQYLKDHKVTIWDEWATEQGDLGPVYGAQWRSWQTPDGRVIDQISQLIHDIKTNPDSRRLIVSGWNPAVLPDTRFSPKDNAAMGKQALPPCHTLFQFYVHDGKLSCQLYQRSADIFLGVPFNIASYALLTMMVAQVCDLTPGDFVHTFGDAHLYSNHLDQVNEQLSRTPHPLPQMKLNPAIKDIFGFTIDDFELVNYLAHPAIKAPIAI

SEQ ID NO: 106434 - protein, 123 aa, Unknown
  Bacterial polypetide isolated from the Sargasso Sea
ALPPCHCLFQFYVAQNKISCQLYQRSADIFLGVPFNIASYSLLLHLIAEQTGYEVGDFIWTGGDCHLYLNHIDQAKIQLQREPLNLPEIAIKKNISSIFDYKFEDIEFINYVAHEKILAPISV

SEQ ID NO: 106435 - protein, 253 aa, Unknown
  Bacterial polypetide isolated from the Sargasso Sea
LEEGEAKGDRTGTGTISLFGHQMRFDLREGFPAITTKRVHWPSVIHELLWFLSGDTNIEYLIQNKVRIWNEWADENGDLGPVYGKQWRKWESNDGRVIDQIEGAIDLIKNDPNSRRIIVSAWNVGDLRDMALMPCHAFFQFYVNEGRLSCNLYQRSADVFLGVPFNISSYSLLTCMIAQVCDLEPGEFIWTGGDCHLYLNHIEQARLQMSREPLNLPILKLDQSIKSIDDFRFEHISVVGYEHHPHIAAPISV

SEQ ID NO: 106436 - protein, 164 aa, Unknown
  Bacterial polypetide isolated from the Sargasso Sea
MKQYLDLLQHVLDEGVKKEDRTGTGTISVFGHQMRFNLQEGFPLVTTKTLHIPSIVHELLWFLSGNTNIKYLNDNKVSIWNEWADENGELGPVYGSQWRSWPLPDGKQFDQISDLISRIQSDPNSRRHLVSAWNVSLLDEMALPPCHCLFQFYVAENKISCQLY

SEQ ID NO: 106437 - protein, 59 aa, Unknown
  Bacterial polypetide isolated from the Sargasso Sea
MKQYQDLLKYIKENGVEKKDRTGTGTISVFGYQMKFDLKKGFPLVTTKKLHLRSIIYEL

SEQ ID NO: 106438 - protein, 220 aa, Unknown
  Bacterial polypetide isolated from the Sargasso Sea
MEQYLNLLTEIKSKGTKKEDRTGTGTISIFGHQMRFDLNDGFPLVTTKKVNFNAILHELLWFIKGETNIEYLVKNNVNIWNEWPFQSWLERTNQNEGLTMHSKEWKDKLQEFIDLVKKDNSFAKEYGDLGPVYGKQWRDFEGVDQLAQVIEDLKNNPNSRRHIVSAWNPKEIPIMIKSGLPPCHTLFQFYVADGKLSCQLYQRSADVFLGVPYNIASYAL

SEQ ID NO: 106439 - protein, 236 aa, Unknown
  Bacterial polypetide isolated from the Sargasso Sea
MQQYLDLLARVLEEGVDRGDRTGTGTRAVFGHQMRFDLSAGFPLLTTKKLHTRSIFHELLWFIKGDTNIRYLQEHGVSIWDEWADENGDLGPVYGKQWRRWESPDSTEIDQLADLVAAIRATPESRRLMLSSWNPADLPNMALPPCHCLFQFFVAEGRLSCQLYQRSADIFLGVPFNIASYALLTHMIAAVCGLKPGEFVHTLGDAHLYHNHFDQARLQLTREPGPQPQLVLHRVP

SEQ ID NO: 106440 - protein, 253 aa, Unknown
  Bacterial polypetide isolated from the Sargasso Sea
KVRKSFGYQMRFNLNKGFPALTTKKLAWKAVTSELLWFLEGSNDERRLAEILYKDSRKNLKEKKTIWTQNAQSDYWKNQSKFDGDVGRIYGVQWRDFAGVDQLVNLIEGIKNNPNGRRHILSAWNPAELDLMSLPACHAFSQFFISKGKLSCQLYQRSCDMFLGVPFNIASYSLLTHLIAHECKLEVDEFIHTLGDFHIYHEHFNQVKIQLKREPRRLPTLKFKSKNIFSYTIDDFQLVDYDPHPTIKAEMNV

SEQ ID NO: 106441 - protein, 211 aa, Unknown
  Bacterial polypetide isolated from the Sargasso Sea
MKQYLDLLQHVLDEGVKKEDRTGTGTISVFGHQMRFNLQEGFPLVTTKTLHIPSIVHELLWFLSGNTNIKYLNDNKVSIWNEWADENGELGPVYGSQWRSWPLPDGKQFDQISDLISRIQSDPNSRRHLVSAWNVSLLDEMALPPCHCLFQFYVAENKISCQLYQRSADIFLGVPFNIASYSLLLHLIAEQTGYEVGDFIWTGGDCHLYLN

SEQ ID NO: 106442 - protein, 256 aa, Unknown
  Bacterial polypetide isolated from the Sargasso Sea
AKIREKGVFKEDRTGTGTYSIFAEQMRFDLQKGFPLLTTKKLHLRSIIHELLWFLSGSTNISYLKENKVKIWDAWADEKGELGPVYGRQWRSFPRPNGGSVDQIKELVEGLKKNPDSRRHLVVAWNPGEIDKMALPPCHCLFQFWVGDGKLSLQLYQRSADFFLGVPFNIASYSLLTHMIAEQCELEVGEFIWTGGDIHLYKNHLEQASKQLSRSPLPLAKLLIKRRPSDLFSYKFEDFEIENYQCHPHIKAAVSV

SEQ ID NO: 106443 - protein, 185 aa, Unknown
  Bacterial polypetide isolated from the Sargasso Sea
MKNYLDALKYCYENGDFVKSRAGNVKKAFGYQMRFNLEDGFPAVTTKKLAWKAVVSELLWFLEGSNDERRLAEILYDNKRENLKNKKTIWTQNAEADYWKHKSKFIGDVGRIYGVQWRNFNGVDQIHELIEGLKKNPNSRRHILTAWNPSELNEMSLPPCHAFSQFFVSNKKLSCQLYQRSCDMF

SEQ ID NO: 106444 - protein, 201 aa, Unknown
  Bacterial polypetide isolated from the Sargasso Sea
MQTYLDLLRRILDEGVERGDRTGTGTLSVFGHQMRFDLSEGFPAVTTKRLHWPSIIHELLWFLSGDTNVAYLQENKVRIWNEWADENGDLGPVYGKQWRKWETKDGRVIDQIAEAIELIKSNPSSRRILVSAWNVGELEEMALMPCHAFFQFYVADGKLSCQLYQRSADVFLGVPFNIASYALLTHMMAQVCGLGVGDFVH

SEQ ID NO: 106445 - protein, 243 aa, Unknown
  Bacterial polypetide isolated from the Sargasso Sea
HYDLSKGFPAITTKKLAWKSVVSELLWFIEGSDDERRLAEILYNDSRENVKNKKTIWTQNAEADYWKPKARFEGDVGKIYGVQWRNFNGEDQVLNLIKGLKDDPNGRRHIISAWNPPEIKNMSLPPCHAFSQFFVSNNKLSCQLYQRSCDMFLGVPFNIASYSLLTHMLARECNLEVGTFIHSLGDFHIYKEHFDQVKIQLERVPKKLPELQFETKDFFKYKVNDFKLINYQHHEKIDALMNV

SEQ ID NO: 106446 - protein, 176 aa, Unknown
  Bacterial polypetide isolated from the Sargasso Sea
MGPVYGKQWRSWGKDVGGEDQIKKIIEDLKNNPNSRRHIVSAWNVDKIEKMALPPCHTMFQFHIQDKELSCQLYQRSADMFLGVPFNIASYSLLVCIFSEILNLVPGEFIWTGGDCHIYNNHFEQVKKQIKRKPMKAPKLRIPKLKSIDDVLKSKPKEYILVDYNPMESIKAPMAV

SEQ ID NO: 106447 - protein, 50 aa, Unknown
  Bacterial polypetide isolated from the Sargasso Sea
MKQYLDLLKLIKETGIKKEDRTGTGTLSIFGHQMRFNLEEGFPLMTTKKV

SEQ ID NO: 106448 - protein, 161 aa, Unknown
  Bacterial polypetide isolated from the Sargasso Sea
EGKNNIHDQVTEVIKQIKDNPDSRRHIVSAWNVADIPSMALAPCHILFQFYVQDGKLSCQLYQRSADIFLGVPFNIASYSLLTHMIANICDLKVGEFVHTLGDAHLYTNHLEQAEEQLSRKPLDPPQIIVKDKESIDDYEFEDFEIVNYQFHPHIPAKVAI

SEQ ID NO: 106449 - protein, 137 aa, Unknown
  Bacterial polypetide isolated from the Sargasso Sea
SAWNVAMIDKMALPPCHLLAQFYVSSDQSLDCHMYQRSADMFLGVPFNIASYSLLMHILGKVLDLTPRYFIHSFGDAHIYLNSVDQVKEQIKRTPRELPQLKFPDINNLEDLKGLSLDDFVLEGYDPHPAIKAKMAI

SEQ ID NO: 106450 - protein, 258 aa, Unknown
  Bacterial polypetide isolated from the Sargasso Sea
MKSYLDLLSHILENGEKREDRTNVGTISSFGHQLKFDLRDGFPAVTTKKLAWKGVVSELIWFLEGSDDERRLAEIRYNKNRDELIDIDKYPTIWTDNADNQGKNLGYENSTLVKKLGPVYGVQWRNWDDKDQIKELLDSLKNNPTSRRHILSAWNVAMIDKMALPPCHLLAQFYVSSDQCLDCHMYQRSADMFLGVPFNIASYSLLMHILGKVLDLTPRYFIHSFGDAHIYLNSIDQVEEQIKRTPRELPQLKFPIYK

SEQ ID NO: 106451 - protein, 168 aa, Unknown
  Bacterial polypetide isolated from the Sargasso Sea
MKQYLDLLSYVLNEGNLKNDRTGTGTKSVFGWQMRFDLSKGLPLLTTKRLHLKSIIHELLWFIKGDTNISYLKKNKVSIWDEWADQNGDLGPVYGKQWRNWETPDGRGIDQLNNIITEIKNNNNSRRLIVSAWNPSDVGSMALPPCHCLFQFYISESKLSCQLYQRSA

SEQ ID NO: 106452 - protein, 238 aa, Unknown
  Bacterial polypetide isolated from the Sargasso Sea
KGFLAITTKKLAWKSVISELLWFIEGSDDERRLAEILYNDSRKNLKDKKTIWTQNAEADYWKPKARFVGDVGKIYGVQWRNFNGEDQIVNLIKGLKEDPNGRRHIISAWNPPEIKNMSLPACHAFSQFFVSNNKLSCQLYQRSCDMFLGVPFNIASYSLLTHMLARECKLEVGIFIHSLGDFHIYKEHFEQVKIQLQREPKKLPELQFETKNFFKYNVNDFKLVNYDHYEKIDALMNV

SEQ ID NO: 106453 - protein, 149 aa, Unknown
  Bacterial polypetide isolated from the Sargasso Sea
MKQYISLLENVIRNGVQKEDRTGTGTRSIFGWQMRFDLSKGFPLLTTKKLHFKSIAYELLWFIRGDTNIEYLNKNGVSIWDEWADENGDLGPVYGSQWRSWPTRDGGSIDQLLKVVKDIKNNPDSRRMIVSAWNPEYVEKMALPPCHCL

SEQ ID NO: 106454 - protein, 264 aa, Unknown
  Bacterial polypetide isolated from the Sargasso Sea
MKQYLDALRFCYDNGSDVESRAGGVRKSFGYQMHYDLSKGFPAITTKKLAWKSVVSELLWFIEGSDDERRLAEILYNDSRENLKDKKTIWTQNAQADYWKLKARFEGDVGKIYGVQWRNFNGEDQILNLIKGLKEDPNGRRHIISAWNPPEIKSMSLPACHVFSQFFISNNKLSCQLYQRSCDMFLGVPFNIASYSLLTHMLARECKLEVGTFIHSLGDFHIYKEHFEQVKIQLERAPKKLPALQFETKDFFKYNVNDFKLINY

SEQ ID NO: 106455 - protein, 113 aa, Unknown
  Bacterial polypetide isolated from the Sargasso Sea
FYINDGFIDAQLYQRSGDMFLGVPFNIASYSFLLYIIGHLTGYKPRKLIHILGDAHVYKEHISAVKKQFIRIPRKFPKLYISNELNDINHIKEENFKILEYESCLTIKAKMIA

SEQ ID NO: 106456 - protein, 223 aa, Unknown
  Bacterial polypetide isolated from the Sargasso Sea
FPLVTTKKVHLKSVIHELLWFIQGSTNVKYLQDHGVRIWNEWADAYGELGPVYGKQWRAWKKADGSTVDQLADLLDGLRTQPDSRRHILSAWNVGELAEMALPPCHAFSQFYVANGALSCKLTQRSADLFLGVPFNIASYSLLTHMIAEQVGLDVGEFIWSGGDCHIYLNHMEQVNTQLTREPRALPQLAFARRPDTLFDYVYDDVVITGYHPCDAIPAPIAV

SEQ ID NO: 106457 - protein, 231 aa, Unknown
  Bacterial polypetide isolated from the Sargasso Sea
MRFDLSKGFPLLTTKKLHLRSIIVELLWFLKGDTNVQFLKENGCNIWNEWCDDKGDLGPIYGKQWRSWESTDGQIIDQLGSVIEQIKSNPSSRRLVVTAWNPGDLSKMALPPCHCLFQFFVSNGRLSCQLYQRSCDVFLGLPFNIASYSLLTHMVAAECGLDVGEFVWTGGDVHLYTNHLDQVKLQLKRQTKGLPKLILKRKPSSVFDYKYDDFSFENYFPHPHIKAEVAV

SEQ ID NO: 106458 - protein, 115 aa, Unknown
  Bacterial polypetide isolated from the Sargasso Sea
FQFYVADNRLSCQMYQRSADVFLGVPFNIASYSLLTFMIAQVCDLEVGEFIHTLGDAHIYLNHLEQVDLQLSRDPLELPKLKLNPEIKSIEDFKYEDIEIVDYKFHPPIKGKISI

SEQ ID NO: 106459 - protein, 228 aa, Unknown
  Bacterial polypetide isolated from the Sargasso Sea
MQNYLELLKEILDSGEEKSDRTGVGTIGLFGKQLRFNLQDGFPAVTTKKLAWKGVVSELLWFLEGSDDERRLAEIRFNDSRENLTDQGKFSTIWTDNADNQGVSLGYTNSETEKRLGPIYGVQWRNWGGKDQIKELIINLKHNPHSRRHILTAWNVGEINQMALPPCHVMSQFYVSNKSELSCHMYQRSADMFLGVPFNIASYALLTHILASILELEVGDFVHSFGDC

SEQ ID NO: 106460 - protein, 184 aa, Unknown
  Bacterial polypetide isolated from the Sargasso Sea
MKQYLTALKHCYEKGVDVKSRAGDVRKAFGYQMRFNLEEGFPALTTKKLAWKAVVSELLWFLEGSNDERRLAEILYNDDRKNLNDKKTIWTENAKSEYWKDHSKFEGDVGRIYGVQWRDFNGTDQIKNLIDGIKKDPDSRRHIISAWNPAELHLMSLPPCHAFSQFFISNKKLSCQLYQRSCDM

SEQ ID NO: 106461 - protein, 177 aa, Unknown
  Bacterial polypetide isolated from the Sargasso Sea
MVKKLGPVYGVQWRNWGDKDQIKELLDSLENNPTSRRHILSAWNVAMIDKMALPPCHLLAQFYVSSDQSLDCHMYQRSADMFLGVPFNIASYSLLMHILGKVLDLTPRYFIHSFGDAHIYLNSVDQVKEQIKRTPRELPQLKFPDINNLEDLKDLSLDDFILEGYDPHPAIKAKMAI

SEQ ID NO: 106462 - protein, 155 aa, Unknown
  Bacterial polypetide isolated from the Sargasso Sea
MKQYISLLENVIRNGVQKEDRTGTGTRSIFGWQMRFDLSKGFPLLTTKKLHFKSIAYELLWFIRGDTNIEYLNKNGVSIWDEWADENGELGPVYGSQWRSWPTRDGGSIDQLLNVVKDIKNNPNSRRMIVSAWNPEYVDEMALPPCHCLFQFYVA

SEQ ID NO: 106463 - protein, 132 aa, Unknown
  Bacterial polypetide isolated from the Sargasso Sea
MNPSDVGSMALPPCHCLFQFYVAKNKLSCQLYQRSADIFLGVPFNIASYSILTHMIANVTGLSVGDFVHTLGDAHLYTNHFDQAKLQLTRSTKKLPKLKIPKKHSDINKFKFEDFDITDYNPYPNIPAPIAV

SEQ ID NO: 106464 - protein, 64 aa, Unknown
  Bacterial polypetide isolated from the Sargasso Sea
MATIGRFGDGVEQYLSLIRRILNEGEQKGDRTGTGTLSVFGHQMRFDLSEGFPMVTTKKLHLKS

SEQ ID NO: 106465 - protein, 263 aa, Unknown
  Bacterial polypetide isolated from the Sargasso Sea
NGTIYSIISNILTNGIDKDDRTGTGTKSIFGWQMRFNLSKGFPLLTTKKLHFKSIAYELLWFIRGDSNIKFLNENGVSIWNEWADEDGELGPVYGKQWRKWETSNNRSIDQLSNVINDIKENPFSRRLIISAWNPEHIGSMALPPCHCLFQFYVSQGKLSCQLYQRSADVFLGIPFNIASYALLTEMIAKVCNLKVGDFIISLGDAHLYADHIDLAQKQILRKPRKLPLLKLNSRKSIDEFSYEDMEIIGYDPHPHISAKVSI

SEQ ID NO: 106466 - protein, 177 aa, Unknown
  Bacterial polypetide isolated from the Sargasso Sea
MQDKKSGVSMQQYLDLMHLVLNTGSEKVDRTGVGTLSIFGHQMRFNLEDGFPMLTTKKLHLKSIIHELIWFLNGDTNITYLNQHGVRIWNEWADENGELGPVYGEQWRSWPAGDGETIDQIVNLVSGLKDNPDSRRHLVTAWNPSVLKEMALPPCHCLFQFYVADGKLSCQLYQRSA

SEQ ID NO: 106467 - protein, 112 aa, Unknown
  Bacterial polypetide isolated from the Sargasso Sea
QFFISKNKLSCQLYQRSCDMFLGVPFNIASYSLLTHMLARECNLEVGNFIHSLGDFHIYEEHFDQVKVQLERKPKNLPTLYFKTKDFFEYNVNDFILDDYNYHPKIEATMNV

SEQ ID NO: 106468 - protein, 155 aa, Unknown
  Bacterial polypetide isolated from the Sargasso Sea
MEDLINNLMNDPDGRRHILSAWNVGEIDKMALPPCHVMSQFYIHENEISCHMYQRSADMFLGVPFNIASYALLLCIIAKILDLKPKRFIHSFGDAHIYKNSIEQVKEQISRKPKTLPKLKLPNLNSIDDLNKYSIDDFILVDYDPHPSIKARMAI

SEQ ID NO: 106469 - protein, 239 aa, Unknown
  Bacterial polypetide isolated from the Sargasso Sea
TRSVFGWQMRFNLNEGFPLVTTKKLHLRSIIHELLWFLKGDTNIGYLKDNQVRIWDEWADANGDLGPVYGKQWRSWATADGREIDQMQWLVDEIKRNPDSRRLVVSAWNVGELSQMALMPCHNLFQFYVVDGKLSCQLYQRSGDIFLGVPFNIASYALLTHMVAQATGLGVGDFVHTLGDAHLYSNHFEQAREQLAREPRALPKLWLNPDVTDLFGFQFDDIRIDGYDPHPAIKAPVAV

SEQ ID NO: 106470 - protein, 186 aa, Unknown
  Bacterial polypetide isolated from the Sargasso Sea
LGPIYGFQWRHFNANYENCDSNYDGKGIDQLNNIIKELKDVETRNSRRLIMSAWNPCQLNEMALPPCHVLCQFNISNNDELSCALYQRSGDVGLGVPFNIASYAFLTHLIAHHCGLKAKEFIYYLGNTHIYDDHIEGLKIQKNRIPYNFPKLCISNKYTNIEDYKVDDFKINNYEYYDNINLLMRQ

SEQ ID NO: 106471 - protein, 142 aa, Unknown
  Bacterial polypetide isolated from the Sargasso Sea
KNPNSRRHILTAWNPSEINEMSLPPCHAFSQFFVSNKKLSCQLYQRSCDMFLGVPFNIASYSLLIHIIAEECKLGVGDFVHSLGDFHIYEEHFDQVKIQIKRKPKQLPILEFSPKKMSDYKTADFELHNYDPHPKIVAPMNV

SEQ ID NO: 106472 - protein, 158 aa, Unknown
  Bacterial polypetide isolated from the Sargasso Sea
ETIDQLCNLIREIKSTPDSRRLIINAWNVGQLSEMALPPCHAFVQFYVSEGKLSCQLYQRSADIFLGVPFNIASYALLTMMVAQVCDLELGEFIHTLGDAHLYVNHLDQAKEQLSRTPKKLPQMKLNTDVKNIDDFSFDDFELVGYEAHPHIKGEVSI

SEQ ID NO: 106473 - protein, 159 aa, Unknown
  Bacterial polypetide isolated from the Sargasso Sea
MQQYLSLMQHVLDNGVKKEDRTGTGTLSVFGHQMRFDLQKGFPMVTTKKCHLRSIIHELLWFLKGDTNIGYLKENGVRIWDEWADENGDLGPVYGHQWRSWAAADGHTIDQISNVVDRIKTNPDDRRLIVSAWNVGELHKMALPPMSCVLPSFMWLMGA

SEQ ID NO: 106474 - protein, 264 aa, Unknown
  Bacterial polypetide isolated from the Sargasso Sea
MKQYLDLMTRVMREGTLKEDRTGTGTKSVFGHQMRFDLSKGFPCVTTKKIHLKSIIHELLWFLKGETNIKYLKENGVRIWDEWADENGELGHIYGYQWRSWPDSNGNHIDQIKQVIDTLKSNPNSRRIIVSAWNVGELDQMALPPCHAFFQFYVANGKLSCQLYQRSADIFLGVPFNIASYALLTMMIAQVCNLEIGDFIHTLGDAHIYTNHFEQTKLQLSRDCKKLPRMKINKNVTNIFDFTIDDFELVNYEFHPHIKGKVAI

SEQ ID NO: 106475 - protein, 263 aa, Unknown
  Bacterial polypetide isolated from the Sargasso Sea
MSRVLQNVKTKTYEDGRFVHDEHQYLSLISDILEFGEKVNGRNGDTLTVCGSAMHFSLEGGAIPLLTTKKVAWKTCLRELLWFVSGSTDNELLQKQNVKIWDGNASREFLDSRGLSNLRTNDLGPVYGHQWRHFNAPYQSCDTDYSGMGVDQLAWVIAQLKDPETRTSRRIVMSAWNPCQLDEMALPPCHVLVQFNVLPGNRLSCSLYQRSGDVGLGVPFNIASYSFLTHLLAKHCDLEAYELNYHLGNCHIYDDHIEPLRSK

SEQ ID NO: 106476 - protein, 246 aa, Unknown
  Bacterial polypetide isolated from the Sargasso Sea
MKNYLDALKHCYENGDFVKSRAGNVKKAFGYQMRFNLEDGFPAVTTKKLAWKAVVSELLWFLEGSNDERRLAEILYDDIRENLEDKRTIWTQNAEADYWKDKSKFIGDVGKIYGVQWRNFNGVDQIHELIEGLKKNPNSRRHILTAWNPSEINEMSLPPCHAFSQFFVSNKKLSCQLYQRSCDMFLGVPFNIASYSLLIHILAEECKLGVGDFVHSLGDFHIYEEHFDQVKIQLTREPKQLPTLKF

SEQ ID NO: 106477 - protein, 264 aa, Unknown
  Bacterial polypetide isolated from the Sargasso Sea
MRAYLDLMQKILDEGTVKSDRTGTGTVSLFGHQMRFNLAEGFPLVTTKKCHLRSIIHELLWFLNGDTNTAYLKEHGVSIWDEWADENGNLGPVYGAQWRSWPAADGSVIDQIQKAVDDIKHNPDSRRIIVSAWNVGELDKMALAPCHAFFQFYVADGKLSCQLYQRSCDVFLGLPFNIASYALLTHMMAQQCDLDVGDFVWTGGDVHLYSNHMEQTALQLSREPRPLPTLVIKRKPDSIFEYRFEDFEIEGYDPHPGIKAPVAI

SEQ ID NO: 106478 - protein, 276 aa, Unknown
  Bacterial polypetide isolated from the Sargasso Sea
MKQYLDALRYCYDNGSDVESRAGGVRKSFGYQMHYDLSKGFPAITTKKLAWKSVVSELLWFIEGSDDERRLAEILYNDSRENLKDKKTIWTQNAQADYWKSQARFEGDVGKIYGVQWRNFNGEDQVLNLIKGLKEDPNGRRHIISAWNPPEIKNMSLPACHAFSQFFISNNKLSCQLYQRSCDMFLGVPFNIASYSLLTHMLARECKLEVGTFVHCLGDFHIYKEHFEQVKIQLEREPKKLPELQFETKDFFKYKVDDFKLLNYQHHEKIDALMNV

SEQ ID NO: 106479 - protein, 276 aa, Unknown
  Bacterial polypetide isolated from the Sargasso Sea
MRQYLDALKYCLDNGTDVKSRAGNVRKSFGFQMHYDLSKGFPAITTKKLAWKSVVSELLWFIEGSNDERRLAEILYNDKRENLTDKRTIWTQNAEAEYWKPKAKFKGDVGKIYGVQWRNFNGEDQLANLIYSLKNDANGRRHIISSWNPGELKNMALPACHVLSQFFISNNKLSCQLYQRSCDMFLGVPFNIASYSLLTHMLAREINLEVGNFIHSLGDFHIYEEHFDQVKIQLERQPKNLPILDFKTKNFYEYNIDDFKLLNYSHHPKIEARMNI

SEQ ID NO: 106480 - protein, 250 aa, Unknown
  Bacterial polypetide isolated from the Sargasso Sea
MKSYLNLLSHILENGEKREDRTNVGTISSFGHQLKFDLRDGFPAVTTKKLAWKGVVSELIWFLEGSDDERRLAEIRYNKNRDELTDVDKYPTIWTDNADNQGKNLGYENSSLVKKLGPVYGVQWRNWDGKDQIEELLSSLRNNPTSRRHILSAWNVAMIDKMALPPCHLLAQFYVSGDQSLDCHMYQRSADMFLGVPFNIASYSLLMHVLGKVLDLAPRYFIHSFGDAHIYLNSVDQVKEQVKRVPRALP

SEQ ID NO: 106481 - protein, 295 aa, Unknown
  Bacterial polypetide isolated from the Sargasso Sea
MSKLEYSEEEAYLQLIRDIHKKGEDDEGRNGRVRCIFGANMRFSMKNNKIPILTSKRVAWKTCLKELLWFISGNTSNKTLKAQNVHIWDGNSSREFLDSRGLKHLHEDDLGPVYGFQWRHFNAEYKTCDDNYTNKGIDQLQQIIDALKDPKDRKSRRLIMSAWNPEQIGEMALPPCHVLCQFNVIGENKLSCALYQRSGDVGLGVPFNIASYSFLLHLIAHHCDLVACDFVYFLGNAHIYDDHMPQLLSQIENELYEFPTLSIKKKYDKIDQYTLEDFELENYTHNSTIPMKMRV

SEQ ID NO: 106482 - protein, 141 aa, Unknown
  Bacterial polypetide isolated from the Sargasso Sea
IIPNTKKTFSENVKEGKAALPPCHAFFQFYVADNKLSCQMYQRSADVFLGVPFNIASYALLTFMIAQVCELEIGEFVHTLGDAHIYLNHLEQVDLQLSRDPLELPKLKLNPIIKSIEDFKYEDVEILDYKFHPPIKGKISI

SEQ ID NO: 106483 - protein, 220 aa, Unknown
  Bacterial polypetide isolated from the Sargasso Sea
FTTKKVHLKSIIHELLWFLQGSTNIKYLKENGVSIWDEWADERGELGPVYGSQWRSWPVNEKESIDQISQVIDQIKNNPDSRRLIVSAWNVSLVEDMALPPCHTLFQFYVADGKLSCQLYQRSADIFLGVPFNIASYALLVLMIAKVCGLKPGDFVHTLGDAHLYLNHLEQVDEQLSRAPKKLPVMKITKDTNNIFDLKYEDFSLEEYNPDPHISAPVAV

SEQ ID NO: 106484 - protein, 224 aa, Unknown
  Bacterial polypetide isolated from the Sargasso Sea
MKQYLEALRYCFENGTDVDSRAGKVRKSFGYQMHYDLSEGFPAITTKKLAWKSVVSELLWFIEGSNDERRLAEILYDDVRENLTNKKTIWTQNAEANYWKPKAKFEGDVGKIYGVQWRNFNGEDQLSNLINGLKNDPNGRRHIISSWNPPEIKNMSLPACHAFSQFFISKNKLSCQLYQRSCDMFLGVPFNIASYSLFTHMLARECGLEVGKFIHSLGDFHIYE

SEQ ID NO: 106485 - protein, 288 aa, Unknown
  Bacterial polypetide isolated from the Sargasso Sea
MIQYISALEHILKKGKQREDRTGIGTKGVFGYQMRFNLKEGFPAVTTKKLAWKSVVSELLWFLEGSTDERRLAEIHFGKDRGDIKEKKTIWTANANKQGVDLGYTNNDIKKELGPVYGKQWRSWGADSGGVDQIKNIITDLSNNPNSRRHIVSAWNVDKIDQMALPPCHTMFQFHIQDGELSCQLYQRSADMFLGVPFNIASYSLLVCILSNILKLKPGEFIWTGGDCHIYNNHFEQVKEQIKRKPMNPPALEIPNFKSIEEVLASKPQDYKLLNYKPMDSITAPMAV

SEQ ID NO: 106486 - protein, 264 aa, Unknown
  Bacterial polypetide isolated from the Sargasso Sea
MKQYLDLMRHVRENGVFKDDRTGTGTYSVFGYQMRFDLSEGFPLVTTKKTFLKGIIHELLWFLSGSTNIKYLVDHDVHIWDEWADEHGELGPVYGSQWRSWPGPDGKTIDQISRVVEDLKTNPDSRRHIVSAWNVAEVDEMALPPCHSLFQFYVADGRLSCQLYQRSADIFLGVPFNIASYALLNMMIAQVVDLEVGDFVHTLGDAHLYSNHIEQADKQLLREPRSLPTIRINPEVKDILGFKISDFELLEYDPHPGIKAPIAV

SEQ ID NO: 106487 - protein, 275 aa, Unknown
  Bacterial polypetide isolated from the Sargasso Sea
MKSYLNLLSHILENGEKREDRTNVGTISSFGHQLKFDLRDGFPAVTTKKLAWKGVVSELIWFLEGSDDERRLAEIRYNKNRDELTDIDKYPTIWTDNADNQGKDLGYENSSLVKKLGPVYGVQWRNWGDKDQIKELLDSLKNNPTSRRHILSAWNVAMIDKMALPPCHLLAQFYVSSDQSLDCHMYQRSADMFLGVPFNIASYSLLMHILGKVLDLTPRYFIHSFGDAHIYLNSVDQVKEQIKRTPRELPQLKFPDINNLDDLKDLSLDDFILEG

SEQ ID NO: 106488 - protein, 264 aa, Unknown
  Bacterial polypetide isolated from the Sargasso Sea
MQQYLNLLHHVMENGEEKSDRTGTGTKSVFGHQMRFDLANSFPLLTTKKVHLKSIIYELLWFLKGETNIKYLKDNGVSIWDEWADENGELGPVYGHQWRSWPSEDGGKIDQITQLIEQIENNPDSRRLIVSAWNPADVEKMALPPCHCLFQFYVSNRKLSCQLYQRSADIFLGVPFNIASYALLTMMIAKVTKLELGEFVHTFGDAHLYSNHLSQAKEQLARPPKSLPKMKIISNPKTIFDFEYEDFVLEDYDPHPHISAPVAV

SEQ ID NO: 106489 - protein, 276 aa, Unknown
  Bacterial polypetide isolated from the Sargasso Sea
MKQYLDALKYCYENGTDVESRAGGVRKSFGYQMHYDLSKGFPAITTKKLAWKSVVSELLWFIEGSDDERRLAEILYNDSRENLKDKKTIWTQNAQADYWKSQARFEGDVGKIYGVQWRNFNGEDQVLNLIKGLKEDPNGRRHIISAWNPPEIKNMSLPACHAFSQFFISNNKLSCQLYQRSCDMFLGVPFNIASYSLLTHMLARECKLEVGTFIHSLGDFHIYKEHFEQVKIQLERVPKKLPELQFVTKDFFKYNVNDFKLINYQHHEKIDALMNV

SEQ ID NO: 106490 - protein, 264 aa, Unknown
  Bacterial polypetide isolated from the Sargasso Sea
MRQYLDLLRRILEEGESKGDRTGTGTISLFGHQMRFDLSGGFPAITTKRVHWPSVIHELLWFLSGDTNIEYLIQNKVRIWNEWADENGDLGPVYGKQWRKWESNDGRVIDQIEGAIDLIKKDPNSRRIIVSAWNVGDLRDMALMPCHAFFQFYVNDGRLSCNLYQRSADVFLGVPFNISSYSLLTCMIAQVCDLEPGEFIWTGGDCHLYLNHIEQARLQVSREPLNLPTLRLDPSIKSIDDFRFEHISIVGYEHHPHIAAPISV

SEQ ID NO: 106491 - protein, 276 aa, Unknown
  Bacterial polypetide isolated from the Sargasso Sea
MKQYIEALKYCFENGSDVESRAGKVRKNFGFQMRFDLQNGFPAMTTKKLAWKSVVSELLWFLEGSDDERRLAEILYEDKRENLKDKKTIWTQNANSNYWKDKAKFEGDVGRIYGVQWRDFNGVDQVKNLIKGIKSDPNGRRHILSAWNPAEIHLMSLPPCHAFSQFYVSKNKISCQLYQRSCDMFLGVPFNIASYSLFLHLLAAECSLEVGEFILTLGDYHIYHEHFEAVKEQISREPKDLPNLAFNKKNIFDYSLKDFTLENYDPHPTIKAKMNI

SEQ ID NO: 106492 - protein, 262 aa, Unknown
  Bacterial polypetide isolated from the Sargasso Sea
MQEYLDLLEKVKDSGKPKGDRTGTGTISVFGHQMRFNLEDSFPLLTTKKIHFKSVAYELLWFLKGDTNINYLKENGVSIWDEWADENGDLGPVYGKQWRKWEGKNNIHDQVTEVIKQIKDNPDSRRHIVSAWNVADIPSMALAPCHILFQFYVQDGKLSCQLYQRSADIFLGVPFNIASYSLLTHMIANICDLKVGEFVHTLGDAHLYTNHLEQAEEQLSRKPLDPPQIIVKDKESIDDYEFEDFEIVNYQFHPHIPAKVAI

SEQ ID NO: 106493 - protein, 287 aa, Unknown
  Bacterial polypetide isolated from the Sargasso Sea
MKVYLDLLRHILENGEEKDDRTNTGTISSFGHQLEFDLEQGFPAVTTKSLAWKGVVSELLWFLEGSDDERRLAEIRFNKDRSEITDLEKYSTIWTDNADSQGKELGYENSETKKILGPVYGVQWRNWNGNDQVKNLLDGLKNNPDGRRHILSAWNVGEINKMALPPCHVMSQFYIHKDTISCHMYQRSADMFLGVPFNIASYALLLSIFAQILGLKPKRFIHSFGDAHIYKNSIEQVKEQISRTPRSLPKLIIPKLNSIDDLKKYSIDDFILEDYDPHPQIKAEMAV

SEQ ID NO: 106494 - protein, 323 aa, Unknown
  Bacterial polypetide isolated from the Sargasso Sea
MKQYLDLVRTILDTGTWQENRTGIRTISMPGAMLRFDLQQGFPAVTTKKLAFKSAIGELVGFLRATRSAADFRALGCKVWDANANENAQWLANPYRQGVDDLGDVYGVQWRQWPGYKVLDAGADAQIADATRRGFRIVTRFDEDGAPKVLLYKAIDQLRQCLDTIMENPSDRRILFHAWNPAVLDQIALPACHLLYQFLPNATKREISLCLYIRSNDVGLGTPFNLTEGAALLELVGRLTGYTPRWFTYFIGDAHIYENQLDMLQRQLTREPYDSPRLEIAERVPEYAKTGVYAPEWLEQIEPSDFSLVGYRHHEPLTAPMAV

SEQ ID NO: 106495 - protein, 274 aa, Unknown
  Bacterial polypetide isolated from the Sargasso Sea
MGEEKDDRTNTGTISSFGHQLDFDLEYGFPAVTTKSLAWKGVVSELLWFLEGSDDERRLAEIRFNKDRSDLTNLEKYSTIWTDNADKQGKELGYENNDLQKLLGPVYGVQWRSWAGIDQIKELIDGLKNNPNSRRHILSAWNVGEIDKMALPPCHVMSQFYVNRNYISCHMYQRSADMFLGVPFNIASYALLLSIIAEILGLKPKRFIHSFGDAHIYKNSIEQVKEQISRKPRSLPRLVIPKLNTIDDLKTCSVDDFILEGYDPHPPIKAKMAV

SEQ ID NO: 106496 - protein, 264 aa, Unknown
  Bacterial polypetide isolated from the Sargasso Sea
MQQYLNLLRHVMDNGEEKSDRTGTGTRSVFGHQMRFDLAESFPLLTTKKVHLKSIIYELLWFLKGETNIKYLKDNGVSIWDEWADSNGELGPVYGHQWRSWPSDDGGKIDQITQLIEQIENNPDSRRLIVSAWNPTDVEKMALPPCHCLFQFYVSNGKLSCQLYQRSADIFLGVPFNIASYALLTMMIAKVTKLNLGEFVHTFGDAHLYSNHFSQAEEQLARSPKSLPKMKITSNPKTIFDFEYEDFILEDYDPHPHISAPVAV

SEQ ID NO: 106497 - protein, 287 aa, Unknown
  Bacterial polypetide isolated from the Sargasso Sea
MKVYLDLLKFILENGHEKDDRTNTGTLSSFGHQLEFDLSEGFPAITTKSLAWKGVVSELLWFLEGSNDERRLAEIRFGKSRNDLKDLNKYSTIWTDNADKQGKELGYENTDTKKILGPVYGVQWRNWSGKDQLEELIYNLKNNPDSRRHILSAWNVGEINKMALPPCHVMSQFYIHNDEISCHMYQRSADMFLGVPFNIASYALLLSIIAEILNLKPKRFIHSFGDAHIYKNSIEQVKEQISRNPKKLPKLKIPNLNSLEDLNKYKIEDFILVDYDPHPPIKARMAV

SEQ ID NO: 106498 - protein, 288 aa, Unknown
  Bacterial polypetide isolated from the Sargasso Sea
MKSYLDLLSHILENGEKREDRTNVGTISSFGHQLKFDLRDGFPAVTTKKLAWKGVVSELIWFLEGSDDERRLAEIRYNKNRDELTDIDKYPTIWTDNADNQGKNLGYENSTLVKKLGPVYGVQWRNWDDKDQIKELLDSLKNNPMSRRHILSAWNVAMIDKMALPPCHLLAQFYVSSDQSLDCHMYQRSADMFLGVPFNIASYSLLMHILGKVLDLTPRYFIHSFGDAHIYLNSVDQVKEQIKRTPRKLPQLKFPDINNLEDLKGLSLDDFVLEGYDPHPAIKAKMAI

SEQ ID NO: 106499 - protein, 109 aa, Unknown
  Bacterial polypetide isolated from the Sargasso Sea
MRNYLNLVEKIINEGVDREDRTGTGTRSIFGEQLRFDLENNFPLITTKKVHLKSIIYELLWFIKGETNIKFLKDNKVTIWDEWADPNGELGPVYGSQWRSWPTHDGKKV

SEQ ID NO: 106500 - protein, 169 aa, Unknown
  Bacterial polypetide isolated from the Sargasso Sea
MLQYLNLCQRIIDNGKWILNKRTGKKCLTIIDADMVYNVAKNEFPLITTRKSYWKSAIAELLGYLRGYDNAADFRALGTKTWDANANENQSWLKNPARQGKDDMGRVYGVQGRSWAKPDGTVLDQLTKIVDNLTASVDDRGEILTFYNPGEFELGCLRPCMHTHTFSLS

SEQ ID NO: 106501 - protein, 115 aa, Unknown
  Bacterial polypetide isolated from the Sargasso Sea
YVASDQSLDCHMYQRSADMFLGVPFNIASYSLLMHILGKLLDLTPRYFIHSFGDAHIYLNSVDQVKEQIKRTPRVLPQLKFPDINNLEDLKNLSLDDFVLEGYDPHPAIKAKMAI

SEQ ID NO: 106502 - protein, 280 aa, Unknown
  Bacterial polypetide isolated from the Sargasso Sea
MEMIREIIDQGAVKGDRTGTGTISTFGNQMRFDLRRSFPLLTTKRVFWRGVAEELLWFVAGETNANKLADKNVRIWDGNGSREYLDSIGLTDREVGDLGPVYGFQWRHFGAEYTNMHADYTGKGVDQLAEVIHKIKNNPTDRRILLTAWNPAALKEMALPPCHMFCQFYVANGELSCQMYQRSCDMGLGVPFNIASYSLLTCMIAQVCGLKPGDFVHCCGDTHVYSNHVEPLETQLLCEPRPFPILKINPEKKDIDSFTFEDFEIVGYDPHPKIAMEMAV

SEQ ID NO: 106503 - protein, 288 aa, Unknown
  Bacterial polypetide isolated from the Sargasso Sea
MKSYLDLLSHILENGEKREDRTNVGTISSFGHQLKFDLRDGFPAVTTKKLAWKGVVSELIWFLEGSDDERRLAEIRYNKNRDELTDIEKYPTIWTDNADNQGKNLGYENSSLVKKLGPVYGVQWRNWGEKDQIKELLDSLKNNPTSRRHILSAWNVAMIDKMALPPCHLLAQFYVSSDQSLDCHMYQRSADMFLGVPFNIASYSLLMHILGKVLDLTPRYFIHSFGDAHIYLNSVDQVKEQIKRAPRELPQLKFPDINNLEDLKDLSLDDFILEGYDPHPAIKAKMAI

SEQ ID NO: 106504 - protein, 276 aa, Unknown
  Bacterial polypetide isolated from the Sargasso Sea
MKNYLKALEYCFENGDFVKSRAGNVKKAFGYQMRFNLEDGFPAVTTKKLAWKAVVSELLWFLEGSNDERRLAEIQYEDTKENLEDKKTIWTQNANADYWKNKSKFKGDVGRIYGVQWRNFNGVDQIVNLIEGLKKNPHSRRHILTAWNPAELDQMSLPPCHAFSQFYISNNKLSCQLYQRSCDMFLGVPFNIASYSLLIHILAKECGYQVGEFILSLGDFHIYEEHFDQVKIQLTREPKTHPNLQFEQKKINEYKTSDFELINYEYHPKIVAPMNV

SEQ ID NO: 106505 - protein, 288 aa, Unknown
  Bacterial polypetide isolated from the Sargasso Sea
MKQYIKALEHVLEKGKQREDRTGVGTRGVFGYQMRFDLRNSFPAVTTKKLAWKSVVSELLWFLEGSTDERRLAEIHFGKPREKIVDKKTIWTANANKQGVELGYQNNETQKELGPVYGKQWRSWGEDVGGVDQIKKIISDLKSNPNSRRHIVSAWNVDKIGEMALPPCHTMFQFHIQDKELSCQLYQRSADMFLGVPFNIASYSLLVYILSSILDLNPGNFIWTGGDCHIYNNHINQVKEQVKREPLEAPTLIMPNFKSIEEVLKSKPTDYELLNYKPMDSIKAPMAV

SEQ ID NO: 106506 - protein, 264 aa, Unknown
  Bacterial polypetide isolated from the Sargasso Sea
MRQYLELLECVLHNGVKREDRTGTGTKSIFGYQMRFNLLDGFPLVTTKRLHIKSIIYELLWFLEGGTNIKYLNDKGVSIWDEWADDDGELGPTYGNQWRSWTSTDGEKHDQISKVITSIKDNPYSRRHIVSAWNVGDLDKMNLPPCHILFQFYVSKGKLSCQLYQRSADIFLGIPFNIASYSLLTMMVADQVGLKYGDFIHTLGDAHLYENHIKQAEVQIQRSPKNLPEMKINKSVPSIFDYEYDDFMLNNYDAHEHIKADVAV

SEQ ID NO: 106507 - protein, 276 aa, Unknown
  Bacterial polypetide isolated from the Sargasso Sea
MKQYLDALRYCYNNGSDVESRAGGVRKSFGYQMHYDLSKGFPAITTKKLAWKSVVSELLWFIEGSDDERRLAEILYNDSRENLKDKKTIWTQNALADYWKSQARFEGDVGKIYGVQWRNFNGEDQVLNLIKGLKEDPNGRRHIISAWNPPEIKNMSLPACHAFSQFFISNNKLSCQLYQRSCDMFLGVPFNIASYSLLTHMLARECKLEVGTFIHSLGDFHIYKEHIEQVKIQLERVPKKLPKLQFETKDFFKYNVNDFKLTNYQHHEKIDALMNV

SEQ ID NO: 106508 - protein, 117 aa, Unknown
  Bacterial polypetide isolated from the Sargasso Sea
MQEYLDLLEKVKNSGKPKGDRTGTGTISVFGHQMRFNLEDSFPLLTTKKIHFKSVAYELLWFLKGDTNINYLKENGVSIWDEWADENGDLGPVYGKQWRKWEGKNNIHDQVTEVINR

SEQ ID NO: 106509 - protein, 276 aa, Unknown
  Bacterial polypetide isolated from the Sargasso Sea
MKQYITALKYCFEKGSDVESRAGKVRKNFGFQMRFDLQNGFPAMTTKKLAWKSVVSELLWFLEGSDDERRLAEILYEDKRENLKDKKTIWTQNANSNYWRDKAKFEGDVGRIYGVQWRDFNGVDQIKNLIQGIKSDPNGRRHILSAWNPSEIHLMSLPPCHAFSQFYVSKKKISCQLYQRSCDMFLGVPFNIASYSLFLHLIAAECSLEVGEFILTLGDYHIYHEHFDAVKEQISRVPKDLPNLVFNKKNIFDYSIKDFTLENYDPHPTIKAKMNI

SEQ ID NO: 106510 - protein, 108 aa, Unknown
  Bacterial polypetide isolated from the Sargasso Sea
MKQYLDLLKLIKETGTKKEDRTGTGTISIFGHQMRFDLQEGFPLMTTKKVNLDSIIHELLWFIKGDTNIRYLVKNGVNIWNDWPFQSWLNQTGQSEKYTMHSKEWKNM

SEQ ID NO: 106511 - protein, 301 aa, Unknown
  Bacterial polypetide isolated from the Sargasso Sea
MKQYLDLLNLIKETGIKKEDRTGTGTISIFGHQMRFDLQKGFPLMTTKRVNLDAIIHELLWFIRGDTNIRYLIQNNVNIWNDWPFQNWLNETGKADHYPIHSDDRKDMMKMFIEKVMNDDEFASRYGDLGPVYGKQWRDFEGVDQLELVIKDIKTNPNSRRLIVSAWNPKDIPVMIKSGLPPCHTLFQFYVSNGKLSCQLYQRSADVFLGVPYNIASYALLTLMIAKVTGLEAGEFIHSLGDTHIYLNHLNQVDEQLSRAPHDLPKLEIFNDKNDISNFDISDFKLTEYNPHPFIPAPIAV

SEQ ID NO: 106512 - protein, 264 aa, Unknown
  Bacterial polypetide isolated from the Sargasso Sea
MQQYLDLMKHILAEGVDKSDRTGTGTRSVFGYQMRFDLSKGFPLVTTKKCHMRSIIHELLWFLKGDTNIAYLRENKVSIWDEWADENGDLGPVYGAQWRSWPTQSGDAIDQIAQVIAQIKSQPDSRRLIVSAWNVGELDKMALAPCHAFFQFYVADGKLSCQLYQRSCDVFLGLPFNIASYALLTMMVAQQCDLALGDFVWTGGDTHLYSNHMEQTALQLSREPRSLPTMTILRKPASIFDYQFEDFELTHYDPHPHIKAPVAV

SEQ ID NO: 106513 - protein, 306 aa, Unknown
  Bacterial polypetide isolated from the Sargasso Sea
MYTHDDYWIFYVVIFQEKNMKAYLDLLQYILENGEEKSDRTNTGTISSFGHQFEFDLEKGFPAVTTKSLAWKGVVSELLWFLEGSDDERRLAEIRFNKDRSELTNLEKYSTIWTDNADNQGKELGYENSDTKKILGPVYGVQWRDWCGIDQIKYLLKGLKENPDGRRHILSAWNVGEIEKMALPPCHVMSQFYIHNNSISCHMYQRSADMFLGVPFNIASYALLLSIFAEILDLQPKRFIHSFGDAHIYKNSIDQVKEQISREPKPLPNLKIPKINSIEDIKKYSVDDFILENYNPHPPIKAEMAV

SEQ ID NO: 106514 - protein, 76 aa, Unknown
  Bacterial polypetide isolated from the Sargasso Sea
MKQYISLLENVIRNGVQKEDRTGTGTKSIFGWQMRFDLSKGFPLLTTKKLHFKSIAYELLWFIRGDTNIEYLNKMV

SEQ ID NO: 106515 - protein, 178 aa, Unknown
  Bacterial polypetide isolated from the Sargasso Sea
EKGDLGPVYGSQWRSWEAKDKTIDQITEVIEQIKNNPESRRLIVSAWNVGELDNMALAPCHALFQFYVANGKLSCQLYQRSADIFLGVPFNIASYALLLMMIAKVTKLDLGEFVHTFGDAHLYLNHLEQVDVQLKRKPYALPQIKLNPDINDIFEFQYEDFKLINYQSHPKISAPIAI

SEQ ID NO: 106516 - protein, 264 aa, Unknown
  Bacterial polypetide isolated from the Sargasso Sea
NLQDGFPLVTTKKVNFDSILHELLWFVKGDTNIRYLVENNVNIWNEWPFQNWLEETNQIKNLEMHSQEWKDKLTGFIDLIKTDNAFAEQYGDLGPVYGKQWRDFEGIDQLRLVVDDLKNNPNSRRHIVSAWNPKEIPIMIKSGLPPCHTLFQFYVSEGRLSCQLYQRSADVFLGVPYNIASYALLTCMIASVIGLKVGDFVHSLGDTHIYLNHLDQVEEQLSRKPHPLPNININKKDDLFDYEFEDFTLVDYQSHPFISAPIAV

SEQ ID NO: 106517 - protein, 251 aa, Unknown
  Bacterial polypetide isolated from the Sargasso Sea
RQEGKEKGDRTGTGTISVFGYQMRYDLSQNFPLLTTKKVHFKSMAYELLWFLKGDTNISYLKDNGVSIWDEWADDNGDLGPVYGKQWRKWEGLNGAHDQIKQVIEKIKSNPNSRRHIVSAWNVSDIQSMALAPCHILFQFYVVEGKLSCQLYQRSADIFLGVPFNIASYALLTHMVAKVCNLEVGEFIHTLGDAHLYKNHFEQADEQLSRTPLTPPQIKIKPRNNIDDFVYEDFELINYEHHPHIAAKVAV

SEQ ID NO: 106518 - protein, 278 aa, Unknown
  Bacterial polypetide isolated from the Sargasso Sea
MYTHDDYWIFYVVIFQEKNMKAYLDLLQYILENGEEKSDRTNTGTISSFGHQFEFDLEKGFPAVTTKSLAWKGVVSELLWFLEGSDDERRLAEIRFNKDRSELTNLEKYSTIWTDNADNQGKELGYENSDTKKILGPVYGVQWRDWCGIDQIKDLLKGLKENPDGRRHILSAWNVGEIEKMALPPCHVMSQFYIHNNSISCHMYQRSADMFLGVPFNIASYALLLSIFAEILDLQPKRFIHSFGDAHIYKNSIDQVKEQISREPKPLPNLKIPKMILS

SEQ ID NO: 106519 - protein, 105 aa, Unknown
  Bacterial polypetide isolated from the Sargasso Sea
SCQLYQRSADVFLGVPFNIASYALLLSLVASVTNYKVGEFVYTLGDFHIYKNHIEQAKIQLERDPMKLSKLKLNEKIDDIFKFTYEDIQIEDYSCHPHIKADIAI

SEQ ID NO: 106520 - protein, 133 aa, Unknown
  Bacterial polypetide isolated from the Sargasso Sea
MKQYLDLVRTILDTGTWQENRTGIRTISMPGAMLRFDLQQGFPAVTTKKLAFKSAIGELVGFLRASRSAADFRDLGCKVWDANANQNPQWLANPYRQGPDDLGDVYGVQWRQWPAYKVLDAGASAQLADATAR

SEQ ID NO: 106521 - protein, 137 aa, Unknown
  Bacterial polypetide isolated from the Sargasso Sea
SAWNVGKIDSMALPPCHVMSQFYVSKNDRLSCQMYQRSADMFLGVPFNIASYALLQSILANILNLIPGEFVHTFGDAHIYNNSIEQVKEQLLREPKKLPKLIMPNLNSIDSLNDCSVDDFILEGYESHPALKAPMAI

SEQ ID NO: 106522 - protein, 250 aa, Unknown
  Bacterial polypetide isolated from the Sargasso Sea
MKSYLNLLSHILENGEKREDRTNVGTISSFGHQLKFDLRDGFPAVTTKKLAWKGVVSELIWFLEGSDDERRLAEIRYNKNRDELTDIDKYPTIWTDNADNQGKNLGYENSSLVKKLGPVYGVQWRNWDDKDQIKELLDSLKNNPTSRRHILSAWNVAMIDKMALPPCHLLAQFYVSSDQSLDCHMYQRSADMFLGVPFNIASYSLLMHILGKVLDLNPRYFIHSFGDAHIYLNSVDQVKEQIKRTPRGLP

SEQ ID NO: 106523 - protein, 274 aa, Unknown
  Bacterial polypetide isolated from the Sargasso Sea
MKQYLDLVSHVMENGVLKEDRTGTGTKSVFGYQMRFDLNDGFPLVTTKKLHLKSIIYELLWFLKGDTNINYLKEKGVKIWDGWANENGDLGPVYGSQWRNWNGDNIDQISDLINTINNNPKSRRMIVSAWNPSVLPDTSKSFSENVKNGKAALPPCHAFFQFYVAENKLSCQLYQRSADIFLGVPFNIASYSLFTHMIAHVCNLEVGEFIHTFGDAHIYTNHFEQVNLQLSRKPKKLPKLLINRKVRDIFDFQFEDFEILDYDPHPHIKGVVSI

SEQ ID NO: 106524 - protein, 264 aa, Unknown
  Bacterial polypetide isolated from the Sargasso Sea
MQQYLDLMKHILAEGVDKSDRTGTGTRSVFGYQMRFDLSKGFPLVTTKKCHMRSIIHELLWFLKGETNIAYLRDNKVSIWDEWADENGDLGPVYGAQWRSWPTQGGEAIDQISQVIAQIKSQPDSRRLIVSAWNVGELDKMALAPCHAFFQFYVADGKLSCQLYQRSCDVFLGLPFNIASYALLTMMVAQQCDLALGDFVWTGGDTHLYSNHMEQTALQLTREPRPLPTMTILRKPASIFDYQFEDFELTHYDPHPHIKAPVAV

SEQ ID NO: 106525 - protein, 243 aa, Unknown
  Bacterial polypetide isolated from the Sargasso Sea
TGTGTYSVFGFQMRFDLGESFPLLTTKKMFLKGIIHELLWFLSGSTNIKYLVDNDVHIWDEWADEHGELGPVYGSQWRSWPGQDGATIDQIDRLVGDLKSNPFSRRHIVSAWNVAEVDNMALPPCHTLFQFYVAEGRLSCQLYQRSADIFLGVPFNIASYALLTLMVARVCELKPGFFVHTLGDAHLYANHLEQTDRQLAREPKTPPQMIIKEGIKDIFSFEYSDFQLVGYESHPGIKAPIAV

SEQ ID NO: 106526 - protein, 288 aa, Unknown
  Bacterial polypetide isolated from the Sargasso Sea
MKQYIKALEHVLEKGKQRQDRTGVGTRGVFGYQMRFHLRNSFPAVTTKKLAWKSVVSELLWFLEGSTDERRLAEIHFGKPREEIVDKKTIWTANANKQGVELGYQNNETQKELGPVYGKQWRSWGEDTGGVDQIKKIISDLKSNPNSRRHIVSAWNVDKIDEMALPPCHTMFQFHIQDKELSCQLYQRSADMFLGVPFNIASYSLLVYILSSILDLNPGSFIWTGGDCHIYNNHLDQVKEQVKREPLEPPRLIMPNFKSIKEVLESKPTDYELLNYKPMDSIKAPMAV

SEQ ID NO: 106527 - protein, 284 aa, Unknown
  Bacterial polypetide isolated from the Sargasso Sea
MKSYLNLLSHILENGEKREDRTNVGTISSFGHQLKFDLRDGFPAVTTKKLAWKGVVSELIWFLEGSDDERRLAEIRYDKNRDELTDMDKYPTIWTDNADNQGKNLGYENSSLVKKLGPVYGVQWRNWDDKDQIKELLDSLKNNPTSRRHILSAWNVAMIDKMALPPCHLLAQFYVSSDQSLDCHMYQRSADMFLGVPFNIASYSLLMHILGKVLDLTPRYFIHSFGDAHIYLNSVDQVKEQIKRTPRELPSLKFPDINNLEESKGSSLDDFILEGYDPHPAIKA

SEQ ID NO: 106528 - protein, 274 aa, Unknown
  Bacterial polypetide isolated from the Sargasso Sea
MKQYLELVSHVMENGVLKQDRTGTGTKSVFGYQMRFDLNDGFPLVTTKKLHLKSIIYELLWFLKGDTNINYLKEKGVKIWDGWANEDGELGPVYGSQWRNWNGDNIDQISDLIDTINNNPKSRRMIVSAWNPSVLPDTSKTFSENVKNGKAALPPCHAFFQFYVAENKLSCQLYQRSADIFLGVPFNIASYSLFTHMIAHVCDLEVGEFIHTFGDAHIYTNHFEQVNLQLSRKTKKLPKLLINRKVKDIFDFQFEDFEILDYDPHPHIKGAVSI

SEQ ID NO: 106529 - protein, 287 aa, Unknown
  Bacterial polypetide isolated from the Sargasso Sea
MKAYLDLLKYIIENGDEKEDRTNTGTISSFGHQLEFNLEHGFPAVTTKSLAWKGVVSELLWFLEGSDDERRLAEIRFNKDRSELKDLDKFSTIWTDNADNQGKELGYTNSETEKILGPVYGVQWRDWSGKDQIKDLLRNLKENPDSRRHILSAWNVSEIDKMALPPCHVMSQFYISNKSISCHMYQRSADMFLGVPFNIASYALLLCIFGEILNLKPKRFIHSFGDAHIYLNSIEQVKEQISREPKSLPTLRMPKLNSFEDIKNCKVDDFILENYDHHPPIKAKMAV

SEQ ID NO: 106530 - protein, 300 aa, Unknown
  Bacterial polypetide isolated from the Sargasso Sea
MEQYLNLLTEIKSKGTKKEDRTGTGTISIFGHQMRFDLNDGFPLVTTKKVNFNAILHELLWFIRGETNIEYLVKNNVNIWNEWPFQSWLEKTKQNEGLTMHSKEWKDKLQEFIDLIKKDNSFAKEYGDLGPVYGKQWRDFEGVDQLAQVIEDLKKNPNSRRHIVSAWNPKEIPTMIKSGLPPCHTLFQFYVADGKLSCQLYQRSADVFLGVPYNIASYALLTYMIASVTDLEVGDFVHSLGDTHIYLNHLVQVDEQLSREPHQLPKIEINKKDNLFDYNFEDFKLIDYNSHPFISAPIAV

SEQ ID NO: 106531 - protein, 204 aa, Unknown
  Bacterial polypetide isolated from the Sargasso Sea
MGVHIWDEWETDSGDLGPIYGFQWRNWVDHNNGQHIDQIQQVIDQIRSNPSSRRIIVSAWNVADLPDESISPQENVQEGKMALAPCHAIFQFFVSQGKLSCQLYQRSCDTFLGLGFNIASYSLLTHMIAQQCDLDVGDFIWTGGDVHLYLNHLEQANEQLKREPYPLPTLKINRKPASIFEYKYEDFELINYESHPHISAPISI

SEQ ID NO: 106532 - protein, 278 aa, Unknown
  Bacterial polypetide isolated from the Sargasso Sea
MKQYLDLLQKILDEGEVKDDRTGTGTKSLFGHQMRFDLNQGFPILTTKKIFFKGVVYELLWFLDGSTDNTLLKENGVHIWDEWETDKGDLGPIYGFQWRNWIDHNNGQHIDQIEQVIEQIRSNPSSRRIIVNAWNVADLPDESISPQENVKLGKMSLAPCHALFQFFVSQGKLSCQLYQRSCDTFLGLGFNIASYSLLTHMIAQQCDLDVGDFIWTGGDVHLYLNHLDQANEQLKREPYPLPKLKINRKPASIFDYKYEDFELINYQSHPHISAPISI

SEQ ID NO: 106533 - protein, 278 aa, Unknown
  Bacterial polypetide isolated from the Sargasso Sea
MEQYLDLLQKILDEGQVKDDRTGTGTKSFFGHQMRFDLNQGFPILTTKKIFFKGVVYELLWFLDGSTDNNALKDNGVHIWDEWETDSGDLGPIYGFQWRNWVDHNNGQQIDQIQQVIDQIRSNPSSRRIIVSAWNVADLPDESISPQENVQEGKMALAPCHAIFQFFVSQGKLSCQLYQRSCDTFLGLGFNIASYSLLTHMIAQQCDLDVGEFIWTGGDVHLYLNHLEQANEQLKREPYPLPTLKINRKPASIFEYKYEDFELINYESHPHISAPISI

SEQ ID NO: 106534 - protein, 262 aa, Unknown
  Bacterial polypetide isolated from the Sargasso Sea
MQEYLDLLEKVKNSGKPKGDRTGTGTVSIFGHQMRFNLEDSFPLLTTKKIHFKSVAYELLWFLKGETNISYLKENGVSIWDEWADDNGDLGPVYGKQWRKWEGKNGIHDQVAEVIKQIKENPNSRRHIVSAWNVADIPSMALAPCHILFQFYVQDGRLSCQLYQRSADIFLGVPFNIASYALLTHMIANICNLKVGEFVHTLGDAHLYNNHLEQAEEQLSRKPLEPPKIIIKARESIDDYEFEDFEIVNYQFHPHIPAKVAI

SEQ ID NO: 106535 - protein, 215 aa, Unknown
  Bacterial polypetide isolated from the Sargasso Sea
MKSYLDLLSHILENGEKREDRTNVGTISSFGHQLKFDLRDGFPAVTTKKLAWKGVVSELIWFLEGSDDERRLAEIRYNKNRDELTDIEKYPTIWTDNADNQGKNLGYENSSLVKKLGPVYGVQWRNWGEKDQIKELLDSLKNNPTSRRHILSAWNVAMIDKMALPPCHLLAQFYVSSDQSLDCHMYQRSADMFLGVPFNIASYSLLMHILGKVLD

SEQ ID NO: 106536 - protein, 74 aa, Unknown
  Bacterial polypetide isolated from the Sargasso Sea
MEQYLNLLTEIKSKGTKKEDRTGTGTISIFGHQMRFDLNDGFPLVTTKKVNFNAILHELLWFIKGETNIEYLVK

SEQ ID NO: 106537 - protein, 219 aa, Unknown
  Bacterial polypetide isolated from the Sargasso Sea
CCGSSKATPNIQYLKDNKVSIWDEWATEQGDLGPVYGAQWRSWQTPDGRVIDQISQLIHDIKTNPDSRRLIVSGWNPAVLPDTKFSPKDNAAMGKQALPPCHTLFQFYVHDGKLSCQLYQRSADIFLGVPFNIASYALLTMMVAQVCDLTPGDFVHTFGDAHLYSNHMDQVNEQLSRTPHPLPQMQLNPAIKDIFGFSIDDFELVNYLAHPAIKAPIAI

SEQ ID NO: 106538 - protein, 237 aa, Unknown
  Bacterial polypetide isolated from the Sargasso Sea
KGDTNIRYLVENNVNIWNEWPFQNWLEETNQSKNLEMHSQKWKDKLTGFIDLIKTDNAFAEQYGDLGPVYGKQWRDFEGIDQLSLVVDDLKINPNSRRHIVSAWNPKEIPIMIKSGLPPCHTLFQFYVSEGRLSCQLYQRSADVFLGVPYNIASYALLTYMIASVTGLKVGDFVHSLGDTHIYLNHLDQVEEQLSRKPHPLPNININKKDDLFDYEFEDFTLVDYKSHPFISAPIAV

SEQ ID NO: 106539 - protein, 260 aa, Unknown
  Bacterial polypetide isolated from the Sargasso Sea
MKKPSHIRAKKHLSQNFLTDENVIKKIINSFDLKKDDHVIEIGPGYGAMTFPIMEIVDSIDVIELDKNLANHLKDHDQKKSINVINKDALSFDFTSLKKKRKIRLIGNLPYHISTPLLFHLLNFSEIFHDFHVMVQKEVADRMVSSHNKKTYGRLSVAIQSRCVALKMLDIKPGAFHPKPKVLSSIVKLQPKKSLEGKIQSRLDEIIRMAFNQRRKKIRNSLKELFIPEMIFECGIDPNQRAENLSVDDYIKLSEIEGSI

SEQ ID NO: 106540 - protein, 300 aa, Unknown
  Bacterial polypetide isolated from the Sargasso Sea
GMSGGVDSAVAASVLKEKGYDVEALFMKNWQEDSQYCTAEQDYNDALQVCDNLKIQLHTVNFAKEYWENVFEHFLEEYKNGRTPNPDILCNNEIKFKKFLNYAFELGADKIATGHYVRNEEKNGNIKLIKGVDSKKDQSYFLHGLNQKQVSNSLFPIGDYVKSEVRKMAEEQGFNNFKKKDSVGICFIGERNMKEFLKQYLPANPGYIITDKGESIGEHDGLMYYTIGQRKGLGVGGGHSDLDAPWYVIEKDLGNNQLIVAQGHNNSALYHKQLKASNLHWVSGSPPNGDRYNAKVRYRA

SEQ ID NO: 106541 - protein, 181 aa, Unknown
  Bacterial polypetide isolated from the Sargasso Sea
QGLITHDKKDSTGICFIGERKLKDFLQKYLPAQPGDIYTVDGDKIGQHDGLMYHTLGQRKGLRIGGLKDGDDQPWYVVSKDLINNRLIVAQGHDHPSMFSKGLVANQLHWVDRTGPQQALRCTVKTRYRQTDIPCTLTPMPDGTVVVVFDQPQKAVTPGQSAVFYSDEICLGGGIINSAIQ

SEQ ID NO: 106542 - protein, 298 aa, Unknown
  Bacterial polypetide isolated from the Sargasso Sea
EEDDGTEYCTAKEDLADAQSVADKLGIRLHSANFAAEYWDGVFDHFLSEYRAGRTPNPDILCNREIKFRAFLDYATQLGADLIATGHYVQTDAAGGTTRLRKGADGNKDQSYFLHQVDHQALGRSLFPVGNVDKTLVREKAASAGFVTARKKDSTGICFIGERRFRDFLKQYLPAQPGPIVSVDGDELGEHEGLMYHTIGQRQGLRIGGLANRPEAPWYVVNKNVTDNVLVVAQGNEHPALFKTQLTAADVIWISGQPPTLPLACHAKIRYRQADQPCEVSASGAKMQVSFITPQRAV

SEQ ID NO: 106543 - protein, 277 aa, Unknown
  Bacterial polypetide isolated from the Sargasso Sea
MSRVIVGMSGGVDSAVAASVLIEQGYDVEALFMKNWEEDSKYCTAEQDYNDALQVCDKLKIPLHTVNFVKEYWENVFEHFLEEYKNGRTPNPDILCNNEIKFKKFLDYAFELGADKIATGHYVRSEEKDGNVKLIKGADSKKDQSYFLHGLNQKQVSNSLFPIGGYVKSEVRKIAEEQGFNNFKKKDSVGICFIGERKMKEFLKEYLPANPGEIITSKGESVGEHDGLMYYTIGQRKGLGVGGGHSDLDAPWYVIEKDLVNNQLIVAQGHNNSALYH

SEQ ID NO: 106544 - protein, 271 aa, Unknown
  Bacterial polypetide isolated from the Sargasso Sea
MNRIILGMSGGVDSAVAASELIKQGYEVEAVFMKNWEDDSRFCTSEKDYKDALQVCDTLDIALHSVNFAKEYWDRVFKHFLNEYKNGRTPNPDILCNTEIKFKEFLNYAFDLGAKKIATGHYARLRDYNCDFQLLKGLDESKDQSYFLYGLDQKQISNTIFPIGNLQKTDLRKKAKDLGFTNFNKKDSVGICFIGERNIKEFLKQYIPENPGHIITSKGEKIGQHEGLMYYTLGQRKGLGIGGGHSKSNGAWYVIDKDLTNNELVVAQGHS

SEQ ID NO: 106545 - protein, 85 aa, Unknown
  Bacterial polypetide isolated from the Sargasso Sea
MSDNSSKKVIVGMSGGVDSSVSAYLLMQQGYQVEGLFMKNWEEDDDSEYCAAAEDLKDAQAVCDKLGIKLHKVNFAAEYWDNVFE

SEQ ID NO: 106546 - protein, 212 aa, Unknown
  Bacterial polypetide isolated from the Sargasso Sea
MSEKKHVIVGMSGGVDSSVSAYLLIESGYHVEGLFMKNWEEDDGTEYCTAKDDLTDATSVCNDLKIKLHVANFSAEYWDNVFEHFLTEYQSGRTPNPDILCNKEIKFKAFLEYALDLGADFIATGHYVRSKKIDGTSILLKGLDDEKDQSYFLSRVPEFCIDKSLFPIGALKKSEVRKIAKDHNFDTHDKKDSTGICFIGERKFKDFLSKYV

SEQ ID NO: 106547 - protein, 360 aa, Unknown
  Bacterial polypetide isolated from the Sargasso Sea
MNFNEKIIVGMSGGVDSSISAIILKDMGFNIKGLFMKNWEEDDYDGNCNAKNDYKDAKRVADKLGIELLTVNFSDRYWNLVFKRFIDGLNNGITPNPDIFCNREIKFHYFLNHVLSLEYDKLATGHYAKIKTKDNKYTLNIPKDKIKDQTYFLYVINQYIMNHLVFPLNDISKSDVKNIAKSFDIKLFEKKESMGICFIGKKNYTNLISKYIENIPGKIVDDDNKVLGKHNGLFYYTIGQRKGIGIGGTKNRSEKPWYVVDKKIDKNYLVVSQDVNRLDYKGEIELNEINWINNHPDENKEYNARFRHGGKLLPVTLKQRDEKWYLNLKTSERAPTCGQSAVVYDKDECIGGGIISRLCF

SEQ ID NO: 106548 - protein, 361 aa, Unknown
  Bacterial polypetide isolated from the Sargasso Sea
MTKINKTVVVGMSGGVDSSVAAYLLQQQGYKVQGLFMQNWQNEPGEVCSSEIDFNDASKICDQLNIPLHKANFSNEYWDRVFKEFLSEHEKGRTPNPDILCNREIKFKSFLDYALKIGADYIATGHYAKIEKRDNQFILKRSKDLNKDQTYFLHEVNGKDFAKCIFPLEELNKHEVREIAEKNNFINYDKKDSVGICFVGERNLKDFLRRFIKFHTGDIKDSDGNKIGKHPGALLFTQGQRQGLNVGGVKDKPELPWYVYDKSIELNEVYVCQGEFNDLLMSSGLIMEEMKWINPIDPPNKLNCEVQVRHRGKPVKCEAHFLNDCVKILFSENIRAIAPGQSAVLYKNNECLGGGIIAKAL

SEQ ID NO: 106549 - protein, 360 aa, Unknown
  Bacterial polypetide isolated from the Sargasso Sea
MNFNEKIIVGMSGGVDSSISAIILKDMGFNIKGLFMKNWEEDDHDGNCNAKNDYQDAKRIADKLGIELLTVNFSDKYWSLVFKRFIDDLNSGITPNPDIFCNREIKFHYFLNHVLSLEYDKLATGHYAKIKIKNDKYTLNIPKDKIKDQTYFLYVINQYIMNHLVFPLNDISKSDVKSIAKSFDIKLFEKKESMGICFIGKKNYTNLISNYITNIPGKIVDDDNKVLGKHNGLFYYTIGQRKGIGIGGTKNRSEKPWYVVDKKIEENYLVVSQDTDRLNYKGEIELNEINWINNHPEENKEYHARFRHGGKLLPVTIIQRDEKWYLDLKANERAPTCGQSAVLYDEDECIGGGIINKLCF

SEQ ID NO: 106550 - protein, 57 aa, Unknown
  Bacterial polypetide isolated from the Sargasso Sea
MTDNSQIKVIVGMSGGVDSSVSAYLLQQQGYQVEGLFMKNWEEDDTDEYCSAAPGFG

SEQ ID NO: 106551 - protein, 151 aa, Unknown
  Bacterial polypetide isolated from the Sargasso Sea
MSENSHIKVIVGMSGGVDSSVSAYLLQQQGYQVEGLFMKNWEEDDNDEYCAAAEDLKDAQAVCDKLGIELHTVNFAAEYWDNVFEYFLEEYKAGRTPNPDIMCNKEIKFKAFLEFAAQALGADFIATGHYVRRELRDDKYVMCRGLDNNKD

SEQ ID NO: 106552 - protein, 244 aa, Unknown
  Bacterial polypetide isolated from the Sargasso Sea
MSDNSSKKVIVGMSGGVDSSVSAYLLMQQGYQVEGLFMKNWEEDDDSEYCAAADDLRDAQAVCDKLGIKLHKVNFAAEYWDNVFEYFLEEYKAGRTPNPDIMCNKEIKFKAFLEFAAEALGADFIATGHYVQRREVEGHWQLLRGLDTNKDQSYFLYTIGEEHVAQTLFPVGHLEKPLVRAIAEEQGLITHDKKDSTGICFIGERKFKDFLQKYLPAQPGDIYTVDGDKIGQHDGLMYHTLGQR

SEQ ID NO: 106553 - protein, 163 aa, Unknown
  Bacterial polypetide isolated from the Sargasso Sea
KFKDFLAKFLPAQPGPIETVDGKVIGEHQGLMYHTLGQRKGLGIGGRKDATEEAWYVVVKEVERNTLVVAQGEHPRLYSDGLIASQLHWVDRTPIRAPRRCTVKTRYRQEDIPCLIQPIDDETIRVIFDEKQAAVTPGQSAVFYDGEVCLGGGIIEQRFSHPV

SEQ ID NO: 106554 - protein, 154 aa, Unknown
  Bacterial polypetide isolated from the Sargasso Sea
MTSIEPTHTGKKVIVGMSGGVDSSVSAYLLMQQGYQVEGLFMKNWEEDDNNEYCAAAEDLKDAQAVCDKLGIKLHTVNFAAEYWDNVFEYFLAEYKAGRTPNPDIMCNKEIKFKAFLEFADEILDADYIAMGHYVRRRDNSDGSTQMLRGVDGN

SEQ ID NO: 106555 - protein, 300 aa, Unknown
  Bacterial polypetide isolated from the Sargasso Sea
NGKKVIVGMSGGVDSSVSAYLLIQQGYEVEGLFMKNWEEDDTDEYCAAADDLKDAQAVCDKLGIKMHTVNFAAEYWDNVFEYFLAEYKAGRTPNPDIMCNKEIKFKAFLEFADEILDADYIAMGHYVRRRDNRDGSVEMLRGVDGNKDQSYFLYTLSHEQVARSLFPVGELEKHEVREIAKKMGLITHDKKDSTGICFIGERKFTDFLATYLPAQPGDIENSEGEVIGTHQGLMYHTLGQRKGLGIGGLKNSSEDPWYVVEKDLIRNVLVVAQGANHPRLMSQGMTVNQLHWVDRKGPAN

SEQ ID NO: 106556 - protein, 372 aa, Unknown
  Bacterial polypetide isolated from the Sargasso Sea
MTSIEPTHTGKKVIVGMSGGVDSSVSAYLLMQQGYQVEGLFMKNWEEDDNDEYCAAAEDLKDAQAVCDKLGIKLHTVNFAAEYWDNVFEYFLAEYKAGRTPNPDIMCNKEIKFKAFLEFADDILDADYIAMGHYVRRRDNADGTTQMLRGVDNNKDQSYFLYTLSHEQVARSLFPVGELEKHEVREIAKQMGLITHDKKDSTGICFIGERKFTEFLGNYLPAQPGNIETAEGEVIGTHQGLMYHTLGQRKGLGIGGMKNSNDDPWYVVDKDLKRNVLVVGQGGHHPRLMSNGMFVNQLHWVDRKGPADGSQIVVKTRYRQQDIPCTLTYLDDNTLKVVFDEPVAAVTPGQSAVFYDGEVCLGGGIIDQLIRG

SEQ ID NO: 106557 - protein, 372 aa, Unknown
  Bacterial polypetide isolated from the Sargasso Sea
MTSIEPTHTGKKVIVGMSGGVDSSVSAYLLMQQGYQVEGLFMKNWEEDDNDEYCAAAEDLKDAQAVCDKLGIKLHTVNFAAEYWDNVFEYFLAEYKAGRTPNPDIMCNKEIKFKAFLDFADDILDADYIAMGHYVRRRDNADGTTQMLRGVDNNKDQSYFLYTLSHEQVARSLFPVGELEKHEVREIAKKMGLITHDKKDSTGICFIGERKFTEFLGNYLPAQPGNIETAEGEIIGKHQGLMYHTLGQRKGLGIGGMKNSNDDPWYVVDKDLKRNVLVVGQGGHHPRLMSNGMLVNQLHWVDRKGPAEGSQIVVKTRYRQQDIPCTLTYLDDNTLKVVFDEPVAAVTPGQSAVFYDGEVCLGGGIIDQLIRG

SEQ ID NO: 106558 - protein, 366 aa, Unknown
  Bacterial polypetide isolated from the Sargasso Sea
MSDNSSKKVIVGMSGGVDSSVSAYLLMQQGYQVEGLFMKNWEEDDDSEYCAAADDLRDAQAVCDKLGIKLHKVNFAAEYWDNVFEYFLEEYKAGRTPNPDIMCNKEIKFKAFLEFAAEALGADFIATGHYVQRREVDGHWQLLRGLDTNKDQSYFLYTIGEEHVAQTLFPVGHLEKPLVRAIAEEQCLITHDKKDSTGICFIGERKFKDFLQKYLPAQPGDIYTVDGDKIGQHDGLMYHTLGQRKGLRIGGLKDGDDQPWYVVSKDLINNRLIVAQGHDHPSMFSKGLVANQLHWVDRTGPQQALRCTVKTRYRQTDIPCTLTPMPDGTVVVVFDQPQKAVTPGQSAVFYSDEICLGGGIINSAIQ

SEQ ID NO: 106559 - protein, 366 aa, Unknown
  Bacterial polypetide isolated from the Sargasso Sea
MSDNSSKKVIVGMSGGVDSSVSAYLLMQQGYQVEGLFMKNWEEDDDSEYCAAAEDLKDAQAVCDKLGIKLHKVNFAAEYWDNVFEYFLEEYKAGRTPNPDIMCNKEIKFKAFLEFAAEALGADYIATGHYVQRREVEGHWQLLRGLDTNKDQSYFLYTIGEEHVAQTLFPVGHLEKPLVRAIAEEQGLITHDKKDSTGICFIGERKFKDFLQKYLPAQPGDIYTVDGDKIGQHDGLMYHTLGQRKGLRIGGLKDGDDQPWYVVSKDLVNNRLIVAQGHDHPSMFSKGLVANQLHWVDRTGPQQMLRCTVKTRYRQTDIPCTLTPMPDGTVVVVFDQPQKAVTPGQSAVFYSDEICLGGGIINSAIQ

SEQ ID NO: 106560 - protein, 200 aa, Unknown
  Bacterial polypetide isolated from the Sargasso Sea
MSVQSIVSDIESNASKKVIVGMSGGVDSSVSAYLLQQQGYQVEGLFMKNWEEDDNDEYCAAAEDLKDAQAVADKLGIELHTINFAAEYWDNVFEYFLEEYKAGRTPNPDIMCNKEIKFKAFLEFAAEDLGADYIATGHYVRRRKVDGKWQMLRGLDNNKDQSYFLYTLGEEHVAKTLFPVGDIEKPLVRKIAEEQGLITH

SEQ ID NO: 106561 - protein, 151 aa, Unknown
  Bacterial polypetide isolated from the Sargasso Sea
MSSYVFKSIIGNIELVSSKNRIIAVHRTRKKPNKTENKLLKRSALQIKMYLARKRRSLNFPTRQMGTKFQNRVWNYLQRIPYGRTTTYGDIARKLRTSPRAVGGALGRNNLMMTVPCHRVVGSDGKLTGFTSVGGLSTKRNLLNIEQKTKK

SEQ ID NO: 106562 - protein, 79 aa, Unknown
  Bacterial polypetide isolated from the Sargasso Sea
GLEHLRRVPYGRTTSYGQIAKKLRTSPRAVGGALGRNNLMMSVPCHRVVSKDGKLTGFTSVGGIKTKKKLLNVEQKTRK

SEQ ID NO: 106563 - protein, 125 aa, Unknown
  Bacterial polypetide isolated from the Sargasso Sea
MIGNIEVISGNNKITGISRTRKAITNTKDKLLLRAAFQINAYLARKRRSLSFPTRQMGTRFQNRVWNHLRRVPYGRTTSYGQIAKKLRTSPRAVGGALGRNNLMMSVPCHRVVSKDGKLTGFTSV

SEQ ID NO: 106564 - protein, 171 aa, Unknown
  Bacterial polypetide isolated from the Sargasso Sea
MLNLLEDTIDTPLGPLWVICDEQFRLRAVEWDQHSDRMEQLLDIHYRTEGYQRITAKNPGGLSDKLAEYFAGNLSIIDTLETATAGTPFQREVWQALRTIPCGQVMHYGQLAEQLGRPGAARAVGAANGSNPVSIVVPCHRVIGRNGTMTGYAGGVQRKEWLLRHEGYLLL

SEQ ID NO: 106565 - protein, 151 aa, Unknown
  Bacterial polypetide isolated from the Sargasso Sea
MSSYVFKSIIGNIELVSSKNRIIAVHRTRKKPNKTEDKLLKRSALQIKMYLARKRRSLNFPTRQMGTKFQNRVWNYLRRIPYGRTTTYGDIARKLRTSPRAVGGALGKNNLMMTVPCHRVVGTDGKLTGFTSVGGLSTKRNLLNIEQKTKK

SEQ ID NO: 106566 - protein, 152 aa, Unknown
  Bacterial polypetide isolated from the Sargasso Sea
ISCWKLLLVGDGVNIVKLGFPSGKMKLRRERNWTKDGLPFKQAICQLEAFFEGELKSFDLPLVVTGTSFRKLVWAGLMDIPYGETWSYSQLANHIGTPNACRAVGSANGVNPIPIIIPCHRVVGSDGSLTGFGGGLKTKEFLLELESKNVHR

SEQ ID NO: 106567 - protein, 150 aa, Unknown
  Bacterial polypetide isolated from the Sargasso Sea
MSSYVFKSIIGNIELVSSKNRIIAVHRTRKKPNKTEDKLLKRSALQIKMYLSRKRRSLNFPTNQTGTRFQNRVWNYLRRVPYGKTITYGDIARKLKTSPRAVGGALGRNSLMMSVPCHRVVGTDGKLTGFTSIGGVNTKRKLLSLEKKSR

SEQ ID NO: 106568 - protein, 163 aa, Unknown
  Bacterial polypetide isolated from the Sargasso Sea
MTLRYDTFDSPIGALTVAGDSRGIHHILFENNRYDAKGREHWQRDAHAVRDARLQLLQYLRGERTAFALPLAPHGTPFQLRVWRALADIPFGRTWSYVDLARHIDHPTASRAVGAANGRNPLPIVLPCHRVIGSNGALTGFGGGLDTKAALLKLEARRDSLFA

SEQ ID NO: 106569 - protein, 151 aa, Unknown
  Bacterial polypetide isolated from the Sargasso Sea
MSSYVFKSIIGNIELVSSKNRIIAVHRTRKKPNKTEDELLKRSGLQIKMFLARKRRTLNFPTRQMGTKFQNRVWNYLRRVPYGKTTTYGDIARKLKTSPRAVGGALGRNSLMMSVPCHRVVGSDGKLTGFTSVGGLNTKKDLLNIEQKTKK

SEQ ID NO: 106570 - protein, 161 aa, Unknown
  Bacterial polypetide isolated from the Sargasso Sea
MNIYYEYYKSPVGKLLLVGDGVNMMKLGFPSGKMKLRHERNWTKDRLPFRQAICQLEAFFEGELKSFDLPLVVTGTSFRKLVWAGLMDIPYGETWSYSQLANHIGTPNACRAVGSANGVNPIPIIIPCHRVVGSDGSLTGFGGGLKTKEFLLELESKNVDR

SEQ ID NO: 106571 - protein, 143 aa, Unknown
  Bacterial polypetide isolated from the Sargasso Sea
MIGNIEVISGNNKITSISRTRKAITNTKDKLLLRAAFQINAYLARKRRSLSFPTRQKGTRFQNRVWNHLRRVPYGSTTSYGQIAKKLRTSPRAVGGALGRNNLMMSVPCHRVVSKDGKLTGFTSVGGIKTKKELLNVEQKTRK

SEQ ID NO: 106572 - protein, 66 aa, Unknown
  Bacterial polypetide isolated from the Sargasso Sea
TISYLKLANSLNTSPRAVGNACGKNPLLIVIPCHRVLSIKKELTGFSALGGIVTKKKLLQIENIKV

SEQ ID NO: 106573 - protein, 61 aa, Unknown
  Bacterial polypetide isolated from the Sargasso Sea
IARKLRTSPRAVGGALGRNNLMMTVPCHRVVGSDGKLTGFTSVGGLSTKRNLLNIEQKTKK

SEQ ID NO: 106574 - protein, 151 aa, Unknown
  Bacterial polypetide isolated from the Sargasso Sea
MSSYVFKSLIGNIEVISGNNKITGISRTRKAITNTKDKLLLRAAFQINAYLARKRRSLSFPTRQMGTRFQNRVWNHLRRVPYGRTTSYGQIAKKLRTSPRAVGGALGRNNLMMSVPCHRVVSKDGKLTGFTSVGGIKTKKKLLNVEQKTRK

SEQ ID NO: 106575 - protein, 152 aa, Unknown
  Bacterial polypetide isolated from the Sargasso Sea
MLYKSSVLTPIGSLGLLANKEKLLKLSFKGLEDIPDKAKMDSKRFKLIFKEIEEYFAGDRKQFSFNYQVKSSPFSERVYSEMIKIPYGETLSYSELAKRSGRKLAYRAVGNVCGKNPLPLIIPCHRVIAVNSLGGFGGGLGIKKFLLNLETN

SEQ ID NO: 106576 - protein, 125 aa, Unknown
  Bacterial polypetide isolated from the Sargasso Sea
MDKNIDQNEVNKFAELADKWWDSSGEFKPLHNINPIRSEYIASKIDLKGKKVLDVGCGGGLLAEALYDLGAEVDGIDAAGPGIEVARIHAEREDKQINYATAQAEDFCIDKEGYYDVVTCLEVLE

SEQ ID NO: 106577 - protein, 100 aa, Unknown
  Bacterial polypetide isolated from the Sargasso Sea
MDKNIDQNEVNKFAELADKWWDSSGEFKPLHNINPIRSEYIASKIDLKGKKVLDVGCGGGLLAEALYDLGAEVDGIDAAGPGIEVARIHAEREDKQINYA

SEQ ID NO: 106578 - protein, 215 aa, Unknown
  Bacterial polypetide isolated from the Sargasso Sea
MTSVNKKEIDKFSKMANEWWDPEGKFKPLHKFNPIRIKYIKENIINNFKLKNKLRPLSGINILDVGCGGGLLSEPMSRMGAYVTGIDASNKNIKIAKLHSKKNKLKINYICSSPEKIKITKKFDVILNMEIVEHVEDIDFFLKSCSKLLKKDGLMFVATINKTLKSYVLAIVGAEYVLRWLPIGTHEWEKFVKPEDLEKILIKYKLSLIKLNGMN

SEQ ID NO: 106579 - protein, 162 aa, Unknown
  Bacterial polypetide isolated from the Sargasso Sea
YQVAATDPATRNIEIARNHAQQMGLDIDYHEGLIENLELKTFDAILVMEVVEHVPDVQELLSECIQRLKPGGHLFVATINRTLASFVTAIVGAEYVFRMLPRGTHQWSKFIKPEEIISPLTRSNMTLVKTSGISVNPLGPRFRLTRYMGVNYMLAFKKQLRH

SEQ ID NO: 106580 - protein, 213 aa, Unknown
  Bacterial polypetide isolated from the Sargasso Sea
MNTTIDEKEIEFFSNLSKHWWDFDGPLGSLHKLADVRIEFLLRNIARIKKYKNVLPLQHLKCIDVGCGGGILSERLKRLGGNITGIDTSNQAIDVAKEHAKKSNLKINYKCISTSKFLKTHKDLKFDVVIASEVIEHVNNRSKFLHDLSNLLKDRGLIIITTLNKSLPSIVLAKYFAENILKIIPKGTHDIEKFVTPEKLIHEAKKYNIILDD

SEQ ID NO: 106581 - protein, 204 aa, Unknown
  Bacterial polypetide isolated from the Sargasso Sea
ASSNINPIRSEYIASIIDLKGKKVLDVGCGGGLLAEALYDLGAEVDGIDAAGPGIEVARIHAEREDKQINYATAQAEDFCIDKEGYYDVVTCLEVLEHVPSPASLVGACSKMLKKDGLLFLSTINRNPRSWITAIVGAEYIFSILPKGTHEFEKFIKPSELSEYMENASVKLMEAKGMFYNPVTHHVSLNNDLGVNYMMYGINE

SEQ ID NO: 106582 - protein, 193 aa, Unknown
  Bacterial polypetide isolated from the Sargasso Sea
NFDINIDNPSSLEKLKILDVGCGGGLLCEPLSRLGAKVTGIDASEKNIEIAKAHARKGNINVNYICTSPEKVNESYDVILCMEVVEHVEDLDFFYKSCSKLLNKNGLIFFATINKTIKSYILAILGAEYVLRWLPIGTHDWKKFVKPSHMINSLSQIGLSHKDIIGVVFNPLINKWKLSKDLDVNYMSYFKRN

SEQ ID NO: 106583 - protein, 63 aa, Unknown
  Bacterial polypetide isolated from the Sargasso Sea
MDKNIDQNEVNKFAELADKWWDSSGEFKPLHNINPIRSEYIASKIDLKGKKVLDVGCGGGLLA

SEQ ID NO: 106584 - protein, 155 aa, Unknown
  Bacterial polypetide isolated from the Sargasso Sea
MTNIDQQEVKKFSDIAEQWWNKDGDFKPLHVINPLRANYIKEKIELKDKKVLDVGCGGGLLCESLYDFGAEVTGIDAAGPGIEVAKIHAQKNNKNIKYFEKTAEELNTEYIEYYDVVTCLEVLEHVPDPKSLVKTCVQLLKPSGLLFLSTINKNP

SEQ ID NO: 106585 - protein, 119 aa, Unknown
  Bacterial polypetide isolated from the Sargasso Sea
VTAMEILEHVADKAFFLETLSRVLKPGGSLFLSTFNKTPKSYVTAIIGAEYLLRLLPRGTHQWEKFTPPSKIIQSFLTHGLKPMHIRGVRYAPFSNTWTLTRDLSVSYILHASKPLNQS

SEQ ID NO: 106586 - protein, 241 aa, Unknown
  Bacterial polypetide isolated from the Sargasso Sea
MTTINKEEIQKFSKLADEWWDPNGKFKPLHLFNPVRLEYIIKKCTNYFNLAKSTGATLSNLKILDVGCGGGLISEPLCRLGGNVTGIDASSKNIEIAKIHAKKNGLKIKYLNTSPEKQQINEKFDVILNLEVVEHVANLDLFFRSTTNLLKKNGIMFVATINRTFESYVKAIVGAEYVLRWLPIGTHDWQKFLKPQEIEEKLLKLNLKKINLDGIKYNILSNDWKMSKDYSVNYILVAKKN

SEQ ID NO: 106587 - protein, 188 aa, Unknown
  Bacterial polypetide isolated from the Sargasso Sea
MAHSGNVVISGDGYDVIDCETCGFKHVTPLPDKLENETLYRDSHYDDGERDRLNYYERDRDWWLMSYRDVLNEIAQFISPSDDNTLVDIGCGAGLFLEAAIEEGWNTVGVEISTIAANHCRDKGLDIINSSFDADLTSLPKNIKVVHMRNILEHVPDPFSLINVAFDKLASGGVLVVGVPNDFNPLQE

SEQ ID NO: 106588 - protein, 201 aa, Unknown
  Bacterial polypetide isolated from the Sargasso Sea
NINPIRSEYIASKIDLKGKKVLDVGCGGGLLAEALYDLGAEVDGIDAAGPGIEVARIHAERENKQINYATAQAEDFCIDKEGFYDVVTCLEVLEHVPSPASLVEACSKMLKKDGLLFLSTINRNPRSWITAIVGAEYIFSILPKGTHEFEKFIKPSELSEYMENASVKLMEAKGMFYNPVTHHVSLNGDLGVNYMMYGINE

SEQ ID NO: 106589 - protein, 209 aa, Unknown
  Bacterial polypetide isolated from the Sargasso Sea
DGDFKPLHVINPLRANFIKDKTRLKNKNILDVGCGGGLLTESLYDFGAKVTGIDAAGPGIEVAKLHAKQNKKNIDYYEKTAEELNKEKSESFDVVTCLEVLEHVPDPKSLVKTCVNLLKPDGLLFLSTINKNLRSWITAIVGAEYIFNILPKGTHEFDKFIKPSNLALYVRDANAEVIETKGMFYNPITHKANLNNDLSVNYLMYARKL

SEQ ID NO: 106590 - protein, 152 aa, Unknown
  Bacterial polypetide isolated from the Sargasso Sea
AEAIKAAKDHASVVGLDIDYRIGDLSTIPNELDQFDVVIASEVIEHVPDPKSFIEEIHKLISPGGKLIITTLNRSLMSLLGAKIFAEYLLKIVPVGTHDWRKFIKPSELNDMLTSARFKPEIVKGISYSFNEDEFQLVANPVVNYAVSAFKF

SEQ ID NO: 106591 - protein, 154 aa, Unknown
  Bacterial polypetide isolated from the Sargasso Sea
MDKNIDQNEVNKFAELADKWWDSSGEFKPLHNINPIRSEYIASKIDLKGKKVLDVGCGGGLLAEALYDLGAEVDGIDAAGPGIEVARIHAEREDKQINYATAQAEDFCIDKEAYYDVVTCLEVLEHVPSPASLVGACSKMLKKDGLLFLSTINR

SEQ ID NO: 106592 - protein, 197 aa, Unknown
  Bacterial polypetide isolated from the Sargasso Sea
YDLNIFSSKIDLKGKKVLDVGCGGGLLAEALYDMGAEVDGIDAAGPGIEVAKIHAKRVDKQINYATAQAEDFCIDKESYYDVVTCLEVLEHVPSPASLVEACSKMLKEDGLLFLSTINRNPRSWITAIVGAEYIFNILPKGTHEFEKFIKPSELSEYMENASVRLIEAKGMFYNPVTHHVSLNNDLGVNYMMYGVNE

SEQ ID NO: 106593 - protein, 188 aa, Unknown
  Bacterial polypetide isolated from the Sargasso Sea
MVDEGACVQGGTLDCTAGDIWIGARAVVEPGALIRGPCIIGQECTIRRGAYLRGDCLLGPACVIGCEMKNALTLDAVELPHHGYVGDSLLGHRAHFGCGTITANFPLFPTSVPSVDIGAIRFDLGRRKFGAVVGDHSQVGCQSVLEPGCLLGKDTHAYPLSRLPRGTHGPNELIKTRPSVEGLYSKRH

SEQ ID NO: 106594 - protein, 205 aa, Unknown
  Bacterial polypetide isolated from the Sargasso Sea
LHQIKNNRMTYILDQIGNRDIKNLKILDVGCGGGIICEPLARLGAKVTGIDFAPNNISAAKIHSKKNKLKINYIHKDVEKSKLDGKFDLILMFEVLEHLDDWRKTIKKIKKNLNKNGIIIISTINRNSLSKLFAISIAENILNWIPKGTHDYYKLIKPEELKKTLNNEELHFKNIKGLVFDPLSGEWKLSNNYMINYFCTANLIN

SEQ ID NO: 106595 - protein, 176 aa, Unknown
  Bacterial polypetide isolated from the Sargasso Sea
MDKNIDQNEVNKFAELADKWWDSSGEFKPLHNINPIRSEYIASKIDLKGKKVLDVGCGGGLLAEALYDLGAEVDGIDAAGPGIEVARIHAEREDKQINYATAQAEDFCIDKEGYYDVVTCLEVLEHVPSPASLVGACSKMLKKDGLLFLSTINRNPRSWITAIVGAEYIFSILPKR

SEQ ID NO: 106596 - protein, 233 aa, Unknown
  Bacterial polypetide isolated from the Sargasso Sea
MTDNIDQNEVQKFAAIAEQWWDPTGDFKPLHVINPIRAEYISKKIDLKGKKVLDVGCGGGLLAEALFDAGAEVSAIDVTERNIEVAKHHANAHKKNISYHLTDAKSFSNNHKNYFDIVTCLEVLEHVPDPSVLINECSSMLKIDGSLFLSTINKNPRSFVTAIFGAEYLFQLLPKGTHEYAKFIKPYELESYMTSANVRLMESKGLFYNPLFHSATLNNDLGVNYMMHGVKVD

SEQ ID NO: 106597 - protein, 229 aa, Unknown
  Bacterial polypetide isolated from the Sargasso Sea
MNIDKSEIENFDNYAHEWWNKRGPYKFIHLLTPLRLKYISNNLKLKGLKVLDLGCGGGLLCEAMTDSGADVVGIDASLKTIEIAKKHANEKNLKIDYLHTDIESFNYKEKFDAVICFELIEHVPDPNELIRQISKHIKPNGKLFLSTINRNLFSFMFAKLVAEYLLNIIPRGTHTYEKFIKPSEMRQMLENNNFSISDIQGLKFNPISNTFKLSTFSKINYFITALLNE

SEQ ID NO: 106598 - protein, 231 aa, Unknown
  Bacterial polypetide isolated from the Sargasso Sea
MVNIDLQEVKKFSDIAEDWWNKNGDFKPLHVINPLRTKFIKERTELKNKNVLDVGCGGGLLSESLFDFGAKVTGIDAAGPGIEVAKIHAKENNKDINYFEKTAEELRKEKSETFDIVTCLEVLEHVPDPKSLVKTCTDLLKPGGHLFLSTINKNPRSWITAIVGAEYIFNLLPKGTHEFDKFIKPSSLASYVRDANAKVIETKGMFYNPITHKANLNEDLGVNYLMYARKS

SEQ ID NO: 106599 - protein, 245 aa, Unknown
  Bacterial polypetide isolated from the Sargasso Sea
MNSTVDKTEVNHFDQPNQDWWDESGSFSALHRLTPCRVEYIVKVIKRNIINKQINSTSQICNNLNILDVGCGGGLLCEPLARLGGNVTGIDVSENAIITAKQHASKMGLEINYICTSLEELNLKNDFDLIIASEVIEHVLDRKYFLKMIRKISSNKTSFIFTTINKSIPSLLFGKFAAEYILNLIPKGTHDWEKFVTPQKLYLEALENGIYLNNFSGLTPNVFNKEFNLTSYLGINYAASGIVRE

SEQ ID NO: 106600 - protein, 209 aa, Unknown
  Bacterial polypetide isolated from the Sargasso Sea
MTNIDQQEVKKFSDIAEQWWNKDGDFKPLHVINPLRANYIKEKIDLKDKKVLDVGCGGGLLCESLYDFGAMVTGIDAAGPGIEVAKIHAQKNNKNIKYFEKTAEELNTEYIEYYDVVTCLEVLEHVPDPKSLIKTCVQLLKPGGLLFLSTINKNPRSWITAIVGAEYIFNLLPKGTHEFDKFIKPSSLAKYVRDAEAELLETKGMFYNP

SEQ ID NO: 106601 - protein, 196 aa, Unknown
  Bacterial polypetide isolated from the Sargasso Sea
RSQYISSKIDLKGKKVLDVGCGGGLLAEALYDLGAEVDGIDAAGPGIEVAKIHAKKEDKQINYATAQAEDFCIDKEGYYDVVTCLEVLEHVPSPASLVEACSKMLKKDGLLFLSTINRNPRSWITAIVGAEYIFSILPKGTHEFEKFIKPSELSEYMENASVRLIEAKGMFYNPVTHHVSLNNDLGVNYMMHGINE

SEQ ID NO: 106602 - protein, 187 aa, Unknown
  Bacterial polypetide isolated from the Sargasso Sea
MTQNIDQNEVNKFADIAEKWWDPTGDFKPLHVINPLRANYINNKSPVDGLKVLDVGCGGGLLAEALDSKGAEVTAIDVTEANIEVAKLHAKKMQVKIDYRLVTAEELSQKESQSFDVVSCLEVIEHVPDPGQLIKACSDLLKPDGQMFLSTLNRNPRSFITAILGAEYIFNVLPKGTHEWAKFIKPS

SEQ ID NO: 106603 - protein, 231 aa, Unknown
  Bacterial polypetide isolated from the Sargasso Sea
MTNIDQQEVKKFSDIAEQWWNKDGDFKPLHVINPLRANYIKEKIELKDKKVLDVGCGGGLLCESLYDFGAIVTGIDAAGPGIEVAKIHAQKNNKNIKYFEKTAEELNTEYIEYYDVVTCLEVLEHVPDPKSLIKTCVQLLKPGGLLFLSTINKNPRSWITAIVGAEYIFNLLPKGTHEFDKFIKPSSLAKYVRDAEAELLETKGMFYNPLTHKANLNNDLGVNYLMYARKS

SEQ ID NO: 106604 - protein, 231 aa, Unknown
  Bacterial polypetide isolated from the Sargasso Sea
MTNVDKQEVNKFSDIADEWWNKNGDFKPLHVINPLRAKYIKDKTDLENKKVLDVGCGGGLLAEALHDFGAKVTGIDAAGPGIEVAKLHASNNQKDIEYYEKTAEDLSQEYQEYYDVVTCLEVLEHVPDPSSLVATCIDLLKPEGDLFLSTINKNPRSWLTAIVGAEYIFNILPKGTHEFDKFIKPSTLAKYVRDANGSVIETKGMFYNPITHKAHLNNDLGVNYLIYAKKS

SEQ ID NO: 106605 - protein, 244 aa, Unknown
  Bacterial polypetide isolated from the Sargasso Sea
MVNKFTDADEIAKFSSLYEDWWKNDGAFGMLHKLTPVRMLFIRQALSNFLERDSELSKTFEGLRILDVGCGGGLLTEPLKRLGADVTGLDASAEAIKAAKEHASVVGLDIDYRIGDLSTIPNELDQFDVVIASEVIEHVLNPQSFIEEIHKLISPGGKLIITTLNRSLMSLLGAKIFAEYLLKIVPVGTHDWRKFIKPSELNSMLRSARFTPEIVKGISYSISEDEFRLATNPVVNYAVSAFKC

SEQ ID NO: 106606 - protein, 58 aa, Unknown
  Bacterial polypetide isolated from the Sargasso Sea
HEFDCFIKPSELEKWSRSAGLELVELIGVTYNPITTVFSLSDDVDVNYMMHFKKISND

SEQ ID NO: 106607 - protein, 86 aa, Unknown
  Bacterial polypetide isolated from the Sargasso Sea
TINRNIKSYIMAIVGAEYILNLLPKGTHEFDCFIKPSELEKWSKSAGLELIELIGVVYNPITTVFSLSDDVDVNYMMHFKKINDGR

SEQ ID NO: 106608 - protein, 231 aa, Unknown
  Bacterial polypetide isolated from the Sargasso Sea
MSNIDKQEIKKFSDIADEWWNKDGDFKPLHVINPLRANYIKEKIDLNSKKILDVGCGGGLLTEALHDFGAEVTGIDAAGPGIKVAKIHAEKNKKNIQYFEKTAEELIKENEGAYDIVTCLEVLEHVPDPKSLVATCVDLLRPGGLIFLSTINKNPRSWITAIVGAEYIFNLLPKGTHEFDKFIKPSLLAKYLRDAGGELIETKGMFYNPITHKANLNNDLGVNYLMYGKKS

SEQ ID NO: 106609 - protein, 225 aa, Unknown
  Bacterial polypetide isolated from the Sargasso Sea
MTQNIDQHEVKKFAEIAENWWDPTGDFKPLHVINPLRANYINQKICVEGLKVLDVGCGGGLLAEALNAKGANVTAIDVTEANIGVAQLHAKKMQIEIDYRHITAEELAEQESESFDVVSCLEVIEHVPDPGQLIKACADLLKPNGKMFLSTLNRNPRSFVTAIVGAEYIFNILPKGTHEWNKFIKPSELEKYMRNAGIKLIESKGMLYNPIFHTANLNNDLGVNY

SEQ ID NO: 106610 - protein, 235 aa, Unknown
  Bacterial polypetide isolated from the Sargasso Sea
MNPSSNVDPAEIAKFNEIASRWWDPSGEFKPLHQLNPCRLAFISDQVQGLFGKKTVDVGCGGGILAEAMAKAGAEVTGIDMADEALTVAKLHALESAVSVQYQQSTAEDFAAANQGSFDLVTCMEMLEHVPEPASVVKACADLAKPGATLVFSTLNKTWKAYLMAIVGAEQVLKLVPKGTHEFEKFIRPSDLMRFIDDAGLQVVDATGLHYNPINQSFRTGPGLDVNYFVVAKKP

SEQ ID NO: 106611 - protein, 180 aa, Unknown
  Bacterial polypetide isolated from the Sargasso Sea
MNSINKKEIEKFSKMASEWWNPEGKFKPLHKFNPIRIKYIKENIIENFNLKNKITPLSGVNILDIGCGGGLISEPMSRMGANVTGIDASDKNIKIAKLHSKKNKLKINYLCSSPEKLKVKKKFDVILNMEIVEHVENVDFFLKSCSGLLKKNGMMFVATINKTLKSYVFAIVGAEYVLRW

SEQ ID NO: 106612 - protein, 217 aa, Unknown
  Bacterial polypetide isolated from the Sargasso Sea
GKFKPLHKFNPTRIKYIKENIINNFKLKNKSKPLSGISILDIGCGGGLLSEPMSRMGANVTGIDASDKNIKIAKLHSKKNKLKINYLCSSPEKLKIKKKFDVILNMEIIEHVEDIDFFLKSCSKLLKKNGLMFVATINKTLKSYVFAIVGAEYVLRWLPIGTHEWEKFVKPEELKKILMKYNLSLNKLDGMNFNIIKDKWNISKDLSVNYIGKFIKN

SEQ ID NO: 106613 - protein, 63 aa, Unknown
  Bacterial polypetide isolated from the Sargasso Sea
DLLPRGTHEYSKFIKPSELVEWCRESALKLNNQIGMGYNPLTKRYFLQNSLDVNYIACFQKPY

SEQ ID NO: 106614 - protein, 183 aa, Unknown
  Bacterial polypetide isolated from the Sargasso Sea
DVGCGGGILTEALASVASEVHGIDMAEKGLAVANIHKNKSNITNIKYSQSTIEDYALKHENKFDVLTCMEMLEHVPSPEETIKACSDIVIEGGDLYFATINRNIKSYVMAIIGAEYILNLLPKGTHEFDCFIKPSELEKWSRSAGLELVELIGVTYNPITTVFSLSDDVDVNYMMHFKKIRND

SEQ ID NO: 106615 - protein, 200 aa, Unknown
  Bacterial polypetide isolated from the Sargasso Sea
MTSVNKKEIDKFSKMADEWWNPEGKFKPLHKFNPTRIKYLKESIVYNFKLKNKSKPLSGINILDIGCGGGLLSEPMSRMGANVTGIDASDKNIKIAKLHSKKNKLNINYLCSSPEKLKIKKKFDVILNMEIVEHVEDIDFFLNSCSKLLKKKGLMFVATINKTLKSYIFAIVGAEYVLRWLPIGTHEWEKFVKPEDLKKF

SEQ ID NO: 106616 - protein, 218 aa, Unknown
  Bacterial polypetide isolated from the Sargasso Sea
KLNEWWDINGNYKILHKINPLRLDFIINNFNKPLNNKKVLDIGCGGGLISELLSKKKANVTGIDENIYNIKQAKNHAKISSLKINYLNKSLNSFNKKNKQKYDLILCLEVLEHVENVEESLEIISKLLKTNGTLILSTINRNLKSLIFAKMFGEYILNWIPIGTHQYKKFLKPEEIIQIFKLKKINFKKIKGMEFNPVLNKWFLSNNTNINYFMVGKK

SEQ ID NO: 106617 - protein, 232 aa, Unknown
  Bacterial polypetide isolated from the Sargasso Sea
MDKNIDQNEVNKFAELADKWWDSSGEFKPLHNINPIRSEYIASKIDLKGKKVLDVGCGGGLLAEALYDLGAEVDGIDAAGPGIEVARIHAEREGKQINYATAQAEDFCIDKEGYYDVVTCLEVLEHVPSPASLVKACSKMLKKDGLLFLSTINRNPRSWITAIVGAEYIFSILPKGTHEFEKFIKPSELSEYMENASVKLMEAKGMFYNPVTHHVSLNNDLGVNYMMYGINE

SEQ ID NO: 106618 - protein, 217 aa, Unknown
  Bacterial polypetide isolated from the Sargasso Sea
LADKWWDSSGEFKPLHNINPIRSQYISSKIDLKGKKVLDVGCGGGLLTEALYDMGAEVDGIDAAGPGIEVAKIHAKREDKQINYATAQAEDFCIEKENHYDVVTCLEVLEHVPSPASLVEACSKMLKGDGLLFLSTINRNPRSWITAIVGAEYIFNILPKGTHEFEKFIKPSELNEYMENASVRLIEAKGMFYNPVTHHVSLNNDLGVNYMMYGVNE

SEQ ID NO: 106619 - protein, 232 aa, Unknown
  Bacterial polypetide isolated from the Sargasso Sea
MNKNIDQNEVNKFAELADKWWDSSGEFKPLHNINPIRSEYISSKIDLKGKKVLDVGCGGGLLAEALYDLGAEVDGIDAAGPGIEVARIHAEREDKQINYAIAQAEDFCIDKEDHYDVVTCLEVLEHVPSPASLVEACSKMLKKDGLLFLSTINRNPRSWITAIVGAEYIFSILPKGTHEFEKFIKPSELSKYMENASVKLMEAKGMFYNPVTHHVTLNNDLGVNYMMYGINE

SEQ ID NO: 106620 - protein, 239 aa, Unknown
  Bacterial polypetide isolated from the Sargasso Sea
MKINTINKEEINKFTKMADEWWNPEGKFKPLHKFNPIRIKYIKDNVILHFKKKNSLKGLEFLDIGCGGGLLSEPLARLGANITGIDPSSKNIKIAKIHSKKSNLKINYICSAPENLNLNKKFDVILNMEVVEHVEDLNFFINKSGKFLKKNGLMFVATLNKTLKSYIFAILGAEYVLRWLPIGTHEWEKFVEPSKLINIAKKNNLKIDQIDGIKYYPILDQWKISKDTSVNYISKFIKY

SEQ ID NO: 106621 - protein, 90 aa, Unknown
  Bacterial polypetide isolated from the Sargasso Sea
MTNVDQQEINKFSELASRWWDPEGEFKPLHLINPLRLDFINQHSEGLFDKKVVDIGCGGGILAESMARAGATVTGLDMAEASLEVAKLHG

SEQ ID NO: 106622 - protein, 240 aa, Unknown
  Bacterial polypetide isolated from the Sargasso Sea
MSTINKEEIQKFSNLADEWWDVKGKFKPLHLFNPVRIEYILDNIKIHFNIQNKKGLLLNNLKVLDIGCGGGLISEPLARLGADVTGIDASEKNIKVAQIHAKQNNLNIRYLNSSPEKFNEFENFDIILNLEIVEHVENVKLYIESCHKLLKKNGLMFTATINRTLVSYLKAIIGAEYVLRWLPIGTHDWNKFIKPEELEKKLYDENFKTIDIKGLEFNPLLNKWKKSENLSVNYIICSKK

SEQ ID NO: 106623 - protein, 221 aa, Unknown
  Bacterial polypetide isolated from the Sargasso Sea
MKNNTINKKEIEKFTKIAEEWWDPQGKFKPLHKFNPIRISYIKKNIINTFKLNQKIKPLKKVKILDIGCGGGLLSEPMSRLGAEVVGIDASDRNIRIAKSHAKKSNLNIKYLCSSPENFNSKTKFDVVLNMEIVEHVQDVDFFLKSCAKLLKKNGIMFVATLNKTLKSYLFAIVGAEYVLRWLPVGTHEWDKFVKPNDLIDILKKYDLKLDSLDGMKFNLV

SEQ ID NO: 106624 - protein, 230 aa, Unknown
  Bacterial polypetide isolated from the Sargasso Sea
FSKLAKDWWNPNGKFKPLHLFNPARIKFIKEKLISHFKIDPGSEKPLENLKILDIGCGGGLLCEPLSRLGAHMTGIDASNNNIEVAKLHAKEMDLKITYMRCEPENFNFENKFDVILNMEIVEHVLNIDLFIKNCSKLIKKNGIMFVATINKNLKSYIFAILGAEYVLRWLPIGTHDWDKFITPQDLETVAHKNDFSTEDLIGMKFDLFSKKWSVSKDDSVNYISTFLRN

SEQ ID NO: 106625 - protein, 208 aa, Unknown
  Bacterial polypetide isolated from the Sargasso Sea
MDKNIDQNEVNKFAELADKWWDSSGEFKPLHNINPIRSEYIASKIDLKGKKVLDVGCGGGLLAEALYDLGAEVDGIDAAGPGIEVARIHAEREDKQINYATAQAEDFCIDKEGYYDVVTCLEVLEHVPSPASLVGACSKMLKKDGLLFLSTINRNPRSWITAIVGAEYIFSILPKGTHEFEKFIKPSELSEYMENASVKLMEANRPCS

SEQ ID NO: 106626 - protein, 140 aa, Unknown
  Bacterial polypetide isolated from the Sargasso Sea
QIFHRVLVEDYALKINENFYVLTCMEMLEHVPSPGETIQACSDIVIDGGDLFFATINRNIKSYIMAIVGAEYILNLLPKGTHEFDCFIKPSELEKWSKSAGLELIELIGVVYNPITTVFSLSEDVDVNYMMHFKKINNGR

SEQ ID NO: 106627 - protein, 222 aa, Unknown
  Bacterial polypetide isolated from the Sargasso Sea
MDQRDNINTEEVDKFNDLANEWWNPYGSFAPLHKLNPLRFEYIRANSNLDGKTAIDVGCGGGILTEALASVASEVHGIDMAEKGLAVANIHKNKSNITNIKYSQSTIEDYALKHENKFDVLTCMEMLEHVPSPEETIKACSDIVIEGGDLYFATINRNIKSYVMAIIGAEYILNLLPKGTHEFDCFIKPSELEKWSRSAGLELVELIGVTYNPNYDLYPHFR

SEQ ID NO: 106628 - protein, 218 aa, Unknown
  Bacterial polypetide isolated from the Sargasso Sea
EGKFKPLHKFNPIRISYIKENIIKTFKLDFNKTPLKNIKILDIGCGGGLLSEPMCRLGAKVTGIDASDKNIKVAKLHSEKNNLKIDYFCSSPEKFNTKDKFDVILNMEIVEHVEDVNFFLKSCCKLLKKNGLMFVATLNKTLKSYIFAIVGAEYVLRWLPIGTHEWEKFIKPEELVSILEKNDLRLERVDGMNFNLLKNRWSVGNDKSVNYIAKFIKN

SEQ ID NO: 106629 - protein, 241 aa, Unknown
  Bacterial polypetide isolated from the Sargasso Sea
MTTINQEEIQKFSKIADEWWDAEGKFKPLHRFNPIRIKYIIDKCTNHFNLKNNNNELLSGLKFLDIGCGGGLVSEPLSRLGANVTGIDASPRNIEVAKIHAKKNNLKIKYLATSPEKKIIQDKFDVILNLEVIEHVENVDLFMIAATDLLKKNGIMFIATINRTLESYIKAIVGAEYVLRWLPIGTHDWQKFLTPNEIEEKFSRLNLEKLDLTGLKFNLFSNDWTKSKDYSVNYILLAKKN

SEQ ID NO: 106630 - protein, 233 aa, Unknown
  Bacterial polypetide isolated from the Sargasso Sea
EIEKFSNMADEWWDPHGKFKPLHKFNPIRIKYIKENIIRQFKIKNKNKPLSGINILDIGCGGGLLSEPMCRLGADVTGIDASTKNIKISKLHAKKDNLKINYICSSPEKLKISKKFDVILNMEIVEHVEDISFFLKSCSKLLNKNGLMFVATINKTLKSYVFAIVGAEYVLRWLPIGTHDWEKFVKPEELKEILSKNNLFLKKLDGMHFNIIKDEWSITNDLSINYIAKFLKN

SEQ ID NO: 106631 - protein, 150 aa, Unknown
  Bacterial polypetide isolated from the Sargasso Sea
MKAVIDTIDPKEVAKFEAMADEWWDPDGKFKPLHMLNPCRLDYIVSQIALEFDRDLKSKEPFKGLEILDIGCGGGLLCEPMARLGATVVGVDAAERNIPVAKAHANRSNLSIDYRVGTAEELVESGNKFDVVLNMEVVEHVADPLTYLTA

SEQ ID NO: 106632 - protein, 61 aa, Unknown
  Bacterial polypetide isolated from the Sargasso Sea
MKNVDDIEIQKFEALAHRWWDPNSEFKPLHDINPLRVNYISRTTGLAEKEILDIGCGGGIL

SEQ ID NO: 106633 - protein, 217 aa, Unknown
  Bacterial polypetide isolated from the Sargasso Sea
PNFFTNFNPIRLKFIMDQTITIFNCDHKNECPLKGIKILDIGCGGGLLSEPLSRLGAEVTGVDAAENNIKAASIHAKKENLEINYINGDIDSLNPDEKFDIILNMEVIEHVDNTDYFMKSCCDRVRSNGLIFMATINKTLFSLIFAKYMAEYVLGFLPKGTHDWNKFLSPEEIYAFLIKNHFNVRETLGVNYNPIKNNWSISRSTPANYMVLGQKNN

SEQ ID NO: 106634 - protein, 184 aa, Unknown
  Bacterial polypetide isolated from the Sargasso Sea
GWRVLDIGCGGGLLSEPMARLGAEVVGADPAERNIPVAKIHAEQSGLAIDYRHTTAEELAKKSEKFNIILNMEVVEHVANPASYIEVCYSLLEDNGLMMCSTINRNIKSYLNAIIGAEYIMKWLPKGTHDWNKFLSPNELSDLLEKAGFRIVDKKGFVFSKIFWKWTISANDLSINYVTSSIRP

SEQ ID NO: 106635 - protein, 152 aa, Unknown
  Bacterial polypetide isolated from the Sargasso Sea
ANIHKNKSKLTNIKYSQSTVEDYALKSNEKFDVLTCMEMLEHVPSPGETIQACSDIVIDGGDLFFATINRNIKSYIMAIVGAEYILNLLPKGTHEFDCFIKPSELEKWSKSAGLELIELIGVVYNPITTVFSLSDDVDVNYMMHFKKINDGR

SEQ ID NO: 106636 - protein, 211 aa, Unknown
  Bacterial polypetide isolated from the Sargasso Sea
HKFNPIRIKYIKENIINNFELKNKTKPLSGVNILDIGCGGGLLSEPMSRMGANLTGIDASEKNIKIAKLHAKKNKLNINYLCTSPERLKIKNKFDVILNMEIVEHVEDVDFFLKSCSELLKKNGLMFVATINKTLKSYVFAIVGAEYVLRWLPIGTHEWEKFVKPEDLKKILMKYSLSLNKLDGMNFNIIKDEWNISKDLSVNYIGKFIKN

SEQ ID NO: 106637 - protein, 206 aa, Unknown
  Bacterial polypetide isolated from the Sargasso Sea
MDAQQEITKFNNLAEKWWDTSGPMAPLHGLNSLRVPFIHETLNPPSTNRPTMDVLDVGCGAGILSESMASLGYQVVATDPATRNIEIARNHAQQMGLDIDYHEGLIENLKLKTFDAILVMEVVEHVPDVQELLSECIQRLKPGGHLFVATINRTLASFLTAIVGAEYVFRMLPRGTHQWSKFVKPEEIISPLTRSDMTLIKTSASA

SEQ ID NO: 106638 - protein, 123 aa, Unknown
  Bacterial polypetide isolated from the Sargasso Sea
MDKINVDTNEIDKFNRLSSRWWDLNGDFKPLHEINPLRLDFILKNINLNNCNVADIGCGGGILSESMIDYGARVTGIDMAPDVIRVANIHRKESGKDIEYKNITVEELAERSPRSFDVVTCME

SEQ ID NO: 106639 - protein, 195 aa, Unknown
  Bacterial polypetide isolated from the Sargasso Sea
MVPEMNKTVDQLEIKKFSNISYDWWNPEGKFATLHKINPIRVKFMLDLIFKNNQIDVHAVRPLANFRVLDIGCGGGLSSEPFAKLGAHVCSVDADSQAIEVAKNHAKNENLKIDYKNCSVEDLSLKKDGKFDVLLILELLEHIDDTNHFLSIALKYLKKNGVVFVSTINKNIKSMVLAKFAAEYILNLVPKGTHD

SEQ ID NO: 106640 - protein, 196 aa, Unknown
  Bacterial polypetide isolated from the Sargasso Sea
MKINTINKEEINKFTKMADEWWNPEGKFKPLHKFNPIRIKYIKDNVISHFKKNKKKNSLKGLEFLDIGCGGGLLSEPFARLGANITGIDASNKNIKIAKIHSKKSNLKINYICSSPENLNLNKKFDVVLNMEVVEHIEDLNFFISKSGKFLKKNGLMFVATLNKTLKSYIFAILGAEYVLRWLPIGTHEWEKFVEP

SEQ ID NO: 106641 - protein, 98 aa, Unknown
  Bacterial polypetide isolated from the Sargasso Sea
MNIKNLDHDEVKKFDDLAAKWWDPDGEFKPLHQINPLRVGFINERANLEGIKVLDVGCGGGILAEALSKLGAQVTGIDASEQTIGVAQNHSNAVGSDV

SEQ ID NO: 106642 - protein, 204 aa, Unknown
  Bacterial polypetide isolated from the Sargasso Sea
IKYIKENIIRQFKIKNKNKPLSGINILDIGCGGGLLSEPMCRLGANVTGIDASTKNVKISKLHAKKDNLKINYICSSPEKLKISKKFDVILNMEIVEHVEDISFFLKSCSKLLNKNGLMFVATINKTLKSYVFAIVGAEYVLRWLPIGTHDWEKFVKPEELKEILSKNNLFLKKLDGMHFNIIKDEWSITNDLSVNYIAKFLKN

SEQ ID NO: 106643 - protein, 241 aa, Unknown
  Bacterial polypetide isolated from the Sargasso Sea
MKSSTINKQEIEKFSKIAAEWWDPTGKYKPLHKFNPTRIRYIRDEIIKHYEIKKKGRPLANLNILDIGCGGGLICEPLSRLGGNMTGIDPSERNIKVAKIHAGKKSNIKYLCTSPEKLKIKKKFDVVLNLEVIEHVDNLDLFIRKSSNFLKKDGIMFISSINKTLKAYLFAIIGAEYVLRWLPIGTHEWEKFVEPENLTKICEKNFLKVKKQDGMIFNPLKNLWILSKDKSVNYIAIFQKV

SEQ ID NO: 106644 - protein, 180 aa, Unknown
  Bacterial polypetide isolated from the Sargasso Sea
EILDIGCGGGLLSEPMSRMGANVTGIDASDKNIKIAKVHSKKNKLKINYLCSSPEKLKIGKKFDVILNMEIVEHVEDIDFFLKSCSKLLKKNGLMFVATINKTLKSYVFAIVGAEYVLRWLPIGTHEWEKFVKPEELKKILMKYDLSLNKLEGMNFNIIKDEWSISRDLSVNYIAKFIKN

SEQ ID NO: 106645 - protein, 234 aa, Unknown
  Bacterial polypetide isolated from the Sargasso Sea
MDTQQEITKFDNLAERWWDTSGPMAPLHGLNSLRVPFIHETLNPPSTNRPTMDILDVGCGAGILSESMASLGYQVVATDPATRNIEIAKTHAQQMGLDIDYHEGLIENLELKTFDAILVMEVVEHVPDVQELLNECNQRLKPGGHLFVATINRTLASFVTAIVGAEYVFRMLPRGTHQWSKFVKPEEIISPLTRTNITLVKTSGISVNPFGPRFRLTRYMGVNYMLAFKKQLRH

SEQ ID NO: 106646 - protein, 240 aa, Unknown
  Bacterial polypetide isolated from the Sargasso Sea
MNSINKKEIEKFSKIASEWWNPEGKFKPLHKFNPIRIKYIKENVISNFKLRNKAKPLSGINILDIGCGGGLLSEPMARMGASVTGIDASDQNIKIAKLHSKKNKLKINYLCSSPEKLNIKKKFDVILNMEIVEHVENVDFFLKSSSNLLKKNGLMFVATINKTLKSYVFAIVGAEYVLRWLPIGTHEWEKFVSPEDLKKILIKYNLYIDKMDGMSFNILKDKWNISKDLSVNYIGKFIKN

SEQ ID NO: 106647 - protein, 232 aa, Unknown
  Bacterial polypetide isolated from the Sargasso Sea
MNIDESEIKKFAELADKWWDKNGDFKPLHVINPLRANYIFDKLDISNKKVLDVGCGGGILSEALYEKGADVTGIDAAGPGINIAKIHAEQNNKTITYYENTAEELYEKYKKNYDVVTCLEVLEHVPDPAMLVSTCLKLLKPNGHLFLSTINKNPRSFITAIVGAEYIFNILPKGTHEFNKFIKPSKLAEYIRKADGKLIESKGMFYNPLTHKANLNNDLGVNYMMYARKIED

SEQ ID NO: 106648 - protein, 240 aa, Unknown
  Bacterial polypetide isolated from the Sargasso Sea
MTSVNKKEIDKFSKMADEWWDPEGKFKPLHKFNPTRIKYIKENIINNFKLKNKSKPLSGISILDIGCGGGLLSEPMSRMGANVMGIDASDKNIKIAKLHSKKNKLKINYLCSSPEKLKIKKKFDVILNMEIVEHVEDVDFFLKACSKLLKKNGIMFVATINKTLKSYIFAIVGAEYVLRWLPIGTHSWEKFVKPEDLKKILVNYDLSLNKLDGMNFNIIKDEWNITKDLSVNYIGKFIKN

SEQ ID NO: 106649 - protein, 244 aa, Unknown
  Bacterial polypetide isolated from the Sargasso Sea
MNKTVDQLEITKFSNISYDWWNPEGKFATLHKINPIRVKFMLDLIFKNNQIDVHAERPLANFRVLDIGCGGGLSSEPFAKLGAHVCSVDADKQAIEVAKNHAKNDKLKIDYKNCSVEDLSLKKDGKFDVILILELLEHIDDTNHFLSIALKYLKKNGVVFVSTINKNIKSMVLAKFAAEYILNWVPKGTHDWNKFITPSNLSQMMERHGFDEVLRAGIVFDPVSLKWKQSTDVSVNYITSFSQM

SEQ ID NO: 106650 - protein, 214 aa, Unknown
  Bacterial polypetide isolated from the Sargasso Sea
MENIDKQEVKKFSDLAEEWWNEKGDFKPLHVINPLRANYIKEKTDLTDKNILDVGCGGGLLSEALHDLGGIVTGIDAAGPGIEVAKIHAKKNNKNISYFEKTAEVLNKERSGTYDIVTCLEVLEHVPDPKNLVKTCVELLKPGGLLFLSTINKNPRSWITAIIGAEYIFNILPKGTHEFNKFIKPSELAYYVRNSNAELIETKGMFYNPITHKA

SEQ ID NO: 106651 - protein, 204 aa, Unknown
  Bacterial polypetide isolated from the Sargasso Sea
IKYIKENIIYNFKLKNKSKPLSGIKILDIGCGGGLLSEPMSRMGANVTGIDASDKNIKVAKLHSKKNKLKINYLCSSPEKLKIEKKFDVILNMEIVEHVEDVDFFLKSCSKLLKKNGLMFVATINKTLKSYVFAILGAEYVLRWLPIGTHEWEKFVKPGDLKKILMKYDLSLNKLEGMNFNIIKDEWSISRDLSVNYIAKFIKN

SEQ ID NO: 106652 - protein, 119 aa, Unknown
  Bacterial polypetide isolated from the Sargasso Sea
FDVVTCMEMLEHVPDPASIIHAVAKLAKPGADVFFSTLNKTPKAYLYAIVGAEKLLKMVPEGTHDHKKFIKPAQLIAWAEQAGLKVRASSGLSYNPFSKQYTLNNDVSVNYILHFEKLV

SEQ ID NO: 106653 - protein, 239 aa, Unknown
  Bacterial polypetide isolated from the Sargasso Sea
MSQKENISSEEVEKFNDLAKEWWNPHGSFAPLHKLNPLRFEYIRTNSNLEGKTAIDVGCGGGILTESLASVASNVHGIDMAEKGLAVANIHKNKFELKNIKYSQSTVEDYALKNNQKFDVLTCMEMLEHVPSPGETIQACSDIVIEGGDLFFATINRNIKSYLMAIIGAEYILNLLPKGTHEFDSFIKPSELEKWSKSAGLELIELIGVVYNPITTIFSLSEDVDVNYMMHFKKIKNGR

SEQ ID NO: 106654 - protein, 232 aa, Unknown
  Bacterial polypetide isolated from the Sargasso Sea
MDKNIDQNEVNKFAELADKWWDSKGEFKPLHNINPIRSQYIASKMDLKGKKVLDVGCGGGLLAEALYDLGAEVDGIDAAGPGIEVAKIHAKKEDKHINYATAQAEDFCIDKEGYYDVVTCLEVLEHVPSPASLIEACTKMLKKDGLLFLSTINRNPRSWITAIVGAEYIFNILPKGTHEFEKFIKPSELSEYMENASVRLIEAKGMFYNPVTHHVSLNNDLGVNYMMYGINE

SEQ ID NO: 106655 - protein, 238 aa, Unknown
  Bacterial polypetide isolated from the Sargasso Sea
MTSINKKEIDKFSKMANEWWDPDGKFKPLHKFNPTRIKYIKENIINNFKLKNKFRPLSGINILDIGCGGGLLSEPMSRMGANVTGIDASDKNIKIAKLHSKKNKLKINYFCSSPEKLKITKKFDVILNMEIVEHVEDIDFFLKSCSKLLKKNGLMFVATINKTLKSYIFAIVGAEYVLRWLPIGTHEWEKFVKPEDLKKILMKYNLSLNKLEGMNFNIIKDEWSISRDLSVNYIAKFY

SEQ ID NO: 106656 - protein, 144 aa, Unknown
  Bacterial polypetide isolated from the Sargasso Sea
MASKSNKDINYILGEAESLLVEKKAFDIVSCLEAIEHVPDPELLVKTCSDLCKPGGEVFFSTINRNPKSFLFAIIGAEYILNLLPKGTHDFNKFIKPSELHGFMTRSGLEVKEIIGMSYNPLSGNYWLGDDVKVNYLVHAHKPQ

SEQ ID NO: 106657 - protein, 243 aa, Unknown
  Bacterial polypetide isolated from the Sargasso Sea
MDISSIDKTEIDKFKNLAKEWWKHDGKFKTLHKFNPIRLEYIINTIKDHYAIDQKNESPLKGLSVLDIGCGGGLMSEPLARLGADVTGIDALEKNCITAKIHAEENNLDINYLNTTAESLNKNKKYDIILNLEVIEHVNNPKNFIKECSGLVSNNGIMFIATINKSIFSLIFAKFMAEYVLGFLPKGTHDWNKFLTPEDIYSFFIQNNFDVISNIGVNYNPLRDEWFMSKRMDANFIVSGKKN

SEQ ID NO: 106658 - protein, 240 aa, Unknown
  Bacterial polypetide isolated from the Sargasso Sea
MSSVNKKEIEKFSKMAAEWWDPEGKFKPLHKFNPIRIKYIKDNIIYSFKLKSKEKPLQKINILDIGCGGGLLSEPMARLGANVTGIDASDKNIQIAKLHAKKNKLNINYFCSSPEKLKIKKKFDVILNMEIIEHVEDINFFIKSCSKLLKKNGLMFVATLNKTFKSYVFAIIGAEYVLRWLPIGTHDWEKFVKPEDLKNILNKNNLKIEKIDGMNFDIFKDEWNISKDTSINYIAKSLKV

SEQ ID NO: 106659 - protein, 241 aa, Unknown
  Bacterial polypetide isolated from the Sargasso Sea
MTTINREEIQKFSKIADEWWNPNGKFKPLHKFNPARIEYILDITSAHFNLDRSKKLPLNSLKILDIGCGGGLISEPMSRLGAKVTGIDASEKNIKVAEIHAKKNNLKIEYQNKSPEEIKDDLKFDIILNLEVVEHVDNIDLYLKACEKLLKKNGLMFTATINRTMTSYIKAIVGAEYVLRWLPIGTHDWNKFVKPEELEKKLVDLKFSIKDIKGLDYNLVSGKWRRTDNLSVNYIIVGNKN

SEQ ID NO: 106660 - protein, 240 aa, Unknown
  Bacterial polypetide isolated from the Sargasso Sea
MNSINKKEIEKFSNMAAEWWDPEGKFKPLHKFNPIRIRYIKENIIKEFQLKNKKYPLSGINVLDIGCGGGLLSEPMCRLGANVTAIDASNKNIAIANLHAKKNNLKINYICSSPEKLKTTKKFDVILNMEIVEHVEDVDFFLKSCANLLKKNGLMFVATINKTLKSYIFAIVGAEYVLRWLPIGTHEWEKFVKPEELKSILIKNNLNLKKIDGMNFNILKDEWNVSKDLSVNYIAEFKKN

SEQ ID NO: 106661 - protein, 240 aa, Unknown
  Bacterial polypetide isolated from the Sargasso Sea
MSSVNKIEIEKFSNMADEWWDPHGKFKPLHKFNPIRIKYIKENIIRQFKIKNKNKPLSGINILDIGCGGGLLSEPMCRLGANVTGIDASIKNVKISKLHAKKDNLKINYICSSPEKLKISKKFDVILNMEIVEHVEDISFFLKSCSKLLNKNGLMFVATINKTLKSYVFAIVGAEYVLRWLPIGTHDWEKFVKPEELKEILSKNNLFLKKLDGMHFNIIKDEWSITNDLSVNYIAKFLKN

SEQ ID NO: 106662 - protein, 235 aa, Unknown
  Bacterial polypetide isolated from the Sargasso Sea
MTELKNIDINELKKFSSRANSWWDQSGDFKTLHHINSTRLKFITNKINLKGLHVLDIGCGGGILTESIARQGTYTTGIDASEENIAIASQHASKNNLEINYLVTNAEELSKKITNKFDLITCMELLEHVPDPQSIIEASYMMIKPGGHIIFSTINRNLKSYMLAIVAGEYLLNLLPKGTHQYEKFIRPSELIKWCNKFNLTANDLSAIKYNPLLKTCTLAGAPDVNYILDVIADD

SEQ ID NO: 106663 - protein, 232 aa, Unknown
  Bacterial polypetide isolated from the Sargasso Sea
MTENIDHQEVNKFAELADEWWNKNGDFKPLHVINPLRANYIKEKLDLESKSILDVGCGGGLLTEALYDSGANVTGIDAAGPGIEVAKIHASKGNKKINYFEQTAEELLNKNSELFDVVTCLEVLEHVPDPKSLVKTCIQLLKPNGHLFLSTINRNPRSWITAIVGAEYIFNLLPKGTHEFDKFIKPSELASYVRSGNANLLETKGMFYNPITHKANLNNDLGVNYLMHAKKI

SEQ ID NO: 106664 - protein, 232 aa, Unknown
  Bacterial polypetide isolated from the Sargasso Sea
MDKNIDQNEVNKFAELADKWWDSYGEFKPLHNINPIRSQYISSKTDLKGKKVLDVGCGGGLLTEALYDLGAEVDGIDAAGPGIEVAKIHAKKEDKQINYATAQAEDFCIDKEGYYDVVTCLEVLEHVPSPASLVEACSKMLKKDGLLFLSTINRNPRSWITAIVGAEYIFSILPKGTHEFEKFIKPSELSEYMENTSVRLIEAKGMFYNPLTHHVTLNNDLGVNYMMYGINE

SEQ ID NO: 106665 - protein, 241 aa, Unknown
  Bacterial polypetide isolated from the Sargasso Sea
MTTVNQEEIQKFSKLADQWWDANGKFKPLHTFNPIRIKYIIDKCSSHFKLNKQENKTLSKLKILDIGCGGGLVCEPLTRLGAQVTGIDASYKNIEVAKIHAKKSNLKIKYLNASPEKNKINEKFDVILNLEVVEHVDNLDLFLKSSSKLLKRNGIMFIATINRTFESYIKAIIGAEYVLRWLPIGTHDWQKFLKPEEIEKKFKQLNLDKTDLNGLKFNIFSNNWSLSSDCSVNYIIVAKKS

SEQ ID NO: 106666 - protein, 240 aa, Unknown
  Bacterial polypetide isolated from the Sargasso Sea
MTSVNKKEIDKFSKMADEWWDPEGKFKPLHKFNPTRIKYLKENIVYNFKLKNKSKPLSGIKILDIGCGGGLLSEPMSRMGANVTGIDASDKNIKIAKVHSKKNKLKINYLCSSPEKLKIGKKFDVILNMEIVEHVEDIDFFLKSCSKLLKKNGLMFVATINKTLKSYVFAIVGAEYVLRWLPIGTHEWEKFVKPEDLKKILMKYDLSLNKLEGMNFNIIKDEWSISRDLSVNYIAKFIKN

SEQ ID NO: 106667 - protein, 240 aa, Unknown
  Bacterial polypetide isolated from the Sargasso Sea
MTSVNKKEIDKFSKMANEWWDPEGKFKPLHKFNPTRIKYIKENIINNFKLKNKLRPLSGINILDIGCGGGLLSEPMSRMGANVTGIDASDKNIKIAKLHSKKNKLKINYLCSSPEKLKITKKFDVILNMEIVEHVEDIDFFLKSCSKLLKKNGLMFVATINKTLKSYIFAIVGAEYVLRWLPIGTHEWEKFVKPEDLKKILMKYDFSLNKLEGMNFNIIKDEWSISSDLSVNYIAKFIKN

SEQ ID NO: 106668 - protein, 92 aa, Unknown
  Bacterial polypetide isolated from the Sargasso Sea
MKAVIDTIDPKEVAKFEAMADEWWDPDGKFKPLHMLNPCRLDYIVSQIALEFDRDVKSKEPFKGLNILDIGCGGGLLCEPMARLGATVVGVD

SEQ ID NO: 106669 - protein, 242 aa, Unknown
  Bacterial polypetide isolated from the Sargasso Sea
MKRSTINKEEIDKFSKMAEEWWNPEGKFKPLHKFNPIRIKYIRDSIIKNFKIYNSNLPLKNINILDIGCGGGLLSEPISRLGANVTGIDASLKNIKIARAHLKKSKLKIDYKHISPEKLKVKKKFDVILNMEIVEHIEDLELFIKTSSKLLKTNGLMFVATLNKTLKSFIFAIIGAEYVLRWLPIGTHDWEKFVEPSKLISYGNKFSLKLNKIDGLKFNPLNNKWDISNDKSVNYITEFKKF

SEQ ID NO: 106670 - protein, 136 aa, Unknown
  Bacterial polypetide isolated from the Sargasso Sea
QLRRIAAEALAAREPGTYDVVTCMEMLEHVPQPAAIVEACKTLVKPGGWVFFSTLNRNVKSYLFAVIGAEYIARMLPKGTHDYARFIRPSELASFVRAAGLRTADIKGIVYNPLSKHFTLSNDTSVNYMLACRRDA

SEQ ID NO: 106671 - protein, 157 aa, Unknown
  Bacterial polypetide isolated from the Sargasso Sea
MTADAKQPQVNVDPDEIAKFNDIASRWWDPDGEFKPLHLLNPVRLSYISDELQGLFGKTVIDIGCGGGILAESMARSGANVTGLDMAQDSLNVARLHALEAGVTINYQQATAEQYAAEHGEQFDVVTCMEMLEHVPEPMSVIQACADLAKPGATLFF

SEQ ID NO: 106672 - protein, 236 aa, Unknown
  Bacterial polypetide isolated from the Sargasso Sea
MNIKNLDHDEVNKFDELAAKWWDKDGEFKPLHQINPLRVGFIKERSSMEGKKVLDVGCGGGILAEALNELGASVTGIDASENTIGVAKTHSKSIGSNVKYIQNTIEEFTSSYPDERFDVITCLEMLEHVPSPFEIIKSCSNLLKEDGNIFFSTINRNPRSYLFAVIGAEYILNLLPKGTHDYEKFIKPSELAKWIRDAGLNSKETIGLSYNPITDNYWLGKDIQVNYMVHAKKESI

SEQ ID NO: 106673 - protein, 211 aa, Unknown
  Bacterial polypetide isolated from the Sargasso Sea
MENLDPEEIKKFNEMASTWWDPNGDFKALHDINPSRLDYILSRVRTPLSAVLDVGCGGGILTESLEAHTTEIIGIDAAPKPLKVAQLHAIDQDLEIDYRLSTVETLSKEYRNHFDVLTCMELLEHVTDFASTVSACADLTRPGGHLFFSTINRNPISFLKLIIGAEEILKILPRGTHEYQKFIKPSELANALRIANLKLLDISGISYNPFT

SEQ ID NO: 106674 - protein, 194 aa, Unknown
  Bacterial polypetide isolated from the Sargasso Sea
MHNINDAEIKKFDELAHKWWDRDGEFRALHDINQLRLDFILQRCNLTSGPAIDIGCGGGILTESLAKISPANVTGIDLANKALEVAKLHAQISGVEVDYKATSAEDLSIEYDSHFETLSCMEMLEHVPSIEESIDSCARLVKPGGNLFFSTINRTPKAYLYLIIGAEYILNILPRGTHEFDRFIKPSELAAVCA

SEQ ID NO: 106675 - protein, 129 aa, Unknown
  Bacterial polypetide isolated from the Sargasso Sea
MKNVDDIEIQKFEALAHRWWDPNSEFKPLHDINPLRVNYISRTTGLAEKEVLDIGCGGGILAEALANHGARVTAIDLAEASLSVAKIHLLESKLDIDYRFSSAEEIAKKESQRYDIVTCLEMLEHVPDP

SEQ ID NO: 106676 - protein, 205 aa, Unknown
  Bacterial polypetide isolated from the Sargasso Sea
MHEINPLRLDFINLHSKGLFEKQTLDVGCGGGILSESMAKLGAKVTGIDMGEEPLNVAKLHALESNIDINYTKTTAELFADSHPNQFDVVTCMEMLEHVPDPESIIYSLAKMVKPDGHVFMSTLNKSVKGYLYGIVAAEQVLGLVPKGTHDYNKFIKPATLIGWAEKYGLKARVIRGLNYHPISQTYSLNNDVSVNYMIHFERIA

SEQ ID NO: 106677 - protein, 162 aa, Unknown
  Bacterial polypetide isolated from the Sargasso Sea
MNAEKQPVAHNVDHHEIAKFEAVASRWWDLEGEFKPLHRINPLRLGYIAERSGGLFGKKVLDVGCGGGILAESMAREGATVTGLDMGFEPLQVAKLHALESGVQVEYVQETVEEHAAKHAGQYDVVTCMEMLEHVPDPQSVVHACARLESPAVRSSSRPLTA

SEQ ID NO: 106678 - protein, 154 aa, Unknown
  Bacterial polypetide isolated from the Sargasso Sea
EAPLSVARLHQMESGVTVDYQQSTAESLAEHRAGEFEVVTCLEMLEHVPDPSTVIQACADLCRSGGDLFFSTINRNPKSFLFAIVGAEYILNLLPRGTHEYDKFIKPSELARWIREAGLEMQEMMGMTYNPLTKRYRLTPDDISVNYLIRAKKP

SEQ ID NO: 106679 - protein, 247 aa, Unknown
  Bacterial polypetide isolated from the Sargasso Sea
MKTVSSINVEEVKKFEQLANEWWNTEGKFKPLHMLNPCRLEFITDHLSMHFKKDLTIDKKPLKGLKILDIGCGGGLLCEPMARLGAEVLGIDVVEKNIKVASLHAKKMKLDIDYRHISAEDLLRKKPKFDVILNMEVIEHVESPAFFIEICSNLLKTRGLIFCSTINKNFKSYLFAILGAEYIMQWLPKGTHDWNKFIKPSELSKLFFDSGLRVKDTKGFVFNPLAWSWELSKRDFTVNYSICATKE

SEQ ID NO: 106680 - protein, 206 aa, Unknown
  Bacterial polypetide isolated from the Sargasso Sea
MQQNTNVDPQEIAKFERMAETWWDLNGEFKPLHLLNPLRLNYIDQTAGGIFGKKVLDVGCGGGILSESMARIGAEVHGLDMGEEPLEVARLHALETGVSINYVKNTAEAHREDHREYYDVVTCMEMLEHVPDPQSVIQACCDMVKPGGFVFFSTINRNIKSFVETIIGAEYLLKMLPIGTHDHNKFIKPSELMALVDNTDLLCKDA

SEQ ID NO: 106681 - protein, 244 aa, Unknown
  Bacterial polypetide isolated from the Sargasso Sea
MEHSSINPQEVKKFTELANEWWKPNGKFKTLHKFNPSRLDFIIRNIKLNYSISDNIKQRPLEGLSILDIGCGGGLLCEPLSRLGANVTGIDASKQNIEAASIHAKNNNLNINYIHTTVEELDIKGSFDTILNMEVVEHVNNQKVFIKRSCELLNKNGLIFIATLNKTLFSLIFAKYTAEYILNFLPRGTHDWNKFLTPEEVYSFLIQNNCEVKESVGINFNPLLNSWNVSKSMKANFIVTGKKN

SEQ ID NO: 106682 - protein, 228 aa, Unknown
  Bacterial polypetide isolated from the Sargasso Sea
DEIAKFEAMAEEWWDPNGKFKPLHMLNPCRLDYIIAMIRTEFGCDPTNAKPFDGLRILDIGCGGGLLCEPMARLGAQVVGVDAAERNIPVAMAHAKQSNLKIDYRHGTAEGLLADTERFDVILNMEVIEHVADPSGYIKTCEALLKDGGLMICSTLNRNPKSFIMAIIGAEYVMRWLPKGTHEWSKFFRPRELEDIITKAGLKMVDKKGFVFNPISWQWSISDKDLSV

SEQ ID NO: 106683 - protein, 213 aa, Unknown
  Bacterial polypetide isolated from the Sargasso Sea
MKNVDDIEIQKFEALAHRWWDPNSEFKPLHDINPLRVNYISRTTVLAEKEILDIGCGGGILAEALANHGANVTAIDLAEASLSVAKIHLLESKLDIDYRFTSAEEMAEKDPQRFDIVTCLEMLEHVPDPASIVNACFKLVKPGGFVFFSTINRNPKSYLFAIVGAEYILNLLPKGTHEYSKFIKPSELAKWCRDVDLKTHDQIGMGYNPLTKR

SEQ ID NO: 106684 - protein, 82 aa, Unknown
  Bacterial polypetide isolated from the Sargasso Sea
MTEHQNVDNAEIAKFEAIAERWWDRDGEFKPLHEINPLRLDFVADKVGGLFDKETLDVGCGGGILSESMARMGAKVTGIDMG

SEQ ID NO: 106685 - protein, 217 aa, Unknown
  Bacterial polypetide isolated from the Sargasso Sea
MPSSGRKKSPEPTVTEQQTQIPNVDAGEIAKFNALAEQWWDPNSEFRPLHDINPLRLNYIDERVSLPGKKVIDIGCGGGLLSEGMARRGAEVTGIDMGEAPLSVARIHAEKAGVAVEYRQIPAEQIAEERPAQYDVVTCLEMLEHVPDPSSVIRACATLVKPGGQIFFSTINRNPKAFLFAIVGAEYVLRLLPRGTHEYAKLIKPSELAGWARDAGL

SEQ ID NO: 106686 - protein, 144 aa, Unknown
  Bacterial polypetide isolated from the Sargasso Sea
SNVEIDYRHTTVETLLEKEEGSFDVVCCLEMLEHVPDPASAVEACSKLVRPGGSIFFSTINRNLKAFVFAIVGAEYVLSLLPRGTHDYKKFIRPSELDGWARSALLSLSSITGMHYNPITKRYTLGDGVDVNYLCHYSSPTGAE

SEQ ID NO: 106687 - protein, 147 aa, Unknown
  Bacterial polypetide isolated from the Sargasso Sea
MPLDDNVDQDEIAKFEKLASRWWDPNSEFKPLHDINPLRAGWIDQHADVKGKNALDVGCGGGLLCEALAHRGATVTGIDMGEAPLAVARLHQLESGVEIDYVQSTAEAMAAEQRGTFEVVTCLEMLEHVPDPSTVIQACADLVSPAA

SEQ ID NO: 106688 - protein, 231 aa, Unknown
  Bacterial polypetide isolated from the Sargasso Sea
MTNVDQQEINKFSELASRWWDPEGEFKPLHLINPLRLDFINQHSEGLFDKKVVDIGCGGGILAESMARAGATVTGLDMAEASLEVAKLHGLESGIKVDYVCSTAEAFAEANAGQFDVVTCMEMLEHVPDPASVVLACAKLVKPGGHVFFSTLNRNLKSYLMGIVGAEYILKLVPKGTHDHSKFIKPSELMSMTDQAGLLPRDMTGLHMDPISQGFYLSSNNVDVNYLLYTV

SEQ ID NO: 106689 - protein, 235 aa, Unknown
  Bacterial polypetide isolated from the Sargasso Sea
MSLNVDRAEIAKFEALASRWWDRNSEFKPLHEINPLRTNWIDERASLAGKKVLDVGCGGGILAEAMAQRGAQVTGIDMGEAPLAVARLHQLESGVSVDYEQSTAEEFAELHAGTFDVVTCLEMLEHVPDPSSVIRACAKLVKPGGQVFFSTINRNPKSFMFAIVGAEYVLRMLPRGTHEFAKFIRPAELGRWVRDASLDLQDITGLTFNPLTRTYKLGADVDVNYMVHCQREAQA

SEQ ID NO: 106690 - protein, 150 aa, Unknown
  Bacterial polypetide isolated from the Sargasso Sea
AKLHAQIAGVKVDYRATSAEDLSIEYDSHFETLSCMEMLEHVPSIEESIDSCAKLVKPGGNLFFSTINRTPKAYLYLIIGAEYVLNILPRGTHEFDRFIKPSELAACLRKSRLEIVEMAGMQYDPFKRTCSLNSDLSTNYIVHARKPLTK

SEQ ID NO: 106691 - protein, 212 aa, Unknown
  Bacterial polypetide isolated from the Sargasso Sea
MAQRNMTTTHANADPGELEKFSELAHRWWDPNSEFKPLHEINPLRLDWIQSITPLAGKRIVDVGCGGGILSESMARAGAIVKGIDLSRKALRVADLHSLEAGVTVDYEEIAAEALAAREPGSFDVVTCMEMLEHVPDPASVVRACATLVKPGGYVFFSTIHRNAKAYLLAVIGAEYVLNMLPRGTHDYAKFIRPSELSAFVRAAGLQAQEMR

SEQ ID NO: 106692 - protein, 239 aa, Unknown
  Bacterial polypetide isolated from the Sargasso Sea
MTNKAVTNVDPQEIDKFSQLASRWWDPEGEFKPLHLINPLRLDFINQNAQGLFGKTVIDIGCGGGILAESMAKAGAAVTGLDMAQASLEVAKLHGLESGAKVDYVCSTAEDFAADNAGKFDVVTCMEMLEHVPDPASVVSACAALAKPGGHVFFSTLNRNIKSYLMGIVGAEYVLKLVPKGTHDHSKFLKPSELMSMTDNAGLLPRDMTGLHMDPVTQGFYLSADNVDVNYLLYTVVPD

SEQ ID NO: 106693 - protein, 217 aa, Unknown
  Bacterial polypetide isolated from the Sargasso Sea
MENLDPEEIKKFNQMASTWWDPNGDFKALHDINPSRLDYILSRVSKPLAAVLDVGCGGGILTESLEAHTNEIIGIDAAPKPLKVAQLHAIDQDLEIDYRLSTVETLSKEYQNHFDVLTCMELLEHVTDFNSTVQACADLTRPGGHLFFSTINRNPISFLKLIVGAEEILKILPRGTHEYQKFIKPSELANALRIANLQLLNISGISYNPFTRKTRID

SEQ ID NO: 106694 - protein, 236 aa, Unknown
  Bacterial polypetide isolated from the Sargasso Sea
MNIENLDHDEVNKFDELAARWWDKDGEFKPLHQINPLRVGFIKERSALEGKKVLDVGCGGGILSQALGELGAEVIGIDASERTIGVAKAHSELIKSDVEFFQQTIEDFIASNPNKKFDVITCLEMLEHVPSPGDIIKSCSNLLNDNGDIFFSTINRNPKSYLFAVIGAEYILNLLPKGTHDYEKFIKPSELAKWVRDAGLTSKETIGLSYNPITDNYWLGKDIQVNYMVHAKKEVV

SEQ ID NO: 106695 - protein, 236 aa, Unknown
  Bacterial polypetide isolated from the Sargasso Sea
MQQNTNVDPQEIAKFERMAETWWDLNGEFKPLHLLNPLRLNYIDQTAGGIFGKKVLDVGCGGGILSESMARIGAVVDGLDMGEEPLEVARLHALETGVSINYVKNTAEAHREDHREYYDVVTCMEMLEHVPNPQSVIQACCDMVKPGGFVFFSTINRNVKSFVETIIGAEYLLKMLPIGTHDHNKFIKPSELIELVDNTDLICKDALGITYNPLTGIFKYTSKVDVNYMIATQKAD

SEQ ID NO: 106696 - protein, 234 aa, Unknown
  Bacterial polypetide isolated from the Sargasso Sea
MTNVDQQEINKFSELASRWWDPEGEFKPLHLINPLRLDFINQHSEGLFDKKVVDIGCGGGILAESMARAGATVTGLDMAEASLEVAKLHGLESGVKVDYVCSTAEAFAEANAGQFDVVTCMEMLEHVPDPASVVLACAKLVKPGGHVFFSTLNRNLKSYLMGIVGAEYILKLVPKGTHDHSKFIKPSELMAMTDHAGLLPRDMTGLHMDPISQGFYLSANNVDVNYLLYTVAQN

SEQ ID NO: 106697 - protein, 230 aa, Unknown
  Bacterial polypetide isolated from the Sargasso Sea
MNNFDQQELDKFSKLADEWWNPNGKFKPLHLINPLRVSYIEDKVELRGLDILDIGCGGGILSEALSQKGANVTAIDLADGPLEVAKIRQKESKLDIRYEKKSTSELVDEGNKYDVITCLEMLEHVPDPAEIVKDCADLTKNGGHLFFSTINRNLKSFVFAILGAEYILNILPQGTHEFEKLIKPAELKNYVDAAKLDFEEVKGMSYIPILDIVRLTEDSSVNYIVHARKK

SEQ ID NO: 106698 - protein, 214 aa, Unknown
  Bacterial polypetide isolated from the Sargasso Sea
WWDPNSEFKPLHDINPLRAGWIDQHADVKHKSVLDVGCGGGLLCEALAHRGAAVTGIDMGEAPLSVARLHQLESGVTVDYQQSTAESMAAHRAGKFEIVTCLEMLEHVPDPSTVIQACADLCRPGGDLFFSTINRNPKSFLFAIVGAEYILNLLPRGTHEYDKFIKPSELARWIREAGLDMQEMMGMTYNPLTKRYRLTPDDVSVNYLIRAKKP

SEQ ID NO: 106699 - protein, 130 aa, Unknown
  Bacterial polypetide isolated from the Sargasso Sea
MKNYANEHKNLDPEEVKKFNDIAEKWWDLEGEFKPLHQINPLRLNFIKERTSLKGKSILDIGCGGGILTEALSEAGAEVIGIDASAQTIGVAKSHANAVNSKATYLESTVEDFLANNQNELFDVITCLEM

SEQ ID NO: 106700 - protein, 238 aa, Unknown
  Bacterial polypetide isolated from the Sargasso Sea
MHSDANVDLTEIAKFEAIASRWWDMEGEFKPLHQINPVRLDWITDKSGGLFGKRILDIGCGGGILAESMARRGAKVTGIDMGKEPLGVARLHALEAGVELEYRQITAEAHADEAPGQYDVVTCMEMLEHVPDPASVLRAIATLVRPGGKVFVSTINRNPKAYLMMILGAEYLMKMVPKGTHDHKKFITPAELCRMGEAAGLLVRDMSGVHYAPLSNSFKLGRNVDVNYMVAFERPEQG

SEQ ID NO: 106701 - protein, 232 aa, Unknown
  Bacterial polypetide isolated from the Sargasso Sea
MTNADPHELQKFSDLAHRWWDPNAEFKPLHDLNPVRLGWIDAHAHLAGKRALDIGCGGGILSESMAGLGAQVKGIDLSTEALGVADLHSLESGISVDYEAIAAEAIAAREPGTYDVVTCMEMLEHVPSPGDIVAACATLVKPGGWVFFSTLNRNLKAYLFAVIGAEYIAQMLPKGTHDYARFIRPSELAGFVRATDLHIVEIKGITYHPIGKRFALSNDADINYLVACRRGA

SEQ ID NO: 106702 - protein, 234 aa, Unknown
  Bacterial polypetide isolated from the Sargasso Sea
MNIKNLDPEEVKKFNDIAEKWWDLEGEFKPLHQINPLRVNFIKERTQLEGKRVLDIGCGGGILSEALSSAGAEVIGIDASSQTIGVAKSHANSVNSRVTYMESTVEEFLLNNKNDLFDVITCLEMLEHVPAPNLIIENCHSLLKDDGDIFLSTINRNPRSYFFAIIGAEYLLNLLPKGTHEYSKFIKPSELAGWIRQAGLNLKETIGLSYNPITDHYWLGKDIQVNYMVHARKE

SEQ ID NO: 106703 - protein, 160 aa, Unknown
  Bacterial polypetide isolated from the Sargasso Sea
HGLDMGEEPLEVARLHALETGVSINYVKNTAEAHREDHREYYDVVTCMEMLEHVPDPQSVIQACCDMVKPGGFVFFSTINRNIKSFVETIIGAEYLLKMLPIGTHDHNKFIKPSELMALVDNTDLLCKDALGITYNPLTGIFKYTPKVDVNYMIATQKVD

SEQ ID NO: 106704 - protein, 232 aa, Unknown
  Bacterial polypetide isolated from the Sargasso Sea
MENIDQEEVNKFDEIAEKWWDLEGEFKPLHQINPLRVGFINERTILKGAKVLDIGCGGGILSESLSNLGAEVTGLDASEKTIGVARARSNKVGSNITFLQMSLEEYINSENEKKFDVITCLEMLEHVPDPSKVVQGCKSLLKKDGKVFFSTINRNPKSYLFAILGAEYILNLLPKGTHEFDKFIKPSELSRWIRNSKLKQEEIIGLSYNPLTNHYWLGKDIQVNYMVFASNE

SEQ ID NO: 106705 - protein, 236 aa, Unknown
  Bacterial polypetide isolated from the Sargasso Sea
MNIKNLDHDEVNKFDELAAKWWDKDGEFKPLHQINPLRVGFIKERSSMEGKKVLDVGCGGGILAEALNELGASVTGIDASENTIGVAKTHSKSIGSDVKYIQNTIEEFTSSYPDERFDVITCLEMLEHVPSPYEIIKSCSNLLKEDGNIFFSTINRNPRSYLFAVIGAEYILNLLPKGTHDYEKFIKPSELAKWIRDAGLNSKETIGLSYNPITDNYWLGKDIQVNYMVHAKKESI

SEQ ID NO: 106706 - protein, 158 aa, Unknown
  Bacterial polypetide isolated from the Sargasso Sea
MENFDQLELEKFSKLADQWWDPNGKFKPLHLINPLRTSYIEDKVDIKNLEILDIGCGGGILAELLSRKGADMTAIDLADGPLNVAKIRQKKSKLDINYRKISTTDMVKEKKTFDVITCLEMLEHVPDPSQVVEECAQLCKPGGHLFFSTINRNLKSFI

SEQ ID NO: 106707 - protein, 230 aa, Unknown
  Bacterial polypetide isolated from the Sargasso Sea
MKNFDQQELDKFSKLAKDWWNPSGKFKPLHLINPLRFNYIKSKIDLKSKKVLDIGCGGGILSESLARAGSDVKAIDLADGPLGVAEIRRRETNLNISYEKCSTSELVDRGEKYDVITCLEMLEHVPEPRLIVEECNKLLKANGHVFFSTINRNMKSFFLAIVGAEYVLNILPTGTHDFDKLIKPSELKEYIDKTSLNFEEIKGMLYLPFFDIVKLNDDPSVNYIIHARKK

SEQ ID NO: 106708 - protein, 230 aa, Unknown
  Bacterial polypetide isolated from the Sargasso Sea
MENFDKSEIEKFSSLADQWWDPSGKFKPLHLINPLRADYISSKVNLKNKKILDVGCGGGILAESLALKGANVKGIDLADGPLEVAKIREQKRNLGITYEKIETSKLIKKKEKFDVITCLEMLEHVPDPEKTVKECSELLNNNGDIFFSTINRNLKAFTLAILGAEYILNILPKGTHDYEKLIKPSELLTYIDKGGLDFSEIKGMTYIPFFDIVKLSNDPSVNYIIHARKK

SEQ ID NO: 106709 - protein, 230 aa, Unknown
  Bacterial polypetide isolated from the Sargasso Sea
MNNFDQQELDKFSKLADEWWDPNGKFKPLHLINPLRISYIEEKISIKDLDILDIGCGGGILSEALAKKGANVTAIDLADGPLEVARIRQKESKLDIRYEKKSTTELIEEKIQYDVVTCLEMLEHVPDPAEIVKDCAKLTKNGGHLFFSTINRNLKSFVFAILGAEYILNILPQGTHEFEKLIKPSELKNYVDGAKLDFEEVKGMSYLPIFDIVKLTDDSSVNYIVHARKK

SEQ ID NO: 106710 - protein, 218 aa, Unknown
  Bacterial polypetide isolated from the Sargasso Sea
MEPGFWHEKWQQQLIGFHQQDINPFLVKYWHTLALPAEAQVFVPLCGKSLDMCFLAEQGHQVIGCELNEIAVQQFFEDNQLPMQQSALGEHQHYHTEQVSLYQGDIFTLPVSITAKVSGFYDRAALIAWPECMRAQYAKQLAQLLPQGSVGLLVTLDYPQEALSGPPFAVSPTWVETHLSDDFDIQLLDCQDVLADNPRFVKKEVPWLNEAAYLLRRR

SEQ ID NO: 106711 - protein, 205 aa, Unknown
  Bacterial polypetide isolated from the Sargasso Sea
EDRIGFHLKEVNPYLIQYADQLLHQNPDRIFVPLCGKTLDLCWLTKRTKKVIGIELVEKAVQDFLDENHIEYLTHKEGDLKKFNSKSIDIYLGDFFDLNPNKTYSFKAIYDRASIVAIEKSDRRKYVDHLISFLEKSGRILIITLEYNQSQMEGPPFSVSAEEIKSLFSSLGSVTLLETFDILDDRSRKKGLTSLLEHVFLIIKT

SEQ ID NO: 106712 - protein, 218 aa, Unknown; identical to SEQ ID NO: 106710
  Bacterial polypetide isolated from the Sargasso Sea

SEQ ID NO: 106713 - protein, 218 aa, Unknown
  Bacterial polypetide isolated from the Sargasso Sea
MEPGFWHEKWQQQLIGFHQQDINPFLVKYWHTLALPAEAQVFVPLCGKSLDMCFLAEQGHQVIGCELNELAVQQFFEDNQLPMQQSTLGEHQHYHTEQVSLYQGDIFTLPASITAQVSGFYDRAALIAWPESMRAQYAKQLAQLLPQGSVGLLVTLDYPQEALSGPPFAVSPTWVETHLSDDFDIQLLDCQDVLADNPRFVKKEVPWLNEAAYLLRRR

SEQ ID NO: 106714 - protein, 189 aa, Unknown
  Bacterial polypetide isolated from the Sargasso Sea
LYYQFREEFNASQDPFRRAVLFLYLNRYGYNGLCRYNLRGEFNVPFGRYKKPYFPEAELYHFAEKAQNAEFHCLSYDECMEQADANSVVYCDPPYAPLSATANFTAYHTNSFSPKEQAHLAKMAEKLVSKQIPVLISNHDTPDTREWYKAAEHFQVKVRRSISSNGGTRKKVDELLALYKPGVVSPANK

SEQ ID NO: 106715 - protein, 93 aa, Unknown
  Bacterial polypetide isolated from the Sargasso Sea
MQQKSRAFLKWAGGKYSLVDDINARLNQASSHADTLVEPFVGAGSVFLNSDFKHYILNDINADLINLYKELRNSPDEFISDAKKLFVDLNNHP

SEQ ID NO: 106716 - protein, 242 aa, Unknown
  Bacterial polypetide isolated from the Sargasso Sea
GAGSVFLNTDFSRYILADINSDLISLYNIVKTRTDEYVQASRELFMPETNQAEVYYRFREEFNASQDPFRRAVLFLYLNRFGYNGLCRYNLRGEFNVPFGRYKKPYFPEAELYHFAEKAQNAEFHCLSYEECMDRADSNSVVYCDPPYAPLSATANFTAYHTNSFSPKEQAHLAEMAEKLVSKQIPVLISNHDTPDTREWYRAAKHFQVKVRRSISSNGGTRKKVNELLALYKPGVVTPAKK

SEQ ID NO: 106717 - protein, 217 aa, Unknown
  Bacterial polypetide isolated from the Sargasso Sea
MKKTRAFLKWAGGKYSLVEEIAERLPAGRVLLEPFVGAGSVFLNTDYDAYVLNDINPDLIGLYNHLKLTPDRFIAESRKLFVTEHNHKAAYYRLRTQFNQTDTSFERALLFLFLNRHGFNGLCRYNKKGGFNVPFGSYKKPYFPEKELWAFAEKAQKATFICESYADAIQRAEEDWVIYCDPPYAPLSTTASFTTYSAGGFTLDDQAVLARLARHTA

SEQ ID NO: 106718 - protein, 299 aa, Unknown
  Bacterial polypetide isolated from the Sargasso Sea
MLKKSRAFLKWAGGKYNLVDAISLQLPKAPLLVEPFVGAGSVFLNTDYPEYLLNDINADLINLYQLLQTKPADFIADAQNLFVQSSNEKSSYLSFREEFNQSTDIYQRSLLFLYLNRHGYNGLCRYNSSGKFNVPFGSYKKPYFPEAELWFFAEKAQKAKFVCMDYNELMHQIKSPAVVYCDPPYVPLSRTASFTSYAKNSFDLDDQAELANLAENCQNRGVSVVISNHDTTLTRKLYEKAKLTSIQVGRSISQKGATRGKVAELFALYATTHQPGTTQLTTNSNSTIKATTAKMPATK

SEQ ID NO: 106719 - protein, 270 aa, Unknown
  Bacterial polypetide isolated from the Sargasso Sea
MKKNRAFLKWAGGKYPLLDDIKKHLPKGECLIEPFVGAGSVFLNTDFSRYILADINNDLISLYNIVKLRTEEYVAEARKLFTPENNHPDVYYQFRTEFNQSQDPFRRALLFLYLNRHGYNGLCRYNLRGEFNVPFGRYKRPYFPQDELYHFAEKAQNAEFHCLSYEECMELAGVNSVVYCDPPYAPLSATANFTAYHTNSFSPAEQARLAEMAEKLVSKRIPVLISNHDTPDTREWYKAAKHFQVKVRRSISSNGGTRKKVDELLALYRP

SEQ ID NO: 106720 - protein, 209 aa, Unknown
  Bacterial polypetide isolated from the Sargasso Sea
MQKKNRAFLKWAGGKYSLVEHIQARLPQANKLIEPFVGAGSVFLNTQYKRYLLNDINPDLINLYNFLKAQPDALINDARSFFDGKRNEEKMYYALREEFNATEDEYYRAILFLYLNRHGYNGLCRYSLQGRFNVPFGRYKKPYFPEDEMFVFSEKSQKATFTCLPFEKVFSRARRGNVIYCDPPYAPISKTAAFTSYAARSFGQESQEK

SEQ ID NO: 106721 - protein, 292 aa, Unknown
  Bacterial polypetide isolated from the Sargasso Sea
MQKKNRAFLKWAGGKYSLVEHIQARLPQANKLIEPFVGAGSVFLNTQYKRYLLNDINPDLINLYNFLKAQPDALINDARSFFDGKRNDEKMYYALREEFNATQDEYYRAILFLYLNRHGYNGLCRYSLQGRFNVPFGRYKKPYFPEDEMFVFSEKSQKATFTCLPFEKVFSRARRGNVIYCDPPYAPISKTAAFTSYAARSFGQESQEKLAELATRASKKRGIPVLISNHDLPLTRSLYQGADFSMLSVKRSISQNGAKRQPVDEILAYFPPAKVAPKRKARKKKTFQRPSL

SEQ ID NO: 106722 - protein, 80 aa, Unknown
  Bacterial polypetide isolated from the Sargasso Sea
MSNSGFTFRRVREEMIETLLELGIKDFRVLDAISQIPRHTFLDEALWSRAYENRPLTIGYKQTISQPYIVARMTELLISH

SEQ ID NO: 106723 - protein, 167 aa, Unknown
  Bacterial polypetide isolated from the Sargasso Sea
MINKGEEQRAHLIMKLRGQGIRSASVLSAIESVPRDIFIENALKNHAWENVTLPIGEGQTISQPYIVALMTTALNLSGKEIVLEIGTGSGYQASILSLLCRRVYTIERIKTLHEFSNKKFKELKINNITSKFGNGSFGWPEVSPFDRIILTCAINQIPKQLFLQLKI

SEQ ID NO: 106724 - protein, 117 aa, Unknown
  Bacterial polypetide isolated from the Sargasso Sea
MNINEVKGAGLTSEAVRRKLGEELKTLGIKNNEVLDLVSSMPRHLFIDSALTNRAYENVSLPIGFRQTISQPYIVAKMTELIHEMTSMKNVLEIGTGSGYQTSILSMLFDKVTTMKE

SEQ ID NO: 106725 - protein, 192 aa, Unknown
  Bacterial polypetide isolated from the Sargasso Sea
TNEKVISIMEKIPRESFIDPALKQMAYDDDALPIGHNQTISSPYIVAKMSQIIIEEDKMDKVLEIGTGCSYQTVVLSYLFKKVVSIERIKSLYVKSKKIVSDFNRNNIKLIFGDGYTGSNIDAPFDAIIITAAPNEIPKSLIEQLKTHGRMIMPLNKNGKQILIRIKNTPKGIILKEIDDVLFVPMLKGIIQ

SEQ ID NO: 106726 - protein, 80 aa, Unknown
  Bacterial polypetide isolated from the Sargasso Sea
MNMIETQIKKRGITDQTILDAMKEVNRHEYVQENFERLAYSDRPVPIGFGQTISQPYIVAFMSHKLNVASHHKVLEIGTG

SEQ ID NO: 106727 - protein, 219 aa, Unknown
  Bacterial polypetide isolated from the Sargasso Sea
MHLDSYKHKGLRIKLIELLRSKGIDNEGVLKAINKVPRHLFLDNAFVKFAYQDQAFPIGANQTISQPFTVAFQSQLLDAKRGQKVLEIGTGSGFQSCVLMELGLKVFSIERHRSLHQSAKKQLEGMGYFPRLFFGDGYQGLATFAPFDRILITAAAPYIPEALKSQLKLGGKMVIPLGEGDKQEMQRITKVSETEFNIERFGDFSFVPMLQDKSFGKTQ

SEQ ID NO: 106728 - protein, 123 aa, Unknown
  Bacterial polypetide isolated from the Sargasso Sea
MTRVALTSAVNLAKKLQEAGIRHPAVLKAISHTPRELFLDNALAHKAYENTALPIGQGQTISQPYIVARMTELLLQHQPQKVLEVGTGSGYQAAILAQLVPEMCTIERIKGLQIQARQRLKRL

SEQ ID NO: 106729 - protein, 199 aa, Unknown
  Bacterial polypetide isolated from the Sargasso Sea
ETKLLSIMESIPRSHFIGNSFKIYAFDDIALPIACGQTSTQPSIVGIMSQSLNISSRCKVLEIGTGSGYQTAILAKMARRVYSIEIIKPLGVAAKEKMDSLKIRNVTILCKDGTTGLKEQAPFDRIILGAATEDIPKVLLDQLKPRGVLVAPVGMTEKIQKIVKVEKNGTNYEYTDLKSVRFHPLTESKNGNISHAQFL

SEQ ID NO: 106730 - protein, 209 aa, Unknown
  Bacterial polypetide isolated from the Sargasso Sea
MVDKQIKDRGVVDPKVLDIISNTPRHKFVPKDMVDYAYDDRPLPIGEGQTISQPYIVALMTELLSLSGKEKVLEIGTGSGYQSAILSSLSNKVFTIEIVKPLAIRAINILEELQINNVYARWGDGYNGWPSEAPFDCIIVTAAPDKIPEALIKQLKIGGKLVIPVGKYWQELKVISKTSDSNIHEKTIIPVRFVPMVHPSNSFFDEDLN

SEQ ID NO: 106731 - protein, 226 aa, Unknown
  Bacterial polypetide isolated from the Sargasso Sea
MSNSGFTFRRVREEMIETLLDLGIKDFRVLDAISQIPRHIFLDEALWSRAYENRSLTIGYKQTISQPYIVARMTELLISHTNSRGKVFENLLELGSGCGYQSAVLSFFSEKVDAIERIKPLVHKSRENLSNLKINNVLFKHGDGFEDWDKQKKYDGILCAAAPRAYPNDLVSVLNDNAKLVIPVGGSSQKLNVITKNKDEEIKEEQYDDVSFVPMLAGKSEDGNDV

SEQ ID NO: 106732 - protein, 141 aa, Unknown
  Bacterial polypetide isolated from the Sargasso Sea
MTRVALTSAVNLAKKLQEAGIRHPAVLKAISHTPRELFLDNALAHKAYENTALPIGQGQTISQPYIVARMTELLLQHQPQKVLEVGTGSGYQAAILAQLVPELCTIERIKGLQIQARQRLKRLDLHNVSFKYGDGWQGWPN

SEQ ID NO: 106733 - protein, 147 aa, Unknown
  Bacterial polypetide isolated from the Sargasso Sea
MSNSGFTFRRVREEMIETLLDLGIKDFRVLDAISQVPRHIFLDEALWSRAYENRSLTIGYKQTISQPYIVARMTELLISHTNTRGKVFENILELGSGCGYQSAVLSFFSEKVDAIERIKPLVHKSRENLSNLKINNVLFKHGDGYED

SEQ ID NO: 106734 - protein, 119 aa, Unknown
  Bacterial polypetide isolated from the Sargasso Sea
MSNSGFTFRRVREEMIETLLELGIKDFRVLDAISQIPRHTFLDEALWSRAYENRPLTIGYKQTISQPYIVARMTELLISHTKTRGKVFDKVLDLGSGCGYQSAVLSFFSEKVGCNRKNQ

SEQ ID NO: 106735 - protein, 213 aa, Unknown
  Bacterial polypetide isolated from the Sargasso Sea
MVDRVSEGARPDHHRFGGFISQRSQQRLLDTLRAKGIRNEDVLEAFAKIPRHEFVEEALRSRAYEDTALPIGYQQTISQPYVVALMTQLLLTGRERLKRVLEIGTGSGFQTAVLSRVSARVFSIERIGALAGRAYQKLGSLGIENVSLRHGDGANGWSAKGPFDGIILTAAPKRVPDTLFSQLSDQGVLVAPEGSNRQQRLLYWIKQDGIAIR

SEQ ID NO: 106736 - protein, 123 aa, Unknown
  Bacterial polypetide isolated from the Sargasso Sea
MYDSPKLIGLRNELIKNLFKKGINNKDILKAFFKVPRHLFIHKDFESYAYKDEAFPIDENQTISQPFTVAFQTQLLDVFKGDKVLEIGTGSGFQTAVLVFLGAEVYTIERIHSLYKKSKKILD

SEQ ID NO: 106737 - protein, 128 aa, Unknown
  Bacterial polypetide isolated from the Sargasso Sea
MSERLKQKQTLHSYWKNSRMITSERILKAFMEIPREYFVETSFADQAYADHPLPIGEGQTISQPTTVMLMLQLLEVEPEHRVLEIGAGSGYNAALLGLLAKEVVTIERHKKLAVLARANLKKAGISNV

SEQ ID NO: 106738 - protein, 113 aa, Unknown
  Bacterial polypetide isolated from the Sargasso Sea
MNSGLAEGWEEEKRTRMIDVDLKPRGITNQEVLKAMMNVPRQEFVPENIRSLAYADRPLPIGEGQTISQPFVVAWMSQLLVIEKGMKVLEIGTGSGYQAAILAELEARTFSVE

SEQ ID NO: 106739 - protein, 218 aa, Unknown
  Bacterial polypetide isolated from the Sargasso Sea
RRVREDMIENLLDMGIKDFRVLDAMSQVPRHLFIEEALWSRAYENRSWSIQYGQTISQPYIVARMTELLISHTNSRGKIFENILELGSGCGYQSAVLSFFSEKVDALERIKPLVEEAKKNLSNLSIDNVFFNHGDGYQDWKKNIKYDGILCAAAPRAYPHDLVSALKPNAKLVIPVGGKVQKLNVISVNEKNEVNEEKFDDVSFVPMLPGTSEDGNEL

SEQ ID NO: 106740 - protein, 118 aa, Unknown
  Bacterial polypetide isolated from the Sargasso Sea
MIDNATLKMQFLFSLRKAGVVDKQVLDAMERIDRKNFVNGIFSEKAYDDTPLPIACGQTISQPTVVGLMTQTLKVSSRDKVLEIGTGSGYQAAILSLLARRVYTVERHSLLVNNAAKV

SEQ ID NO: 106741 - protein, 151 aa, Unknown
  Bacterial polypetide isolated from the Sargasso Sea
NQTISQPTTVMLMLQLLKVLPEQRVLEIGTGSGYNAALLSELTGKVVTIERHMQLVKFAQDNLTKAGYDDVIVLKGDGKKGYAKHAPYDRIMVTAAAQKVPQHLKDQLSIGGLLVAPIGETYGCEMLIFEKISLDNFKICKNGLFSFVPLV

SEQ ID NO: 106742 - protein, 178 aa, Unknown
  Bacterial polypetide isolated from the Sargasso Sea
EALRSRAYENMSLPIGFKQTISQPYIVAKMTELLVRNSKKQNEKFEKILEIGSGCGYQSAVLSYFADEVHSLERIKQLVSKARVNLSELRIYNVLIKNRDGFEGWDEEIKYDGILCAAAPPEIPKKLLDFLKVGCSLVLPVGGSKSQKLKIVTKTKKGFDEQEFESVSFVPMLGGTSK

SEQ ID NO: 106743 - protein, 214 aa, Unknown
  Bacterial polypetide isolated from the Sargasso Sea
MAFKKENSNFEQQKQHLYSYWQKSRMITSKTVLKAFLAVQRDLFVDPSYRDQSYADNPLPICCEQTISQPTTVMLMLQLLEVIPGQRVLEIGTGSGYNAALLAELTGKVVTVERHMKLVKLAQHNLKKAGCEGVIVVKGDGKKGYASHAPYDRIMVTAATQKVPQQLKDQLSVGGLLVAPIGATFRCEMKTFEKISSDNFRTLNHGLFSFVPLV

SEQ ID NO: 106744 - protein, 134 aa, Unknown
  Bacterial polypetide isolated from the Sargasso Sea
MDKVLEIGTGCSYQTVVLSYLFKKVVSIERIKSLYIKSKKIVSDFNRNNIKLIFGDGYMGSTIDAPFDAIIITAAPNEIPKSLIEQLKTHGRMIMPLNKNGKQILIRIKNTPKGIILKEIDDVLFVPMLKGIIQ

SEQ ID NO: 106745 - protein, 156 aa, Unknown
  Bacterial polypetide isolated from the Sargasso Sea
MKLSQQLNFNGIGMTSLRTRERLLGRLMEQGIKNMQVLDIIRSTPRHIFLDEALSHRAYEDVALPIGYGQTISQPYVVAKMTEIVSASRQLKSVLEIGTGCGYQTAVISRIAEKVYTIERIKPLLDRAKKNLKLLGIRNVEFKHDDGSLGWEERAP

SEQ ID NO: 106746 - protein, 213 aa, Unknown
  Bacterial polypetide isolated from the Sargasso Sea
AAKMMVDKQIKDRGVLDPKVLDVISNTPRHKFVPKDMVDYAYDDRPLPIGEGQTISQPYIVALMTELLSLSGKEKVLEIGTGSGYQSAILSSLSNKVFTIEIVKPLAIRAINILEELQINNVYARWGDGYNGWPSEAPFDCIIVTAAPDKIPEALIKQLKIGGKLVIPVGKYWQELKVISKTSNSNIHEKTIIPVRFVPMVHPSNSFFDEDLN

SEQ ID NO: 106747 - protein, 181 aa, Unknown
  Bacterial polypetide isolated from the Sargasso Sea
MTRVALTSAVNLAKKLQEAGIRHPAVLKAISHTPRELFLDNALAHKAYENTALPIGQGQTISQPYIVARMTELLLQHQPQKVLEVGTGSGYQAAILAQLVPELCTIERIKGLQIQARQRLKRLDLHNVSFKYGDGWQGWPNRSPFDGIMVTAAAAKVPEALLSQLAEGGVLIIPVGGRDAA

SEQ ID NO: 106748 - protein, 269 aa, Unknown
  Bacterial polypetide isolated from the Sargasso Sea
RAVLATLAEFTGLNLVASDSVTGRVTLNLNDVPWDQALALILQSQGLSSREQGNVIVVAPASELAEIERQEIEARSQQQILAPLVTEFIEIKYARAEDLAQLLRGGDGFGLLTERGRVSVDQRTNTLLIQDTAEQVRDIMRTLDRLDVAVRQVQIEARIVIARDSASRELGVNWGVSSTRGFLENEAGQFVPRNINPGGLNRAQGGLAVDLGSTTAADTGFSFGYLSGDILLDLELRALESEGKSQTISQPRVITANKRTATIRQGEER

SEQ ID NO: 106749 - protein, 81 aa, Unknown
  Bacterial polypetide isolated from the Sargasso Sea
KHGDGWQGWSSKAPYDCIIVTAAASSVPEALTDQLNEGGRLVIPVGDDQQQLLCIDKIEGELHSTTVEAVRFVPLVAGDLL

SEQ ID NO: 106750 - protein, 122 aa, Unknown
  Bacterial polypetide isolated from the Sargasso Sea
GYQTAVLARLFSQVCSVERIKSLQFQAKRRLQQLDLHNVSMKHGDGWLGWASKAPFDCIIVTAAPHEVPQALLQQLSEGGRLVIPVGSQEQVLRVFTRIGDEFEQKDVEAVRFVPLVPGELA

SEQ ID NO: 106751 - protein, 193 aa, Unknown
  Bacterial polypetide isolated from the Sargasso Sea
FQIPRHTFLDEALWSRAYENRPLTIGYKQTISQPYIVARMTELLISHTKTRGKVFDKVLDLGSGCGYQSAVLSFFSEKVDAIERIKPLVEKSRENLANLKIHNVLFKYGDGYQDWDKKLQYDGIICAAAPREYPQDLISILKNNAKLVIPVGGSDQRLNVITKLKNNEVEEKQYEEVSFVPMLAGKSEDGNDV

SEQ ID NO: 106752 - protein, 213 aa, Unknown
  Bacterial polypetide isolated from the Sargasso Sea
EMIETLLELGIKDFRVLDAISQIPRHTFLDEALWSRAYENRPLTIGYKQTISQPYIVARMTELLISHTKTRGKVFDKVLDLGSGCGYQSAVLSFFSEKVDAIERIKPLVEKSRENLANLKIHNVLFKYGDGYQDWDKKLQYDGIICAAAPREYPQDLISILKNDAKLVIPVGGSDQRLNVITKLKNNEVEETQYEEVSFVPMLAGKSEDGNDV

SEQ ID NO: 106753 - protein, 223 aa, Unknown
  Bacterial polypetide isolated from the Sargasso Sea
SGFTFRRFREEMIETLLDLGIKDFRVLDAISQVPRHIFLDEALWSRAYENRSLTIGYKQTISQPYIVARMTELLISHTNSRGKIFENLLELGSGCGYQSAVLSFFSENVDAIERIKPLVHKSRENLSYLKINNVLFKHGDGYEDWDKQKRYDGILCAAAPRAYPNDLVSVLNNNAKLVIPVGGSSQKLNVITKNKDEEIKEEQYDDVSFVPMLAGKSEDGNDV

SEQ ID NO: 106754 - protein, 225 aa, Unknown
  Bacterial polypetide isolated from the Sargasso Sea
MVAKSGFTFKRVREQMVEMLLEMGIKDFRVLDAMSHIARHQFLDEALWSRAYENRSLTIGYKQTISQPYIVARMTELLIEKASGRGKIFKKIIDIGSGSGYQSAILSFFSEEVIGIERIKPLVSKSRSTLLNLGIKNVSIINGDGYVLDGLKNVDGMICAAAPLEIPEDLIKLLKKDARLILPVGFKNTQKLICIEKQNKNSYEKFEVEDVAFVPMLGGISRNGN

SEQ ID NO: 106755 - protein, 142 aa, Unknown
  Bacterial polypetide isolated from the Sargasso Sea
MALRGMGVGETEVLAAMEQVPREQFVPPTLRDHAYENASLPIAMEQTISQPYVVARMTAALQLTGRERVLEIGTGSGYQAAILSFLCRRVYSIERLRPLLVEAETRFRQLKITNVTTKVGDGAKGWPEGAPFDRIILTCAPP

SEQ ID NO: 106756 - protein, 226 aa, Unknown
  Bacterial polypetide isolated from the Sargasso Sea
MSNSGFTFRRVREEMIETLLDLGIKDFRVLDAISQVPRHIFLDEALWSRAYENRSLTIGYKQTISQPYIVARMTELLISHTNSRGKIFENLLELGSGCGYQSAVLSFFSENVYAIERIKPLVQKSKENLSQLKINNVLFRHGDGYQDWEKEKKYDGILCAAAPREYPTDLVSVLNNDAKLVIPVGGASQKLNVITKVNNDEIKEEEFDDVSFVPMLAGKSEDGIDV

SEQ ID NO: 106757 - protein, 226 aa, Unknown
  Bacterial polypetide isolated from the Sargasso Sea
MNSSGFTFRRVREDMIENLLDMGIKDFRVLDAMSQVPRHLFIEEALWSRAYENRSWSIQYGQTISQPYIVARMTELLISHTNSRGKIFENILELGSGCGYQSAVLSFFSEKVDAIERIKPLVEEAKKNLSNLSIDNVFFKHGDGYQDWKKNIKYDGILCAAAPRVFPDDLVSALKPNAKLVIPVGGKDQKLNVISVNEKNEINEEEFDDVSFVPMLPGISEEGNEL

SEQ ID NO: 106758 - protein, 196 aa, Unknown
  Bacterial polypetide isolated from the Sargasso Sea
MKLRGQGIRSASVLSAIESVPRDIFIENALKNHAWENVTLPIGEGQTISQPYIVALMTTALNLSGKEIVLEIGTGSGYQASILSLLCRRVYTIERIKTLHEFANKKFKEQKLNNITTKFGNGSLGWPEVSPFDRIILTCAINQIPKQLFFQLKIGGILIGPEILEDSSQVLSSYYQIDKNKFEKKKIEDVKFVPML

SEQ ID NO: 106759 - protein, 211 aa, Unknown
  Bacterial polypetide isolated from the Sargasso Sea
MTRVALTSAVNLAKKLQEAGIRHPAVLKAISHTPRELFLDNALAHKAYENTALPIGQGQTISQPYIVARMTELLLQHQPQKVLEVGTGSGYQAAILAQLVPELCTIERIKGLQIQARQRLKRLDLHNVSFKYGDGWQGWPNRSPFDGIMVTAAAAKVPEALLSQLAEGGVLIIPVGEETQQLMRFTRRSDRFSSEVIETVKFVPLVNGELA

SEQ ID NO: 106760 - protein, 226 aa, Unknown
  Bacterial polypetide isolated from the Sargasso Sea
MSNSGFTFRRVRKEMIETLLELGIKDFRVLDAISQIPRHTFLDEALWSRAYENRPLTIGYKQTISQPYIVARMTELLISHTKTRGKVFDKVLDLGSGCGYQSAVLSFFSEKVDAIERIKPLVEKSRENLANLKIHNVLFKHGDGYQDWDKKIQYDGIICAAAPREYPQDLISIMKNNAKLVIPVGGFDQRLNVITKIENNEVEEKQYEEVSFVPMLAGKSEDGNDV

SEQ ID NO: 106761 - protein, 226 aa, Unknown
  Bacterial polypetide isolated from the Sargasso Sea
MSNSGFTFRRVREEMIETLLDLGIKDFRVLDAISQIPRHIFLDEALWSRAYENRSLTIGYKQTISQPYIVAKMTELLIAHTKSRGKIFERVLEIGSGCGYQSAVLSFFSEKVDAIERIKPLVQKSRDNMAKLKINNVMFKFGDGYQDWDDSIKYDGILCAASPREYPKDLISILKKDAKLVLPVGGASQKLNVIRKCDKDEVEESFHDDVSFVPMLAGKSEDGNDV

SEQ ID NO: 106762 - protein, 209 aa, Unknown
  Bacterial polypetide isolated from the Sargasso Sea
MVDKQIKDRGVVDPKVLDVISNTPRHKFVPKDMVDYAYDDRPLPIGEGQTISQPYIVALMTELLSLSGKEKVLEIGTGSGYQSAILSSLSNKVFTIEIVKPLAIRAINILEELQINNVYARWGDGYNGWPSEAPFDCIIVTAAPDKIPEALIEQLKIGGKLVIPVGKYWQELKVISKTSDSNVNEKTIIPVRFVPMVHPSNSFSDEDLN

SEQ ID NO: 106763 - protein, 226 aa, Unknown
  Bacterial polypetide isolated from the Sargasso Sea
MNSSGFTFRRVREDMIENLLDMGIKDFRVLDAMSQVPRHLFIEEALWSRAYENRSWSIQHGQTISQPYIVARMTELLISHTNSRGKIFENILELGSGCGYQSAVLSFFSEKVDAIERIKPLVEEAKKNLSNLSIDNVFFKHGDGYQDWKKNIKYDGILCAAAPRTYPHDLVSALKPNAKLVIPVGGKVQKLNVISVNEKNEINEEEFDDVSFVPMLPGISEDGNEL

SEQ ID NO: 106764 - protein, 226 aa, Unknown
  Bacterial polypetide isolated from the Sargasso Sea
MNSSGFALRRVREEMIEKLLELGIKDFRVLDAISQVPRHIFVDEALRSRAYENRSLTIGYQQTISQPYIVARMTELLISHTKSRGKVLDKVLELGSGCGYQSAVLSYFCEKVDAIERIKPLVQKARDNLAELKIHNVQFKYGDGYIDYDKSVKYDGILCAAAPRSYPEDLISVLKNNAKLVLPVGGNSQKLNVITKKHDDNFDEDIYEDVSFVPMLSGKSEDGNDI

SEQ ID NO: 106765 - protein, 224 aa, Unknown
  Bacterial polypetide isolated from the Sargasso Sea
MEHKSGFTFKRMKDQMIEALLDDGIKDFRVLDAMSKVERHKFVDEALWSRAYENRSLSIGHRQTISQPYIVARMTELLIQRFAGRGLVMKNVLEIGSGCGYQSAVLAQLSENVLGLERIKPLVRKSRINLLELRISNVKIKHADGFQAANELEQCFDGILCASAPRDIPIELIPLLKKDANLVIPVGSSNQTLTVVTKKSKQNYITEEYDKVSFVPMLGGKTNH

SEQ ID NO: 106766 - protein, 203 aa, Unknown
  Bacterial polypetide isolated from the Sargasso Sea
MNMVETQIKQRGIKDQAILDALSKINRHEFVQENFERLAYSDRPVPIGFGQTISQPYIVAFMSEKLNVNTHHKVLEIGTGSGYQAAVLAELSEHVYTIEIISELAERAKKVLNKNKYDNIFFRIGDGYKGWPEEAPFDRIMVTAAPKEVPERLIEQLAPGGIMVIPVGETVMMQYLWSITKENDGSIIKEKIFPVRFVPMVKE

SEQ ID NO: 106767 - protein, 160 aa, Unknown
  Bacterial polypetide isolated from the Sargasso Sea
MVDKQIKDRGVVDPKVLDVISNTPRHKFVPKDMVDYAYDDRPLPIGEGQTISQPYIVALMTELLSLSGKEKVLEIGTGSGYQSAILSSLSNKVFTIEIVKPLAIRATNILEELQINNVYARWGDGYNGWPSEAPFDCIIVTAAPDKIPEALIEQLKIGGK

SEQ ID NO: 106768 - protein, 227 aa, Unknown
  Bacterial polypetide isolated from the Sargasso Sea
MSLDNENLQGQGMTSLRTRQRLIERLTEKGISDVRILEAMRDSPRHLFLDEALATRAYEDLSLPIGYQQTISQPYIVARMTECLISDERLSEIPLKNTLEIGTGCGYQTYLLSIFSKKVTTIERIEPLQIKAKNILKNLEVNNVSFKFGDGNNLGQKHYDAILSAAAPLEVPHNLKERLTIGGKLILPVGNNEQQVLTLVKRISKDEFLEEKLEEVMFVPLLKGVVS

SEQ ID NO: 106769 - protein, 214 aa, Unknown
  Bacterial polypetide isolated from the Sargasso Sea
MAFKRGSSNFEQQKQHLFRYWQENRMITSNTVLKAFLAVPRELFVDQSYRDQPYADNPLPICCEQTISQPTTVMLMLQLLNVIPGQRVLEIGTGSGYNAALLAELTGEVVTVERHLKLVKLAQHNLKQAGYEGVIVVKGDGKKGYASHAPYDRIIVTAAAEKMPQQLKDQLSVGGLIVVPIGVPYRCEMITFEKISSDNFQTRNHGLFSFVPLV

SEQ ID NO: 106770 - protein, 184 aa, Unknown
  Bacterial polypetide isolated from the Sargasso Sea
MTNSGFTFRRVREELIETLLDLGIKDFRVLDAISQIPRHIFLDEALWSRAYENRSLTIGYKQTISQPYIVAKMTELLVSHTKSRGKVFESILEIGSGCGYQSAILSFFSEEVHAIERIKPLVQKSRENLSNLKINNVLVKHGDGYQDWEKEKKYDGIICAAAPREYPNDLISVLNKDAKLVIPV

SEQ ID NO: 106771 - protein, 213 aa, Unknown
  Bacterial polypetide isolated from the Sargasso Sea
MIDSPKHKGKRKKLVEELISKGITSKRVLSAIYNIPRHFFIENDFQDFAYDDKAFPISACQTISQPYTVAFQTEKLCIKEGEKILEIGTGSGYQTAILIYLKTEVYSVERIFELKRKAKTTLSKLKLKPKKIIWADGYLGFEEKAPFDKILVTAASKEIPMELLKQLKINGKMIIPIGDLNQKMILIKKTDANNFEKTDLGSFKFVPMLKKTI

SEQ ID NO: 106772 - protein, 221 aa, Unknown
  Bacterial polypetide isolated from the Sargasso Sea
MNNPKAIYERPLEEMIGKLLEMGIKDFSVLDAMRRVPRHIFIDEALRSRAYENMSLPIGYKQTISQPYIVAKMTELLVRNSAKQNEKFEKILEIGSGCGYQSAVLSYFADEVHSVERIKQLVSKARENLSDLRIHNVLIKNRDGFEGWDEEIKYDGILCAAAPPEIPKSLLAFLKVGCCLVLPVGGSKSQKLKIVTKTKKGFDEQECENVSFVPMLGGTSK

SEQ ID NO: 106773 - protein, 227 aa, Unknown
  Bacterial polypetide isolated from the Sargasso Sea
MGLDQEIFQGQGMTSLRTRQRLIERLTEKGISDVRVLEAMRDTPRHLFLDEALSTRAYEDLALPIGYQQTISQPYIVAKMTEALIQKDKMSQKPLKKVLEIGTGCGYQSYILSLFSKKVVSIERIKPLQEKAKKILKQLKVTNIEFNLDDGSSVKETKFDAILSAAAPLEVPLELKQKLSIGGKMIIPVGNKSKQVLTLVTRTSKNNFEETKVEDVLFVPLLKGVVS

SEQ ID NO: 106774 - protein, 208 aa, Unknown
  Bacterial polypetide isolated from the Sargasso Sea
MSERQKQKQILLRYWKNSRMITSERILKAFMEIPREYFVETSFADQAYADHPLPIGEGQTISQPTTVMLMLQLLEVESEHRVLEIGAGCGYNAAMLGLLAKEVVTIERHEKLAVLSRANLRKSGISNVTVLAGDGKLGDLEHSPYNRIIVTAAAQNIPVQLKEQLALDGILLSPVGHSHRCEMLRILKTPSNQFQTSTHGLFSFVPLV

SEQ ID NO: 106775 - protein, 201 aa, Unknown
  Bacterial polypetide isolated from the Sargasso Sea
MIETQIKKRGITDQTILDAMKKVNRHEYVQENFERLAYSDRPVPIGFGQTISQPYIVAFMSYKLNVASHHKVLEIGTGSGYQAAVLAELSDYVYTIEIIPELAKRAEKVLKKNDYDNITIRIGDGYKGWPEHAPFDRIMVTAAPKEIPEKLVEQLAPGGIMVLPVGETVMMQYLWLITKDNDGQIEKEKILPVRFVPMVKK

SEQ ID NO: 106776 - protein, 201 aa, Unknown
  Bacterial polypetide isolated from the Sargasso Sea
MVEDQIIKRGVEDPRVLDVMKVVERHKFVPEKYSESAYKDGPLPIGHGQTISQPFIVAFMTENLKLEPSHKVLEIGTGSGYQAAVLSELCDHVYTIEIVDELANESVERLGRLGFNNITVRSGDGYKGWPEEAPFDRIMVTAAPEEIPELLTEQLAEGGVMVIPVGKQYEIQYLWVITKEAGGSIKKEKILPVRFVPMISK

SEQ ID NO: 106777 - protein, 178 aa, Unknown
  Bacterial polypetide isolated from the Sargasso Sea
MSEIINHKKNQLINLLRDKGITNEKVISIMEKIPRESFIDPALKQMAYDDDALPIGHNQTISSPYIVAKMSQIIIEEDKMDKVLEIGTGCSYQTVVLSYLFKKVVSIERIKSLYIKSKKIVSDFNRNNIKLIFGDGYMGSTIDAPFDAIIITAAPNKIPKSLIEQLKTHGRMIMPLNK

SEQ ID NO: 106778 - protein, 310 aa, Unknown
  Bacterial polypetide isolated from the Sargasso Sea
MSGERAKRFPLALEDLKRAPRKSEGRAGERHAAVAVSKAADKPAAVLKPVAVKPAVVRTALPGSAAAKPATVPKPTAPKPAMPKPAAPSVAPAGAFALTSERVRERMVERLRANGVTDARVLEAMAAVPRHMFVDPGLATQAYEDSALPIGHQQTISKPSVVARMIELAMAGRTLERVLEIGTGCGYQAAVLSHVARDVYSIERIKPLYERAKLNLRPLRVPNIRLHYGDGRVGLPSAAPFDAIVIAAAGLDVPQALLEQLAIGGRLVAPVGAQSGQHQVLTLVERVAHAQWRASRLDRVFFVPLKSGVI

SEQ ID NO: 106779 - protein, 203 aa, Unknown
  Bacterial polypetide isolated from the Sargasso Sea
MNMIETQIKQRGIKDQVILDAMLKINRHEFVQENFERLAYSDRPVPIGFGQTISQPYIVAFMSEKLNVNTDHKVLEIGTGSGYQAAVLAELSEHVYTIEIISELAKRAEKVLNKNKYDNITIRIGDGYKGWPEEAPFDRIMVTAAPKKIPERLIEQLAPGGIMVIPVGETVMMQYLWSITKENDGSIIKEKIFPVRFVPMVKE

SEQ ID NO: 106780 - protein, 215 aa, Unknown
  Bacterial polypetide isolated from the Sargasso Sea
MITNKIEKLVKVLSEKGISDVRVLQAMLEIPRHEFLDGVFDAQAYEDMSLPIGHKQTISQPFIVARMTELLISETAFVDRPLGEVLEIGAGCGYQTAVLSKICRKVFAIERIEQLCAVAKKNLKKLNINNFEIKYGDGYEGWKIEKKFDGILCAAAAPLVPKKLKQQLNIGAKLVCPVGDQENQKLMTVKRISKEGFEEELVENVLFVPMLEGVD

SEQ ID NO: 106781 - protein, 217 aa, Unknown
  Bacterial polypetide isolated from the Sargasso Sea
RVWEEMIETLLELGIKDFRVLDAISQIPRHTFLDEALWSRAYENRPLTIGYKQTISQPYIVARMTELLISHTKTRGKVFDKVLDLGSGCGYQSAVLSFFSEKVDAIERIKPLVEKSRENLANLKIHNVLFKYGDGYQDWDNKLQYDGIICAAAPREYPQDLISILKNDAKLVIPVGGSNQRLNVITKLKNNEVEETQYEEVSFVPMLAGKSEDGNDV

SEQ ID NO: 106782 - protein, 211 aa, Unknown
  Bacterial polypetide isolated from the Sargasso Sea
MTRVALTSAVNLAKKLQDAGIRNPAVLKAISYTPRELFLDNALAHKAYENTALPIGQGQTISQPYIVARMTELLLQHQPHKVLEVGTGSGYQAAILAQLVPELCTVERIKTLQIQARQRLKRLDLHNVSFKYGDGWQGWQNRSPYNGIMVTAAAAKVPEALLSQLAEGGVLIIPVGEETQQLMRITRHLDSFSSEVIETVKFVPLVNGELA

SEQ ID NO: 106783 - protein, 212 aa, Unknown
  Bacterial polypetide isolated from the Sargasso Sea
MIETLLDLGIKDFRVLDAISQVPRHIFLDEALWSRAYENRSLTIGYKQTISQPYIVARMTELLISHTNSRGKIFENLLELGSGCGYQSAVLSFFSENVDAIERIKPLVQKSKENLSQLKINNVLFRHGDGYQDWEKEKKYDGILCAAAPREYPNDLVSVLNNDAKLVIPVGGASQKLNVITKINNDEINEEEFDDVSFVPMLAGKSEDGNDV

SEQ ID NO: 106784 - protein, 200 aa, Unknown
  Bacterial polypetide isolated from the Sargasso Sea
MGIKDFSVLDAIRRVPRHIFIDEALRSRAYENMSLPIGFKQTISQPYIVAKMTELLVRNSKKQNEKFEKILEIGSGCGYQSAVLSYFADEVHSVERIKQLVSKARENLSDLRIHNVLIKNRDGFEGWDEEIKYDGILCTAAPPEIPKRLLAFLKVGCSLVLPVGGSKSQKLKIVTKTKKGFDEQELENVSFVPMLGGTSK

SEQ ID NO: 106785 - protein, 226 aa, Unknown
  Bacterial polypetide isolated from the Sargasso Sea
MNSSGFALRRVREEMIEKLLELGIKDFRVLDAISQVPRHIFVDEALRSRAYENRSLTIGYQQTISQPYIVARMTELLISHTKSRGKVLDKVLELGSGCGYQSAVLSYFCEKVDAIERIKPLVQKARDNLAELKIHNVQFKYGDGYIDYDKSVKYDGILCAAAPRSYPEDLISVLKHNAKLVLPVGGNSQKLNVITKKHDDNFDEDIYEDVSFVPMLPGKSEDGNDI

SEQ ID NO: 106786 - protein, 221 aa, Unknown; identical to SEQ ID NO: 106772
  Bacterial polypetide isolated from the Sargasso Sea

SEQ ID NO: 106787 - protein, 217 aa, Unknown
  Bacterial polypetide isolated from the Sargasso Sea
KAIYERPLEEMIGKLLEMGIKDFSVLDAMRRVPRHIFIDEALRSRAYENMSLPIGFKQTISQPYIVAKMTELLVRNSAKKNEKFEKILEIGSGCGYQSAVLSYFADEVHSVERIKQLVSKARENLSDLRIHNVLIKNRDGFEGWDEEIKYDGILCAAAPPEIPKRLLAFLKVGCCLVLPVGGSKSQKLKIVTKTKKGFDEQEFENVSFVPMLGGTSK

SEQ ID NO: 106788 - protein, 176 aa, Unknown
  Bacterial polypetide isolated from the Sargasso Sea
EKFISETYRNQAYENIALPIENNQTISQPYVVARMTELLDVKSNHKVLEIGTGSGYQCAVLSILARRVYTIERIKNLHEVSNNIFEKLKLTNIVSKYNDGNNGWIEQIPFDRIIFTAASKKINNEIFSHIENEGIIVCPIVKNNKQILVKYIKQNNKIISEEYDDVLFVPNLQGVV

SEQ ID NO: 106789 - protein, 199 aa, Unknown
  Bacterial polypetide isolated from the Sargasso Sea
MNQLIAQDVRDFRVLAAIAKVPRQLFVDEAMAHKAWDNTALPIGHGQTISQPYIVARMTELLIQNDPAHVLEIGTGSGYQTAVLAHLVEHVYTMERIKSLQFQARRRLRQLDLHNVSAKHGNGWLGWPNKGPFDAILVTAAASEVPKALTDQLADGGRLVLPVGDGQQTLQLIERSGSQLTSRILEPVRFVPLIDGDVE

SEQ ID NO: 106790 - protein, 216 aa, Unknown
  Bacterial polypetide isolated from the Sargasso Sea
MNSIDEQKMQFILTIRSNGVVDKNVLNALETVNRQHFLKGLFAQRAYEDTPLPIECGQTISQPSVVGLMTQALNIKSRDKVLEIGTGSGYQTAILSKLARRIYSIERFKPLYEEAREIFNKLNLNNVTSVWGDGSQGLVEQQPFDRIIVTAAAEDPPPTLLTQLKIGGIMVIPVGQSDEIQKLIRVERTETHFKYEDLCDVRFVPLLEGKEEDIYV

SEQ ID NO: 106791 - protein, 214 aa, Unknown
  Bacterial polypetide isolated from the Sargasso Sea
MKDLRFQGLRNKLVNQLKTKGISDKKVLDAISKVPRHLFFDEVFQNQFAYEDVAFPIGQDQTISQPYTVAFQSEMLNVKKGHKVLEIGTGSGYQTAVLCFLGAKVYSIERQKPLFEKASIFLSENGYRANLFFGDGFKGKKVFAPYDSIIVTCGAPFVPDDLKMQLKIGGRMVIPVGDGDVQQMKLIVRSKVDVFKETTYGEFKFVPMLKNKNN

SEQ ID NO: 106792 - protein, 200 aa, Unknown
  Bacterial polypetide isolated from the Sargasso Sea
MILELRELGISNANVLSAIEKIPRENFISEAYRNQAYENIALPIENNQTISQPYVVARMTELLDVKSNHKVLEIGTGSGYQCAVLAILARRVYTIERIKNLHEGSNYIFEKLKLTNIVSKYDDGNNGWIEQIPFDRIIFTAASKKINNEIFSHIKNEGIIVCPIVKNNKQILVKYIKQNNKIISEEYDDVLFVPNLQGVV

SEQ ID NO: 106793 - protein, 116 aa, Unknown
  Bacterial polypetide isolated from the Sargasso Sea
MTNIKEEEKANLIMSLRSMGIISHDVLSALESTPREIFIPKHLSHYAYENRALPIGFNQTISQPYIVALMTEKLSLNSNDIVLEIGTGSGYQTAIISKLVRKVYTIERINPLLVEA

SEQ ID NO: 106794 - protein, 205 aa, Unknown
  Bacterial polypetide isolated from the Sargasso Sea
TRDRLIARLREQGISDEQVLETMRTTPRHIFIEEALAHKAYEDTALPIGFNQTISQPFVVAKMTQLVLQGAHDSVLEIGTGSGYQTAILAKLCASVHSLERVSAFIPKARERLRALKLSNFSLHLADGYKGLEESGPFDTIICTAAPKSIPLELMNQLKVGGRMIIPVGDSVQQQLKVIERKEEEFQSNVVDDVMFVPLQEGIVS

SEQ ID NO: 106795 - protein, 197 aa, Unknown
  Bacterial polypetide isolated from the Sargasso Sea
MTSQRTRDRLIVRLREQGISDEQVLETMRKTPRHIFIEEALAHKAYEDTALPIGFNQTISQPFVVAKMTQLVLQRAHNSVLEIGTGSGYQTAILAKLCASVHSLERVSAFIPKARERLRALKLSNFSLHLADGYKGLEESGPFDTIICTAAPKSIPVELMNQLKVGGRMIIPVGDSVQQQLKVIERKEEEFQSNVVD

SEQ ID NO: 106796 - protein, 173 aa, Unknown
  Bacterial polypetide isolated from the Sargasso Sea
IPENYKNQAYENIALPIGDNQTISQPYVVARMTELLEVKSNHKVLEIGTGSGYQCAILSKLARRVYTIERIKNLHEKSFRIFEELKLTNIVSKYDDGNKGWKEQIPFDRIIFTAATKKITDVIFSHIAENGIIICPIIKNDKQIIVKYIKKDQRIISKEYDNVLFVPNLSGKI

SEQ ID NO: 106797 - protein, 136 aa, Unknown
  Bacterial polypetide isolated from the Sargasso Sea
MNESKALLILKLRKIGVSNPEILDCIESIDRSRFVSESFLSRCLEDIALPIDCGQTISQPSLVAFMTQHLEIPQRSKVLEIGTGSGYQTAILSRLASRVYSIERHKKLVDIAKNRLDNLNISNVIILLQDGFFGYA

SEQ ID NO: 106798 - protein, 190 aa, Unknown
  Bacterial polypetide isolated from the Sargasso Sea
DEQVLETMRTTPRHIFIDEALAHKAYEDTALPIGFNQTISQPFVVAKMTQLVLQGAHDSVLEIGTGSGYQTAILAKLCASVHSLERVSAFIPKARERLRALKLSNFSLHLADGYKGLEESGPFDTIICTAAPKSIPLELMNQLKVGGRMIIPVGDSVQQQLKVIERKEEEFRANVVDYVMFVPLQEGIVS

SEQ ID NO: 106799 - protein, 220 aa, Unknown
  Bacterial polypetide isolated from the Sargasso Sea
MDIQLSGIGMTSARTRDRLVQRLRDAGIQDERVLDAIRNTPRHLFIEEALAHQAYDDTALPIGHGQTISQPWVVARMTELLIAKGKPRKVLEIGTGCGYQTAVLAPFCDELYSVERIRPLQDLARKRLLQLGLAKVQLKHADGGFGWTAEAPFDAILAACARVDIPEGLLSQLADGGRLVMPVGGDRQQVLTVVDRDGDQFRSQTLDSVRFVPFQRGVLR

SEQ ID NO: 106800 - protein, 202 aa, Unknown
  Bacterial polypetide isolated from the Sargasso Sea
MLDLKKQGVSDINVLNVIEDIDRSLFIDTNLKEKSNLNIALPIECGQTISQPLIVAYMTQMLEINKRMRVLEIGTGSGYQSFVLSKLSRFVYTIERHNILLKKAKNLLQSMNINNVFFKHADGGLGWLEQAPFDRIIVTASAPEIPNNLLSQLVDNGIMVIPIGEDNDNQVLKKIIKKDDNIIVKNMMNVRFVPLLEGKVEY

SEQ ID NO: 106801 - protein, 146 aa, Unknown
  Bacterial polypetide isolated from the Sargasso Sea
MVARMTELLIQNDPAHVLEIGTGSGYQTAVLAHLVEHVYTVERIKSLQFQARRRLRQLDLHNVSAKHGNGWLGWPNKGPFDAILVTAAASEVPTALTDQLADGGRLVLPVGDSQQTLQLIERSGSQLTSRILEPVRFVPLIDGDVE

SEQ ID NO: 106802 - protein, 134 aa, Unknown
  Bacterial polypetide isolated from the Sargasso Sea
MILELRELGISNAEVLSAIEKIPREKFISEAYRNQAYENIALPIENNQTISQPYVVARMTELLDVKSNHKVLEIGTGSGYQCAVLSILARRVYTIERIKNLHEGSNNIFEKLKLTNIVSKYDDGNNGWIEQIPF

SEQ ID NO: 106803 - protein, 117 aa, Unknown
  Bacterial polypetide isolated from the Sargasso Sea
ILAHLVHHVCSVERIKGLQWQARRRLKQLDLHNVSTRHGDGWQGWQARAPFDAIIVTAAPPEIPTALMMQLDEGGILVLPVGDEHQFLKRVRRRGGEFIIDTVEAVRFVPLVKGELA

SEQ ID NO: 106804 - protein, 201 aa, Unknown
  Bacterial polypetide isolated from the Sargasso Sea
MAQKLQQDGIKDSKVLSAIAQTPRHLFVEAVLAHKAYENTALPIGQGQTISQPYIVAKMTELLLQSQQCQKVLEIGTGSGYQTAVLARLFSQVCSVERIKSLQFQAKRRLQQLDLHNVSMKHGDGWLGWASKAPFDCIIVTAAPHEVPQALLQQLSEGGRLVIPVGAQEQVLRVFTRVGDEFEQKDVEAVRFVPLVPGELA

SEQ ID NO: 106805 - protein, 211 aa, Unknown
  Bacterial polypetide isolated from the Sargasso Sea
MRASRKGDALAQLLYNEGIRSQAVLNAIAGTPRESFLPDALKHKAYQNTALPIGQGQTISQPYIVAKMTELLLDSPNKPEKVLEIGTGSGYQTAILAQLFAKVFSVERIKSLQFQAKRRMNQLDLHNIAMKHGDGWKGWASKGPYDAIIVTAAAASLPQDLCDQLKEGGRLIIPVGNEQQSLLCIDRIEGELKTSTIESVRFVPLVAGELM

SEQ ID NO: 106806 - protein, 267 aa, Unknown
  Bacterial polypetide isolated from the Sargasso Sea
MSTGNLDFEQFRVFLEKACGILLGENKQYLVSSRLNKLMEQQGIKSLGELVQRIQGQPRSGLKEMVVDAMTTNETLWFRDTYPFEVLKNKVLPEAIKASPGQRLRIWSAACSSGQEPYSISMSIDEFERTNMGQLKAGAQIVATDLSGTMLTNCKTGEYDSLALGRGLSQERLQRYFDPKGAGRWAIKAPIKNRVEFRSFNLLDSYASLGKFDMVFCRNVLIYFSAEVKKDILLRIHGTLKRGGYLFLGASEALNGLPDHFQMVQCS

SEQ ID NO: 106807 - protein, 272 aa, Unknown
  Bacterial polypetide isolated from the Sargasso Sea
MLVANKELQESEYRLFRDFLEQQCGIVLGDNKQYLVKSRLAPLMQRFGLSSLSELLNKTLSPFERQLRSAVIDAMTTNETLWFRDNYPYELLKKQILPEFEKDHKTVKIWSAASSSGQEPYSIAMTGLEYQQSRPSAFPLGLQILGTDISNAMLEHCQRAEYDGLALSRGLSPERRSKFFDDSGNGMMRLKDAVRKNVSFRHLNLLDSYTLLGKFDIIFCRNVLIYFSPEVKMKIIKQFAQALNPRGYLFLGASESLSSLNNDFDMLRCNPG

SEQ ID NO: 106808 - protein, 276 aa, Unknown
  Bacterial polypetide isolated from the Sargasso Sea
MANKDVSPASYLKFREFLEKQCGIVLGDNKQYLVRSRLASLLYKHKYESADELIDVVVKGFDRTLLQNVIDAMTTNETLWFRDNYPFDLLVKELLPTLSAKNQKLRIWSAACSSGQEPYSIAMSVLEYQRQRPGALRAGVEIVATDLSSEMLQKCELGIYDELSLARGLSPQRRQAFFQQNDSGLMQVKPDVRRMVSFRSLNLLSSYAALGRFDIVFCRNVLIYFSAEVKQRILQQIAGQLQPQGVLFLGASESISAASDTYSMVKCHPGLYYQKK

SEQ ID NO: 106809 - protein, 181 aa, Unknown
  Bacterial polypetide isolated from the Sargasso Sea
PEFKDLRRPVKIWSAASSSGQEPYSIAMSVAEFQSKQPNVLKMGAQIIGTDISNTMLDMCKNGEYDALALARGLSAERRKKFFTDSGNGMAKVNDTLKRQVSFRHLNLLDSYALMGKFDIIFCRNVLIYFSPEVKAKIIKQFAQALNPKGYLFLGASESMAGLSDEFDMVRCNPGIIYQKK

SEQ ID NO: 106810 - protein, 324 aa, Unknown
  Bacterial polypetide isolated from the Sargasso Sea
MPHARAPFRPDVPDASPRAGEPGRDFAFTSADFARIRALIHQRAGISLSEHKRDMAYSRLARRLRARGLDTFRDYLDLLEQEDDPLEWEAFTNSLTTNLTAFFRESHHFPILSEFVKGRPAPVSVWCSAASTGEEPYSIAITLIEALGESAARGASILATDLDTQVLAKAEAGIYTYDQVKHLAPERLKRFFLKGTGAQAGRVKVRPELRAMIRFEQLNLTDADYGIAKPFDAIFCRNVMIYFDKPTQGQVLSRFEPLVKPGGLLFAGHSENFTYVTQAFRLRGQTVYELTRDAAQGARPRGAQAPAMLSAAHARAASAPGVRG

SEQ ID NO: 106811 - protein, 326 aa, Unknown
  Bacterial polypetide isolated from the Sargasso Sea
MTATRAQQSPRAAAPQAARADRAEPLRSGEQGRDFEFTSADFARIRDLIHHSAGISLSDHKRDMAYSRLARRLRARGLETFKQYLDLLEAENDPAEWEAFTNALTTNLTAFFREAHHFPILAEFVPRRPQPVSVWCSAASTGEEPYSIAMTLIEALGDSGARQATVLATDIDTQVLAKAEAGMYQFDQVKHLSPERLKRFFLKGTGAHAGLVKVRPEVRAMVRFEQLNLTDRDYQLRSQFDAIFCRNVMIYFDKPTQAQVLARFEPLMKSGGLLFAGHSENFTYVTQAFKLRGQTVYELTRDAGAARTPARAASHAAGATTSGVTA

SEQ ID NO: 106812 - protein, 274 aa, Unknown
  Bacterial polypetide isolated from the Sargasso Sea
MKTLSDDLYKQFSNFLAVQSGIVLGDNKQYLVKSRLSPLMTQFGIESLSDLVTRAMSVRERDLKMAVVDAMTTNETLWFRDTYPFQLLTDKIFPELGKSGRPIKIWSAASSSGQEPYSIAMTALEQQVKKPGTLPGGVQIVGTDISSTMLNQCKEGVYDSLALARGLSPERKKLFFEPYGDNKMRVVERVRKLTTFRPLNLLESYSLLGKFDIIFCRNVLIYFAPEVKSKILNQFAASLNPGGYLMLGASESLAGLTDRFEMIRCNPGIVYKVK

SEQ ID NO: 106813 - protein, 120 aa, Unknown
  Bacterial polypetide isolated from the Sargasso Sea
MSQKIVFMGTPEFAVPILKSLNDNGYDLLSVYTQPPKKKSRGQKIISSPIHQFAEKLKLPVRCPDDVNTEKEFNYLKQIKPNYVIVVAYGKLISKKILNLPDTTFLNIHASILPKWRGAA

SEQ ID NO: 106814 - protein, 131 aa, Unknown
  Bacterial polypetide isolated from the Sargasso Sea
DKRLIQILEGYSPDLIVLAGFMRILSEIFVDKYIGRLINIHPSLLPKYPGLDTHKKVIKNQDTHHGVTVHYVDKTLDGGPVCAQSEMEVTTTDINKLEEQIHKLEHEIYPLVVKQIADGKIAFKDGKVIKK

SEQ ID NO: 106815 - protein, 83 aa, Unknown
  Bacterial polypetide isolated from the Sargasso Sea
IINIHPSLLPKYKGINTHERVINNNEKFSGCTVHYVSSRLDSGKIIMQKKIRISKKETPKSLAKKVLKIEHQLYPSAIMKIYN

SEQ ID NO: 106816 - protein, 193 aa, Unknown
  Bacterial polypetide isolated from the Sargasso Sea
MVLLTGSNKIKTAVFISGKGSNLKSLIKFSKKNNSPISIDLIICDNLNAKGLNFGNTFKIKKKVFNFKNKAKAENKILFELKSKNINLICLAGFMKILSKNFIKKFKGKILNIHPSLLPKYKGLNTHQRVLENNEKYSGCTVHYVSYKLDSGEIILQKKVKIKRKETPKSLAKKILVQEHKLYPKAILKVFRL

SEQ ID NO: 106817 - protein, 287 aa, Unknown
  Bacterial polypetide isolated from the Sargasso Sea
MTLDVDKTKAKVEDLKSQGKLPKIAMFGGSVFLFPHPVKELAEFLKGHGMHINYDAAHVAGLIAGGKFQDPLREGTDTMTMSTHKTLFGPQGGLVIGSEEHAEPIKKAMFPGLTSSHHIHHMGAKAVAFAEALEFGKDYAEQTIKNAKALATELNNVGFKVLGEKRGYTESHQTVVNVLDYGDGGTIEADLEKANIIVNRQLIPGDLKAGRHYMHPGGIRLGTSEITRLGMKESEMKEIASLLKQVVVDKKDAGEIAARVKEFKTDFKKTQYCFDNKLGAYEYVKLR

SEQ ID NO: 106818 - protein, 76 aa, Unknown
  Bacterial polypetide isolated from the Sargasso Sea
VPNDPQSPFVTSGIRLGTAAITTRGFMESETKILGNLICDVLDDIENEKNISSVKEKVLNLTSQFPVYSSDKKAVA

SEQ ID NO: 106819 - protein, 97 aa, Unknown
  Bacterial polypetide isolated from the Sargasso Sea
RGSGVTGKEGEGALASAGITTNKNAIPFDPLPPSVASGIRIGTPGITTRGMKEDEVRQIGELISKVLLNYDNEALLETCKKEVNDLCVRFPIYTNLL

SEQ ID NO: 106820 - protein, 108 aa, Unknown
  Bacterial polypetide isolated from the Sargasso Sea
GGTETHIVLVDTRSVDEELTGKEAGILLNDRGVTLNRNAIPFDPRSPFITSGIRMGTPAVTTCGMKENELTQVGFLISEIMKNRSDVNKLTELEAQVRSLATSFQPYG

SEQ ID NO: 106821 - protein, 164 aa, Unknown
  Bacterial polypetide isolated from the Sargasso Sea
MDGNRNYKTLFIKIAKEKGKGVFILVKTSNQGSKDIQNLEVNGESVFLKISKLIKENLPLNLGKSGYSNIGIVVGATKPKEAELIRKILPNHLFLVPGFGTQGGSAKDAISGLVFNTNTYEGGLINSSRAILFPERSKKYNKIYDWRDSIKMALNKARNELIIN

SEQ ID NO: 106822 - protein, 38 aa, Unknown
  Bacterial polypetide isolated from the Sargasso Sea
MINKQKIETFDPDLWKAIQNEKIRQEEHIELIASENYT

SEQ ID NO: 106823 - protein, 45 aa, Unknown
  Bacterial polypetide isolated from the Sargasso Sea
MIRDSLVFDLIEKEKQRQINGIELIASENFVSNEVSTFHGEYSNK

SEQ ID NO: 106824 - protein, 209 aa, Unknown
  Bacterial polypetide isolated from the Sargasso Sea
MAKKLDAKDVELYLLENTDFFLSRESLVSELSFKHDAEGATSLLEMQVRKLRDEQSRLMNMLSSFVSTGKENEELFFKSKNLTLSLIASENFAEVKKTVELFFHENFAVDSCILETFSDSELKELETRTGLDMNKDVIHMGPLSKEKMAAFFSSESIKSAVISVMKLKKGFGLLKVGSNEPTKYLGDGDTTFIEYIRDIIIRVLESKEV

SEQ ID NO: 106825 - protein, 311 aa, Unknown
  Bacterial polypetide isolated from the Sargasso Sea
MNYLLIFHIGGIELFKEFIISAFNPKINNEIIFTLVKRLNETIFIAFFSWLISIIFGVIFGILSSEIFYKILNLPIFLKRFLNLFLTFIRSIHEIIWGLILLQIYGINFSIGIIAICIPYVAINAKVFSEQIENINLKTIESIKQINGIKSSTLITLVWAPVIETFKNFGLYRLECAIRSTAVLGLFGVGGIGTSIFLSFQTLNFRELWTYLWGLAFLIIISKKLLKRFNLSNTSKNFLTSFVIALFCISLFSLSFFVYFIFNKNAIPFNSINNLLISNFNFISYDFLKLLLETIVLCLLSTGIAISFPQI

SEQ ID NO: 106826 - protein, 198 aa, Unknown
  Bacterial polypetide isolated from the Sargasso Sea
NKAVALKQALLAAIDDTNADSTAEDSFTNALNGINGLSATSDTELANQVGAQSDGTAGSISATRVMTGTVQGIVSSRMASLRSGDAYIAGVAAGDGVSKKSGFLQVFGSDVTQKNTALGSGTEFGYNSETVGFALGFDGMTDNGSTIGLSLSNSYTDVAGKGPGKSTNDIESYTASIYLDKVSDNGYVEGSITYGIND

SEQ ID NO: 106827 - protein, 107 aa, Unknown
  Bacterial polypetide isolated from the Sargasso Sea
VDLRPFKVTVKAAEISLGKANLTCNKNGIPFDTEKMTITSGIRLGSQAATTRGFGLNEFKKVGDLITKVIKGLSINTNDNSKIESEVKKEVIELCSKFPIYSHLFKK

SEQ ID NO: 106828 - protein, 73 aa, Unknown
  Bacterial polypetide isolated from the Sargasso Sea
FDTQSPMITSGIRLGTPACTTRGFGANEFSLIGDLISKVVKGLGKNGQNNSKIEKEVQKEVIDLCSSFPIYSD

SEQ ID NO: 106829 - protein, 81 aa, Unknown
  Bacterial polypetide isolated from the Sargasso Sea
MSESKKFNELGAFGAFFGAQLRERDAEVQAAIEGELLRQRDQIELIASENIVSRAVLEATGCVMTNKYAEGYPGASILRRV

SEQ ID NO: 106830 - protein, 160 aa, Unknown
  Bacterial polypetide isolated from the Sargasso Sea
MADSNKESYDKVFSSLEKHHEWFDNSIPLIASENIPSPAVREAVMSDFGNRYAEGWPGERVYAGCTYIDEVEIQCMELAQKLFKAEFADVRSVSGVVANLAIYSAYSNPGDVMIASSIPAGGHISHGKKEHSGTAGLVHGLDIEFFAFDPEEMTLDVDKT

SEQ ID NO: 106831 - protein, 250 aa, Unknown
  Bacterial polypetide isolated from the Sargasso Sea
ALFVLAAGITVLQVSANPYVAALGPDKTASSRLNLAQALNALGTTVGPYVGGILFFGTAGTLAASAASAESVKVPYLMLAAALLLIAIVFAFIKLPEIEAHKEDSTDTETRSLMQAPHLTMGVVAIFCYVGGEVAIGSFLVNYFGEAHIAGLEEHAAAALISYYWGGAMVGRFVGSALLQKIAPSKAIAFNAISVIALLLITIFTQGDVALYSVLAIGLFNSIMFPTIFSVAIEKLGPLTSKGSGWLCLA

SEQ ID NO: 106832 - protein, 307 aa, Unknown
  Bacterial polypetide isolated from the Sargasso Sea
NLTENLVHISLTDNPSHLEAVNPVVLGQVRAKQFFHKDKDRKKVIPVLMHGDAAFAGQGIVAECFAMSGLPGHNIGGTIHIIVNNQIGFTTAPRFARSSPYPSDVAKTAQAPIFHVNGDDPEAVVHCAKIATEYRQKFNRDVVIDMVCYRRFGHNEGDEPSFTQPIMYKKIKKHPTTLKIYGEKLITEGLISEKSLQQNKLEFKNFLEQEFISSKNYKSELKWFDGVWSRFRPGLGKDKRGISGVDQNILKKIAQKVFSIPNNFTTHKTLKRVFELRSEMMKSGKIDWSMAESLAIGSLLTEGFSVR

SEQ ID NO: 106833 - protein, 185 aa, Unknown
  Bacterial polypetide isolated from the Sargasso Sea
MADSNKESYDKVFSSLEKHHEWFDNSIPLIASENIPSPAVREAVMSDFGNRYAEGWPGERVYAGCTYIDEVEIQCMELAQKLFKAEFADVRSVSGVVANLAIYSAYSNPGDVMIASSIPAGGHISHGKKEHSGTAGLVHGLDIEFFAFDPEEMTLDVDKTKTKVEDLKSQGKLPKIAMFGGSVFL

SEQ ID NO: 106834 - protein, 35 aa, Unknown
  Bacterial polypetide isolated from the Sargasso Sea
PNDPQSPFITSGIGIGTPSITTRGFDESDAKQVAK

SEQ ID NO: 106835 - protein, 150 aa, Unknown
  Bacterial polypetide isolated from the Sargasso Sea
AAKAVCFKEALTKEYKEYAKQILNNAKALSDSFQEQGLRVISGGTENHIVLVDTRSVDEELTGKEAGILLNDRGVTLNRNAIPFDPRSPFITSGIRMGTPAVTTCGMKENELTQVGFLISEIMKNRSDVNKLTELEAQVRSLATSFQPYG

SEQ ID NO: 106836 - protein, 117 aa, Unknown
  Bacterial polypetide isolated from the Sargasso Sea
MSDSNKESYDKVFSSLEKHHEWFDNSIPLIASENIPSPAVREAVMSDFGNRYAEGWPGERVYAGCTYIDEVEIQCMELAQKLFKAEFADVRSVSGVVANLAIYSAYSNPGDVMIASS

SEQ ID NO: 106837 - protein, 61 aa, Unknown
  Bacterial polypetide isolated from the Sargasso Sea
MSSESKYLNDQYKSFFEDSLSKTDPDLYKAINDELQRQQEHIELIASENIVSQAVLEAQGS

SEQ ID NO: 106838 - protein, 190 aa, Unknown
  Bacterial polypetide isolated from the Sargasso Sea
MADSNKESYDKVFSSLEKHHEWFDNSIPLIASENIPSPAVREAVMSDFGNRYAEGWPGERVYAGCTYIDEVEIQCMELAQKLFKAEFADVRSVSGVVANLAIYSAYSNPGDVMIASSIPAGGHISHGKKEHSGTAGLVHGLDIEFFAFDPEEMTLDVDKTKAKVEDLKSQGKLPKIAMFGGSVFLFPHPV

SEQ ID NO: 106839 - protein, 242 aa, Unknown
  Bacterial polypetide isolated from the Sargasso Sea
MKKINVVIYGATGSIGRSTLSIISKNLNKINIEGITCNKNILKLLKIAKSYNVKKIGFNEKTIHKLNKFNLNKYEVFNDDSKYYNIISKKTDVIIFATSGLTSLDLLLKILKSGKIVGIANKECIITLGTKFISLSKKFNTKIIPLDSEHNSIYHLLSQNLGKYKSITITATGGPFLYHTKKKLSFVRPQQAIKHPVWNMGSKISIDSATMMNKALEIIEAKYLFNLKNNEINAIIHPQAII

SEQ ID NO: 106840 - protein, 263 aa, Unknown
  Bacterial polypetide isolated from the Sargasso Sea
RRNQSRITGKLGVEHIIVSADIQKKRENIAKNIRAWLRRPELGMVPLFMAGDKQFYYYADLVRKQTGVPLVFFSAGNEMEATGFKTGFCGIKRRSTGGLLASVPMAQKLALMFYYMKHFVINSSYLTTALFDTAHAFFSTYLMEHDFHYLYHYLYWDEQEIMTVLESEYDWQKASDTDATWRIGDGTAAFYNYIYFFLAGLTENDTFRSNQIREGRLSRAEALDLIASENTPRYDTIQEYLDIIGLDFDTTLEIINAQKPIFR

SEQ ID NO: 106841 - protein, 132 aa, Unknown
  Bacterial polypetide isolated from the Sargasso Sea
SAKVMAKTLVDRGFRIVTGGTDSHIVWLDLTPKGLTGDKAEKILEEVGLACNKNAIPYDPNPPKITSGLRFGTAAATTRGFNQKDFEQVGNMIADILDSLLLEENERNVVFNKTRKDIIELCKKYPIYSEAF

SEQ ID NO: 106842 - protein, 63 aa, Unknown
  Bacterial polypetide isolated from the Sargasso Sea
DLHATSGIRLGTPAVTTRGMGPKEMDQIADWIDRVITSKGDSSVQESVRKEISSFCSNFPLPH

SEQ ID NO: 106843 - protein, 77 aa, Unknown
  Bacterial polypetide isolated from the Sargasso Sea
MLYNFDRSQNHYYFNNKNSVPIIFIHGLGLNQSMWKSQMDFFKNNSFVTYDLLGHGKTPFSENTLTMKKLGNQLLVL

SEQ ID NO: 106844 - protein, 239 aa, Unknown
  Bacterial polypetide isolated from the Sargasso Sea
MIDLSLGSSDLPPPQPVLEAMAAALPSPSSSAYCLQAGTAPFRSAVAAWCHRRFGVTVDPDREVQLLIGSQEGTAHLPLAVLDPGDAALLLDPCYPSHRGGLILADADIQALPLREADGWRPDLESLPGSAWDRLRLFVLGYPHNPTARVGDQDLLDQVMAKGVRHELVIAHDNPYVDLALEGEAPSLLCSPGWRFWGIEFFSLSKGWGLGGFRLAFAVGAPPLIEALGQVKAVVDFNQ

SEQ ID NO: 106845 - protein, 121 aa, Unknown
  Bacterial polypetide isolated from the Sargasso Sea
NGFKIVTGGTDSHIVWLDLTPKNITGDKAEKILEEVGIACNKNAIPYDPNPPKITSGLRFGTAAATSRGFDENDFSEIGDLISAILDNINQNQDNHKEFISSMKSKVISMCKKYPIYNEAF

SEQ ID NO: 106846 - protein, 159 aa, Unknown
  Bacterial polypetide isolated from the Sargasso Sea
HIIAARAVCFGEALKPEFEDYIKNVISSAKVMSQTLVDRGFRIVTGGTDSHIVWLDLTPKGLTGDKAEKILEEVGLACNKNAIPYDPNPPKVTSGLRFGTAAATTRGFNQKDFKQVGNMIADVLDSLLLSENERQDVFNKTRKDVIELCSKYPIYDEAF

SEQ ID NO: 106847 - protein, 99 aa, Unknown
  Bacterial polypetide isolated from the Sargasso Sea
NVKGNLAAESLCRANITCNKNGIPFDTESPMITSGIRLGSQAATTRGFGLTEFKMVGELITKTIKGLSENQNDNSKIEDEVRKEVVELCSKFPIYKHLN

SEQ ID NO: 106848 - protein, 44 aa, Unknown
  Bacterial polypetide isolated from the Sargasso Sea
MILKKFKDIADKVGALFLVDMAHFAGLVATGLYPNPLEYADVVT

SEQ ID NO: 106849 - protein, 43 aa, Unknown
  Bacterial polypetide isolated from the Sargasso Sea
SLAKKHRPKLLIAGFSAYSRVLDWQKFRDIADSVGAYFLVDMA

SEQ ID NO: 106850 - protein, 308 aa, Unknown
  Bacterial polypetide isolated from the Sargasso Sea
SNEFRKVTKNSSLITDFSLTKGYKSSINNKKKDINHLFLKYEKNLNLPSYLSSKLDAKIERVNNDTYLKVFQNNLFTSPVMPSNRDLMVSELNFDFDHNNYDLTTGVQIFENLGLPHNDRYQYVLPSYDFSKNINPKNLDGSINFFSSGSNRLKDTNNLRTSIVNDLEFNSINYLTNTGFINNFKVYFKNLNSLGKNDSIYKSSPSVDAMSIAEIRTALPMIKKKTFSQETLTPKISFRANPGNNMKNHSSSTKLLDANNIFEINRLGINDSFEAGKSLTFGIDYKLDVFQNNLTNKDDTSDKIILED

SEQ ID NO: 106851 - protein, 166 aa, Unknown
  Bacterial polypetide isolated from the Sargasso Sea
HCIHFDNEEWSRLNTSGSVIAHCPNSNLFLGSGLFSMKSAVEHGVRVGIGSDIGGGCEFSILRTLADGYKVARLRGEDISPLQAFYLATLGGVRALDLEDRIGNFLTGKEADFLILDRESTPIIKHRLNISKNLNEQLFAMMMLGDDRLVKETWIMGEKSHDRDAN

SEQ ID NO: 106852 - protein, 110 aa, Unknown
  Bacterial polypetide isolated from the Sargasso Sea
MSLNNQTYYNYINKNTIPIVFIHGVGLDHKMWSPQINYLNTYSTITYDLLGHGRTPFKKEKIKMNDYVEQLFSIIKFLELEKINLVGFSIGSFIALNFAAEFQKKLNSLT

SEQ ID NO: 106853 - protein, 136 aa, Unknown
  Bacterial polypetide isolated from the Sargasso Sea
NVIASAKVMAQTLVDRGFRIVTGGTDSHIVWLDLTPKGLTGDKAEKILEEVGLACNKNAIPYDPNPPKITSGLRFGTAAATTRGFNQKDFEQVGNMIADILDSLLLEENERADVFNKTRKDVIELCKKYPIYSEAY

SEQ ID NO: 106854 - protein, 302 aa, Unknown
  Bacterial polypetide isolated from the Sargasso Sea
MNPNTQYSTLAVPATRRFDYWKEVVCRHCLAADSKPLSQSRFDGSLTLNTVGALDICTLSSPLHYWERSEQHLRSGPAEDLWLGFARKGHGQIEQGSRKANLATGNLFLYDATQAFRFSLGGTENHLIRIPRALLTERLPRIAEYTAMVLDDRRPGVVPLREMLHQAASTPASLQDERISNRYSSAVLDLLVISLELQDLKTSHQEMDLYGRIMQYIQRHLTEPDLSIEAIAKAHNVSTRTVTRAFARYQKTPVAEIWKERLNASREAIERGQVRSVSEAALDFGFSDFSHFSHAFRKAFGV

SEQ ID NO: 106855 - protein, 82 aa, Unknown
  Bacterial polypetide isolated from the Sargasso Sea
NKNMIPYDERKPVDPSGIRLGTPALTTRGMGADEMEQVAAWILQVLKAPEDAQVIESTRREVADLAEQYPVPAAKLDQVVTG

SEQ ID NO: 106856 - protein, 74 aa, Unknown
  Bacterial polypetide isolated from the Sargasso Sea
RGIGMTGKVADLLVSDVHITANKNTVPFDPESPLVTSGLRLGTAALTTRGFDVQAFWEVADVIADRLLNPEDDA

SEQ ID NO: 106857 - protein, 84 aa, Unknown
  Bacterial polypetide isolated from the Sargasso Sea
TCNKNGIPFDSESPMITSGIRLGSQAATTRGFGLKEFEKVGELITKVIDGLSKNPHDNSKIEDEVRNEVVSLCSSFPIYKNLRK

SEQ ID NO: 106858 - protein, 40 aa, Unknown
  Bacterial polypetide isolated from the Sargasso Sea
MQEQKNYLGAESVNVQPHSGAQANMAVFLGFLNPGDTVLG

SEQ ID NO: 106859 - protein, 182 aa, Unknown
  Bacterial polypetide isolated from the Sargasso Sea
MKAGKTKNGEFEILHKAKNTRTKRYRKNVDEAYETLDQIVMFINDNEKLKELSPEIKELRNTIDNKNFEKSISIIDSLFENLGEISGTEEFANKLDDLISIIDNDEIDEQKLIETSSETFDLFNLEVSWRDDANKNLLPELIKYNDVIKHNIGLRLQSRLTKEQAKFVARCNSVHRDISLNF

SEQ ID NO: 106860 - protein, 246 aa, Unknown
  Bacterial polypetide isolated from the Sargasso Sea
CFGQRKLWLVDHLFKISNDKVMSGPFKGMKLLKKSSWDKKIYEFNPDLSSKIVGCYEQEVQSKIVELQKINKKKYFINFGAGEGYFALGVLYSGFFEQSIAFEITDESRNIMIENSKINKLDNRLSIKYAANSSFLKDILDSGKKLDDIFILSDIEGAEFEIFNDDNLSKLINCNLIIEFHRHPIDEENKKFREKLNKYFKVSLLSTSNRSFSDISLLKELNDDDRWLIASENRPYLMNWFVCTPK

SEQ ID NO: 106861 - protein, 263 aa, Unknown
  Bacterial polypetide isolated from the Sargasso Sea
MLLDQTGVGEATLRSGHHAGRRKGWGPLSYGCFVAFQTVPQGPKSRELTVGKVLENRRDDQQVVVHQYRGLWKQVRVVHVPAYLGANGEVLDPRAAVRGSAPSQVTVLYAALVLQVELQAGGELTYTSASTLSKRGWGLFVEPDEQLRFVREIADEVRTRSASAAPGAESPIQMWDFASVVDYVRDHPLRTDPFWHRPLPAEWLNRDGVADTVTELHWTDPARGIHGVWKRTDKGVKVFLTSKHKGTFKQKGPEWFTVWKRTT

SEQ ID NO: 106862 - protein, 167 aa, Unknown
  Bacterial polypetide isolated from the Sargasso Sea
MGIGVSEEIADEVKKRFSKHRLGYNTSWHDIDEMCLTLFSKEWRYEVAKSSLTPYTINWNCLDQIGFHLNPRRRQLGPNIIYKYYEEQINLNNISWDRLYWHYHPIAFSRELNKTGTSLNHYPYHYISLCHRILDCHNFPAVFRPGYHIERTDLNVFLEQWIPFDYA

SEQ ID NO: 106863 - protein, 189 aa, Unknown
  Bacterial polypetide isolated from the Sargasso Sea
PRFSHLRVNLYPDGGLARLRVYGQPKRDWERVERGTLLDLAAIENGAYLVAANNQHFGPASQMLMPGRGVNMGDGWETRRRREPGNDWAIVALARPGVIHKIEVDTAHFKGNYPDRCSLQAASVTGGTDDSLITQAMFWPVLIGEQKLQMDHVHTFADGIASLGPVTHVRFNIFPDGGVSRLRLWGEIA

SEQ ID NO: 106864 - protein, 658 aa, Unknown
  Bacterial polypetide isolated from the Sargasso Sea
MFFGALLPGLVLVGLYMLYVFVYARLNPKAAPPVPFRGNFDSKFWIKVFMVIIPPLALIFAVLGSILLGIATVNQAGSIGAIGATMMAGYRLHKGKKDAYYPIIIAILSVIPIYILSKNYNLNIKAVETRDLAAIFIAGFFTITFLIGIIWSFWRAYKVENVLREVVTETCVTTSMVFIILLGAAMLTSGFRAFGGEELVRDFLQDLPGGFWTQFIVVMAVIFLLGFFLDFIEIAVVVVPIIAPILLAEPGANVSAIWLGVMIGVNLQTSFLTPPFGFALFYLKGVASKLVTTLNIWKGVVPFIVLQLIGLGIVGFYPSLVNYLPARTYLTSNVAPPPMNPKLQHCLQEYKFAIYNKEEQRITNAIKDMQKLTPTNLPIDKLDIFEEHFDNALGTFAIVKKLQKTEEEYQLFTEDYRDLHFSVRKIEKKIRKLDEKIKKTKAEIRNLDDDNLTDKNKLELKIENYELEIKELQNKVPETWKAKNGDFEILLKAKNTRTKRYRKNVDEAYEALDQIVIFINDNEKLKELSPEIKELKYTIDNKNYKNTISVIDGLFEKLGEISGTEEFANKLDDLISVIDNDEVDEQKLTEISSETFDLFNLEVSWRNEANKNLLPELIKYNDVIKHNIGLRLQNRLTKEQAKFVARCNSVHRDISLNF

SEQ ID NO: 106865 - protein, 705 aa, Unknown
  Bacterial polypetide isolated from the Sargasso Sea
MITEQLAHIAQKQLVEIRFEYQQQVCSLYLLNGLLAAQLHLHAEAYISALAQIKPEIAEETNTVERCLNSAFTLAKRDCTQAVNCYAQASNLASQLNVLAQAVEALSHRTLAGITPMLDATDAAQLTEQQAKKPTTLAENGYWFTKPHQARVLSLNLLGNLLGKPPQASTAQSLILTQGTRLFPQPLLNANRLFIPISGNTLESLTVQLSQLIDSLDLSANFPNTDWLSSQGSDWFVHYQAKDELALVLMAGSLEELMQEAKAMRVYIEKTQQSPAPAPTQTPALMPSANLAFKTPSGSYFTPTPLGDTGLTFVYPGVGTVYPNMFSDLHGYFPELYRELEREGDLAAMLQAEAIYHSAAYAKSAVDVKDAADMSLSQLAISGVGASYLFSRLLTRVFNIQPQLALGYSMGEAAMWASLDIWQTPHALINATQNSAIFNQEISGPLLAVRRDWQLSEDAPLVWNSFLVRASRAEINAMLPDFPRVYLAIEQGDTCIIAGCEASCLQLLVRLGKRGIASNKVTAMHTPPSQSQHSAIQGFYTLGLKANACESQVRFISAAQQSAVNIDSQSIAKSIADTFCAPLNFTALINTAYNQGARLFVEVGADRQTSTLIDKIGRQLELGADGTQTQGQPILAMACNAKGSDTITCLLKCLAQLICHRVPLSLAPLIPQSADKARAKTIAPHSASASALGHFSNVFQEGEPL

SEQ ID NO: 106866 - protein, 238 aa, Unknown
  Bacterial polypetide isolated from the Sargasso Sea
MHINYDAAHVAGLIAGGKFQDPLREGTDTMTMSTHKTLFGPQGGLVIGSEEHAEPIKKAMFPGLTSSHHIHHMGAKAVAFAEALEFGKDYAEQTIKNAKALASELNNVGFKVLGEKRGYTESHQTVVNVLDYGDGGTIEADLEKANIIVNRQLIPGDLKAGRHYMHPGGIRLGTSEITRLGMKESEMKEIASLLKQVVVDKKDAGEIAARVKEFKTDFKKTQYCFDNKLGAYEYVKLR

SEQ ID NO: 106867 - protein, 78 aa, Unknown
  Bacterial polypetide isolated from the Sargasso Sea
MSTATKISRVTNSFFDQGLEHSDKEVFNSISKEFVRQQNHIELIASENIVSKAVLEAQGSVITNKYAEGYSGKRYYGG

SEQ ID NO: 106868 - protein, 119 aa, Unknown
  Bacterial polypetide isolated from the Sargasso Sea
MSDSNKESYDKVFSSLEKHHEWFENSIPLIASENIPSPAVREAVMSDFGNRYAEGWPGERVYAGCTYIDEVEIQCMELAQKLFKAEFADVRSVSGVVANLAIYSAYSNPGDVMIASSIP

SEQ ID NO: 106869 - protein, 145 aa, Unknown
  Bacterial polypetide isolated from the Sargasso Sea
MSDSNKESYDKVFSSLEKHHEWFDNSIPLIASENIPSPAVREAVMSDFGNRYAEGWPGERVYAGCTYIDEVEIQCMELAQKLFKAEFADVRSVSGVVANLAIYSAYSNPGDVMIASSIPAGGHISHGKKEHSRTAGLVHGLDIEF

SEQ ID NO: 106870 - protein, 958 aa, Unknown
  Bacterial polypetide isolated from the Sargasso Sea
MKNHGLSRRGFLKASVLAGVAVYVAPLGSRAFAALFEEKLLTPVKWDSVTGIPQFRIDGIAKVTGSKVFARDVRAADMPHWPQQQSHALILRVTQADRIYEGFDLSLLGDDLKPDRVVTADDLVRDGVAFPTFYGDDMLLPAGKTPAYLGHAVAILIYHDFARFRFAKNALKFRDDVIRYGAVTGPLERDPWGTFRYVRVGGKTAYDDDVYSSLKDAPIFPSMMRKHLPVWPDGKEHGKLDEQGMFLAGQIASELDHPSADWLVFDREYNTQSVDTSALEPDNANCWYDAATQSLHLVVPTQSPLEVAENAAAMVAKCRFPVKKLFVHPCYTVGYGSKDHFNVPFYGLVCALYADGRPVRFANDRYEQFQTSLKRHAFKMHYRIAVDRNTGLLQSFKGDFEANGGGRSNFSPSVAMVGATAAQSIYYFPKSDLAAVAIASRAIDAGSARGYGTLQSMAATEMAVDEIAAQLNIDPIDFRLRNALRSGMKNTQGAIPAGALRVDEVLERSKQHPLWTRRAARKAEYEAANPGKRYGVGFACVQKDFGTGAEASFAKVEFDENGKVSLQHTAAEIGTGMSTSQAVAVAKWLGRPATDVRVAVTEWPDLPVETSGDPYVMSQADQDRLSANPRWSPSYASPSSATNSAYYFTHSTREAARAVFRYGLWPAAMSIWTRGLGGGQAAPYAIRIEDARWVDGKLTADGLEPLSFEQLAKQAHALGLPTGAVVHVFNRWQWTDAEFEVGGTVERLPIDGLSLRVGAPKTGDNGPVPGTAAPAGATAMRGTLAPTANGYRVLDRKRVFIPPTSRNNAAVTYYTAVGTLVELAVHEATGKVELLTHHSIMECGNQISPQLVSGQLQGGLAMGIGHALHEYLPLYEDGPGNGTWNFNRYQLPRASDVAVWTQTGDVLPPLSETDPPKGVAEVVMIPVVGAIVNGIAHAIGHRFTDLPVTPQKIQEVLA

SEQ ID NO: 106871 - protein, 914 aa, Unknown
  Bacterial polypetide isolated from the Sargasso Sea
MVLQQVKKFIILGVSATMLMCTQAQALTPSPQMIEQFKQLPKAEQQRLARQYGIDPSIISGSQAQPQIANPQVVSEREVQPERSNETSDKKEKAELDFSVDSSNLKLRRFGYEMFAGEPSTFAPVSDVPVPSEYLVGPGDNIKVQLYGKENKEYDLVINREGVIQFPELGPIPVNGLTFSELRDTLSQRIQQQMIGIESNITMGELRSIRIFVAGDAYKPGSYTVSSLSTITQALFVAGGVNEIGSLRNVQLKRNGKLVGTLDLYDLLLKGDASGDLRLHSGDVVFIPSIGGLVSVSGEVRRPAIYELKNNETMADVITMAAGLNPGAYPKSSSIERYNSKSLKTVVNVDLTSDQGKMTLAKAGDVIRVKNASEQFESAVTVVGAVVRPGKYQWFAGQKISDIFPSIWGDLAISADLDYALVVREVNEYGDIEVHQFSPGKAISNKNSDQDIELKARDKVIVFNFSDDVQNRFELNKLVKQRVEKVTSLNTNTLISSDLFKAGFVQLDKSRLTQRTQLAGVVVTDKTESEDVAVVKGVVNKMLANLFDDTELLKLSNQMARQELLYPVMVKLNNQGRAGAGIQVVGIDGQVRLPGLYPLTAGAKVNDLVVAAGGLKEGAYTARAELTSTVVDNSGSKTEHKNIDLALALQNNSSANLLLSGRDILTVMTTPDWQETKVVEVRGEVKFPGRYNIRRGETLSDLITRVGGFTEYAALPSAVFVRESVRQQEQIEIKKLADQLRRDIATRGISKDGTVVNYADAQLMLTDLENIKAVGRLVVDLPAISLGITQADLQLEDADILYVPSTKQTISVMGEVQHPATHRFKEGLTIDQYLAMSGGARERADEGRTYVIQANGSVLMPSRSSWFSGGEQLQPGDTVIVPLDTEYKDNLTLWSQVTGIIYNTAVAISAISGL

SEQ ID NO: 106872 - protein, 446 aa, Unknown
  Bacterial polypetide isolated from the Sargasso Sea
MFDFDATVLARIQFAFTVSFHIIFPAITIGLATYLAVLEGLWLKTNNQIYQQLYQFWVKIFAINFGMGVVSGIVMAYQFGTHWSGFSAFAGSVTGPLLTYEVLTAFFLEAGFLGVMLFGQNKVGKKLHFFATCMVAMGTVISTFWILASNSWMHTPQGFEIIDNRVVPTDWWQIVFNPSFPYRLTHMTVAAFLSSAFFVGASAAWHLLKGKDTPAIRKMLSMAMWMALIVAPLQAVIGDFHGLNTLEYQPVKIAAMEGHWRNEGDEPTPLILFAMPDMDKQTNHFSLEIPGLASLILKHDITKQVPALTEFPAEDWPNVPLVFWSFRVMVGLGVLMILAGVWSLYLRRKQTLYSNHLFLRLVLLLGPAGLIATLAGWFTTELGRQPWVIQGLMRTQDAVSSHSVAHLSLSLMMFVICYFGIFGVGYRYMMRLISKGPVTQGIEHHG

SEQ ID NO: 106873 - protein, 158 aa, Unknown
  Bacterial polypetide isolated from the Sargasso Sea
VEIGLPETGCKIIGQPQDAKINPESVVDGQFSMPFCAAVVLREGAMGWDDYAKHLNDEDTRALCQKISTVHDAKAEAAYPVNMSGSVKIKTAFGEFSTFVEVPKGEPDNFMTTSEFRAKFDSLCAPYLDDVRRTRLADAILKLEEANAVASVFQLSQP

SEQ ID NO: 106874 - protein, 565 aa, Unknown
  Bacterial polypetide isolated from the Sargasso Sea
DLTSEQGKMTLAKAGDVIRVKNASEQFESAVTVVGAVVRPGKYQWFAGQKISDIFPSIWGDLAISADLDYALVVREVNEYGDIEVHQFSPGKAISNKNSDQDIELKARDKVIVFNFSDDVQNRFELNKLVKQRVEKVTSLNTNTLISSDLFKAGFVQLDKSRLTQRTQLAGVVITDKKESEDVAVVKGVVNKMLANLFDDTELLKLSNQMARQELLYPVMVKLNNQGRAGAGIQIVGIDGQVRLPGLYPLTAGAKVNDLVVAAGGLKEGAYTARAELTSTVVDNSGSKTEHKNIDLALALQNNSTANLRLSGRDILTVMTTPDWQETKVVEVRGEVKFPGRYNIRRGETLSDLITRVGGFTEYAALPSAVFVRESVRQQEQIEIKKLADQLRRDIATRGISKDGTVVNYADAQLMLTDLENIKAVGRLVVDLPAISLGITQADLQLEDADILYVPSTKQTIAVMGEVQHPTTHRYKEGLTIDQYLSMSGGARERADEGRTYVIQANGSVLMPSRSSWFSSGEQLQPGDTVIVPLDTEYKDNLTLWSQVTGIIYNTAVAISAISGL

SEQ ID NO: 106875 - protein, 556 aa, Unknown
  Bacterial polypetide isolated from the Sargasso Sea
MYLKILIILFSLLYQNTAHSKATEKNQFNQKYLSNYFSALVSVTNQKNDDAIIFFNSSKFLMNKHDNFLREYVFSLVLGGQAKNAINQIKRSNNSNFFEGDLLLALESITKKNYKQAEKRLKKLLAYQENEAYEFVIIKILESYNHLFLNSRIKKNSRNLGRIDLITSSFQNCYLGTKKTDLNFLNLINSSENEYSRYLFFHLGNIIEKKDYELVNEISKTIDPLMSSLLIAQSKKWIDENKYEKFNNYFSCKSENDLLAEFFFLIANLYSSQDLFKESNFYLNLSNYLNPKFYFNLSLLAENYHLNNNLEFAKKILNELSDEEEVYHWFKTKKITQFLAEQEKDNEALDYFEKKINKFKNPSTKILYDIANIYKKFKNYEKAIEYYSLVLSKIDKNTSTYADVLYRRGGSFERMGNYEMADIDLLKSLEIRPDDPYSLNYLAYSWLERKFKIKEAMEMLNKAYNEKENDPYITDSVGWGYYLIGDYENAEKYLRKAVELMPDDPIVNDHYGDVLWQLNRKMQAKYFWKSVLEFEDTDDKMREDIQNKLLNGPSKI

SEQ ID NO: 106876 - protein, 90 aa, Unknown
  Bacterial polypetide isolated from the Sargasso Sea
QASLGRANITCNKNGIPFDSESPMITSGIRLGTPACTTRGFGSEEFKLIGDLIYKVIEGLSKNQEDNSKIEKEVQKEIIDLCSSFPIYDK

SEQ ID NO: 106877 - protein, 103 aa, Unknown
  Bacterial polypetide isolated from the Sargasso Sea
HIVLVDTNSVDEELTGKDAGILLNEMGITLNRNAIPFDERSPFVTSGIRMGTPAATTCGMKESELTKVGYLISEILKNRSDSNKLDELKDEVKELASQYKPYV

SEQ ID NO: 106878 - protein, 229 aa, Unknown
  Bacterial polypetide isolated from the Sargasso Sea
AAHVMGLVAGGQFQDPLREGADVMTGSSHKTFPGPQGGFVISDSEDEKLHRRLNSGIFPGVCSSYHLHHVAGKAIALSEFEEFGDSYAADIVSNAQALGEALSSEGFEVIAEDRGFTASHQVVTRHGEIDSGAGRDAAATLEEAGIITNMNMLPGDTKALTPSGLRLGTPELTRVGMKSGEMGDVARFFARALIEGEDPSSVKADVREFKSQFQTVHYCFEPGPAYPGL

SEQ ID NO: 106879 - protein, 80 aa, Unknown
  Bacterial polypetide isolated from the Sargasso Sea
MKKLYNQSIKEADPEVYATLEKELIRQQNQIELIASENIASLAILNAQGSVMTNKYAEGYSGKRYYGGCEFVDQAEDIAI

SEQ ID NO: 106880 - protein, 68 aa, Unknown
  Bacterial polypetide isolated from the Sargasso Sea
PYDPKSPFVTSGIRIGSPAITTRGMGVNEVKIIVDLIDQVIVNHDNKEKIQSIKKHVNELCSSYPIYE

SEQ ID NO: 106881 - protein, 109 aa, Unknown
  Bacterial polypetide isolated from the Sargasso Sea
MIDKQVEKLIHLEAIRHKEDINLIASENYPSKEVLEACGSIFSTKYAEGYPGKRYYEGCEVADEIETLAINRAKDLFNCDHVNVQPHSGTQANMAVYLAVLNSNDSVLS

SEQ ID NO: 106882 - protein, 174 aa, Unknown
  Bacterial polypetide isolated from the Sargasso Sea
HSKIINSRVFPGTQGGPLMNSIVAKAIAFKEALDNSFKDYQKQVLINSRRLAEILMKNGFNCITGGTDTHLVLLDLRDSGFTGKDAEKALSDAGITTNKNAIPFDPQPPAIASGVRIGTPGVTTRGMKEEEIDIIGELIVEAIKNGENQEVLISCKKRVNDLCSRFPIYKDLLI

SEQ ID NO: 106883 - protein, 90 aa, Unknown
  Bacterial polypetide isolated from the Sargasso Sea
QVEHALERAGITCNKNGIPFDSEKPTVTSGVRLGTPAATTRGFGVSEFREVGRLIVEVFDALRDHPEGHAATEQRVRREIFALCERFPIY

SEQ ID NO: 106884 - protein, 115 aa, Unknown
  Bacterial polypetide isolated from the Sargasso Sea
WRTDTHLMLVDLRPFNVKGNLAAESLSRANITCNKNGIPFDSESPMITSGIRLGSQAATTRGFGLKEFEKVGELITKVIDGLSKNPNDNSKIEDEVRKEVVSLCSSFPIYKNLRK

SEQ ID NO: 106885 - protein, 81 aa, Unknown
  Bacterial polypetide isolated from the Sargasso Sea
AGITTNKNMIPFDTKSPMITSGIRIGTPALTTRGMGKEEMIVIAQLIDNVLSDIDNENNISKTKKSVEELCNDFELYPSIK

SEQ ID NO: 106886 - protein, 46 aa, Unknown
  Bacterial polypetide isolated from the Sargasso Sea
MKDADREMYDLIQLEKRRQIGGIELIASENFTSAPVMEALGSALTN

SEQ ID NO: 106887 - protein, 279 aa, Unknown
  Bacterial polypetide isolated from the Sargasso Sea
GVRKDDGFIDMDQVQALAEKHRPKLIICGGSAYPRCIDFSAFRIVADSVDAILLADMAHFAGLVAGGAHPSPILHAHVSTATTYKNLRGVRGGLILASDLSLKRKLNSGVFPGVQGSVILNAVAAKAVCLGEALRPEFEVYAHAVLNNARVLAATLVDRGVDVVTGGTDTPLILVDLRPNRLTGVVASNSLERAGLTCNKNGVPGDIKPPSITSGLRFGVSAGTTRGFGAQEFETIGNLIADILHGLENRIANQSQLETRVASEVGAMTDRFPIYDTDI

SEQ ID NO: 106888 - protein, 91 aa, Unknown
  Bacterial polypetide isolated from the Sargasso Sea
NISGKAAEIALDEAGIFVNKNMIPYDPKSPFVTSGIRVGSPAMTTRGMGVEEVKIIVDLIDQVILNHDNKEKINSVRAQVNELCSSYPIYE

SEQ ID NO: 106889 - protein, 66 aa, Unknown
  Bacterial polypetide isolated from the Sargasso Sea
MNKKGASQESLNNVDAEISELIDNDLNRQNTHIHLIASENFASKAVMEASGSILTNKYSEGFPGRR

SEQ ID NO: 106890 - protein, 104 aa, Unknown
  Bacterial polypetide isolated from the Sargasso Sea
VDLRPYNVKGNLAAESLSRANITCNKNGIPFDTEKPMVTSGIRLGTQAATTRGFGLNEFKTVGELITKTLKGLSENPNDNSKVENEVKNEVISLTSSFPIYKNL

SEQ ID NO: 106891 - protein, 86 aa, Unknown
  Bacterial polypetide isolated from the Sargasso Sea
MKSSRSDSIFSNNNTIKDYDNELWASFQHEAERQEDHIELIASENYASKRILEAQGSLLTNKYAEGYPSKRYYGGCENVDIAENLA

SEQ ID NO: 106892 - protein, 98 aa, Unknown
  Bacterial polypetide isolated from the Sargasso Sea
NTIKSVGMDGKIAEELLDQFGLTTNKQVIPDDPNPPLRPSGIRLGTPAITTRGMEEEDMKKIAKWITNILKSKKGLNRLVELKSEIKTFSSNFKLPGI

SEQ ID NO: 106893 - protein, 50 aa, Unknown
  Bacterial polypetide isolated from the Sargasso Sea
MENIRKEDPALYDVLSKEIDREETTLELIASENFTSKAVMEMAGSVMTNK

SEQ ID NO: 106894 - protein, 90 aa, Unknown
  Bacterial polypetide isolated from the Sargasso Sea
ESLSRANITCNKNGIPFDTEKPMVTSGIRLGTQAITTRGFGLNECKKVGELITKTLKGLSENPDDNSKVEDEVRNEVIALTSSFPIYKNL

SEQ ID NO: 106895 - protein, 102 aa, Unknown
  Bacterial polypetide isolated from the Sargasso Sea
MDGFFNNQLSITDPEISNAIEKEKMRQKEQVELIASENIVSQAVLDAQGSILTNKYAEGYSGRRYYGGCEFIDDLETIGINRVKELFNCNYANIQPHSGAQA

SEQ ID NO: 106896 - protein, 109 aa, Unknown
  Bacterial polypetide isolated from the Sargasso Sea
TDSHMVLVDLRSKNVTGKDAEESLERAGMTCNKNGVANDPNPPTITSGIRLGSPAATTRGFKEEEFKFIGEKISTVINALSSSNADISMTESSILKDVTELCSKFPIYK

SEQ ID NO: 106897 - protein, 223 aa, Unknown
  Bacterial polypetide isolated from the Sargasso Sea
MVSNINPILKEEISKLNDLSTLSSIAYLSSLQLVHSIDPSVSKSIIQELIDQRSNLKMIASENFSSIAVQMAQANLFTDKYAEGFPFHRFYAGCDNVDTIESRAADLAKELFNAEHAYVQPHSGADANLIAYWAILSKTVQEPFLDKLEKKDITALTQSEWSELRKLFGNQKLLAMNYYSGGHLSHGYRHNVSSRMFQVENYDVDKDSKLLDYDVIRKQAKEF

SEQ ID NO: 106898 - protein, 113 aa, Unknown
  Bacterial polypetide isolated from the Sargasso Sea
GTDTHLMLVVLRPFNVKGNVAAESLSRANITCNKNGIPFDSESPMITSGIRLGSQAATTRGFGLKEFQIVGDLITKTIKGLAENPENNSKTEDEVRKEVVSLCSNFPIYKHLG

SEQ ID NO: 106899 - protein, 104 aa, Unknown
  Bacterial polypetide isolated from the Sargasso Sea
MKSVAKIDPIIHSVIKKEINRQKTQLVMIASENYASSAVLEATGSIMTNKYAEGYPGRRYYAGCENFDTIETIAMNRANELFSSKFSNVQPHSGTQANMAAYFS

SEQ ID NO: 106900 - protein, 92 aa, Unknown
  Bacterial polypetide isolated from the Sargasso Sea
AAESLSRANITCNKNGIPFDTEKPMITSGIRLGTQAATTRGFGLSEFKTVGELITKTLKGLSENPSDNSKIEEEVKNEVISLTSSFPIYKNL

SEQ ID NO: 106901 - protein, 155 aa, Unknown
  Bacterial polypetide isolated from the Sargasso Sea
GKAVAFGEALKPEFQNYIKKVIANAKVLASSLVNNGFKIVTGGTDSHIVWLDLTPKNITGDKAEKILEEVGIACNKNAIPYDPNPPKITSGLRFGTAAATSRGFNENDFNQIGDLISEILDNINQNQDNQKEFISLMKSKVISMCKKYPIYDEAF

SEQ ID NO: 106902 - protein, 54 aa, Unknown
  Bacterial polypetide isolated from the Sargasso Sea
MIEAQDPELAVELTKERNRQQDKLEMIASENFTSLAVMQAQGTWLTNKYAEGLP

SEQ ID NO: 106903 - protein, 89 aa, Unknown
  Bacterial polypetide isolated from the Sargasso Sea
MSVYRSPRFRGIELIASENFTTAAVMECNGSCLTNKYSEGQAGKRYYGGNEVIDKIEWLCKKRALQAFSLDAQEWHVNVQPYSGSPANF

SEQ ID NO: 106904 - protein, 96 aa, Unknown
  Bacterial polypetide isolated from the Sargasso Sea
MTTNLELLQQNDPLLFDALQGEEARQRSGIELIPSENYTHPEVLVTLGSVFTNKYSEGYPGRRYYGGQTYTDEIENLARDRAKAVFRCEHANVQPF

SEQ ID NO: 106905 - protein, 286 aa, Unknown
  Bacterial polypetide isolated from the Sargasso Sea
KVFSSLEKHHEWFDNSIPLIASENIPSPAVREAVMSDFGNRYAEGWPGERVYAGCTYIDEVEIQCMELAQKLFKAEFADVRSVSGVVANLAIYSAYSNPGDVMIASSIPAGGHISHGKKEHSGTAGLVHGLDIEFFAFDPEEMTLDVDKTKAKVEDLKSQGRLPKIAMFGGSVFLFPHPVKELADFLKGHDMHINYDAAHVAGLIAGGKFQDPLREGTDTMTMSTHKTLFGPQGGLVLGFEKHAEPIKKAMFPGLTSSHHIHHMGAKAVAFAEALELEKIMQNRQS

SEQ ID NO: 106906 - protein, 90 aa, Unknown
  Bacterial polypetide isolated from the Sargasso Sea
MKKLYNQSIKEADPEIYETLEKELTRQQNQIELIASENIASLAILNAQGSVMTNKYAEGYSGKRYYGGCEFVDQAEDIAIERVKKLYGCK

SEQ ID NO: 106907 - protein, 95 aa, Unknown
  Bacterial polypetide isolated from the Sargasso Sea
MDGFFNNQLSITDPEISNAIEKEKIRQKEQVELIASENIVSQAVLDAQGSILTNKYAEGYSGRRYYGGCEFIDDLETIGINRVKELFNCEYAKYT

SEQ ID NO: 106908 - protein, 91 aa, Unknown
  Bacterial polypetide isolated from the Sargasso Sea
LCKANITCNKNGIPFDTEKPTITSGIRLGSQAATTRGFGLNEFKKVGELITKVIKGLSENPENNSKTESEVKKEVIELCSKFPIYNHLIKK

SEQ ID NO: 106909 - protein, 58 aa, Unknown
  Bacterial polypetide isolated from the Sargasso Sea
MSLLDNKSDLKTDAIFSNKKDIELYDIELWESFEKEMIRQEEHIELIASENYASQRVL

SEQ ID NO: 106910 - protein, 65 aa, Unknown
  Bacterial polypetide isolated from the Sargasso Sea
MSIAVKLNKYLNSFFKLDLKEADKELYKSIEEEFVRQQNHIELIASENIVSKAVLEAQGSVLTNK

SEQ ID NO: 106911 - protein, 102 aa, Unknown
  Bacterial polypetide isolated from the Sargasso Sea
STCLPSHTPARDADAALAGAYITANKNSVPNDPRSPFVTSGLRIGTPAVTTRGFGVTECEQLAGWLCDVLDALETGGHALTTVRDGVRKQVVDLCRRHPVYQ

SEQ ID NO: 106912 - protein, 134 aa, Unknown
  Bacterial polypetide isolated from the Sargasso Sea
CCHASALAERLIARGIDVVSGGTDNHVVLLDLRCIGMTGKVADLLVSDVHITANKNTVPFDPESPFVTSGLRLGTAALTTRGFDAEAFVEVADVIADRLLNPEDDAIQKRCLDRVEQLCSRFPLYAEQKQPALA

SEQ ID NO: 106913 - protein, 238 aa, Unknown
  Bacterial polypetide isolated from the Sargasso Sea
MADSNKESYDKVFSSLEKHHEWFDNSIPLIASENIPSPAVREAVMSDFGNRYAEGWPGERVYAGCTYIDEVEIQCMELAQKLFKAEFADVRSVSGVVANLAIYSAYSNPGDVMIASSIPAGGHISHGKKEHSGTAGLVHGLDIEFFAFDPEEMTLDVDKTKAKVEDLKSQGKLPKIAMFGGSVFLFPHPVKELAEFLKGHGMHINYDAAHVAGLIAGGKFQDPLREGTDTMTMSTHKT

SEQ ID NO: 106914 - protein, 237 aa, Unknown
  Bacterial polypetide isolated from the Sargasso Sea
MSDSNKESYDKVFSSLEKHHEWFDNSIPLIASENIPSPAVREAVMSDFGNRYAEGWPGERVYAGCTYIDEVEIQCMELAQKLFKAEFADVRSVSGVVANLAIYSAYSNPGDVMIASSIPAGGHISHGKKEHSGTAGLVHGLDIEFFAFDPEEMTLDVDKTKAKVEDLKSQGRLPKIAMFGGSVFLFPHPVKELADFLKGHDMHINYDAAHVAGLIAGGKFQDPLREGTDTMTMSTHK

SEQ ID NO: 106915 - protein, 78 aa, Unknown
  Bacterial polypetide isolated from the Sargasso Sea
MSSVTKIRRVSSNFFDRDLKDSDKDLFDSISQEFVRQKNHIELIASENIVSRAILEAPGSVLTNKYAEGYSGKRYYGR

SEQ ID NO: 106916 - protein, 65 aa, Unknown
  Bacterial polypetide isolated from the Sargasso Sea
MSNKGASKDNLLSADEEIAGLIKTDLERQNSHIHLIASENFASQAVMEASGSILTNKYSEGFPGR

SEQ ID NO: 106917 - protein, 97 aa, Unknown
  Bacterial polypetide isolated from the Sargasso Sea
WQIADLLVSEVNITANKNTVPFDPESPFVTSGLRLGTAALTTRGFNENAFAEVGEIIADRLLNPNDALIESQCKERVLTLCNRFPLYEGKLEASTIK

SEQ ID NO: 106918 - protein, 344 aa, Unknown
  Bacterial polypetide isolated from the Sargasso Sea
MSVNISDVLDILIRQNQWRGREAINLIASENVQSEAVKQAEINDFMGRYAEGHPNTDQKDGRYYEGTRYIDQIESMAVSEMIKLAKCHQADVRPVSGNAANTAVALGILRGNDTVIVNSIENGGHISHNPIGVVGRRIQVRGKVLTLGRENSINLHFWPTTQDGYHLDTPKCLDLLEQTSPNLVILGKSLFLFPEPVKAIAEICRAKNIPILYDGAHVLGLIIGGKFQDPFQEGAHFINASTHKTFPGPQRGVILGNMSSDQEMKWWNSVDRGVMPGSSSSHHLHTLPGMLIAIREMAEYGNQYASQTVANAKALGQALAGEGVNVEAKEFGFTESHQLALNVT

SEQ ID NO: 106919 - protein, 104 aa, Unknown
  Bacterial polypetide isolated from the Sargasso Sea
LLDLRSFRVTGKDAQASLGRSNITCNKNGIPFDTESPMITSGIRLGTPACTTRGFGENEFKLVGDLIFKVIEGLSKNKEDNSKIEKEVQKEIIELCSSFPIYSS

SEQ ID NO: 106920 - protein, 439 aa, Unknown
  Bacterial polypetide isolated from the Sargasso Sea
MADSNKESYDKVFSSLEKHHEWFDNSIPLIASENIPSPAVREAVMSDFGNRYAEGWPGERVYAGCTYIDEVEIQCMELAQKLFKAEFADVRSVSGVVANLAIYSAYSNPGDVMIASSIPAGGHISHGKKEHSGTAGLVHGLDIEFFAFDPEEMTLDVDKTKAKVEDLKSQGKLPKIAMFGGSVFLFPHPVKELAEFLKGHGMHINYDAAHVAGLIAGGKFQDPLREGTDTMTMSTHKTLFGPQGGLVIGSEEHAEPIKKAMFPGLTSSHHIHHMGAKAVAFAEALEFGKDYAEQTIKNAKALASELNNVGFKVLGEKRGYTESHQTVVNVLDYGDGGTIEADLEKANIIVNRQLIPGDLKAGRHYMHPGGIRLGTSEITRLGMKESEMKEIASLLKQVVVDKKDAGEIAARVKEFKTDFKKTQYCFDNKLGAYEYVKLR

SEQ ID NO: 106921 - protein, 349 aa, Unknown
  Bacterial polypetide isolated from the Sargasso Sea
MKIKTEDIQNLVETQNNWRGRECLNLIASENAQSPMVRSIESNDFMGRYAEGHPNTDSEDRRYYEGTRWIDEIERIAQEEIIEMANCRQADVRPISGNAANTALALGILRGGDSVIVNSIEQGGHISHNPIGVVGRRIQKRGQVLTPGKDHSIDLHYWPNTPDGYHLDADACVKLLEDKRPNLAILGKSLFLFPEPVKEIAETCRNMKIPLLFDGAHVLGLILGGCFQDPLGEGAHFINASTHKTFPGPQRGVILGNLEGDEEMKWWTSIDRGVMPGSSSSHHLHTLPGLVIAIREMKVYGKAYAEQTISNAKALGRALDEEGVDVEAKEFGFTESHQLAVSVTRFGEA

SEQ ID NO: 106922 - protein, 82 aa, Unknown
  Bacterial polypetide isolated from the Sargasso Sea
MSNKGASKDNLLSADEEIAGLIKTDLERQNSHIHLIASENFASQAVMEASGSILTNKYSEGFPGRRYYEGCETVDEMNNLLR

SEQ ID NO: 106923 - protein, 421 aa, Unknown
  Bacterial polypetide isolated from the Sargasso Sea
HHEWFDNSIPLIASENIPSPAVREAVMSDFGNRYAEGWPGERVYAGCTYIDEVEIQCMELAQKLFKAEFADVRSVSGVVANLAIYSAYSNPGDVMIASSIPAGGHISHGKKEHSGTAGLVHGLDIEFFAFDPEEMTLDVDKTKAKVEDLKSQGRLPKIAMFGGSVFLFPHPVKELADFLKGHDMHINYDAAHVAGLIAGGKFQDPLREGTDTMTMSTHKTLFGPQGGLVLGFEKHAEPIKKAMFPGLTSSHHIHHMGAKAVAFAEALEFGKDYAEQTIKNAKALAAELNNVGFKVLGEKRGYTESHQTVVNVLDFGDGGTIEADLEKANIIVNRQLIPGDLKANRHYMHPGGIRLGTSEITRLGMKESEMKEIASLIKQVVVDKKDAVEVANRVKEFKTDFKKTQYCFDNKLGAYEYVKLR

SEQ ID NO: 106924 - protein, 55 aa, Unknown
  Bacterial polypetide isolated from the Sargasso Sea
MLDKKSSIKTDAIFSNKKDIELYDAELWESFQKEMVRQEEHIELIASENYASKRV

SEQ ID NO: 106925 - protein, 114 aa, Unknown
  Bacterial polypetide isolated from the Sargasso Sea
MSETTKTAQYEDFEDFFSKNLKEADPKLYESLSQEFDRQQEHIELIASENIVSRSVLDAQGSIMTNKYAEGYSGRRYYGGCEYVDLAEDLAISRACELFDSKYANSNLIQDRKL

SEQ ID NO: 106926 - protein, 346 aa, Unknown
  Bacterial polypetide isolated from the Sargasso Sea
GCEHVDGAETLAIERAKILFNAKFANVQPHSGASANAAVFLALLEPGDTFLGMALDQGGHLTHGSKVNFSGKNFNAIQYGLDKVTGDIDYVEIRKLAHEHKPKMIVAGFSAFMGIVNWKLFREIADEVGAFLMVDMAHVSGLVAGGVYPNPVEFAHVVTSTTHKSLRGPRSGIILSNEDEEFQKKLNFAVFPGSQGGPLMHVIAAKAVCFKEAMTNDFKDYQKQIISNAKTMCGQFTSRGFNLVQKDTDNHLILVDLRSKNITGKEVEELLGTVNITVNKNSIPDDPESPFVTSGIRIGTPAMTTRGFKNDEAKQVVDLICDAIENKENSDELDIVKDKVKELCRK

SEQ ID NO: 106927 - protein, 208 aa, Unknown
  Bacterial polypetide isolated from the Sargasso Sea
MRASTRAQAKPSPFEDQSVESLDPELYGILVKEKERQRLGLELIASENFTSKAVMEVNGSCLTNKYSEGLPGQRYYGGNEFIDETERLCQSRALSAYRLDPAEWGVNVQVLSGSPANFAVYTAMMQPHERIMGLDLPHGGHLTHGFYTPKKKISATSVYFESMPYRLNEATGLVDYDKLEENAMLFRPKLIIAGASAYARNFDYKRLR

SEQ ID NO: 106928 - protein, 285 aa, Unknown
  Bacterial polypetide isolated from the Sargasso Sea
KYAEGYPGKRYYNGCEHVDVAEKLALERIKKLFNCKYANVQPHSGAQANGAVFLALLKPNDTFMGMSLNSGGHITHGLKISMSGKWFNAISYDVDKKSELIDYDNVEKLALEHKPKLIIAGGSAYSRVINFKRFREIADKVGAYLMVDMAHFSGLVAGKGYPNPCDYAHVVTSTTHKVFRSARGGIILSNNEDLGKKFDTAVFPGYQGGPLMHIIAAKAAGFYEALKPEFQTYIKNVLANAKILAETLKNNGFKIYSGGTDTHLMLVDLRPFNVKGNLASESLCR

SEQ ID NO: 106929 - protein, 182 aa, Unknown
  Bacterial polypetide isolated from the Sargasso Sea
MSSETKYLNREYKDFFEKSLLDSDPEIYKAINDELIRQQNHIELIASENIVSQAVLEAQGSVLTNKYAEGYPGKRYYNGCEHVDVAEQLAIDRLKKLFNCKFANAQPHSGAQANGAVFLALLKPGDTFLGMSLNSGGHITHGLKISMSGKWFNAIGYEVDKESELIDYDNVEKLLSNINLNL

SEQ ID NO: 106930 - protein, 315 aa, Unknown
  Bacterial polypetide isolated from the Sargasso Sea
MSSEGKYLNDQYKSFFEDSLSKTDPDLYKAIDNELQRQQQHIELIASENIVSQAVLEAQGSVLTNKYAEGYSGKRYYNGCEHVDIAENLANERLKKLFGCKFANSQPHSGAQANGATFLALLKPGDTFMGMSLNSGGHITHGLKISMSGKWFNPIGYDVDKKSELIDYDHVEKLALEHKPKLIIAGGSAYSRIIDFKKFRDIADRVGAYLMVDMAHFSGLVAGKGYPNPCEYAHVVTSTTHKVFRSARGGIILTNHEDIAKKINTAVFPGYQGGPLMHIIAAKAAGFLEALRPEFKDYIKSVLANAKILSETLKN

SEQ ID NO: 106931 - protein, 125 aa, Unknown
  Bacterial polypetide isolated from the Sargasso Sea
MSSEKNYLNDSYKSFFEDSLSLKDPELYKAIKDELIRQQQHIELIASENIVSQAVLEAQGSVLTNKYAEGYPGKRYYNGCEHVDVAENLAIERLKKLFNCKFANAQPHSGAQANGAVFLALLSPR

SEQ ID NO: 106932 - protein, 253 aa, Unknown
  Bacterial polypetide isolated from the Sargasso Sea
MSSEKSYLNDSYKSFFEDSLSVKDPELYKAIKDELIRQQQHIELIASENIVSQAVLEAQGSVLTNKYAEGYPGKRYYNGCEHVDVAENLAIERLKKLFNCKFANAQPHSGAQANGAVFLALLSPGDTFMGMSLNSGGHITHGLKISMSGKWFNAIGYDVDKKSELIDYDNVEKLALEHKPKLIIAGGSAYSRVIDFKRFREIADKVGAYLMVDMAHFSGLVAGKGYPNPCDHAHVVTSTTHKVFRSARGGIIF

SEQ ID NO: 106933 - protein, 315 aa, Unknown
  Bacterial polypetide isolated from the Sargasso Sea
ARANGAVFLALLKPNDTFLGMSLNSGGHITHGLKISMSGKWFNAISYDVDKKSELIDYENVEKLALEHKPKLIIAGGSAYSRVIDFKRFREIADKIGAYLMVDMAHFSGLVAGKGYPNPCEYAHVVTSTTHKVFRSARGGIILSNDLDLGKKFDTAVFPGYQGGPLMHIIAAKAAGFYEALKPEFQTYIKNVLSNAKILAETLKNNGFKIYSGGTDTHLMLVDLRPFNVKGNLAAESLSRANITCNKNGIPFDTEKPMITSGIRLGSQAATTRGFGLKEFEKVGDLITKVIKGLSKNPEDNSKVEEDVRNDVVNL

SEQ ID NO: 106934 - protein, 235 aa, Unknown
  Bacterial polypetide isolated from the Sargasso Sea
MSSETKYLNSEYKDFFEKSLLDSDPEIYKAINDELVRQQNHIELIASENIVSQAVLEAQGSVLTNKYAEGYPGKRYYNGCEHVDVAEQLAIDRLKELFNCKFANAQPHSGAQANGAVFLALLKPGDTFMGMSLNSGGHITHGLKISMSGKWFNAIGYEVDKESELIDYDNVEKLALEHKPKLIIAGGSAYSRVIDFKRFREIADKVGAYLMVDMAHFSGLVAGKGYPNPCDYAHV

SEQ ID NO: 106935 - protein, 308 aa, Unknown
  Bacterial polypetide isolated from the Sargasso Sea
MSSEKNYLNDSYKSFFEDSLSKKDPDLFKAIKDELIRQQQHIELIASENIVSQAVLEAQGSVLTNKYAEGYPGKRYYNGCEHVDVAENLAIERLKKLFDCKFANAQPHSGAQANGAVFLALLSPGDTFMGMSLNSGGHITHGLKISMSGKWFNAVGYDVDKESELIDYDNVEKLALEHKPKLIIAGGSAYSRVIDFKRFREIADKVGAYLMVDMAHFSGLVAGKGYPNPCDHAHVVTSTTHKVFRSARGGIILTNYEDLAKKFNTAVFPGYQGGPLMHIIAAKAAGFLEALQPEFQDYIKSVLANAKI

SEQ ID NO: 106936 - protein, 245 aa, Unknown
  Bacterial polypetide isolated from the Sargasso Sea
MSNKGASKDNLLSADEEIAGLIKTDLERQNSHIHLIASENFASQAVMEASGSILTNKYSEGFPGRRYYEGCETVDEIEQLAIDRACELFEADHANVQPHSGSSANMAVYLNLLEPGDTVMGMSLDQGGHLTHGSPVNFSGKTYNFVGYGLDRETELINMEEVAELASKTKPKLLIAGYSSYSQDLDFKGFREIADSIGAYFMVDAAHFIGLVAGKVVENPVPYADVITATTHKALRGPRGGLILS

SEQ ID NO: 106937 - protein, 228 aa, Unknown
  Bacterial polypetide isolated from the Sargasso Sea
NCRFIGAYFMVDAAHFIGLVAGKVVENPVPYADVITATTHKALRGPRGGLILSKEEFAKGIDQNIFPGAQGGAINNQIAAKAVCFKEAMSEEYKSYAQQILDNAHALAESFKAEGLRVVSGGTSNHIVLVDTGSVDDELTGKEAGILLNDMGITLNRNAIPFDERSPFITSGIRMGTPAITTCGMKEEESTKVGYLISEALKNRDNEDRRQELEEEIRNLAKAFQPYE

SEQ ID NO: 106938 - protein, 171 aa, Unknown
  Bacterial polypetide isolated from the Sargasso Sea
MFVNDPQIYEALDKELKRQQNQIELIASENIVSNSVLEAQGSILTNKYAEGYPGKRYYGGCEFVDVAELLAQQRAKELFGVKFANVQPHSGSQANQAVFLALVQPGETILGMSLAAGGHLTHGAKPNVSGKWFNAISYGVDRESHLIDYQEVSNLAIEHQPQAYNCRGFCL

SEQ ID NO: 106939 - protein, 350 aa, Unknown
  Bacterial polypetide isolated from the Sargasso Sea
MQKVILGKRYYGGCEYVDVAEQLAIDRLKELYGADYANVQPHSGSQANAAVFMALLQPHDTILGMSLAHGGHLTHGSKVNFSGKIYNAVQYGLNPDTGEIDYDQVEALAKEHKPKMIIAGFSAYSRVLDWKRFRDIADSIGAYFFVDMAHVSGLVAGGVYPSPVPYADVVTSTTHKSLRGPRGGIIICKSNPEIEKKINSMVFPGTQGGPLMHVIAAKAVAFKEALQPEFKQYQQQILKNASAMADQFIKRGFKVVSGGTDDHLFLVDFIEKGITGKDVDAALGRANITVNKNSVPNDPQSPFVTSGIRVGTPAPTTRGFKEAECIELTNWMCDVIENLDNEEVINAVNK

SEQ ID NO: 106940 - protein, 152 aa, Unknown
  Bacterial polypetide isolated from the Sargasso Sea
MHVIAAKAVAFKEALDPSFKTYIKGVLDNAQCFAEEFLSKGYNLISGGTDTHQVLIDLQNKNISGKAAELSLDEAGITVNKNMIPYDPKSPFVTSGIRIGSPAITTRGMGVNEVKIIVDLIDQVIVNHDNKEKIQSIKKHVNELCSSFPIYE

SEQ ID NO: 106941 - protein, 243 aa, Unknown
  Bacterial polypetide isolated from the Sargasso Sea
MSKIKSNINGGYQDYFDKDLSLRDPDLYNSIKLELQRQQQHIELIASENIVSKAVLDAQGSILTNKYAEGYPGKRYYGGCEFVDKAEELALERVKKLFNCKYANVQPHSGAQANGAVYLALLNPGDTILGMSLNSGGHLTHGAKVSLSGKWLKAFHYEVDKETGLIDYDQIKKLALEHKPKILIAGGSAYSRIIDFKKFREIADSIKAYLMVDMAHFSGLVAGRGYPNPTEYADVVTSTTHKV

SEQ ID NO: 106942 - protein, 183 aa, Unknown
  Bacterial polypetide isolated from the Sargasso Sea
MILSNNKDLGKKFNSAVFPGYQGGPLMHVIAGKAVAFGEALKPEFKEYIKQVIKNAQTLSQTLVDGGLKIVSGGTDTHLILVDLTPMDLTGDAASTSLEEAHITCNKNGIPKDPKPPKITSGIRLGTPAATTRGFKEKEFETVGNLILETLSGLKQNPNDNSKVEKIVKEKVINLCNQFPIYN

SEQ ID NO: 106943 - protein, 278 aa, Unknown
  Bacterial polypetide isolated from the Sargasso Sea
MNSIKKADIEVYDILQKELSRESETLELIASENFVSYPVLEMAGGIMTNKYAEGYPGARYYGGCQHVDEAENLARDRARKLFNCEYVNVQPHSGSQANMATLMTFIDIGDTIMGLDLAHGGHLTHGSKVNFSGQMYNSAAYQVNKNTGRLDMDNVAKIAREYKPKIIICGGSAYPRHVEFAEFKTIADDVGAFLMADIAHPSGLVAAGLHPSPMPFCDVVTTTTHKTLRGPRGGMIMMGKDRENVWNVVAPKSGRVKMISELLDSAVMPGIQGGPLMH

SEQ ID NO: 106944 - protein, 276 aa, Unknown
  Bacterial polypetide isolated from the Sargasso Sea
VTWPEACNKTLAEMDPEIADIVEREKARQWKGLELIPSENFTSRSVMEAVGSVMTNKYSEGYPGARYYGGNEFIDQAETLCQQRALAAFGLDPAEWGVNVQSLSGSPANFQVYTGLLKPHDRIMGLDLPHGGHLSHGFQTDTKKISAVSIFFESMPYRLDESTGLIDYDACETLAAAYRPKLIVAGASAYSRLYDYARMRQIADKSNAFLLADMAHISGLVAAKMIPSPFEHADVVTTTTHKSLRGPRGAMIFFRKGQKGVDKKGNPIMYDLRIRS

SEQ ID NO: 106945 - protein, 97 aa, Unknown
  Bacterial polypetide isolated from the Sargasso Sea
MFITQKNLKEFDPELWSSINNETSRQEEHIELIASENYTSKSILEVQGSVLTNKYAEGYPGKRYYGGCEHVDVAESLAIERAKELYGAAYANVQPHS

SEQ ID NO: 106946 - protein, 113 aa, Unknown
  Bacterial polypetide isolated from the Sargasso Sea
YSRVIDFKRFREIADKVGAYLMVDMAHFSGLVAGKGYPNPCDYAHVVTSTTHKVFRSARGGIILTNHEELAKKFNTAVFPGYQGGPLMHIIAAKAAGFLKLYNQNFKIILNLF

SEQ ID NO: 106947 - protein, 94 aa, Unknown
  Bacterial polypetide isolated from the Sargasso Sea
MNSNFFNENVKLADPEVYATLKKELERQQNQIELIASENITSKAVLNSQGSVMTNKYAEGYPGNRYYGGCEFVDQAENIALERVKKLYNCKYAN

SEQ ID NO: 106948 - protein, 323 aa, Unknown
  Bacterial polypetide isolated from the Sargasso Sea
RELYASITNEEQRQKDGVELIPSENYAFPEVLAALGSVFTNKYSEGYPGRRYYGGQENTDCIENLARERAKSLFNCDHANVQPLSGSGMNQAVYLGLLNPGDTILAMDLSHGGHLTHGAPVSHMGKLFNFVRYVTDPLDGSFDFDQILKDAKACRPKLVLCGYTSYPRDIDYKSFKAIADEVGAISMTDASHFGGLVAGKAMANPFDYGFDIVTTTTHKSLRGPRGGMILCKEDFAAKIDKSVFPGLQGGPHMNAVAALAVTLKLAALPDFKRYADQVLKNSKALANVFIQSDTKLVAGGTDHHMLVLDTVQSYGIDGRIAEE

SEQ ID NO: 106949 - protein, 233 aa, Unknown
  Bacterial polypetide isolated from the Sargasso Sea
ANNINAYLLVDMAHFAGLVASKTYPSPIAIADIVTTTTHKTLRGPRGGLILTNNEDISKKINSAIFPGIQGGPLMHTILAKAVAFGEALRPEFVNYSQNVIDNAKILSQTLLEDGFDIVSGGTDSHLVLLDLRPKGIKGNEAEDVLGKANITCNKNGVPFDPEKPTITSGIRLGTPAGTTRGFGQAEFHKVGSYICEVLNGFQSDGVDTKAILEVQKKVIHLCSKFPIYGGNL

SEQ ID NO: 106950 - protein, 242 aa, Unknown
  Bacterial polypetide isolated from the Sargasso Sea
AFSGILDWKKFKDIAEETGALLLVDMAHVSGLVAAGLYPSPIPYADVVTSTTHKTLRGPRSGIILAKKNEEIEKKLNSAVFPGSQGGPLMHVIAAKAICFKEALDPEFKIYTQQVMDNAKLMAETLISNNIDVVTNGTQNHIVLVDLRNKNISGKDLESTLGCVNITVNKNSVPNDPASPFITSGIRIGTPAVTTRGFKEEEIIKISNWISSIINDFGNVELQNKIKKEVHNLTHEFPVYNL

SEQ ID NO: 106951 - protein, 143 aa, Unknown
  Bacterial polypetide isolated from the Sargasso Sea
MSSEKNYINDNYKSFFEDSLSSKDPELYNAIQDELLRQQQHIELIASENIVSQAVLEAQGSVLTNKYAEGYPGKRYYNGCEHVDVAENLAIERLKKLFNCKFANAQPHSGAQANGAVFLALLKPGDTFMGMSLNSGGHITHGL

SEQ ID NO: 106952 - protein, 118 aa, Unknown
  Bacterial polypetide isolated from the Sargasso Sea
MSSETKYLNSEYKDFFEKSLLESDPEIYKAINDELVRQQNHIELIASENIVSQAVLEAQGSVLTNKYAEGYPGKRYYNGCEHVDVAEQLAIDRLKDLFNCKFANAQPHSGAQANGAVF

SEQ ID NO: 106953 - protein, 120 aa, Unknown
  Bacterial polypetide isolated from the Sargasso Sea
MNNLEKKDPELFDVLKREAKREELTLELIASENFTSKAIMEMAGGVMTNKYAEGYPGKRYYGGCEVVDEAENIARDRLKKLFGCEYANVQPHSGSQANMAVFMTFLKPGDTIMGLDLHTE

SEQ ID NO: 106954 - protein, 210 aa, Unknown
  Bacterial polypetide isolated from the Sargasso Sea
MSSEKNYINDSYKSFFEDSLSSKDPDLYKAIQDELLRQQQHIELIASENIVSQAVLEAQGSVLTNKYAEGYPGKRYYNGCEHVDVAENLAIERLKKLFNCKFANAQPHSGAQANGAVFLALLKPGDTFMGMSLNSGGHITHGLKISMSGKWFNPIGYDVDKKSELIDYDTVEKLALEHKPKLIIAGGSAYSRVIDFKRFRQIADKVGAYL

SEQ ID NO: 106955 - protein, 197 aa, Unknown
  Bacterial polypetide isolated from the Sargasso Sea
MKKLYNQSIKEADPEVYETLEKELTRQQNQIELIASENIASLAILNAQGSVMTNKYAEGYSGKRYYGGCEFVDQAEDIAIERVKKLYGCKFANLQPHSGAQANQAVFLALLKPHDTFLGMSLASGGHLTHGAKPNISGKWFNAIQYGVKKDGNDKDLIDYDEVEKLANEHKPKIIIAGASAYPRVIDWRNLEISLII

SEQ ID NO: 106956 - protein, 316 aa, Unknown
  Bacterial polypetide isolated from the Sargasso Sea
MRNVDIAENLAIDRAKELFKADYANVQPHSGSSANAAAYLALLEPNDTILGMSLDHGGHLTHGSKVNFSGRNYKSFQYGLHPETNDINYDEVRYLAKKHNPKLIIAGFSAFTGVIDWEKFRNIADEVGAYFLVDMAHVSGLVAAELYPSPIPFADVVTSTTHKTLRGPRSGIILAKANEEIEKKLNSAVFPGSQGGPLMHVVAAKALCFKEALDPEFKIYIKQVMDNAKIMAETIMSNGVDIVCNGTQNHIVLVDLRSKDISGKDLERVLGSVNITVNKNSVPNDPASPFITSGIRIGTPAGTTRGFKEKELLKSV

SEQ ID NO: 106957 - protein, 336 aa, Unknown
  Bacterial polypetide isolated from the Sargasso Sea
NKYAEGYPKKRYYAGCQFIDEVEQLAIDRACELFNVKYVNVQPHSGSQANLAVFKAILEPGDCFMGLDLAHGGHLSHGCKANISGQYYRPVTYQLNSKTEALDYDEIERIAKESKPKLIIAGYSAYALTIDWKRLREICDQVGAKMLADIAHVSGLIAAGLFPCPSKYADVITTTTHKSMRGPRGGMIMVPKDEKLAKKIDQAIFPGLQGGPMIHTIAAKAVAFHEALQPEFKVYQKQVIKNAKDLCNHLKEYGYKITSNGTDTHLFLVDLTEKNITGQDAERALEEIGIITNKNTVPNDKRSPFVTSGLRIGACAITTRGVKEEGVKEIAYLIDK

SEQ ID NO: 106958 - protein, 330 aa, Unknown
  Bacterial polypetide isolated from the Sargasso Sea
LAIERAKKLFGADFANVQPHSGSSANSAAYLALLNAGDTVLGMSLADGGHLTHGASVNFSGKLYNAVQYGLNNETGEVDYEAVAKLAEEHKPKLIIAGFSAYSRKMNWERFREIADSVNAYLLVDMAHVAGLVAAGLYPNPVQIADVTTSTTHKTLGGPRSGIILARSNEEIEKKLNSALFPGSQGGPLMHIIAAKAVCFKEAMEEDFVAYQKQTIKNAQVLANEFIHRGYDVVSGGTDNHLFLLDLVSKNITGKDADAALGRANITVNKNAVPNDPRSPFVTSGLRIGSPAITRRGFKEEECIQLVDWMSNILTDINDEAAIERVKKEV

SEQ ID NO: 106959 - protein, 125 aa, Unknown
  Bacterial polypetide isolated from the Sargasso Sea
MSSEKNYLNDSYKSFFEDSLSVKDPELYKAIKDELIRQQQHIELIASENIVSQAVLEAQGSVLTNKYAEGYPGKRYYNGCEHVDVAENLAIERLKKLFNCKFANAQPHSGAQANGAVFLALLSPR

SEQ ID NO: 106960 - protein, 266 aa, Unknown
  Bacterial polypetide isolated from the Sargasso Sea
MNILQNLNDSDPVISNFINSEKNRQETHLELIASENFASIAVMQAQGSVLTNKYAEGLPQKRYYGGCEFVDEIEELAIQRAKKLFNANWANVQPHSGAQANAAVFLSLLKPGDTIMGMDLSHGGHLTHGSPVNMSGKWFNAVHYGVNKETSELNFDEIREIALETKPKLIICGYSAYPRTIDFESFRNIADEVGAFLMADIAHIAGLVASKLHPNPIPYCDVVTTTTHKTLRGPRGGLILCKDAEFGKKFDKSVLPWYSGWGPWNI

SEQ ID NO: 106961 - protein, 255 aa, Unknown
  Bacterial polypetide isolated from the Sargasso Sea
LIIAGGSAYSRVIDFKRFREIADKVGAYIMVDMAHFSGLVAGKGYPNPCDYAHVVTSTTHKVFRSARGGIILTNHEDLSKKFNTAVFPGYQGGPLMHIIAAKAVGFKEALKPEFKDYIKTVLANAKILAETLKNNGFKIYSGGTDTHLMLVDLRPFNVKGNVAAESLSRANITCNKNGIPFDSESPMITSGIRLGSQAATTRGFGLKEFQIVGDLITKTIKGLAENPEDNSKTEDEVRKEVVSLCANFPIYKHLG

SEQ ID NO: 106962 - protein, 275 aa, Unknown
  Bacterial polypetide isolated from the Sargasso Sea
MLYRPKLIIAGASAYPRNYDYARMREICDNCGALLMSDMAHISGLVAADIVDNPFPHSDIVTTTTHKSLRGPRGGMIFYRKEHEQAINSAVFPGLQGGPHNHTIGALAVALKQAQTPEFVEYQKQVVKNCAAMANRLVELGYSLVSGGTDNHLILCDLRPKGIDGARVERILDLSHITLNKNSVPRDTSALIPGGIRIGAPAMTTRGMLEEDFVKVADLIHKGVEIAIDCKSKAEGPKLKDFNAYLETANREDIAALREEVESFSGDFHMPGGVY

SEQ ID NO: 106963 - protein, 237 aa, Unknown
  Bacterial polypetide isolated from the Sargasso Sea
MFSRDLTLARYDAELFAAMEQEAQRQEEHIELIASENYTSPAVMEAQGSVLTNKYAEGYPGKRYYGGCEYVDVVEQLAIDRAKELFGADYANVQPHSGSQANSAVYMALLNAGDTVLGMSLAHGGHLTHGASVSFSGKIYNAVQYGINDQGLIDYDEVERLAVEHKPKMIIAGFSAYSQVLDFPRFRAIADKVGAYLFVDMAHVAGLVAAGLYPNPLPFADVVTTTTHKTLRGPRGG

SEQ ID NO: 106964 - protein, 90 aa, Unknown
  Bacterial polypetide isolated from the Sargasso Sea
MEKILKEFLGSVNITVYKNSVPNDPASPFVTSGIRIGTPAATTRGFKEEEIIQVANWISDIINNFDNEELLKTIKEEVHKLTSNFPVYNL

SEQ ID NO: 106965 - protein, 221 aa, Unknown
  Bacterial polypetide isolated from the Sargasso Sea
MNKKGASQETLNNVDAEISELIINDLNRQNTHIHLIASENFASKAVMEASGSILTNKYSEGFPGRRYYEGCETVDQIEQLAIDRACELFEADHANVQPHSGSSANMAVYLTLLEPGDTVLGMSLDQGGHLTHGSPVNFSGKVYNFVGYGLDEDTELIDMETVYNMALEHKPKLIIAGYSSYSQSLNFQKFREIADEVGAHFMVDAAHFIGLVAGKSVDNPT

SEQ ID NO: 106966 - protein, 228 aa, Unknown
  Bacterial polypetide isolated from the Sargasso Sea
LLQPHDTILGMSLASGGHLTHGAKPNLSGKWFNAVQYGVKKDGNDRDLIDYDEVEALALKHKPKMIIAGASAYPRIIDWKKFREIADKVGAYFLVDMAHYSGLVAGKQYPNPIDHAHIVTSTTHKTLRGARSAMILTNHEDLYKKINSAVFPGLQGGPLMHVIAARAVCFGEALKPEFEEYIKNVIASAKVMSQTLVDRGFRIVTGGTDSHIVWLDLTPKGLTGDKAE

SEQ ID NO: 106967 - protein, 109 aa, Unknown
  Bacterial polypetide isolated from the Sargasso Sea
MSFFSSPLKDIDNEIHKAINLELDRQQNQIELIASENIVSKAVLEAQGSIMTNKYAEGYASSRYYGGCEFVDIAEDLAIKRLQKLYKCEYANVQPHSGAQANGAVMLAL

SEQ ID NO: 106968 - protein, 137 aa, Unknown
  Bacterial polypetide isolated from the Sargasso Sea
MSSEGKYLNVDYKNFFEKKLSETDPEVYKAVTDELIRQQNHIELIASENIVSQAVLEAQGSVLTNKYAEGYPGKRYYNGCEHVDVAESLANERLKKLFNCKFANSQPHSGAQANGAVFLALLKPRGYIHGYEFGFWG

SEQ ID NO: 106969 - protein, 196 aa, Unknown
  Bacterial polypetide isolated from the Sargasso Sea
MSKEYKITYNFFNEGLSKTDPELMSFIKEELNRQQHHLELIASENIVSKSILETQGSVLTNKYAEGYPGKRYYGGCEFVDKAETLAIERAKKLFNVNFANVQPHSGAQANGAVFLALLKPGDTILGMGIDQGGHLTHGAPPAQSGKWFNAIHYGVRKDNGLIDYDQVKDLAKKHKPKLIIAGGSAYSRIIDFKIFR

SEQ ID NO: 106970 - protein, 208 aa, Unknown
  Bacterial polypetide isolated from the Sargasso Sea
TTTTHKTLRGARGGLIMIGKDYENPFGLKFKNGNLKMMSKLVDLAVFPGNQGGPLEHVIAAKAVGFGEALDDSFYNYIERVKNNASTMCNEFISRGYNVVSNGTDNHLMLIDLRNKNITGKDAESALVKADITANKNMVPYDDKSPFITSGIRFGTPAITTRGLVESDIKNVVEMIDKVILNHDNESVLNEVKKDVNQMMSDRPLFNP

SEQ ID NO: 106971 - protein, 245 aa, Unknown
  Bacterial polypetide isolated from the Sargasso Sea
TFMRMSLNSGGHITHGLKISMSGKWFNAIGYDVDKESELIDYDKVEKIALEHKPKLIIAGGSAYSRIIDFKRFREIADKVGAYLMVDMAHFSGLVAGKGYPNPCEHAHVVTSTTHKVFRSARGGIILTNHEDLAKKFNTAVFPGYQGGPLMHIIAAKAAGFLEALKPEFKNYIKSVLSNAKILSETLKNNGFKIYSGGTDSHLMLVDLRPFNVKGNIAAESLSRANITCNKNGIPFDSESPMITS

SEQ ID NO: 106972 - protein, 74 aa, Unknown
  Bacterial polypetide isolated from the Sargasso Sea
KQKCSSNDPASPFVTSGIRIGTPAVTTRGFKEKEIIQVCNWISNIINDFDNEELQKNIKEEVRNLTINFPVYNL

SEQ ID NO: 106973 - protein, 267 aa, Unknown
  Bacterial polypetide isolated from the Sargasso Sea
NVEKLALEHKPKLIIAGGSAYSRVIDFKRFREIADKVGAYLMVDMAHFSGLVAGKGYPNPCDYAHVVTSTTHKVFRSARGGIILTNHEDLSKKFNTAVFPGYQGGPLMHIIAAKAVGFKEALKPEFKDYIKTVLANAKILAETLKNKGFKIYSGGTDTHLMLVDLRPFNVKGNVAAESLSRANITCNKNGIPFDSESPMITSGIRLGSQAATTRGFGLKEFQIVGDLITKTIKGLAENPEDNSKTEDEVRKEVVSLCSNFPIYKHLG

SEQ ID NO: 106974 - protein, 110 aa, Unknown
  Bacterial polypetide isolated from the Sargasso Sea
MKQGVDYKFFSTSLSEIDPLVSDVISSELQRQKDQIELIASENIVSQAVLDAQGSVLTNKYAEGYPGRRYYGGCEFVDKAEELAIERAKDLFDCKFVNVQPHSGAQANQT

SEQ ID NO: 106975 - protein, 119 aa, Unknown
  Bacterial polypetide isolated from the Sargasso Sea
MTQKGASQESLSSVDTEIAGLIDSDLGRQNSHIHLIASENFASKAVMEASGSILTNKYSEGFPGRRYYEGCEVVDEIEQLAIDRACELFEADHANVQPHSGSSANMAVYLSLLEPRDTF

SEQ ID NO: 106976 - protein, 263 aa, Unknown
  Bacterial polypetide isolated from the Sargasso Sea
IEKKPKLIIAGGSAYSRVIDFKKFREIADKVNAYLMVDMAHFSGLVAGKGYPNPIQFAHVVTSTTHKVLRGGRGGIILTNDESIYKKINSAVFPGYQGGPLLHVIAAKAAAFQEALKPNFIDYIKAVLANAKILSETLKNNGFKIFSGGTDTHLMLVDLRPFNVTGKDAETSLCKANITCNKNGIPFDDAKPTITSGIRLGSQAATTRGFGLNEFKKVGELITKVIQGLSKNNDDNSKVETEVRNEVLKLCSNFPIYNHLKED

SEQ ID NO: 106977 - protein, 250 aa, Unknown
  Bacterial polypetide isolated from the Sargasso Sea
KDFFEKSLSETDPDLYKAINDELVRQQNHIELIASENIVSQAVLEAQGSVLTNKYAEGYPGKRYYDGCAHVDVAENLAISRLKKLFNCKFANVQPHSGAQANGAVFLALLKPGDTILGMSLNSGGHLTHGSKASVSGKWFNSVSYDINKETGLIDYEDIEKIALEKKPKLIIAGGSAYSRIIDFAKFRKIADKIEAYLMVDMAHFSGLVAGKGYPNPIDHAHVVTSTTHKVFRSARGGIILTNDEKLSKK

SEQ ID NO: 106978 - protein, 278 aa, Unknown
  Bacterial polypetide isolated from the Sargasso Sea
GYPGKRYYGGCEVVDKIENIAIDRLKALFNVEYANVQPHSGSQANTAVFDAFLKPGDKILGLDLAHGGHLTHGSNVNFSGKIYNSSFYGVNNDGVFDYEKILERAKEVKPNLIIVGASAYSRDINFSKFREIADEVGAFLHADIAHPSGLIAKGFLSDPVPHCHVITSTTHKTLRGPRGGIMMMGKDFDNPFGLKLKNGNLKRMSSILDSAIFPGNQGGPLEHVIAAKAIAFGEALDPQFKKYINQVILNASKLSKNLIDLGYNIVSGGTDNHLLLID

SEQ ID NO: 106979 - protein, 137 aa, Unknown
  Bacterial polypetide isolated from the Sargasso Sea
MNQVIANANTLAQTMMERGFEIVSGGTKNHLMLVSLVKQGITGKAADAALHSANITVNKNSVPNDPQSPFVTSGIRLGTPAITTRGFKETETKILGNLICDVLDNIDNEEEIKKIKEKVLNLCSQFPVYSSSKQAVA

SEQ ID NO: 106980 - protein, 268 aa, Unknown
  Bacterial polypetide isolated from the Sargasso Sea
YNGCEHVDVAEQLAIYRLKELFNCKFANAQPHSGAQANGAVFLALLKPGDTFMGMSLNSGGHITHGLKISMSGKWFNAIGYEVDKESELIDYDNVEKLALEHKPKLIIAGGSAYSRVIDFKRFREIADKVGAYLMVDMAHFSGLVAGKGYPNPCDYAHVVTSTTHKVFRSARGGIILTNHEDLSKKFNTAVFPGYQGGPLMHIIAAKAVGFKEALKPEFKDYIKTVLANAKILAETLKNNGFKIYSGGTDTHLMLVDLRPFNVKGNVA

SEQ ID NO: 106981 - protein, 310 aa, Unknown
  Bacterial polypetide isolated from the Sargasso Sea
ASENFTSPAILEAAGGIMTNKYAEGYPGKRYYGGCIHVDEAENLAIDRLKNLFGVEYGNVQPHSGSQANMAVFMTFLNVGDTIMGLDLAHGGHLTHGNAVNFSGQLYNSVPYQVNKETGRVDFDNVRKLAKEHKPKIIICGGSAYPRYIEFENFSEIAKEVGAFLMADIAHPSGLIAAGIHPSPVPYCDVITSTTHKTLRGPRGGIIMMGRDKENIWGKVAPKSGRVKMISELLDSSVMPGMQGGPLMHIISAKAIAFGEAMKDEFKVYANKIVQNAKLMAQEFMNMDYDIISGGTDTHVILADFTNKNI

SEQ ID NO: 106982 - protein, 268 aa, Unknown
  Bacterial polypetide isolated from the Sargasso Sea
MFSREMNIADFDPELADAMSKEVERQEHHIELIASENYCSPRVMEAQGSQLTNKYAEGYPGKRYYGGCEHVDVVEQLAIDRAKALFGADYANVQPHAGSQANSAVFMALLDAGDTVLGMSLSEGGHLTHGSHVNFSGKTYNAVQYGLNKETGEIDYAQVEALAKEHKPKMIIGGFSAYSGIVDWAKFREIADSVGAYLLVDMAHVAGLVAAGVYPNPLPHAHVVTTTTHKTLAGPRSGLILSSCGDEAIYKKLNSSVFPGNQGGPLAT

SEQ ID NO: 106983 - protein, 315 aa, Unknown
  Bacterial polypetide isolated from the Sargasso Sea
YAEGYPGKRYYGGCEHVDISENLAIERAKKLFNCNFANVQPHSGAQANGAVYLALIKPGDTILGMSLNSGGHLTHGAKPAQSGKWFNAIHYDVKKDTGLIDYENIEKLALENKPKLIIAGGSAYSRVIDFKKFREICDKVNAYLLVDMAHFSGLVAGGVYPNPTKYADVVTSTTHKVLRGPRGGIILTNKEDLIKKFNSAIFPGLQGGPLMHVIAAKAVCFKEALSDEFKNYSKDVINNAKVLADKLIKNGFKIFSGGTDTHLMLVDLRDFNVTGKDVEASLVRSNITCNKNGIPFDTQSPMITSGIRLGTPACT

SEQ ID NO: 106984 - protein, 217 aa, Unknown
  Bacterial polypetide isolated from the Sargasso Sea
LVASKLHPNPIPFCDVVTTTTHKTLRGPRGGLILCKDAEFGKKFDKSVFPGTQGGPLEHIIAAKAVAFGEALHPDFVNYSQQVIKNAKVLASTLISKGIDIVSGGTDNHIVLLDLRSINMTGKVADLLVSEVNITANKNTVPFDPESPFVTSGLRLGTAALTTRGFDENAFAEVGEIIADRLLNPDDSLIENKCKERVLALCNRFPLYENKLEPSIK

SEQ ID NO: 106985 - protein, 286 aa, Unknown
  Bacterial polypetide isolated from the Sargasso Sea
MSSEKNYLNDSYKSFFEDSLSVKDPELYKAIKDELIRQQQHIELIASENIVSQAVLEAQGSVLTNKYAEGYPGKRYYNGCEHVDVAENLAIERLKKLFNCKFANAQPHSGAQANGAVFLALLSPGDTFMGMSLNSGGHITHGLKISMSGKWFNAIGYDVDKESELIDYDNVEKLALEHKPKLIIAGGSAYSRVIDFKRFREIADKVGAFLMVDMAHFSGLVAGKGYPNPCDYAHVVTSTTHKVFRSARGGIILTNHEELAKKFNTAVFPGYQGGPLMHIIAAKAAG

SEQ ID NO: 106986 - protein, 161 aa, Unknown
  Bacterial polypetide isolated from the Sargasso Sea
GGPLMHVIAAKAVAFGEALQPEFKTYIQQVKKNASILGEVLMSNGIDIVTGGTDSHMVLVDLRSKNVTGKDAEESLERAGMTCNKNGVANDPNPPTITSGIRLGSPAATTRGFKEEEFKFIGEKISTIINALSSSNADISMTESSILKDVTELCSNFPIYK

SEQ ID NO: 106987 - protein, 197 aa, Unknown
  Bacterial polypetide isolated from the Sargasso Sea
MNILQNLKESDPVISNFINSEKNRQETHLELIASENFASTAVMQAQGSVLTNKYAEGLPQKRYYGGCEFVDEIEELAIQRAKKLFNANWANVQPHSGAQANAAVFLSLLKPGDTIMGMDLSHGGHLTHGSPVNMSGKWFNAVHYGVNKETSELNFDEIREIALETKPKLIICGYSAYPRTIDFESFRNIADEVGAFL

SEQ ID NO: 106988 - protein, 157 aa, Unknown
  Bacterial polypetide isolated from the Sargasso Sea
GPLMHVIAAKAVAFKEALSDEFVQYQRQVIKNAKILAETLQDGGLDLVTGGTDTHVLLVDLRKKKVTGAIAEKVLGEGNIVCNKNGIPFDSEKPTITSGIRLGTPAATTRGFKEMQFKQVGSWILQILDNVHSEQSSQVISKVKKEVLDLCSEFPIY

SEQ ID NO: 106989 - protein, 132 aa, Unknown
  Bacterial polypetide isolated from the Sargasso Sea
MIKDDNTLSSLIAKEQARQEAHIELIASENYASPAVMAAQGSVLTNKYAEGYPGKRYYGGCEHVDEVEVLAMERLKTLFGADYVNVQPHSGSQANAAVYLALLAPGDTILGMSLDHGGHLTHGSKVNFSGRM

SEQ ID NO: 106990 - protein, 267 aa, Unknown
  Bacterial polypetide isolated from the Sargasso Sea
MSSEKNYLNDSYKSFFEDSLSKKDPELYKAINDELIRQQQHIELIASENIVSQAVLEAQGSVLTNKYAEGYPGKRYYNGCEHVDVAENLAIERLKKLFNCKFANAQPHSGAQANGAVFLALLNPGDTFMGMSLNSGGHITHGLKISMSGKWFNAVGYDVDKKSELIDYDNVEKLALENKPKLIIAGGSAYSRVIDFKRFREIADKVGAYLMVDMAHFSGLVAGKGYPNPCDYAHVVTSTTHKVFRSARGGIILTNHEDLSKKFNTAV

SEQ ID NO: 106991 - protein, 294 aa, Unknown
  Bacterial polypetide isolated from the Sargasso Sea
KYANVQPHSGAQANGAVFLALLKPNDTFMGMSLNSGGHITHGLKISMSGKWFNAISYDVDKKSELIDYDNVEKLALEHKPKLIIAGGSAYSRVIDFKRFRDIADKVGAYLMVDMAHFSGLVAGKGYPNPCDYAHVVTSTTHKVFRSARGGIILSNDIDLGKKFDTAVFPGYQGGPLMHIIAAKAAGFFEALKPEFQNYIKNVLANAKMLAETLKNNGFKIYSGGTDTHLMLVDLRPFNVKGNLASESLCRANITCNKNGIPFDTEKPMITSGIRLGSQAATTRGFGLKEFEKVG

SEQ ID NO: 106992 - protein, 225 aa, Unknown
  Bacterial polypetide isolated from the Sargasso Sea
MSSESKYLNDQYKSFFEDSLSQTDPDLFKAINDELQRQQEHIELIASENIVSQAVLEAQGSVLTNKYAEGYSGKRYYNGCEHVDVAENLANERLKKLFSCKFANSQPHSGAQANGATFLALLKPGDTFMGMSLNSGGHITHGLKISMSGKWFNPIGYDVDKESELIDYDHVEKLALEHKPKLIIAGGSAYSRVIDFKRFREICDKVGAYFMVDMAHFSGLVAGKG

SEQ ID NO: 106993 - protein, 149 aa, Unknown
  Bacterial polypetide isolated from the Sargasso Sea
MSSEGKYLNIDYKNFFEKKLSETDPEVYKAVTDELIRQQNHIELIASENIVSQAVLEAQGSVLTNKYAEGYPGKRYYNGCEHVDVAESLANERLKKLFNCKFANSQPHSGAQANGAVFLALLKPGDTFMGMSLDSGRHITHGLKISMSG

SEQ ID NO: 106994 - protein, 299 aa, Unknown
  Bacterial polypetide isolated from the Sargasso Sea
IKFDKLINNFFKSSLKESDKELYKSVIDEFTRQQNHIELIASENIVSKAVLEAQGSVLTNKYAEGYPGKRYYGGCEHVDLSENLAIERAKKLFNCKFANVQPHSGAQANGAVYLALIKPGDTILGMSLNSGGHLTHGAKPAQSGKWFNAVHYDVDEKSGLIDYENIEKLAVENKPKLIIAGGSAYSRIIDFKKFRDICDKVGAYFLVDMAHFSGLVAGGVYPNPTEYADVVTSTTHKVLRGPRGGIILTNKEDLIKKFNSAIFPGLQGGPLMHVIAAKAVSFKEALTSDFKDYAKVSFK

SEQ ID NO: 106995 - protein, 121 aa, Unknown
  Bacterial polypetide isolated from the Sargasso Sea
MSIALKLNKYLNSFFKLDLKEADKELYKSIEEEFIRQQNHIELIASENIASKAVLEAQGSVLTNKYAEGYPGKRYYGGCEHVDISENLAIERAKKLFDCNFANVQPHSGAQANGAVYLALL

SEQ ID NO: 106996 - protein, 173 aa, Unknown
  Bacterial polypetide isolated from the Sargasso Sea
MSSEKKYLNSNYEDFFEKSLSKTDPDLFKAINDELIRQQNHIELIASENIVSQAVLEAQGSVLTNKYAEGYPGKRYYNGCEHVDVAEQLALERIKKLFNCKYANVQPHSGAQANGAVFLALLKPNDTFMGMSLNSGGHITHGLKISMSGKWFNAISYDVDKKSELIDYDNVKS

SEQ ID NO: 106997 - protein, 198 aa, Unknown
  Bacterial polypetide isolated from the Sargasso Sea
TTHKVFRSARGGIILTNHEDLSKKFNTAVFPGYQGGPLMHIIAAKAVGFKEALKPEFKEYIKTVLANAKILAETLKNNGFKIYSGGTDTHLMLVDLRPFKVKGNAAAESLSRANITCNKNGIPFDTESPMVTSGIRLGSQAATTRGFGLKEFQKVGDLITKTIQGLSENPEDNSKIEDEVRKEVVSLCSNFPIYKHLG

SEQ ID NO: 106998 - protein, 304 aa, Unknown
  Bacterial polypetide isolated from the Sargasso Sea
RANSAVYLALLNAGDTILGMSLPHGGHLTHGAKVSSSGKLYNAVQYGIDENGLIDYDEVERLAVEHKPKMIVAGFSAYSRVLDFPRFRAIADKVGALLFVDMAHVAGLVAAGLYPNPVPFADVVTTTTHKTLRGPRGGLILARKNEEIEKKLNSAVFPGAQGGPLMHVIAAKAVCFKEALEPGFKTYQQQVIDNARAMAAVFVERGYDVVSGGTDNHLMLISLVKQGLTGKAADAALGDAHITVNKNAVPSDPQSPFVTSGIRIGTPAVTTRGFKEGECRTLAGWICDILDDLENPAVIERVRG

SEQ ID NO: 106999 - protein, 239 aa, Unknown
  Bacterial polypetide isolated from the Sargasso Sea
PAQSGKWFNALHYEVDQKTGLIDYEGVEKIAIANKPKLIIAGGSAYSRIIDFKKFREICDKVGAYFLVDMAHFSGLVAGGAYPNPTKYADVVTSTTHKVLRGPRGGIILTNREDLIKKFNSSIFPGLQGGPLMHVIAAKAVCFKEALSDDFKDYTKNVINNAKVLSERLTEKGFKIFSGGTDTHLMLIDLRSFGVTGKDAQASLGRSNITCNKNGIPFDTESPMITSGIRLGTPACTTR

SEQ ID NO: 107000 - protein, 327 aa, Unknown
  Bacterial polypetide isolated from the Sargasso Sea
NDELIRQQNHIELIASENIVSQAVLEAQGSVLTNKYAEGYPGKRYYNGCEHVDIAENLAIERLKKLFNCKYANAQPHSGAQANGAVFLALLKPGDTIMGMSLNSGGHLTHGSKAAVSGKWFKSIAYDVDKKTELINYEEVEKIALENNPKLIIAGGSAYSRVIDFKKFRDIADKVGAYLMVDMAHFSGLVAGKGYPNPIEHAHVVTSTTHKVFRSARGGIILTNDETLSKKFNSAVFPGYQGGPLMHIIAAKAVGFYEALKPEFKDYIKAVLENAKILSETLKNNGFKIYSGGTDTHLMLVDLRPFNVKGNVAAESLSRANITLHKM

SEQ ID NO: 107001 - protein, 102 aa, Unknown
  Bacterial polypetide isolated from the Sargasso Sea
VTSTTHKGFRSARGGIILTNNEALAKKFNSAVFPGYQGGPLMHIIAAKAVGFLEALKPEFREYIKSVLAKAKILSERIKNNGFKIYSGGTDTHLKLVDLRPF

SEQ ID NO: 107002 - protein, 77 aa, Unknown
  Bacterial polypetide isolated from the Sargasso Sea
MNPLNQHLHEQDPDIAAFIAQENERQEHHIELIASENYTSKAVMQAQGSQLTNKYAEGYPGKRYYGGCEAVDKVEQQ

SEQ ID NO: 107003 - protein, 250 aa, Unknown
  Bacterial polypetide isolated from the Sargasso Sea
AYSRIIDFKKFREIADSIGAYLMVDMAHFSGLVAGHGYPNPIDYADVVTSTTHKVLRGGRGGIILTNREDLFKKFNSAVFPGYQGGPLMHVIAAKAAAFQEALKPEFKEYIKSVLANAKILSETLKNNGFKIFSGGTDTHLMLVDLRPFKVTGKAAEVSLCNSNITCNKNGIPFDTEKMTITSGIRLGSQAATTRGFGLNEFKKVGELITKVVKGLSKNPDDNSKIESEVRKEVIDLCSNFPIYNHLFKN

SEQ ID NO: 107004 - protein, 75 aa, Unknown
  Bacterial polypetide isolated from the Sargasso Sea
MFTMDMKIAGFDDELNDAMRKEIKRQEEHVELIASENYASPRVLEAQGSLMTNKYAEGYPGKRYYGGCENVDVAE

SEQ ID NO: 107005 - protein, 179 aa, Unknown
  Bacterial polypetide isolated from the Sargasso Sea
MSKIKSNINGSYQDYFDRDLSSRDPDLYNSIKLELQRQQEHIELIASENIVSKAVLDAQGSILTNKYAEGYPGKRYYGGCEFVDKAEELALERAKKLFNCDYANVQPHSGAQANGAVYLALLNPGDTILGMSLNSGGHLTHGAKVSLSGKWLKSFHYEVDKKTGLIDYDQVKKLALEHK

SEQ ID NO: 107006 - protein, 68 aa, Unknown
  Bacterial polypetide isolated from the Sargasso Sea
MSTATKINKFLNNFFEDSLKTSDREIFESIHKESSRQQNHIELIASENIVSKAVLEAQGSVLTNKYAE

SEQ ID NO: 107007 - protein, 218 aa, Unknown
  Bacterial polypetide isolated from the Sargasso Sea
VMTNKYAEGYPGRRYYGGCEYVDMAEELAIERIKKLFNCNFANVQPNSGSQANQAVFMSLMKPGDTFLAMDLASGGHLTHGAKPNLSGKWFNAIHYGVNRETEIIDYSQVEELAKLHKPKVIIAGGSAVPRQINFKEFKRIAELVGAYLMVDMAHFSGLAAAGCHPNPLDFADVATSTTHKTLRGPRGGIILTNDEELAKKFNSAIFPGLQGGPLMHK

SEQ ID NO: 107008 - protein, 117 aa, Unknown
  Bacterial polypetide isolated from the Sargasso Sea
MQRKKKLFTDNLNISDPELFSVIEKENNRQEQEIELIASENITSLAVMQAQGSVMTNKYAEGYPGRRYYGGCEYVDMAEELAIERIKKLFNCKFANVQPNSGSQANQAVFMSLMKPR

SEQ ID NO: 107009 - protein, 63 aa, Unknown
  Bacterial polypetide isolated from the Sargasso Sea
MFSRDLTIAKYDADLFAAMEQEAVRQEEHIELIASENYTSPAVMEAQGSVLTNKYAEGYPGKR

SEQ ID NO: 107010 - protein, 225 aa, Unknown
  Bacterial polypetide isolated from the Sargasso Sea
MAHFSGLVAGKGYPNPVDYADVVTSTTHKVLRGARGGIILTNREDLIKKFNSAVFPGYQGGPLMHVVAAKAVAFQEALKPSFKEYIKSVLANAKILSETLKSNGFKIFSGGTDTHLMLVDLRPFKVTGKTAEISLCKANITCNKNGIPFDTEKMTITSGIRLGSQAATTRGFGLNEFKKVGELITKVIKGLSQNPNDNSIIESEVRKEVIELCSKFPIYNHLLKN

SEQ ID NO: 107011 - protein, 301 aa, Unknown
  Bacterial polypetide isolated from the Sargasso Sea
EFNFFNDEIKNTDPEVYETLKKELERQQNQIELIASENIASKAVLNAQGSVMTNKYAEGYPGNRYYGGCEFVDEAENIAIERVKKLYNCKYANLQPHSGAQANQAVFLALLKPHDTILGMSLASGGHLTHGAKPNLSGKWFNPIQYGVKKDGNDKDLIDYDEVEALAIEHKPKLIIAGASAYPRIIDWKKFREIADKIGAYFLVDMAHYSGLIAGKQYPNPIEYAHIVTSTTHKTLRGARSAMILTNDETLIKKINSAVFPGLQGGPLMHVMAGKAVAFGEALKPEFEEYIKKVIVNAKVM

SEQ ID NO: 107012 - protein, 160 aa, Unknown
  Bacterial polypetide isolated from the Sargasso Sea
MHIIAAKAAGFQEALKPEFKDYIKSVLANAKILSETLKNNGFKIYSGGTDTHLMLVDLRPFNVKGNTAAASLSRANITCNKNGIPFDTESPMITSGIRLGSQAATTRGFGLKEFQKVGELITKTVKGLSNNPNDNSKIEDEVRKEVIQLCSSFPIYKNLK

SEQ ID NO: 107013 - protein, 101 aa, Unknown
  Bacterial polypetide isolated from the Sargasso Sea
MTQKGASQESLSSVDTEIAGLIDSDLGRQNSHIHLIASENFASKAVMEASGSILTNKYSEGFPGKRYYEGCEVVDEIEQLAIDRACELFEADHANVQPHSG

SEQ ID NO: 107014 - protein, 240 aa, Unknown
  Bacterial polypetide isolated from the Sargasso Sea
KSIAYDVDKKTELINYEEVEKIALENNPKLIIAGGSAYSRVIDFKKFRDIADKVGAYLMVDMAHFSGLVAGKGYPNPIEHAHVVTSTTHKVFRSARGGIILTNDETLSKKFNSAVFPGYQGGPLMHIIAAKAVGFYEALKPEFKDYIKSVIENAKILSETLKNNGFKIYSGGTDTHLMLVDLRPFNVKGNVAAESLSRANITCNKNGIPFDDESPMITSGIRLGSQAATTRGFGLKEFKK

SEQ ID NO: 107015 - protein, 145 aa, Unknown
  Bacterial polypetide isolated from the Sargasso Sea
MSVIKIDKYLNSFFKLKLQDADKELYESIRDEFIRQQNHIELIASENIVSKAVLEAQGSVLTNKYAEGYPGKRYYGGCEYVDVSENLAIERAKKLFDCKFANVQPHSGAQANGAVYLALLKPGDTTLAMSLNSGGHLTHGAKPAQ

SEQ ID NO: 107016 - protein, 233 aa, Unknown
  Bacterial polypetide isolated from the Sargasso Sea
MSIAVKLNKYLNSFFKLDLKNADKELYKSIEEEFDRQQNHIELIASENIVSKAVLEAQGSVLTNKYAEGYPGKRYYGGCEHVDISENLAIERAKKLFNCKFANVQPHSGAQANGAVYLALLKPGDTTLAMSLNSGGHLTHGAKPAQSGKWFNALHYEVDKETGLIDYESVEKLALENKPKLIIAGGSAYSRIIDFKKFREICDKVGAYLLVDMAHFSGLVAGGAYPNPTEYAD

SEQ ID NO: 107017 - protein, 253 aa, Unknown
  Bacterial polypetide isolated from the Sargasso Sea
EHKPKMLIAGASAYPRKIDWKRFREIADKVGAYFLVDMAHYSGLVAGKQYPNPIEHAHVVTSTTHKTLRGARSAMILTNHEDLYKKINSAVFPGLQGGPLMHVIAARAVCFGEALKPEFEEYIKNVIASAKVMAKTLVDRGFRIVTGGTDSHIVWLDLTPKGLTGDKAEKILEEVGLACNKNAIPYDPNPPKITSGLRFGTAAATTRGFNQKDFEQVGNMIADILDSLLLEENERTDVFSKTRKDVIELCKKY

SEQ ID NO: 107018 - protein, 182 aa, Unknown
  Bacterial polypetide isolated from the Sargasso Sea
TNHEDLAKKFNTAVFPGYQGGPLMHIIAAKAAGFLEALQPEFQDYIKSVLANAKMLAETLKNNGFKIYSDGTDTHLMLVDLRPYNVKGNIAAESLSRANITCNKNGIPFDTEKPMITSGIRLGTQAATTRGFGLSEFKTVGELITKTLKGLSENPTDNSKIEEEVKNEVISLTSSFPIYKNL

SEQ ID NO: 107019 - protein, 173 aa, Unknown
  Bacterial polypetide isolated from the Sargasso Sea
MREIMDHELEKILEKEQNRQKNSAVFIASENYASEAVRKYTSSILTNKYAEGYPGARYYAGCEYVDQIENLAIERGKNIFGSNHINVQPHSGSQANMAAYISLLSPGDKILSLSLDHGGHLSHGHNVNFSGKIYEIHNYFLDKDSEMIDFDALQKVADTVQPKLIICGFSAYF

SEQ ID NO: 107020 - protein, 163 aa, Unknown
  Bacterial polypetide isolated from the Sargasso Sea
MMHVIAAKAAAFHEALQPSFREYIKSVLANAKILSETLKNNGFKIFSGGTDTHLMLVDLRPFKVTGKAAEISLGKANLTCNKNGIPFDTEKMTITSGIRLGSQAATTRGFGLNEFKKVGDLITKVIKGLSQSPDDNSKTESEVKKEVIELCSKFPIYSHLFKN

SEQ ID NO: 107021 - protein, 209 aa, Unknown
  Bacterial polypetide isolated from the Sargasso Sea
TSTTHKTLRGPRGGIIMMGEDFENKWAKVAPKSGRIKMVSELLDASVMPGVQGGPLMHIIAAKAIAFREALNSNFKNYANSIISNAKVLANELMNMDYNLITGGTDTHVILIDLSNKNITGKTAELILGKAGITANKNMVPYDTKSPFITSGIRLGTPAITTRGMGKNEMKMIASWIDLAVSNHENDAILLHIKSKVKELCSSFPIYEN

SEQ ID NO: 107022 - protein, 119 aa, Unknown
  Bacterial polypetide isolated from the Sargasso Sea
MSKIKSDINGSYQDYFDKDLSLRDPDLYNSIKQELLRQQQHIELIASENIVSKAVLDAQGSILTNKYAEGYPGKRYYGGCEFVDKAEELALERVKKLFNCKYANVQPHSGAQANGAVYL

SEQ ID NO: 107023 - protein, 318 aa, Unknown
  Bacterial polypetide isolated from the Sargasso Sea
ETLCKKRCLETYRLNPEEWDVNVQPYSGSSANFEAYTGLIKPHDRIMGLDLPSGGHLTHGFYTPKKKISATSIYFESLPYKLDEKTERINYDELEKNAMLFRPKILIAGSSAYPRDWDYQRMREIADKCGSYLLADMAHVSGLVASQIAPDPFKYCDVVTTTTHKTLRGPRAGIIFYRKDERNLGQGINESVFPGLQGGPHNHIIAAIAVAMKQANTKEFKEYSEQVVKNAQYLAEKLMDNGYKIVTDGTDNHTILWNLKNTGLTGSKMEKILEMINISVNKNSVIGDKSALNPSGIRLGTPSLTTRGFVEKDMMYVA

SEQ ID NO: 107024 - protein, 250 aa, Unknown
  Bacterial polypetide isolated from the Sargasso Sea
MFSKNVKVEGFDDELFNAMEGERRRQEEHIELIASENMASPRVLECQGSVLTNKYAEGYPAKRYYGGCEFVDVAEQLAIDRAIELFGADWANVQSHSGSQANGAVFHALLEPGDTIMGMSLAHGGHLTHGATVNVSGRIYNAVQYGLNAETGEIDYDEAEKLALKTKPKLIITGFSAYSRVLDWQRFRDIADKVGAYMLSDIAHIAGLIAVDEYPSPVQIADVTTTTTHKTIRGPRSGLIMGKANGRNTK

SEQ ID NO: 107025 - protein, 142 aa, Unknown
  Bacterial polypetide isolated from the Sargasso Sea
MVGFFDAGLGDRDPAVYAAIQQELERQKNQIELIASENIVSRAVLEAQGGVMTNKYAEGYPGRRYYGGCEFVDVVEALAIERAKKLFDCQFVNVQPHSGAQANGAVMMALLQPGDTILGLSLAAGGHLTHGAKPAQSGKWFN

SEQ ID NO: 107026 - protein, 207 aa, Unknown
  Bacterial polypetide isolated from the Sargasso Sea
YADVVTSTTHKVLRGGRGGIILTNREDIFKKINSAVFPGYQGGPLMHVIAAKAAAFEEALKPDFKEYIKSVLDNAKILSETLKNNGFKIFSGGTDTHLMLVDLRPFKVTGKDAETSLGKANITCNKNGIPFDTEKMTITSGIRLGTQAVTTRGFGLNEFKKVGDMITTVIQGLSKSPTDNSKAESEVKKEVIELCSKFPIYNYLGNN

SEQ ID NO: 107027 - protein, 129 aa, Unknown
  Bacterial polypetide isolated from the Sargasso Sea
VVTSTTHKTLRGPRSGIILARKNEEIEKKLNSAVFPGSQGGPLMHVIAAKAICFKEALDPEFKSYIQQVIDNAKIMAKTIISNGIDVVSNGTENHIVLVDLRNKGITGKDLEAVLGSINITVNKNSVPN

SEQ ID NO: 107028 - protein, 242 aa, Unknown
  Bacterial polypetide isolated from the Sargasso Sea
IIDFKKFREICDKVGAYLLVDMAHLSGLVAGGAYPNPTKYADVVTSTTHKVLRGPRGGIILTNNEELAKKFNSAIFPGLQGGPLMHVIAAKAVCFKEALSNEFKIYTKNVIKNAKILSERLSKKGFKIFSGGTDTHLMLLDLRSFKVTGKDAQASLGRANITCNKNGIPFDTESPFITSGIRLGTPACTTRGFKEEEFKLIADLIHKVIKGLSENKADNSKIEEEVKKEIIDLCSSFPIYGN

SEQ ID NO: 107029 - protein, 226 aa, Unknown
  Bacterial polypetide isolated from the Sargasso Sea
THGSSVNFSGQLYNTVSYQVEKDTGLVNFDHLHKIAKEHKPKIIICGGSAYPRHIEFEKFRDIASDVGAFLMADIAHPSGLVAAGLHPSPMPFCDVVTTTTHKTLRGPRGGMIMMGEDFENQWDITAPKSGRTKLVSELLNSAVMPGVQGGPLMHIIAAKALAFGEALEPSFKLYAQNIINNAKVMSDELLSKGYKLISGGTDTHVILIDLSNKNVTGKSAEKALE

SEQ ID NO: 107030 - protein, 93 aa, Unknown
  Bacterial polypetide isolated from the Sargasso Sea
MSSEKSYLNDSYKSFFEDSLSVKDPELYKAIKDELIRQQQHIELIASENIVSQAVLEAQGSVLTNKYAEGYPGKRYYNGCEHVDVAENLAIER

SEQ ID NO: 107031 - protein, 272 aa, Unknown
  Bacterial polypetide isolated from the Sargasso Sea
PHSGAQANQAVFLALLQPHDTILGMSLASGGHLTHGAKPNLSGKWFNAVQYGVKKDGNDRDLIDYDEVEALALKHKPKMIIAGASAYPRIIDWNKFREIADKVGAYFLVDMAHYSGLVAGKQYPNPIDHAHIVTSTTHKTLRGARSAMILTNHEDLYKKINSAVFPGLQGGPLMHVIAARAVCFGEALKPEFEEYIKNVIASAKVMSQTLIDRGFRIVTGGTDSHIVWLDLTPKGLTGDKAEKILEEVGLACNKNAIPYDPNPPKITSGLRL

SEQ ID NO: 107032 - protein, 86 aa, Unknown
  Bacterial polypetide isolated from the Sargasso Sea
MSSEKNYLNDSYKSFFEDSLSTKDPELYKAIKDELIRQQQHIELIASENIVSQAVLEAQGSVLTNKYAEGYPGKRYYNGCEHVDVA

SEQ ID NO: 107033 - protein, 247 aa, Unknown
  Bacterial polypetide isolated from the Sargasso Sea
IDRAKELFNADYANVQPHSGSSANAAAYLALLEPNDTILGMSLDHGGHLTHGSKVNFSGRNYKSFQYGLNSETHDIDYDQVRDLAKKYNPKLIIAGFSAFSGLVDWSKFREIADEVNAYFLVDMAHISGLVAAGMYPSPVPFADVVTSTTHKTLRGPRSGIILAKENEEIQKKLNSAVFPGSQGGPLMHVVAAKAVCFKEALEPEFKTYMSQVISNAKTMAKTIIGRGVDIVKGGTENHMILVDLRN

SEQ ID NO: 107034 - protein, 226 aa, Unknown
  Bacterial polypetide isolated from the Sargasso Sea
MLDKKSNLKTDAIFSNKKDIELYDAELWKSFEKEMVRQEEHIELIASENYASQRVLQAQGSVLTNKYAEGYPDKRYYGGCEFVDIAEKLAIDRAKELFNADYANVQPHSGSSANAAAYLALLEPNDAILGMSLDHGGHLTHGSKVNFSGRNYKSFQYGLNPETHDIDYDQVRDLAKKHNPKLIIAGFSAFSGLVDWSIFREIADEVNAYFLVDMAHISGLVAAGMY

SEQ ID NO: 107035 - protein, 149 aa, Unknown
  Bacterial polypetide isolated from the Sargasso Sea
MSSESKYLNDQYKSFFEDSLSKTDPDLYKAISDELQRQQEHIELIASENIVSQAVLEAQGSVLTNKYAEGYSGKRYYNGCEHVDVAENLANERLKKLFNCKFANSQPHSGAQANGATFLALLKPGDTFMGMSLNSGGHITHGLKISMSG

SEQ ID NO: 107036 - protein, 115 aa, Unknown
  Bacterial polypetide isolated from the Sargasso Sea
MPWPSLKDEELFEIIKREIHRQNTTLQLIASENFASPAVLAATGSVFTNKYSEGYPGKRYYGGNVHVDEAEILACERIKALFGAEHANVQPHSGASANMAVYQALLEPGDTVLGL

SEQ ID NO: 107037 - protein, 220 aa, Unknown
  Bacterial polypetide isolated from the Sargasso Sea
DKVEAYFLVDMAHYSGLVAGKQYPNPIEHAHVVTSTTHKTLRGARSAMILTNHEDLYKKINSAVFPGLQGGPLMHIIAARAVCFGEALKPEFEDYIKNVITSAKVMSQTLVDRGFRIVTGGTDSHIVWLDLTPKGLTGDKAEKILEEVGLACNKNAIPYDPNPPKVTSGLRFGTAAATTRGFNQEDFKQVGNMIADILDSLLLSEDDRKKVFNKTRKDVI

SEQ ID NO: 107038 - protein, 90 aa, Unknown
  Bacterial polypetide isolated from the Sargasso Sea
MSSESKYLNDQYKSFFEDGLSKTDPDLYKAINDELQRQQEHIELIASENIVSQAVLEAQGSVLTNKYAEGYSGKRYYNGCEHVDVAENLA

SEQ ID NO: 107039 - protein, 270 aa, Unknown
  Bacterial polypetide isolated from the Sargasso Sea
NLKESDPVISNFINSEKNRQETHLELIASENFASIAVMQAQGSVLTNKYAEGLPQKRYYGGCEFVDEIEELAIQRAKKLFNANWANVQPHSGAQANAAVFLSLLKPGDTIMGMDLSHGGHLTHGSPVNMSGKWFNAVHYGVNKETSELNFDEIREIALETKPKLIICGYSAYPRTIDFESFRNIADEVGAFLMADIAHIAGLVASKLHPNPIPYCDVVTTTTHKTLRGPRGGLILCKDAEFGKKFDKSVFPGTQGGPLEHIIAAKAVALE

SEQ ID NO: 107040 - protein, 274 aa, Unknown
  Bacterial polypetide isolated from the Sargasso Sea
LESERKRQEQHIELIASENYASPRVMEAQGGILTNKYAEGYPGKRYYGGCEFVDVAEQLAIDRAKKLFKADFANVQPHSGASANAAIFLALLNAGDKILGMSLDHGGHLTHGSKVNFSGKIYESYSYGINPETGDIDYDEVKSLAEEHQPKLIICGFSAFSGILDFKKFREIADSIGAYLLADISHVSGLVAAGLYPNPFPHAHVVSTTTHKTLVGPRGGLILAGKDEELHKKLNSALFPGSQGGPLMHVIAAKAVCFKEAMEPEFVEYQQQIL

SEQ ID NO: 107041 - protein, 105 aa, Unknown
  Bacterial polypetide isolated from the Sargasso Sea
MLLDLRSLKVTGKDAQASLGRANITCNKNGIPFDTESPFITSGIRLGTPACTTRGFKEEEFKLVADLIHKVIKGLSENKSDNSKIENEVKKEIIDLCSSFPIYGN

SEQ ID NO: 107042 - protein, 280 aa, Unknown
  Bacterial polypetide isolated from the Sargasso Sea
AKPNLSGKWFNAVQYGVKKDGNDKDLIDYDEVEALALEHKPKMIIAGASAYPRTIDWKKFREIADKVGAYFLVDMAHYSGLVAGKQYPNPIEHAHVVTSTTHKTLRGARSAMILTNHEDLYKKINSAVFPGLQGGPLMHVIAARAVCFGEALKPEFEEYIKNVIASAKVMAKTLVDRGFRIVTGGTDSHIVWLDLTPKGLTGDKAEKILEEVGLACNKNAIPYDPNPPKITSGLRFGTAAATTRGFNQKDFEQVGNMIADILDSLLLEDNERNVVFNKTR

SEQ ID NO: 107043 - protein, 305 aa, Unknown
  Bacterial polypetide isolated from the Sargasso Sea
SYELNSGGHLTHGAKPAQSGKWFNALHYDVDKKTGLIDYDAVEKLATENKPKLIIAGGSAYSRVIDFKRFREICDKVGAYLLVDMAHFSGLVAGGVYPNPTKYADVVTSTTHKVLRGPRGGIILTNNEELIKKFNSAIFPGLQGGPLMHVIAAKAVCFKEALSEDFKEYTKNVINNAKVLSESLTEKGFKIFSGGTDTHLMLLDLRSFNVTGKHAQASLGRANITCNKNGIPFDTESPMITSGIRLGTPACTTRGFGKQEFRLIADLIHKVIKGLSENKLDNSKIEKEVKKEIIKLCATFPIYEN

SEQ ID NO: 107044 - protein, 141 aa, Unknown
  Bacterial polypetide isolated from the Sargasso Sea
MYDRKILVEQTDPELFAAIQAENARQEHHIELIASENYASPAVMWAQGTQLTNKYAEGYPGKRYYGGCEHVDVAEQLAIDRVKKIFGADAANVQPHCGASANEAVFLAFLKPGDTIMGMSLAEGGHLTHGMPLNMSGKWFN

SEQ ID NO: 107045 - protein, 279 aa, Unknown
  Bacterial polypetide isolated from the Sargasso Sea
MSENLQKSISPKIIICGGSAYPRYIEFEIFSEIAKEVGAFLMADIAHPSGLIAAGVHPSPVPYCDVITSTTHKTLRGPRGGIIMMGRDKENTWGKIALKSGRVKMISELLDSSVMPGMQGGPLMHIISAKAIAFGEAMKDEFKVYANKIVENAKLMSQELINMDYNIISGGTDTHVILVDLTSKNISGKAAERALEKAGITVNKNMVPFDKKSPFITSGIRIGTPAITTRDMGVQEMKEIAKLIDRVIIDPENDENIQKVKSEVEELCESYPIYKEFSN

SEQ ID NO: 107046 - protein, 299 aa, Unknown
  Bacterial polypetide isolated from the Sargasso Sea
ISTSLRRTSKWSSIFSFIKPGDTFMGMSLDSGGHITHGLKISMSGKWFNAISYDVDKKTELLDYDVIEKMALEHKPKLIIAGASAYSRVIDFKRFREICDKIDAYLMVDMAHFSGLVAGKGYPNPVDHAHVVTSTTHKVFRSARGGIILTNHEDLAKKFNTAVFPGYQGGPLMHIIAAKAVGFLEALKPEFREYISSVLANAKMLAETLKNNGFKIYSGGTDTHLMLVDLRPFNVKGNIAADSLSKANITCNKNGIPFDTESPMVTSGIRLGSQAATTRGFGLKEFEKVGNLITKVIKG

SEQ ID NO: 107047 - protein, 193 aa, Unknown
  Bacterial polypetide isolated from the Sargasso Sea
MSSEKNYLNDSYKSFFEDSLSVKDPELYKAIKDELIRQQQHIELIASENIVSQAVLEAQGSVLTNKYAEGYPGKRYYNGCEHVDVAENLAIERLKKLFNCKFANAQPHSGAQANGAVFLALLSPGDTFMGMSLNSGGHITHGLKISMSGKWFNAIGYDVDKESELIDYDNVEKLALEHKPKLIIAGGSAYSRV

SEQ ID NO: 107048 - protein, 265 aa, Unknown
  Bacterial polypetide isolated from the Sargasso Sea
VQPHSGSQANAAVYMALLSPGDTILGLSLDHGGHLTHGAKPNFSGKLYNAVQYGINPESGEIDYEQVAELAKTHKPKMIVAGFSAYSRIVDWQRFRDIADSVGAWLMVDMAHVAGLVAAGVYPNPVKAAHVVTTTTHKTLRGPRGGLILCQSAPELEKKFNSLIFPGIQGGPLMHVIAAKAVALKEAMSDDYKVYQQQVVDNARAMAEVFIERGFDVVSGGTDNHMFLLSLISKGMTGKAADALLNSVNITVNKNTVPDDPQSPF

SEQ ID NO: 107049 - protein, 259 aa, Unknown
  Bacterial polypetide isolated from the Sargasso Sea
FFDNNLSNTDPDLFKSIKQEIERQQQHIELIASENIVSKAVLDAQGSIMTNKYAEGYPAKRYYGGCEFVDRAEELALERVKKLFNAKYANVQPHSGAQANGAVYLALLKPGDPILGMSLNSGGHLTHGAKVSLSGKWLNSFHYEVNKETGLIDYENVESLAIQHKPKIIIAGGSAYSRIIDFKKFKDIAKKVDAYLMVDMAHFSGLVAGKGYPNPIDHADVVTSTTHKVLRGARGGIILTNREDIFKKINSAVFPRISG

SEQ ID NO: 107050 - protein, 294 aa, Unknown
  Bacterial polypetide isolated from the Sargasso Sea
LLKFCFRPVMAAAGSVLTNKYAEGLPGKRYYGGCEVVDEIEDIARNRLKKLFGANWVNVQPHSGAQANAAVMLGILNPGDKILGFDLAHGGHLTHGSNVNFSGKIYSSCFYGVKKNNGLLDYNQLEKVAFKEKPKLIICGASSYSRDWDYKKIREIADSVNAILLADIAHPSGLIARGLLNDPLDHCHIVTSTTHKTLRGPRGGIIMMRKDYDNPLGLKSPKGNLKSLSSVLDSAVFPGTQGGPLEHIIAAKAVSFEEALSENYMKYILQVKKNAKTMAESLIEKNYNIISNGT

SEQ ID NO: 107051 - protein, 220 aa, Unknown
  Bacterial polypetide isolated from the Sargasso Sea
MAHFSGLVAAEEYPNPLEYADVVTSTTHKTIRGARGGMILSNNLELGKKFNSAVFPGYQGGPLMHVIAGKAVAFGEALKPEFKEYIKQVITNAKILSDTLVSGGLKIVSGGTDTHLILVDLTPMDLTGDSAQTSLEAANITCNKNGIPKDPKPPKITSGIRLGTPAATTRGFKENEFKLVGELILETLVGLKSNPTDNSNVEKAVKEKVINLCKEFPIYS

SEQ ID NO: 107052 - protein, 315 aa, Unknown
  Bacterial polypetide isolated from the Sargasso Sea
FTALVQPGDTILGMSLDAGGHLTHGAKPNQSGKWFNAVQYGVRKQDNLIDYDQIEELAKEHNPKLIIAGGSAIPRTIDFEKIRSIADSVGAYVLADVAHFAGLIAAGEYPSPFPHCHVATTTTHKTLRGPRGGMILTNDADLAKKFNSAIFPGIQGGPLMHVIAAKAVAFGEALRPEFKQYIKQVIINAQALSDELIKGGLDTVTHGTDTHVLLVDLRPKGVKGNTTEKALERAHITCNKNGVPFDPEKPAVTSGIRLGSPAGTTRGFDENDFRQIGRWIIEVVEGLAKNGEEGNSAVEEKVKSEVATLCAKYPL

SEQ ID NO: 107053 - protein, 289 aa, Unknown
  Bacterial polypetide isolated from the Sargasso Sea
DTFMGMSLNSGGHITHGLKISMSGKWFNPIGYDVDKESELIDYDHVEKLALEHKPKLIIAGGSAYSRVIDFKRFREISDKVGAYLMVDMAHFSGLVAGKGYPNPCEHAHVVTSTTHKVFRSARGGIILTNHEDIAKKINTAVFPGYQGGPLMHIIAAKAAGFLEALKPEFKDYIKSVLANAKILSETLKNNGFKIYSGGTDTHLMLVDLRPFNVKGNLAAESLSKANITCNKNGIPFDSESPMITSGIRLGSQAATTRGFGSKEFEKVGELNTKVIDGLSKNPNDNSIM

SEQ ID NO: 107054 - protein, 184 aa, Unknown
  Bacterial polypetide isolated from the Sargasso Sea
ILTNHEDLAKKFNTAVFPGYQGGPLMHVIAAKAAGFLEALQPEFKDYIQSVLANAKMLAETLKNNGFKIYSDGTDTHLMLVDLRPYNVKGNLASESLSRANITCNKNGIPFDTEKPMITSGIRLGTQAATTRGFGLNEFKTVGELITKTLKGLSENPTDNSKIENEVKNEVIDLTSSFPIYKNL

SEQ ID NO: 107055 - protein, 240 aa, Unknown
  Bacterial polypetide isolated from the Sargasso Sea
KKFREIADKVGAYFLVDMAHYSGLVAGKQYPNPIEHAHVVTSTTHKTLRGARSAMILTNHEDLYKKINSAVFPGLQGGPLMHVIAARAVCFGEALKPEFEEYIKNVIASAKVMAKTLVDRGFRIVTGGTDSHIVWLDLTPKGLTGDKAEKILEEVGLACNKNAIPYDPNPPKITSGLRFGTAAATTRGFNQKDFEQVGNMIADILDSLLLEENERSEVFNKTRKDVIELCKKYPIYSEAF

SEQ ID NO: 107056 - protein, 260 aa, Unknown
  Bacterial polypetide isolated from the Sargasso Sea
VRSLAIEHQPKLIIAGFSAFTGIIDWKKFREIADETGAYFLVDMAHVSGLVAADLYPSPVPYADVVTSTTHKTLRGPRSGIILAKANEEIEKKLNSAVFPGSQGGPLMHVVAAKALCFKEALDPEFKIYIKQVMDNAKTMAETIMSNGIDIVSNGTENHIILVDLRSKGITGKDLERVLGSVNITVNKNSVPNDPASPFVTSGIRIGTPAATTRGFKEKEIIQVANWISDIINNFDNEELQKTIKEEVHKLTTNFPVYNL

SEQ ID NO: 107057 - protein, 196 aa, Unknown
  Bacterial polypetide isolated from the Sargasso Sea
DVVTATTHKALRGPRGGLILSKEEFGKDIDKNIFPGAQGGAINNQIAAKAVCFKEAMSQEYKDYAQQVINNANSLAESFIGEGLRVVSGGTSNHLVLVDTGSVDDELTGKEASNLLNDMGITLNRNAIPFDTRSPFITSGIRMGTPCITTCGMKEEESTKVGYLISEALKQRDNQDQIKELQEEIRSLAKQFQPYE

SEQ ID NO: 107058 - protein, 207 aa, Unknown
  Bacterial polypetide isolated from the Sargasso Sea
DYAHVVTSTTHKVFRSARGGIILSNDEDLGKKFDTAVFPGYQGGPLMHIIAAKAAGFFEALKPEFQTYIKNVLANAKILAETLKNNGFKIYSGGTDTHLMLVDLRPFNVKGNIAAESLCRANITCNKNGIPFDTEKPMITSGIRLGSQAATTRGFDLKEFEKIGELITKVIKGLSKNPDDNSEVENEVRNEVVSLCSNFPIYKNLNK

SEQ ID NO: 107059 - protein, 274 aa, Unknown
  Bacterial polypetide isolated from the Sargasso Sea
MSKETNYIDTSYQNFFEKHLSETDPALFKAINDELVRQQNHIELIASENIVSQAVLDAQGSVLTNKYAEGYPGKRYYNGCEHVDVAEQLALERIKKLFNCKYANVQPHSGAQANGAVFLALLKPNDTFMGMSLNSGGHITHGLKISMSGKWFNAISYDVDKNSELIDYDNVEKLALEHKPKLIIAGGSAYSRVIDFKRFREIADKVGAYLMVDMAHFSGLVAGRGYPNPCDYAHVVTSTTHKVFRSARGGIILSNDIDLGKKFDTAVFPGYQGG

SEQ ID NO: 107060 - protein, 238 aa, Unknown
  Bacterial polypetide isolated from the Sargasso Sea
MDFFTKPLNEIDQEISLAIDGELKRQQNQIELIASENIVSKAVLEAQGSVLTNKYAEGYASARYYGGCEFVDIAEDLAIKRLKDLYKCEYANVQPHSGAQANGAVLLALIKPGDTILGMSLDAGGHLTHGSAPSLSGKWFNALQYGLDDQGLINYDEVESIALEYKPKIIIAGGSAYSRIIDFKKFREIADKVDAYLHVDMAHFSGLVAAGEHPNPLEYADVVTSTTHKTIRGARGGM

SEQ ID NO: 107061 - protein, 276 aa, Unknown
  Bacterial polypetide isolated from the Sargasso Sea
SFNYDVDKETGLIDYNQVEDLAKQHKPKLIIAGGSAYSRIIDFKRFRDIADKVSAYLMVDMAHFSGLVAGKGHPNPIQYADVVTSTTHKVLRGARGGIILTNREDIIKKVNSAVFPGYQGGPLMHIIAAKAVAFQEALQPSFKNYIKSVLENAKILSETLKNNGFKIFSGGTDTHLMLVDLRPFNVTGKDAESSLGRANITCNKNGIPFDTQKMTITSGIRLGTQAATTRGFGLDEFKKVGELITKVINGLSKNSEDNSLIENEVRNEVIKLCTKF

SEQ ID NO: 107062 - protein, 132 aa, Unknown
  Bacterial polypetide isolated from the Sargasso Sea
MSSETKYLNSEYKDFFEKSLLDSDPEIYKAINDELVRQQNHIELIASENIVSQAVLEAQGSVLTNKYAEGYPGKRYYNGCEHVDVAEQLAIDRLKELFNCKFANAQPHSGAQANGAVFLALLKPGDTFMGMS

SEQ ID NO: 107063 - protein, 117 aa, Unknown
  Bacterial polypetide isolated from the Sargasso Sea
MSTATKFTKLKNIFFESNLSETDKELNDSIKKEFVRQNEHIELIASENIVSKAVLGAQGSVLTNKYAEGYVGKRYYGGCEFVDISEKLAIERAKKLFNCNFARCSASLRRSSQWCCL

SEQ ID NO: 107064 - protein, 198 aa, Unknown
  Bacterial polypetide isolated from the Sargasso Sea
STTHKVFRSARGGIILTNHEDLAKKFNTAVFPGYQGGPLMHIIAAKAAGFLEALQPEFQDYIKSVLANAKMLAETLKNNGFKIYSDGTDTHLMLVDLRPYNVKGNLAAESLSRANITCNKNGIPFDTEKPMITSGIRLGTQAATTRGFGLSEFKTVGELITKTLKGLSENPTDNSKIENEVKNEVIALTSSFPIYKNL

SEQ ID NO: 107065 - protein, 306 aa, Unknown
  Bacterial polypetide isolated from the Sargasso Sea
AVLDAQGSIMTNKYAEGYPSKRYYGGCEFVDKAEELALERVKKLFDAKFANVQPHSGAQANGAVYLALLKPGDPILGMSLNSGGHLTHGAKVALSGKWLNSFHYEVDEESGLINYDKVEELAIKHKPKLIIAGGSAYSRIIDFKKFKEISKKVNAYLMVDMAHFSGLVAGKGYPNPIEHADVVTSTTHKVLRGGRGGIILTNDEGLFKKINSAVFPGYQGGPLMHVIAAKAVAFQEALQPSFKEYIKAVLANAKILSETLKSNGFKIFSGGTDTHLMLVDLRPYKVTGKDAETSLCKANITCNKNG

SEQ ID NO: 107066 - protein, 119 aa, Unknown
  Bacterial polypetide isolated from the Sargasso Sea
KIYSGGTDTHLMLVDLRPFNVRGNVASESLCRANITCNKNGIPFDTEKPMITSGIRLGSQAATTRGFGLKEFEKVGNLITKVIEGLSKNPEDNSKIEEEVRNEVIDLCSHFPIYKNLNR

SEQ ID NO: 107067 - protein, 217 aa, Unknown
  Bacterial polypetide isolated from the Sargasso Sea
MAHVSGLVAAGLYPSPVPYADVVTSTTHKTLRGPRSGIILAKANEEIEKKLNSAVFPGSQGGPLMHVVAAKAICFKEALDPEFKIYIQQVMDNAKTMAKTLMSNGIDIVSNGTENHIILVDLRSKGITGKDLERVLGSVNITVNKNSVPNDPASPFVTSGIRIGTPAATTRGFKEKEIIQVSNWISNIINDFENEDLQQSIKEEVQNLTSDFPVYNV

SEQ ID NO: 107068 - protein, 165 aa, Unknown
  Bacterial polypetide isolated from the Sargasso Sea
GPLMHVIASKAAAFQEALKPEFKEYIKSVLANAKILSETLKNNGFKIFSGGTDTHLMLVDLRPFKVTGKAAEVSLCNSNITCNKNGIPFDTEKMTITSGIRLGSQAATTRGFGLNEFKKVGELITKVVKGLSKNPDDNSKIESEVKKEVIDLCSNFPIYNHLFKN

SEQ ID NO: 107069 - protein, 154 aa, Unknown
  Bacterial polypetide isolated from the Sargasso Sea
HVIAAKAVCFKEAMSEEYKDYQAQVVKNSQAMASTFIERGINVVSGGTDDHLFLVDLIGKEYTGKDADAALGRANITVNKNSVPNDPRSPFVTSGLRIGSPAITSRGFKEEQATQLAGWICDILDGLEKGESEAVEASVKEKVVALCEQFPVYK

SEQ ID NO: 107070 - protein, 72 aa, Unknown
  Bacterial polypetide isolated from the Sargasso Sea
MNILQNLKESDPVISNFINSEKNRQETHLELIASENFASIAVMQAQGSVLTNKYAEGLPQKRYYGGCEFVDE

SEQ ID NO: 107071 - protein, 303 aa, Unknown
  Bacterial polypetide isolated from the Sargasso Sea
FANVQPHSGAQANGAVYLSLLKPGDTTLAMSLNSGGHLTHGAKPAQSGKWFNAFHYEVNKNTGLIDYESVEKLAIENKPKLIIAGGSAYSRIIDFKKFRDICDKVGAYLLVDMAHFSGLVAGGAYPNPTQYADVVTSTTHKVLRGPRGGIILTNREDLIKKFNSAIFPGLQGGPLMHVIAAKAVCFKEALSPDFKKYTQNVINNAKVLAEKLNERGFKIFSGGTDTHLMLIDLRSFGVTGKDAQASLGRANITCNKNGIPFDSESPMITSGIRLGTPACTTRGFGTDEFKLVGDLIYKVIDGL

SEQ ID NO: 107072 - protein, 185 aa, Unknown
  Bacterial polypetide isolated from the Sargasso Sea
MTSSKSDTIFSNNNSIKEYDKDLWKSFHNESIRQEDHIELIASENYASKRILEAQGSILTNKYAEGYPSKRYYGGCENVDIAENLAIERAKELFKADYANVQPHSGSSANAAAFLALLEPNDMILGMSLDHGGHLTHGAKVNFSGRNYKSVQYGLHPETNDINYEEVRLLAKEHKPKLIIAGFSA

SEQ ID NO: 107073 - protein, 195 aa, Unknown
  Bacterial polypetide isolated from the Sargasso Sea
MFSRDMTIAGFDDALFDAMQKEVARQEAHIELIASENYASPRVLEAQGSQLTNKYAEGYPGKRYYGGCEFVDIAENLAIDYAKQLFGATYVNVQPHSGSQANSAVFQALVTPGDTILGMSLDAGGHLTHGAKPNFSGKHYNAIQYGLNEQGLIDYDQVASLAREHKPKMIIAGFSAYSQIVDWAKFREIADEVGA

SEQ ID NO: 107074 - protein, 156 aa, Unknown
  Bacterial polypetide isolated from the Sargasso Sea
MHSLKQNDPELYDVLNREAEREELTLELIASENFTSKAVMEMAGGVMTNKYAEGYPGKRYYGGCEVVDEAENIARDRLKKLFGCEYANVQPHSGSQANMAVFMTCLEPGDTIMGLDLAHGGHLTHGSHVNFSGQLYKSVSYHISKTNGRVDFDEVF

SEQ ID NO: 107075 - protein, 165 aa, Unknown
  Bacterial polypetide isolated from the Sargasso Sea
MSSEKSYLNDSYKSFFEDGLSVKDPELYKAIKDELIRQQQHIELIASENIVSQAVLEAQGSVLTNKYAEGYPGKRYYNGCEHVDVAENLANDRLKKLFNCKFANSQPHSGAQANGAVFLALLSPGDTFMGMSLNSGGHITHGLKISMSGKWFNAISYDVDKKSEL

SEQ ID NO: 107076 - protein, 274 aa, Unknown
  Bacterial polypetide isolated from the Sargasso Sea
MTLSENFFSSNLEHVDKDLYQSISQELSRQQNQIELIASENIVSKAVLEAQGSIMTNKYAEGYSAKRYYGGCEFVDIAENLAIDRLKQLYGCSYANVQPHSGAQANQAVFLALIKPGDTILGMSLDAGGHLTHGSRPNQSGKYFNAVQYGINPETSLIDYDEVERLAIEHKPTLIIAGGSAYPRNIDFKKFREIADKIEAYLLVDMAHYSGLVAAKEYPDPLPHAHVVTSTTHKTIRGPRGGMILSNDLDLGKKFNSSVFPGLQGGPLMHVIAA

SEQ ID NO: 107077 - protein, 281 aa, Unknown
  Bacterial polypetide isolated from the Sargasso Sea
LIDYDTMEKIASVEKPKMIICGASAYSRDWDYNRIRSIADSIGAIVLADISHPAGLIATNLLNDPLEKCHIVTSTTHKTLRGPRGGIIMMRHNFENPFGIKWKNGNLRTMASLLDAAVFPGTQGGPLEHVIAAKAVAFGEALEPQYKNYTKAVKENAQIMAQCFVDKGYKIISGGTDNHSMLIDLRSKNITGKIAEESLEKAEITVNKNMVPFDTESPFITSGMRVGTSAITTRGINKNDIPNIVDLINNVIENNQNEEIIKQTKNNVHELMSNLPLFKWE

SEQ ID NO: 107078 - protein, 215 aa, Unknown
  Bacterial polypetide isolated from the Sargasso Sea
MSSETKYLNSEYKDFFEKSLLDSDPEIYKAINDELVRQQNHIELIASENIVSQAVLEAQGSVLTNKYAEGYPGKRYYNGCEHVDVAEQLAIDRLKELFNCKFANAQPHSGAQANGAVFLALLKPGDTFMGMSLNSGGHITHGLKISMSGKWFNAIGYEVDKESELIDYDNVEKLALEHKPKLIIAGGSAYSRVIDFKRYREIADKVGAYLMVDMA

SEQ ID NO: 107079 - protein, 197 aa, Unknown
  Bacterial polypetide isolated from the Sargasso Sea
DKIDFAVFPSLQGGPHNNVIAALSVALKEALNSDFREYILKVLNNSKKLSEELMNLGYIISTNGTDNHLFLLDLKKENITGSKIEYILEQISISVNKNTLKGDKSAISPSGIRIGLCAMTTRGLKTQDCILVALFIDRAIQIAKNIKCKKLIDFKNVVNRYLNNQYLEEEKDDAYKLQELKEEVYLFSRKFKNINKL

SEQ ID NO: 107080 - protein, 282 aa, Unknown
  Bacterial polypetide isolated from the Sargasso Sea
RYYDGCEHVDVAENLAVDRLKKLFSCKFANAQPHSGAQANGAVFLALLKPGDTFMGMSLNSGGHITHGLKISMSGKWFNAIGYDVDKESELIDYDNVEKLALENKPKLIIAGGSAYSRVIDFKRFREIADKVQAYLMVDMAHFSGLVAGKGYPNPTEYAHVVTSTTHKVFRSARGGIILTNDENLSKKINTAVFPGYQGGPLMHIIAAKAAGFLEALKPDFKEYIKSVLANAKILSETLKNNGFKIYSGGTDTHLMLVDLRPFNVKGNLNAESLCRANITCN

SEQ ID NO: 107081 - protein, 177 aa, Unknown
  Bacterial polypetide isolated from the Sargasso Sea
TLHKKFNSAVFPGLQGGPLMHVISAKAVCFKEALSNDFKIYTKNVISNAKVLSETLVKNNFKIFSGGTDTHLMLVDLRPYKVTGKDAEESLGRANITCNKNGIPFDTESPMITSGIRLGTPAATTRGFKSQEFKLVGELITKVIKGLSENPKDNSKIEKEVQKEVIDLCSSFPIYSE

SEQ ID NO: 107082 - protein, 227 aa, Unknown
  Bacterial polypetide isolated from the Sargasso Sea
MSSEKSYLNDSYKSFFEDSLSVKDPELYKAIKDELIRQQQHIELIASENIVSQAVLEAQGSVLTNKYAEGYPGKRYYNGCEHVDVAENLAIERLKKLFNCKFANAQPHSGAQANGAVFLALLSPGDTFMGMSLNSGGHITHGLKISMSGKWFNAIGYDVDKESELIDYDNVEKLALEHKPKLIIAGGSAYSRVIDFKRFREIADKVGAYLMVDMAHFSGLVAGKGYP

SEQ ID NO: 107083 - protein, 236 aa, Unknown
  Bacterial polypetide isolated from the Sargasso Sea
MFREVAESVGAYLMSDIAHPSGLVAAGVHPSPMEYCDVVTSTTHKTLRGPRGGIIMMGKDFENKWGKVAPKSGRTKMVSELLDSSVMPGVQGGPLMHIIAAKAVAFGEALEPEFKTYAQNVVDNAKAMGEEFLDLGYDLVSGGTDTHVLLIDLTKKGINGRHAENILGKAGIALNKNMVPFDTRSPFVTSGIRVGTPALTTRGMGKAEMRQVVQWINKAIVDSENDSNLNSIRSEV

SEQ ID NO: 107084 - protein, 193 aa, Unknown
  Bacterial polypetide isolated from the Sargasso Sea
TTHKTLRGARGGMIMARSNPEIEKKLSSLVFPGTQGGPLMHAIAGKAVAFLEALQPEFKAYGEQVIANAQAMAKAFIDRGYDIVSGGTVNHLFLLDLINKGITGKDADAALGRANITVNKNSVPNDPQSPFVTSGLRIGSPAGTTRGFKEAEMAQVAEWICDILDNMGDESVVDATREKVKELCARFPVYREA

SEQ ID NO: 107085 - protein, 297 aa, Unknown
  Bacterial polypetide isolated from the Sargasso Sea
GCEFVDQAEEIAIERVKKLFNCQYANLQPHSGAQANQAVFLALLQPHDTILGMSLASGGHLTHGAKPNLSGKWFNAVQYGVKKDGNDKDLIDYDEVESLALEHKPKMIIAGASAYPRVIDWKRFREIADKVGSYFLVDMAHYSGLVAGKQYPNPIEHAHIVTSTTHKTLRGARSAMILTNHEDLYKKINSAVFPGLQGGPLMHIIAARAVCFGEALKPEFETYIKDVIANAKVMAQTLVDRGFRIVTGGTDSHIVWLDLTPKGLTGDKAEKILEDVGLACNKNAIPYDPNPPKVTSG

SEQ ID NO: 107086 - protein, 285 aa, Unknown
  Bacterial polypetide isolated from the Sargasso Sea
LGMSLDAGGHLTHGAKPNQSGKWFNAVQYGVRKQDNLIDYDQIEELAKEHNPKLIIAGGSAIPRTIDFARIRSIADSVGAYVLADVAHFAGLIAAGEYPSPFPHCHVATTTTHKTLRGPRGGMILTNDADLAKKFNSAIFPGIQGGPLMHVIAAKAVAFGEALKPDFNHYIKQVIKNAQALSDELIKGGLDTVTHGTDTHVLLVDLRPKGVKGNTSEKALERAHITCNKNGVPFDPEKPAVTSGIRLGSPAGTTRGFDENDFRQIGRWIIEVVDGLAKNGEEGNS

SEQ ID NO: 107087 - protein, 317 aa, Unknown
  Bacterial polypetide isolated from the Sargasso Sea
QRQQQHIELIASENIVSKAVLDAQGSILTNKYAEGYPGKRYYGGCEFVDKTEELALERVKKLFNSKYANVQPHSGAQANGAVYLALLNPGDTILGMSLNSGGHLTHGAKVSLSGKWLKAFHYEVDKESGLIDYNQVKKLALDHKPKILIAGGSAYSRIIDFKKFREIADSVKAYLMVDMAHFSGLVAGKGYPNPIDYADVVTSTTHKVLRGGRGGIILTNREDLIKKFNSAVFPGYQGGPLMHVIAAKAAAFHEALQPSFREYIKSVLANAKILSETLKNNGFKIFSGGTDTHLMLVDLRPFKVTGKAAEISLGKAN

SEQ ID NO: 107088 - protein, 149 aa, Unknown
  Bacterial polypetide isolated from the Sargasso Sea
AGDVILGMSLDHGGHLTHGAKVNFSGKTYESYQYGLSPQTGEINYKEVEDLAKKHKPKMIVAGFSAYSGIVDWKKFREISDEVGAYLLVDMAHVSGLIAADLYPSPVPYADVVTTTTHKTLRGPRGGLILAKENEEIQKKLNSGIFPGT

SEQ ID NO: 107089 - protein, 245 aa, Unknown
  Bacterial polypetide isolated from the Sargasso Sea
MSTVTKIRKTPNNFFEQDLKDSDKELFNSISKEFIRQKNHIELIASENIVSRAVLEAQGSVLTNKYAEGYSGKRYYGGCEYVDISENLAIERAKKLFNCKFANVQPHSGAQANGAVYLALIKPGDTILGMSLNSGGHLTHGAKPAQSGKWFNAVHYDVKKDSGLIDYENVEKLAIEHKPKLIIAGGSAYSRVIEFKKFREICDKVGAYLLVDMAHFSGLVAGGAYPNPLDYADVVTSTTHKVLRG

SEQ ID NO: 107090 - protein, 163 aa, Unknown
  Bacterial polypetide isolated from the Sargasso Sea
IFPGIQGGPLMHVIAAKAVALKEAMTAEFRAYQKQVVINAQAMAEVFMKRGFDVVSNGTDNHMFLLSLVSKGMTGKEADAILNSVNITVNKNTVPNDPQSPFVTSGIRIGTPAVTSRNFSEEDCGQLAHWICDVLTAPEGNAVVQRVIDKVATLTAARPVYTK

SEQ ID NO: 107091 - protein, 173 aa, Unknown
  Bacterial polypetide isolated from the Sargasso Sea
MTKTNKYISDNYGNFFDNDLSTSDPDLYKSIKLELKRQQEHIELIASENIVSKAVLDAQGSVLTNKYAEGYPSKRYYGGCEFVDIAENLALERVKKLFECNYANVQPHSGAQANGAVYLALLKPGDTILGMSLNSGGHLTHGAKVALSGKWLNSHHYEVDKRTGLIDYMQVEK

SEQ ID NO: 107092 - protein, 75 aa, Unknown
  Bacterial polypetide isolated from the Sargasso Sea
VNKNTVPNDPQSPFVTSGIRIGTPAVTSRNFREEDCAQLAHWICDVLTAPEDNAVVQQVIDKVATLTAARPVYTE

SEQ ID NO: 107093 - protein, 200 aa, Unknown
  Bacterial polypetide isolated from the Sargasso Sea
FADIVTTTTHKTLRSGRGGMILTDDEDIFKKINSSVFPGLQGGPLMHIIAGKAAGFGEALTPQFRTYSRNVVDNAKCLANTLLDRNINIISGGTDNHIVLVDLSKNNITGNVCEEALERSGITCNKNGIPFDKKPPTITSGIRLGSAAATTRGLMYDEFKVLGNLIADVMNGFSDNVSNEFVEKKTKEVIKTICKKFPIY

SEQ ID NO: 107094 - protein, 260 aa, Unknown
  Bacterial polypetide isolated from the Sargasso Sea
LEHKPKLIIAGGSAYSRVIDFKKFREIADKVGAYLMVDMAHFSGLVAGKGYPNPCDYAHVVTSTTHKVFRSARGGIILTNHEELSKKFNTAVFPGYQGGPLMHVIAAKAAGFLEALQPDFQDYIKSVLANAKILAETLKNNGFKIYSDGTDTHLMLVDLRPYNVKGNLAAESLSRANITCNKNGIPFDTEKPMITSGIRLGTQAITTRGFGLNECKKVGELITKTLKGLSENPNENSKIEEEVRNEVIALTSSFPIYKNL

SEQ ID NO: 107095 - protein, 271 aa, Unknown
  Bacterial polypetide isolated from the Sargasso Sea
AENLAIERLKKLFNCKFANAQPHSGAQANGAVFLALLKPGDTFMGMSLNSGGHITHGLKISMSGKWFNPIGYDVDKKSELIDYDNVEKLALEHKPKLIIAGGSAYSRVIDFKRFREIADKVGAYLMVDMAHFSGLVAGKGYPNPCDYAHVVTSTTHKVFRSARGGIILTNHEELSKKFNTAVFPGYQGGPLMHVIAAKAAGFLEALQPDFQDYIKSVLANAKILAETLKNNGFKIYSDGTDTHLMLVDLRPYNVKGNLAAESLSRANITCN

SEQ ID NO: 107096 - protein, 301 aa, Unknown
  Bacterial polypetide isolated from the Sargasso Sea
NGAVYLALLNPGDTILGMSLNSGGHLTHGAKVSQSGKWLKSFHYEVDKETGLIDYDQVKKLAQEHKPKILIAGGSAYSRIIDFKKFREIADSVNAYLMVDMAHFSGLVAGKGYPNPVEYADVVTSTTHKVLRGGRGGIILTNREDLYKKFNSAVFPGYQGGPLMHVIAAKAASFHEALQPSFREYIKSVISNAKILSETLKNNGFKIFSGGTDTHLMLVDLRPFKVTGKAAEVSLGKSNITCNKNGIPFDKEKMTVTSGIRLGSQAATTRGFGLNEFKKVGELITKVIKGLSENPEDNSKN

SEQ ID NO: 107097 - protein, 161 aa, Unknown
  Bacterial polypetide isolated from the Sargasso Sea
MHIIAAKAVGFLEALKPEFELYIKNVISNAKTLSENLISNGFKIYSGGTDTHLMLVDLRPFNVKGNIASESLSRANITCNKNGIPFDTESPMITSGIRLGTQATTTRGFGPAEFKKVGDLITKVITGLSNNPKDNSKIESDVKQEVIELCSKFPIYKNLRK

SEQ ID NO: 107098 - protein, 117 aa, Unknown
  Bacterial polypetide isolated from the Sargasso Sea
MTLSENFFSSNLEHADKDLYQSISQELSRQQNQIELIASENIVSKAVLEAQGSIMTNKYAEGYSAKRYYGGCEFVDIAENLAIDRLKQLYGCSYANVQPHSGAQANQAVFLALIKPR

SEQ ID NO: 107099 - protein, 248 aa, Unknown
  Bacterial polypetide isolated from the Sargasso Sea
GSAYSRVIDFKKFRDICDKVNAYLLVDMAHFSGLVAGGVYPNPTKYADVVTSTTHKVLRGPRGGIILTNREDLIKKFNSAIFPGLQGGPLMHVIAAKAVCFKEALTEDFKVYSENVIKNAKALSERLSEKGFKIFSGGTDTHLMLLDLRSFGVTGKDAQASLGRSNITCNKNGIPFDTESPMITSGIRLGTPACTTRGFGPNEFKHIGDLIFKIIDGLSKNKENNSKVEKEVQKEIIDLCSSFPIYGE

SEQ ID NO: 107100 - protein, 164 aa, Unknown
  Bacterial polypetide isolated from the Sargasso Sea
FPGLQGGPLMHIIAGKAAGFGEALKDEFKVYSQNVVKNAKILSNTLIERGINIVSGGTDNHIVLVDLRNKGITGNNCEHALERAGITCNKNGVPFDETPPSITSGIRFGSSAATTRGLTENDFKVLGNLISDVICGFKNNISDNEIENEVNRKIIDICKKYPIY

SEQ ID NO: 107101 - protein, 262 aa, Unknown
  Bacterial polypetide isolated from the Sargasso Sea
ICGGSAYPRFIEFQQFREIADSVNAYLMADIAHPSGLIAAGAHPSPFPYCDVVTSTTHKTLRGPRGGIILLGKDFENPWGRIAPKSGRIKMLSELIDSTVMPGIQGGPLMHIIAAKGVAFGEALKRDFKDYAKSIIDNAKLMAEELKSLNYNLISGGTDTHVILIDLSNKNISGKAAENALGKAGITVNKNMVPFDKKSPFITSGIRIGTPAITTRGMKELEISQIVKWIDLVIQNPEDNQLLSDIFADVNALCRDYPVYPD

SEQ ID NO: 107102 - protein, 171 aa, Unknown
  Bacterial polypetide isolated from the Sargasso Sea
MSSETKYLNSEYKDFFEKSLLDSDPEIYKAINDELVRQQNHIELIASENIVSQAVLEAQGSVLTNKYAEGYPGKRYYNGCEHVDVAEQLAIDRLKELFNCKFANAQPHSGAQANGAVFLALLKPGDTFMGMSLNSGGHITHGLKISMSGKWFNAIGYEVDKKSELIDYDNV

SEQ ID NO: 107103 - protein, 274 aa, Unknown
  Bacterial polypetide isolated from the Sargasso Sea
ESELIDYDNVEKLALEHKPKLIIAGGSAYSRVIDFKRFREIADKVGAYLMVDMAHFSGLVAGKGYPNPCDYAHVVTSTTHKVFRSARGGIILTNHEDLAKKFNTAVFPGYQGGPLMHIIAAKAAGFLEALQPEFQNYIKSVLANAKMLAETLKNNGFKIYSDGTDTHLMLVDLRPYNVKGNLAAESLSRANITCNKNGIPFDTEKPMITSGIRLGTQAATTRGFGLSEFKTVGELITKTLKGLSENLSDNSKIEEEVKNEVISLTSSFPIYKNL

SEQ ID NO: 107104 - protein, 325 aa, Unknown
  Bacterial polypetide isolated from the Sargasso Sea
SRAVLDAQGSIMTNKYAEGYPGRRYYGGCEWVDLAETIAIKRAKELFGCEFVNVQAHSGSQANQAVFLATLKPGDKLLGMSLAAGGHLTHGARPNQSGRWFNAVQYGVREEDSLIDIDEVSKLAKKHRPKLIIAGGSAYPRIIDFKSFRNIADEVGALLLVDMAHFAGLVAAGVHPSPFPHADIVTSTTHKTLRGPRGGLILSKQEDLAKKIDSAIFPGLQGGPLEHVIAAKAVAFGEALTDDFKGYAKRVVENARKLSSTLDSAGFKVVSGGTDTHLLLLDLRSKGLTGKIAEMALENAGMTCNKNSVPFDPEKPTVTSGVRLG

SEQ ID NO: 107105 - protein, 193 aa, Unknown
  Bacterial polypetide isolated from the Sargasso Sea
MSSETKYLNSNYEDFFEKSLSKSDPDLFKAINDELIRQQNHIELIASENIVSQAVLEAQGSVLTNKYAEGYPGKRYYNGCEHVDVAEQLALERIKKLFNCKYANVQPHSGAQANGAVFLALLKPNDTFMGMSLNSGGHITHGLKISMSGKWFNAISYDVDKKSELIDYDNVEKLALEHKPKLIIAGGSAYSRV

SEQ ID NO: 107106 - protein, 103 aa, Unknown
  Bacterial polypetide isolated from the Sargasso Sea
MKLQDADKELYNSIKDEFIRQQNHIELIASENIVSNAVLEAQGSVLTNKYAEGYPSKRYYGGCEHVDISENLAIERAKKLFDCKFANVQPHSGAQANGAVYLA

SEQ ID NO: 107107 - protein, 209 aa, Unknown
  Bacterial polypetide isolated from the Sargasso Sea
CCCRFISIACSYADVVTSTTHKTLRGPRSGIIIAKSNDNLEKKLNSAVFPGSQGGPLMHVIAAKAVCFKEALEPDFKIYIQQVIDNAKLMCKVIQDRGIDVVTGKTDNHIVLMDLRKKELTGKDCELALGQANITVNKNAVPNDPQSPFVTSGIRLGTPAVTTRGFGSDEIEMLTNWICDVVLDHNNADKINTIKNKVVEMCKRFPVYK

SEQ ID NO: 107108 - protein, 236 aa, Unknown
  Bacterial polypetide isolated from the Sargasso Sea
MSNFKSDINGSYQDFFDKDLSMRDPDLYNSIRLELERQQQHIELIASENIVSKAVLDAQGSILTNKYAEGYPGKRYYGGCEFVDKAEELALERVKKLFNCKYANVQPHSGAQANGAVYLALLNPGDTILGMSLNSGGHLTHGAKVSLSGKWLKAFHYEVDKQTGLIDYDQIKKLALEYKPKILIAGGSAYSRVIDFKKFREIANSINAYLMVDMAHFSGLVAGKGYPNPIEHADVV

SEQ ID NO: 107109 - protein, 225 aa, Unknown
  Bacterial polypetide isolated from the Sargasso Sea
MISDLFTKGIKEADPEVYGTLSRELERQQNQIELIASENIASRSILNAQGSVMTNKYAEGYPGKRYYGGCEFVDQAEEIALERVKKLFNCKFANLQPHSGAQANQAVFLALLQPHDTILGMSLASGGHLTHGAKPNLSGKWFNAVQYGVKKDGNDKDLIDYDEVEALALEHKPKMIIAGASAYPRIIDWKKFREIADKVGAYFLVDMAHYSGLVAGKQYPNPIEH

SEQ ID NO: 107110 - protein, 98 aa, Unknown
  Bacterial polypetide isolated from the Sargasso Sea
LLDLQKKEVNGKEAEELLGTVNITVNKNSIPNDPESPFITSGIRIGTPAITTRGFKEEEAEQVVDLMCDAIENRNDQASLDRIKDEVKDLCNNFPVYK

SEQ ID NO: 107111 - protein, 213 aa, Unknown
  Bacterial polypetide isolated from the Sargasso Sea
MNFVGKTNLFGGTLASQDPEIFNSLEKEFSRQQNEIELIASENIASPAVMEAQGSVMTNKYAEGYPGRRYYGGCENVDVAEQLAISRACQLYNCKFANVQPNSGSQANQAVFLALMKPGDTFLSMDLASGGHLTHGAKPNQSGKWFNPVHYEVTKDTNHVDYDQVRQLAKLHKPMLIIAGGSAIPRILDFKKFREICNEIGAFLLVDMAHISG

SEQ ID NO: 107112 - protein, 114 aa, Unknown
  Bacterial polypetide isolated from the Sargasso Sea
MSSEKSYLNDSYKSFFEDGLSVKDPELYKAIKDELIRQQQHIELIASENIVSQAVLEAQGSVLTNKYAEGYPGKRYYNGCEHVDVAENLANERLKKLFNCKFANSQPHSGAQAN

SEQ ID NO: 107113 - protein, 304 aa, Unknown
  Bacterial polypetide isolated from the Sargasso Sea
TSNAILAAQGSIATNKYAEGLPGKRYYGGCEDVDAIETLAIERAKQLFAADFANVQPHSGSSANLAVFSALLKPGDTILGMDLNAGGHLTHGHPVNFSGKVYQAFHYGVNEEGLIDYDQIETLAKKHKPKLIIAGFSAYSQVIDWALIRDIASRYGAYFLADMAHVSGLVAADLYPSPIPYADVVTSTTHKTLRGPRGGMILAGANQQIPKLVNRAIFPGIQGGPLMHVIAAKAICYHEAMQPGFKTYQKQVLKNSAMMAQTLQASGFTIISGSPKCHMFLLALNDKSVNGMQAQTAWRAQELL

SEQ ID NO: 107114 - protein, 317 aa, Unknown
  Bacterial polypetide isolated from the Sargasso Sea
ALLKPGDTIMGMSLNSGGHLTHGSKASVSGKWFNAIAYDVDKKTELLDYESIEKLAVENKPKLIIAGGSAYSRQIDFKKFREIADKVGAYFMVDMAHFSGLVAGKGYPNPVEYADVVTSTTHKVFRSARGGIILTNNEALSKKFNSAVFPGYQGGPLMHIIAAKAVGFLEALKPEFRNYISNVMANAKILAETLKNNGFKIYSGGTDTHLMLVDLRPFNVKGNIAADSLCRANITCNKNGIPYDTESPMITSGIRLGTQAATTRGFGLDEFKKVGELITKTIKGLSANPDDNAKVESEVREEVISLCSKFPIYKNLK

SEQ ID NO: 107115 - protein, 160 aa, Unknown
  Bacterial polypetide isolated from the Sargasso Sea
MNIADFDPELWQSMTNETQRQEDHIELIASENYASPRVLQAQGSQLTNKYAEGYPHKRYYGGCEYVDVAEDLAIARAKELFGADYANVQPHSGSQANSAVFLALLNAGDTILGMSLAHGGHLTHGASVSSSGKLYKAVQYGLHPETGVIDYAQAEALALE

SEQ ID NO: 107116 - protein, 254 aa, Unknown
  Bacterial polypetide isolated from the Sargasso Sea
MFNSGNSLAEFDPEISAAIEAERTRQEEHIELIASENHTSPFVMEAQGSVLTNKYAEGYPSKRYYGGCENVDVVEELAIERAKELFGADYANVQPHSGSQANASAYMALMKPGDTLLGMSLADGGHLTHGATVSFSGRIYNSVQYGLNGQTGEIDYDEVDRLAHEHRPKLIVAGFSAYSKVVDWQKFRDIADEVGAYFLVDMAHVSGLVAAGVYPSPVNIADVTTSTTHKTLRGPRGGIILARSNPELEKKLNF

SEQ ID NO: 107117 - protein, 157 aa, Unknown
  Bacterial polypetide isolated from the Sargasso Sea
IIAAKAAGFLEALQPEFKDYIKSVLANAKMLAETLKNNGFKIYSDGTDTHLMLVDLRPYNVKGNLAAESLSKANITCNKNGIPFDTEKPMITSGIRLGTQAATTRGFGLNEFRTVGELITKTLKGLSENPIDNSKIENEVKNEVISLTSSFPIYKNL

SEQ ID NO: 107118 - protein, 101 aa, Unknown
  Bacterial polypetide isolated from the Sargasso Sea
MFDVDMKIAGFDDELNDAIKKEIVRQEEHVELIASENYASPRVIEAQGSVLTNKYAEGYPSKRYYGGCENVDVAEQLAIDRLKEIYGADYANVQPHSGSQA

SEQ ID NO: 107119 - protein, 194 aa, Unknown
  Bacterial polypetide isolated from the Sargasso Sea
TLRGARSAMILTNNEDIYKKVNSAVFPGLQGGPLMHVMAAKAVSFGEALKPEFSEYIREVISNAKILAEIFVQRGFRVVTGGTDSHIVWLDLSPKNLTGDKAEKLLEDVGIACNKNAIPYDPHPPKITSGIRFGTAAATSRGFNNSDFKEVGNIISDVLDSLLKNNEDQKIILTNTKEKIVKMCKNYPIYHEAY

SEQ ID NO: 107120 - protein, 87 aa, Unknown
  Bacterial polypetide isolated from the Sargasso Sea
MNEQKKILFYEEGFFEKSIHDYDPILSSYLDEEKKRQQNQIEMIASENFVSRSVLEAQGSVLTNKYAEGYPGKRYYGGCEFVDKVED

SEQ ID NO: 107121 - protein, 156 aa, Unknown
  Bacterial polypetide isolated from the Sargasso Sea
GPLMHVVAAKALCFKEALDPEFKIYIKQVMDNAKTMAETIMSNGIDIVSNGTENHIILVDLRSKGITGKDLERVLGSVNITVNKNSVPNDPASPFVTSGIRIGTPAATTRGFKEEEIIQVANWISDIINNFDNEELLKTIKEEVHKLTSNFPVYNL

SEQ ID NO: 107122 - protein, 94 aa, Unknown
  Bacterial polypetide isolated from the Sargasso Sea
MSSEKSYLNESYKSFFEDSLSVKDPELYKAIKDELIRQQQHIELIASENIVSQAVLEAQGSVLTNKYAESYPGKRYYNGCEHVDVAKTLPLKDK

SEQ ID NO: 107123 - protein, 250 aa, Unknown
  Bacterial polypetide isolated from the Sargasso Sea
GYDVDKKSELIDYDNVEKLALEHKPKLIIAGGSAYSRVIDFKRFREIADKVGAYLMVDMAHFSGLVAGKGYPNPCDYAHVVTSTTHKVFRSARGGIILTNHEDLAKKFNTAVFPGYQGGPLMHIIAAKAAGFLEALQPEFQDYIKSVLANAKMLAETLKNNGFKIYSDGTDTHLMLVDLRPYNVKGNLAAESLSRANITCNKNGIPFDTEKPMITSGIRLGTQAATTRGFGLSEFKTVGELITKTLKGLS

SEQ ID NO: 107124 - protein, 206 aa, Unknown
  Bacterial polypetide isolated from the Sargasso Sea
AAGCHPNPVPHADFVTTTTHKTLRGPRGGLIMAKEKYAKELNSNVFPGIQGGPLMHVIAAKAVCFKEALSPEFKEYQQQVVMNAKALAEGMERNGFRLVSGGTDNHLILVDVQAKGLTGKESQEALDSAGITVNKNTIPFEALSPFKASGVRLGTPAMTSRGMRETEMEAIADMISEVLGDVNNVDVAKKVRQRVRELTTRFPLPY

SEQ ID NO: 107125 - protein, 274 aa, Unknown
  Bacterial polypetide isolated from the Sargasso Sea
KDLIDYDEVEALAIQHKPKLIIAGASAYPRVIDWKKFRDIADKVGAYFLVDMAHYSGLIAGKQYPNPIEYAHVVTSTTHKTLRGARSAMILTNDETLIKKINSAVFPGLQGGPLMHVMAGKAVAFGEALKPEFEDYIKKVIENAKVLASSLVNNGFKIVTGGTDSHIVWLDLTPKNVTGDKAEKILEEVGIACNKNAIPYDPNPPKITSGLRFGTAAATSRGFNENDFSEIGNMISEVLENINQNEDNQKEFISSMKSKVTNMCKKYPIYDEAF

SEQ ID NO: 107126 - protein, 195 aa, Unknown
  Bacterial polypetide isolated from the Sargasso Sea
MSKEGNYINNQYQSFFENSLSNIDPDIYKAISDELNRQQSHIELIASENIVSQAVLEAQGSVLTNKYAEGYSGKRYYNGCAYVDVAENLANERLKKLFNCKFANSQPHSGAQANGAVFLALLNPGDTFMGMSLNSGGHITHGLKIAMSGKWFNAIGYDVDKNSELIDYENVEKLALEHKPKLIIAGGSAYSRVID

SEQ ID NO: 107127 - protein, 137 aa, Unknown
  Bacterial polypetide isolated from the Sargasso Sea
MSDSTASLINTGLAAADPAIAALIEKEQQRQETHLELIASENFASRAVMDAQGSVLTNKYAEGLPSKRYYGGCEHVDAIEELAIERAKELFGAAWANVQPHSGAQANFAVFLALLQPGDKIMGLDLSHGGHLTHGSP

SEQ ID NO: 107128 - protein, 272 aa, Unknown
  Bacterial polypetide isolated from the Sargasso Sea
WFKAVGYDVDKESELIDYDNVEKLALEHKPKLIIAGGSAYSRVIDFKRFREIADKVGAYLMVDMAHFSGLVAGKGYPNPCDYAHVVTSTTHKVFRSARGGIILTNHEDLSKKFNTAVFPGYQGGPLMHIIAAKAAGFLEALQPEFQDYIKSVLANAKILAETLKNNGFKIYSDGTDTHLMLVDLRPYNVKGNLAAESLSRANITCNKNGIPFDTEKPMITSGIRLGTQAATTRGFGLSEFKTVGELITKTLKGLSENPKDNSKIENEVKNEV

SEQ ID NO: 107129 - protein, 140 aa, Unknown
  Bacterial polypetide isolated from the Sargasso Sea
MSSETKYLNSEYKDFFEKSLLDSDPEIYKAINDELVRQQNHIELIASENIVSQAVLEAQGSVLTNKYAEGYPGKRYYNGCEHVDVAEQLAIDRLKELFNCRFANAQPHSGAQSNGAVFLALLKPGDTFMGMSLNSGGHIT

SEQ ID NO: 107130 - protein, 133 aa, Unknown
  Bacterial polypetide isolated from the Sargasso Sea
KAYQQQVIDNAQAMAKVFIERGYEVVSGGTDNHLFLLSLIKQGLTGKEADAALGRAGITVNKNAVPNDPQSPFVTSGIRIGTPAVTTRGFKVAQCQALAGWICDILDHLGDADVEAQVAKLVAGLCADYPVYR

SEQ ID NO: 107131 - protein, 86 aa, Unknown
  Bacterial polypetide isolated from the Sargasso Sea
MSSEKNYLNDHYKSFFEDSLSKKDPELHKAIQDELLRQQQHIELIASENIVSQAVLEAQGSVLTNKYAEGYPGKRYYNGCEHVDVA

SEQ ID NO: 107132 - protein, 101 aa, Unknown
  Bacterial polypetide isolated from the Sargasso Sea
MSYIEKIDSELYQIIQREHKREHNTLELIASENFTSPAILEAAGGIMTNKYAEGYPGKRYYGGCVHVDEAENLAISRLKKLFGVEYGNVQPHSGSQANMAV

SEQ ID NO: 107133 - protein, 163 aa, Unknown
  Bacterial polypetide isolated from the Sargasso Sea
MKSSKSDSVFSDKSSIKDFDKDLWLSFENEAQRQEDHIELIASENYASKRVLEAQGSLLTNKYAEGYPSKRYYGGCENVDVAENLAIERAKELFHADYANVQPHSGSSANSAAFLALLEPNDTVLGMSLDHGGHLTHGSKVNFSGRNYKSIQYGLHPETDDIN

SEQ ID NO: 107134 - protein, 313 aa, Unknown
  Bacterial polypetide isolated from the Sargasso Sea
GGCEVVDQIEQLAIDRAKELFGAEWANVQPHSGAQANAAVMLAILKPGDKLLGFNLSHGGHLTHGSPVNFSGKLYNPSFYSVEKETGRIDYDVMEKTALEEKPKLIIAGASAYSRDWDYERMRSIADKIGALLLADIAHPAGLIASGLLNNPLPHCHIVTTTTHKTLRGPRGGLIMMGENFENPWGLKTPKGKTRMMSAILDSGVFPGTQGGPLEHVIASKGIAFGEALGDSYKIYCKQVIANAQAMASSFIEKGYHIISNGTDNHSMLIDMRSKGLTGKEAEETLVKADITLNKNMVPFDTESPFVTSGIRI

SEQ ID NO: 107135 - protein, 291 aa, Unknown
  Bacterial polypetide isolated from the Sargasso Sea
MISDLFTKGIKEADPEVYGTLSRELERQQNQIELIASENIASRSILNAQGSVMTNKYAEGYPGKRYYGGCEFVDQAEEIALERVKKLFNCKFANLQPHSGAQANQAVFLALLQPHDTILGMSLASGGHLTHGAKPNLSGKWFNAVQYGVKKDGNDKDLIDYDEVEALALEHKPKMIIAGASAYPRTIDWKKFRDIADKVGAYFLVDMAHYSGLVAGKQYPNPIEHAHIVTSTTHKTLRGARSAMILTNHEDLYKKINSAVFPGLQGGPLMHVIAARAVCFGEALKPEFENI

SEQ ID NO: 107136 - protein, 216 aa, Unknown
  Bacterial polypetide isolated from the Sargasso Sea
VAGKGYPNPVDHADVVTSTTHKVFRSARGGIILTNREDLSKKFNSAVFPGYQGGPLMHVIAAKAVGFLEALKPDFRNYISNVLANAKMLAETLKNNGFKIYSGGTDTHLMLVDLRPFNVKGNMAADSLCRANITCNKNGIPFDTESPMITSGIRLGTQAATTRGFGLEEFKLVGNLITKVIKGLSTNQEDNSKVENEVRKEVIDLCSKFPIYKNLK

SEQ ID NO: 107137 - protein, 95 aa, Unknown
  Bacterial polypetide isolated from the Sargasso Sea
LIRQGLTGKEADAALGRAHITVNKNAVPNDPQSPFVTSGLRIGTPAVTTRGFKVPQCIELAGWICDILDNLGDADVEANVAKHVSALCADFPVYR

SEQ ID NO: 107138 - protein, 315 aa, Unknown
  Bacterial polypetide isolated from the Sargasso Sea
MEAQGSQLTNKYAEGYYGKRYYGGCKFVDIAERLAIERAQKLFGVDYANVQPHSGSQANAAVFDAILKPGDNLLGMNLGAGGHLTHGSKVNFSGKNYNAIQYSLDKNGDINYKQVAELAKRYKPRIIIAGFSAFSGIIDWKIFKDIATSVNAVLMADIAHIAGLIATGLYPNPFPFVDVVTTTTHKTLRGPRGGLILCNNSPNLAKKIQSAVFPGIQGGPLMHIIAAKAVAFKEALDPIFVKYQKQVLRNAKAIERTLKKRDIDIVSGGTNNHLLLLDITNTGFSGKEAEASLDRAHITDNKNSIPNDPRSPFIT

SEQ ID NO: 107139 - protein, 219 aa, Unknown
  Bacterial polypetide isolated from the Sargasso Sea
MGLDLAHGGHLTHGSKVNFSGKMYNAVSYQVNKDTGRVDLNNVHEIAKKYKPKVIICGGSAYPRFVEFSEFKTIADSVDAYLMADIAHPSGLVAAGIHPSPMPYCDVVTTTTHKTLRGPRGGMIMMGKDFENKWGIVAPKSGRVKMVSEILDTAVMPGIQGGPLMHVIAAKAIAYGEALDPKFKLYAADIVKNAKTMADAFIKKGYDIISGGTDTHVVL

SEQ ID NO: 107140 - protein, 206 aa, Unknown
  Bacterial polypetide isolated from the Sargasso Sea
VNIADVTTSTTHKSLRGPRSGIIMAKSNPELEKKLNSAVFPGMQGGPLMHVIAAKAVAFKEALEPEFKNYSQQVIKNAQALANTIIARGYKIVSGGTKNHCFLIDLIDKGITGKQAEHDLGRAHITLNKNSVPGDPQSPFVTSGLRVGSPAVTTRGMQEAEMVELAGLMCDILDNIGDNDVVARVATQVSALSGRFPVYEKAESTV

SEQ ID NO: 107141 - protein, 120 aa, Unknown
  Bacterial polypetide isolated from the Sargasso Sea
MKSSRSDSIFSNNNTIKDYDNELWASFQHEAERQEDHIELIASENYASKRILEAQGSLLTNKYAEGYPSKRYYGGCENVDIAENLAIDRAKELFKADYANVQPHSGSSANAAAYLALLQP

SEQ ID NO: 107142 - protein, 257 aa, Unknown
  Bacterial polypetide isolated from the Sargasso Sea
PKLIIAGGSAYSRVIDFKRFREIADKVGAYLMVDMAHFSGLVAGKGYPNPCDYAHVVTSTTHKVFRSARGGIILTNYEDLSKKFNTAVFPGYQGGPLMHIIAAKAVGFKEALKPEFKDYIKTVLANAKILAETLKNNGFKIYSGGTDTHLMLVDLRPFNVKGNVAAESLSRANITCNKNGIPFDSESPMITSGIRLGSQAATTRGFGLKEFQIVGDLITKTIKGLAENPEDNSKTEDEVRKEVVSLCSNFPIYKHLG

SEQ ID NO: 107143 - protein, 292 aa, Unknown
  Bacterial polypetide isolated from the Sargasso Sea
NGAVFLALLKPGDTIMGLSLNSGGHLTHGSKAAVSGKWFNAIAYEVDKETELLDYNAIEKLAIEHKPKLIIAGGSAYSRVIDFKKFREISDKVGAYFMVDMAHFSGLVAGKGYPNPVDHADVVTSTTHKVFRSARGGIILTNREDLAKKFNSAVFPGYQGGPLMHIIAAKAVGFLEALKPEFREYIKSVLANAKILAETLKNNGFKIYSGGTDTHLMLVDLRPFGVKGNIASDSLSRANITCNKNGIPFDTESPMVTSGIRLGSQAATTRGFGLKEFEKIGELITKTINGLS

SEQ ID NO: 107144 - protein, 127 aa, Unknown
  Bacterial polypetide isolated from the Sargasso Sea
MAATLNRGGLDIVTGGTDTHVVLVDLRPMGLTGKDAEAVMERVGLTCNKNAVPFDSEKPTITSGVRLGTPAATSRGFGQAEFKRVGELIIKVLQGLAERPDDQDVMEADVRSGVGELCKRFPIYPTL

SEQ ID NO: 107145 - protein, 184 aa, Unknown
  Bacterial polypetide isolated from the Sargasso Sea
FTNDEEIHKKINSAVFPGLQGGPLMHVMAAKAVSFGEALKPEFKEYSKKVILNAKVLSETLVNKGFRVVTGGTDSHIVWLDLTPKNLTGDKAEKILEDVGIACNKNAIPYDPHPPKITSGLRFGTAAATSRGFNEDDFKNVGEMISEILDSLKLNEDEMKLVFLNIRKKVLELCNKHPIYNEAF

SEQ ID NO: 107146 - protein, 98 aa, Unknown
  Bacterial polypetide isolated from the Sargasso Sea
MLVDLSALDTSGKEVASALDKAAITVNKNSIPFDKKSPFVTSGIRVGTPAVTTRGMREKEMVLIAEMIKKIAHDPSNEYLISTIREEAISLSSDFPIL

SEQ ID NO: 107147 - protein, 105 aa, Unknown
  Bacterial polypetide isolated from the Sargasso Sea
MNNFKFKNNYFKEGFFEKSLIDYDPELGKILQNELYRQKNQIEMIASENIVSRAVLEAQGSVLTNKYAEGYPGKRYYGGCEEYDKLENLAISRAKKLFNAKFVNV

SEQ ID NO: 107148 - protein, 185 aa, Unknown
  Bacterial polypetide isolated from the Sargasso Sea
MSSEKKYLNDSYKSFFEDSLSKKDPDLYKAIKDELIRQQQHIELIASENIVSQAVLEAQGSVLTNKYAEGYPGKRYYNGCEHVDVAENLAIERLKKLFDCKFANAQPHSGAQANGAVFLALLNPGDTFMGMSLNSGGHITHGLKISMSGKWFNAIGYDVDKESELIDYDNVEKLALEHKPKLIIA

SEQ ID NO: 107149 - protein, 158 aa, Unknown
  Bacterial polypetide isolated from the Sargasso Sea
MSAQTKYSSNKHKDFFEKKLSDTDPEIYSAINDELVRQQNHIELIASENIVSQAVLQAQGSVLTNKYAEGYPGKRYYNGCEHVDVAENLAIERLKKLFECKFANTQPHSGAQANGAVFLALLKPGDTFMGMSLNSGGHITHGLKISMSGKWFNAIGYD

SEQ ID NO: 107150 - protein, 264 aa, Unknown
  Bacterial polypetide isolated from the Sargasso Sea
AIQYGLNPETGEIDYDQVEALAKEHKPKMIVAGFSAYSRVVDWQKFRDIADSVGAYLLVDMAHVAGLVAAGVYPSPINAAHVVTTTTHKTLRGPRGGLIMCKSNPELEKKFNSLIFPGIQGGPLMHVIAAKAVALKEAMTAEFRAYQKQVVINAQAMAEVFMKRGFDVVSNGTDNHMFLLSLVSKGMTGKEADAILNSVNITVNKNTVPNDPQSPFVTSGIRIGTPAVTSRNFSEEDCGQLAHWICDVLTAPEDNAVVQQVIDK

SEQ ID NO: 107151 - protein, 218 aa, Unknown
  Bacterial polypetide isolated from the Sargasso Sea
MSSETKYLNSEYKDFFERSLSDADPDLFKAINDELVRQQNHIELIASENIVSQAVLEAQGSVLTNKYAEGYPGKRYYNGCEHVDVAEQLALERIKKLFNCKYANVQPHSGAQANGAVFLALLKPNDTFMGMSLNSGGHITHGLKISMSGKWFNAINYDVDKKSELIDYDNVEKLALEHKPKLIIAGGSAYSRVIDFKRFREIADKVGAYFMVDMAHFS

SEQ ID NO: 107152 - protein, 254 aa, Unknown
  Bacterial polypetide isolated from the Sargasso Sea
MSSEGKYINSSYQDFFEKSLSETDPELFKAINDELIRQQNHIELIASENIVSRSVLEAQGSVLTNKYAEGYPGKRYYDGCEHVDVAENLAIERLKKIFDCKFANVQPHSGAQANGAVFLALLKPGDKIMGMSLNSGGHLTHGSKASVSGKWFNSISYDIDKNSGLIDYNEVEKIALENQPKLIIAGGSAYSRIIDFKKFREISDKVGAYLMVDMAHFSGLVAGKGYPNPIEHAHVVTSTTHKVFRSARGGIILT

SEQ ID NO: 107153 - protein, 81 aa, Unknown
  Bacterial polypetide isolated from the Sargasso Sea
MSIAVKLNKYLNSFFKLNLKDADKELYKSIEEEFSRQQNHIELIASENIVSNAVLEAQGSVLTNKYAEGYPGKRYYGGCEH

SEQ ID NO: 107154 - protein, 294 aa, Unknown
  Bacterial polypetide isolated from the Sargasso Sea
ISYHVDKETGRVNFDEVRSLALEYKPKMIICGGSAYPRYVEFDKFYEVAQEIGAFLMADIAHPSGLVAAGVHPSPVPYCDVITSTTHKTLRGPRGGIIMMGKDRENTWGKIAPKSGRTKMISELLDSSVMPGMQGGPLMHIISAKAIAFGEAIKDEFKVYAKKIVDNAKVMAQEFIEMDYDIVSGGTDTHVVLMDLSNKGISGKAAEKALEKAGITVNKNMVPFDQRSPFITSGIRVGTPAITTRNMGSNEMKKIATFINTVVTDADNDDTIQNIKLQVKELCDSFPIYEESSH

SEQ ID NO: 107155 - protein, 257 aa, Unknown
  Bacterial polypetide isolated from the Sargasso Sea
ISSAIDQELSRQQNQIELIASENIVSKAVLEAQGSVLTNKYAEGYVGARYYGGCEFVDIAEDLAIKRLKELYKCEYANVQPHSGAQANGAVFLALIKPGDKILGMSLDAGGHLTHGSAPSLSGKWFNAVQYGLDDKGLINYEEVESVALEHKPKIIIAGGSAYSRIIDFKRFREIADKVDAYLHVDMAHFSGLVAAGEHPNPLEYADVVTSTTHKTIRGARGGMILSNNKDLGKKFNSAVFPGYQGGPLMHVIAAKA

SEQ ID NO: 107156 - protein, 171 aa, Unknown
  Bacterial polypetide isolated from the Sargasso Sea
NSAIFPGLQGGPLMHVIAAKAVCFKEALSKDFKEYTKNVINNAKVLSNRLTEKGFKIFSGGTDTHLMLIDLRSFGVTGKDAQASLGRANITCNKNGIPFDTESPMITSGIRLGTPACTTRGFGANEFKLVADLIFKVIEGLSKNKEDNSKIEKEVQKEIIDLCSSFPIYSS

SEQ ID NO: 107157 - protein, 242 aa, Unknown
  Bacterial polypetide isolated from the Sargasso Sea
VLEAQGSVLTNKYAEGYTAARYYGGCEFVDIAEDLAIQRLKKLYKCEYANVQPHSGAQANGAVMLALIKPGDTILGMSLDAGGHLTHGSAPSMSGKWFNAVQYGLDDEGLIDYDEVESLAKEHKPKIIIAGGSAYSRIIDFKKFREICDLVGAYLHVDMAHFSGLVAAEEYPNPLEFADVVTSTTHKTIRGARGGMILSNNSDLGKKFNSAVFPGYQGGPLMHVIAGKAVAFGEALKPEFKE

SEQ ID NO: 107158 - protein, 225 aa, Unknown
  Bacterial polypetide isolated from the Sargasso Sea
MVDMAHFSGLVAGKGYPNPCDYAHVVTSTTHKVFRSARGGIILTNHEELSKKFNTAVFPGYQGGPLMHVIAAKAAGFLEALQPDFQDYIKSVLANAKILAETLKNNGFKIYSDGTDTHLMLVDLRPYNVKGNLAAESLSRANITCNKNGIPFDTEKPIITSGIRLGTQAITTRGFGLNECKKVGELITKNLKGLAENPEDNSKIEEEVRNEVIALTSSFPIYKNL

SEQ ID NO: 107159 - protein, 298 aa, Unknown
  Bacterial polypetide isolated from the Sargasso Sea
GHLTHGAKPAQSGKWFNAVHYDVKEDTGLIDYENVEKLALEHKPKLIIAGGSAYSRVINFKKFKDICQKINAYLLVDMAHFSGLVAGGAYPNPLEYADVVTSTTHKVLRGPRGGIILTNNETLYKKFNSAVFPGLQGGPLMHVIAAKAVCFKEALSGEFKKYTSDVISNAKILSETLVENNFKIFSGGTDTHLMLVDLRPYKVTGKDAEESLGRANITCNKNGIPFDTESPMITSGIRLGTPAATTRGFKSQEFKLVGKLITKVIKGLSENPKNNTKIEKEVQKEVVDLCSDFPIYSG

SEQ ID NO: 107160 - protein, 305 aa, Unknown
  Bacterial polypetide isolated from the Sargasso Sea
LTHGSSVNFSGKIYSSCFYGVKKNNGLLDYNQLEKVAFKEKPKLIICGASSYSRDWDYKKIREIADSVSAIVLADIAHPSGLIARGLLNDPLDHCHIVTSTTHKTLRGPRGGIIMMRNDYDNPLGTKSPKGNLKSLSSVLDSAVFPGTQGGPLEHIIAAKAISFEEALSDNYMQYILQVKKNAKMMAKCLIEKGYNIISNGTENHLMLIDLSNKDITGKVAENTLGKADITINKNMVPFDKESPFITSGMRIGSAAITTRGMKEKEMKKVVFYIDEVLKNRNNEKRIREIKNEINNWMVDYPLFK

SEQ ID NO: 107161 - protein, 139 aa, Unknown
  Bacterial polypetide isolated from the Sargasso Sea
YISNVLANAKILAETLKTNGFKIYSGGTDTHLMLVDLRPFGVKGNAAAESLSRANITCNKNGIPFDTESPMVTSGIRLGSQAATTRGFGLNEFKIVGELITKVIKGLSSNPEDNKKIEDEVRKEVVDLCSNFPIYKNLG

SEQ ID NO: 107162 - protein, 208 aa, Unknown
  Bacterial polypetide isolated from the Sargasso Sea
MNILQNLKESDPVISNFINSEKNRQETHLELIASENFASIAVMQAQGSVLTNKYAEGLPQKRYYGGCEFVDEIEELAIQRAKKLFNANWANVQPHSGAQANAAVFLSLLKPGDTIMGMDLSHGGHLTHGSPVNMSGKWFNAVHYGVNKETSELNFDEIRDIALETKPKLIICGYSAYPRTIDFESFRNIADEVGAFLMADIAHIAGLV

SEQ ID NO: 107163 - protein, 235 aa, Unknown
  Bacterial polypetide isolated from the Sargasso Sea
ALFQPHDTILGMSLASGGHLTHGAKPNLYGKWFNAVQYGVKKDGNDKDLIDYDEVEALALEHKPKMIIAGASAYPRIIDWKKFRNIADKVGAYFLVDMAHYSGLIAGNQYPNPIDHAHIVTCTTHKTLRGARSAMILTNHEDLYKKINSAVFPGLQGGPLMHIIAARAVCFGEALKPEFEEYIKNVIASAKVMSQTLVDRGFRIVTGGTDSHIVWLDLTPKGLTGDKAEKILEDV

SEQ ID NO: 107164 - protein, 185 aa, Unknown
  Bacterial polypetide isolated from the Sargasso Sea
TNNEEIFKKINSAVFPGYQGGPLMHVIAAKAVAFQEALQPSFKIYIKSVLENAKILSETLKNNGFKIFSGGTDTHLMLVDLRPFKVTGKNAEASLCRANITCNKNGIPFDSAKPTITSGIRLGSQAATTRGFGLNEFKKVGDLITRVIKGLSTNPEDNTKTEQEVRKEVVTLCAKFPIYNHLIKK

SEQ ID NO: 107165 - protein, 122 aa, Unknown
  Bacterial polypetide isolated from the Sargasso Sea
TNGFKIYSDGTDTHLMLVDLRPFDVKGNVAAESLSRANITCNKNGIPFDSESPMITSGIRLGSQAATTRGFGLNEFKLVGELITKTIKGLSLNPNDNSKVEDEVRKEVVDLCSNFPIYKNLG

SEQ ID NO: 107166 - protein, 197 aa, Unknown
  Bacterial polypetide isolated from the Sargasso Sea
MSSEGKYLNPEYQNFFEKKLSEIDPEISKAIDDELIRQQNHIELIASENIVSQAVLEAQGSVLTNKYAEGYPGKRYYNGCEHVDVAESLAIERLKKLFDCKFANAQPHSGAQANGAVFLALLKPGDTIMGLSLNSGGHLTHGSKAAVSGKWFNAIAYEVDKETELLDYNEIERLALEHKPKMLIAGGSAYSRIIDLK

SEQ ID NO: 107167 - protein, 286 aa, Unknown
  Bacterial polypetide isolated from the Sargasso Sea
DLFTKGIKEADPEVYGTLSRELERQQNQIELIASENIASRSILNAQGSVMTNKYAEGYPGKRYYGGCEFVDQAEEIALERVKKLFNCKFANLQPHSGAQANQAVFLALLQPHDTILGMSLASGGHLTHGAKPNLSGKWFNAVQYGVKKDGNDKDLIDYDEVEALALEHKPKMIIAGASAYPRTIDWKKFREIADKVGAYFLVDMAHYSGLVAGKQYPNPIEHAHVVTSTTHKTLRGARSAMILTNHEDLYKKINSAVFPGLQGGPLMHVIAARAVCFGEALKPEFE

SEQ ID NO: 107168 - protein, 212 aa, Unknown
  Bacterial polypetide isolated from the Sargasso Sea
MSIAVKFNKYLNSFFKLNLKEADKELYTSIEQEFLRQQNHIELIASENIVSRAVLEAQGSVLTNKYAEGYPGKRYYGGCENVDISENLAIERAKKLFNCKYANVQPHSGAQANGAVYLALLKPGDTTLALSLNSGGHLTHGAKPAQSGKWFNALHYEVEKNSGLIDYNSVEKLALENKPKLIIAGGSAYSRIIDFKKFRKICDKVGAFLLVD

SEQ ID NO: 107169 - protein, 284 aa, Unknown
  Bacterial polypetide isolated from the Sargasso Sea
AGELAVYTALLQPHDRIMGLDLPSGGHLTHGYYTAHGKKISATSIFFESLPYKVDPKTGYIDYDKLEEKAMDFRPKMIVCGGSAYARDWDYARFREIADKCGAMLMSDMAHISGLVAAEEQAQPFDYCDIVTTTTHKSLRGPRSGMIFFRRGINPKTGKDYNYESRVNMSVFPALQGGPHNHQIGALAVALKHAQTPEFKAYIKQVKANAKACGEALMAKGYSLVTGGTDNHLVLWDLRPLGLTGSKMEYLCDLLHITLNKNAVFGDASALSPGGVRIGAPAMT

SEQ ID NO: 107170 - protein, 103 aa, Unknown
  Bacterial polypetide isolated from the Sargasso Sea
DAVGSHRQEYTGKDADAALGEAYITVNKNAVPNDPRSPFVTSGLRLGTPAITTRGFSVEETELLTGWICDVLASLEAGTSDQVIPAIREQVKTLCAKMPVYAN

SEQ ID NO: 107171 - protein, 233 aa, Unknown
  Bacterial polypetide isolated from the Sargasso Sea
FREIANKINAYFLVDMAHFSGLVAGGVHPNPIDHADIVTTTTHKTLRSGRGGMILTNNEELFKKINSAVFPGLQGGPLMHVIAGKAAGFGEALTNEFKTYSKNVVLNAQCLSKTLIKRGYEIVSGGTDNHIVLLNLNNKNITGSSAELALENAGLTCNKNGIPFDPLPPSITSGVRFGSAAATTRGFQEKEFELIGNFIADVLDGIKDNKSDEEKEKLIYEKVKNLCASFPIY

SEQ ID NO: 107172 - protein, 255 aa, Unknown
  Bacterial polypetide isolated from the Sargasso Sea
LIIAGGSAYSRVINFEKFRNIADKIGAYFMVDMAHFSGLVAGKGYPNPVKFADVVTSTTHKVFRSARGGIILTNREDLSKKFNSAVFPGYQGGPLMHIIAAKAVGFLEALKPEFQDYIKSVLANAKILSETLKNNGFKIYSGGTDTHLMLVDLRPFGVKGNIASDSLSRANITCNKNGIPFDTESPMITSGIRLGSQAATTRGFGLKEFEKIGELITKTIKGLEKNPSDNSKIEEEVRNEVIDLCSKFPIYKHLR

SEQ ID NO: 107173 - protein, 293 aa, Unknown
  Bacterial polypetide isolated from the Sargasso Sea
MNPLNHHLQQQDPDIAQFIAQENDRQEHHIELIASENYTSKAVMQAQGSQLTNKYAEGYPGKRYYGGCEAVDKVEQLAIDRAKALFEADYVNVQPHSGSQANTAVYMALLNPGDTILGLSLDHGGHLTHGAKPNFSGKLYNAIQYGLNTETGEIDYAQVEALANEHKPKMIVAGFSAYSRVVDWQRFRDIADSVGAYLLVDMAHVAGLVAADVYPSPINAAHVVTTTTHKTLRGPRGGLIMCKSNPELEKKFNSLIFPGIQGGPLMHVIAAKAVAFKEAMTAEFKTYQKQVIT

SEQ ID NO: 107174 - protein, 85 aa, Unknown
  Bacterial polypetide isolated from the Sargasso Sea
MSKTKKITNGSYQEYFDNDLSLRDPELYNSIKLELERQQQHIELIASENIVSKAVLDAQGSILTNKYAEGYPGKRYYGGCEFVDK

SEQ ID NO: 107175 - protein, 286 aa, Unknown
  Bacterial polypetide isolated from the Sargasso Sea
SENYASKRVLEAQGSVLTNKYAEGYPNKRYYGGCEHVDGAETLAIERAKTLFNAKFANVQPHSGASANAAVFLALMEPGDTFLGMALDQGGHLTHGSKVNFSGKNFNAIQYGLDKVSGDIDYAEVRRLAHEHNPKMIVAGFSAFMGIVDWKLFREIADEVGAYLMVDMAHVSGLVAGGVYPNPVEFAHVVTSTTHKSLRGPRSGIILSNEDQEFQKKLNFAVFPGSQGGPLMHVIAAKAVCFKEAMTDDFKDYQKQIISNAQIMCEQFKLRGFDLVQENTDNHLIL

SEQ ID NO: 107176 - protein, 249 aa, Unknown
  Bacterial polypetide isolated from the Sargasso Sea
IMAGGSAYPRIIDFKRFREIANKINAYFLVDMAHFSGLVAGGMHPNPIDYADIVTTTTHKTLRSGRGGMILTNNEDLFKKINSAVFPGLQGGPLMHVIAGKAAGFGEALTNEFKIYAKNVVLNARCLSKILIKRGYEIVSGGTDNHIVLLNLNNKNITGASAELALENAGLTCNKNAIPFDPLPPSITSGVRFGTAAATTRGFQEKEFELIGNLIADVLDGFKDNKSNMQIEKLIYEKVRNLCENFPIY

SEQ ID NO: 107177 - protein, 120 aa, Unknown
  Bacterial polypetide isolated from the Sargasso Sea
LKIYQGGTDTHLMLVDLRPFNVKGNLAAESLDRANITCNKNGIPFDTESPMVTSGIRLGTQAATTRGFGLEEFRKVGNLITKTIKGLSENPDDNSKIEKEVQEEVIELCSKFPIYKNLRK

SEQ ID NO: 107178 - protein, 165 aa, Unknown
  Bacterial polypetide isolated from the Sargasso Sea
GPLMHIIAAKAVPFQEALQPNFKEYIKSVLDNAKILSETLKNNGFKIFSGGTDTHLMLVDLRPFNVTGKDAETSLCKANITCNKNGIPFDAAKPTITSGIRLGSQAATTRGFGLNEFKIVGNLITKVIKGLEKNKDNNTEIENEVKKEVVELCSRFPIYKHLNRK

SEQ ID NO: 107179 - protein, 97 aa, Unknown
  Bacterial polypetide isolated from the Sargasso Sea
MSELFKKGIRETDPEVYGTLSRELERQQNQIELIASENIASKSILNAQGSVMTNKYAEGYPGKRYYGGCEFVDQAEEIALERVKKLFNCQYANLQPH

SEQ ID NO: 107180 - protein, 145 aa, Unknown
  Bacterial polypetide isolated from the Sargasso Sea
KPDFKEYIKSVLDNAKILSETLKNNGFKIYSGGTDTHLMLVDLRPFNVKGNIAAESLSKANITCNKNGIPFDDESPMITSGIRLGSQAATTRGFGLNEFKLVGELITKTIKGLSENPNDNSKVEDEVRKEVVDLCSNFPIYKNLG

SEQ ID NO: 107181 - protein, 300 aa, Unknown
  Bacterial polypetide isolated from the Sargasso Sea
YYGGCEFVDKAEEFALERVKKLFNCKYANVQPHSGAQANGAVYLALLKPGDTILGMSLNSGGHLTHGAKVAQSGKWLNAFHYEVDKVTGLIDYDQVKELALKNKPKLLIAGGSAYSRIIDFKKFREIADSIGAYLMVDMAHFSGLVAGHGYPNPIDYADVVTSTTHKVLRGGRGGIILTNREDLFKKFNSAVFPGYQGGPLMHVIAAKAAAFQEALKPEFKEYIKSVLANAKILSETLKNNGFKIFSGGTDTHLMLVDLRPFKVTGKAAEVSLCNSNITCNKNGIPFDTEKMTITSGYRL

SEQ ID NO: 107182 - protein, 312 aa, Unknown
  Bacterial polypetide isolated from the Sargasso Sea
EADPEVYGTLSRELERQQNQIELIASENIASRSILNAQGSVMTNKYAEGYPGKRYYGGCEFVDQAEEIALERVKKLFNCKFANLQPHSGAQANQAVFLALLQPHDTILGMSLASGGHLTHGAKPNLSGKWFNAVQYGVKKDGNDKDLIDYDEVEALALEHKPKMLIAGASAYPRTIDWKRFREIADKVGAYFLVDMAHYSGLVAGKQYPNPIAHAHVVTSTTHKTLRGARSAMILTNHEDLYKKINSAVFPGLQGGPLMHVIAARAVCFGEALKPEFEEYIKNVIASAKVMAKTLVDRGFRIVTGGTDSHIV

SEQ ID NO: 107183 - protein, 269 aa, Unknown
  Bacterial polypetide isolated from the Sargasso Sea
ENVEKLALEHKPKLIIAGGSAYSRVIDFKRFREIADKVGAYLMVDMAHFSGLVAGKGYPNPCDYAHVVTSTTHKVFRSARGGIILSNDLDLGKKFDTAVFPGYQGGPLMHIIAAKAAGFFEALKPEFQTYIKNVLANAKMLAETLKNNGFKIYSGGTDTHLMLVDLRPFGVKGNTASESLCRANITCNKNGIPFDTEKPMITSGIRLGSQAATTRGFGLKEFEKVGELITKVIKGLSKNPEDNRQVEEEVRKEVINLCSNFPIYKNLNR

SEQ ID NO: 107184 - protein, 283 aa, Unknown
  Bacterial polypetide isolated from the Sargasso Sea
NRAKELFGAEYAFVQPHSGSQANTAVFSAFLKPNDSILGFDLSHGGHLTHGSPVNFSGQLYKAHFYGVEKQTGRLDYDKIHMIALRVKPKMIIAGASSYSRDMDFKKFRNIADEVGAFLLADIAHPAGLIASGLLSDPLPFCDVITTTTHKTLRGPRGGLILMGKDFENPFGITLKNGSLRRMSHLINMSVFPGNQGGPLEHVIAAKAIAFGEALEPKFKDYMKRVQTNASLMADLFIEKGYNVISGGTDNHMLLIDLRNKNITGKDAEEILAKAEITVNKNM

SEQ ID NO: 107185 - protein, 120 aa, Unknown
  Bacterial polypetide isolated from the Sargasso Sea
MSSESKYLNDQYKGFFEDSLSKTDPELYKAINDELKRQQEHIELIASENIVSQAVLEAQGSVLTNKYAEGYPGKRYYNGCEHVDVAENLAIERLKKIFDCKFANAQPHSGAQANGAVFLA

SEQ ID NO: 107186 - protein, 168 aa, Unknown
  Bacterial polypetide isolated from the Sargasso Sea
MSKELKINNNFFEQSLKDSDPELYSSISEELDRQKNHLELIASENIASKAVIEAQGSVLTNKYAEGYPGKRYYGGCEFVDKSENLAIQRATKLFNVQFANVQPHSGAQANGAVFLALLNPGDTILGMGIDQGGHLTHGAPPAQSGKWFKAVAYGVDKKTGLIDYDQVK

SEQ ID NO: 107187 - protein, 331 aa, Unknown
  Bacterial polypetide isolated from the Sargasso Sea
NGCEHVDVAEKLALERIKKLFNCKYANVQPHSGAQANGAVFLALLKPHDTFMGMSLNSGGHITHGLKISMSGKWFNAVSYDVDKESELIDYDNVEKLALEHKPKLIIAGGSAYSRVIDFKRFREIADKVGAYLMVDMAHFSGLVAGKGYPNPCDYAHVVTSTTHKVFRSARGGIILSNEEDLGKKFDTAVFPGYQGGPLMHVIAAKAAGFYEALKPDFQTYIKNVLANAKMLAETLKNNGFKIYSGGTDTHLMLVDLRPFNVKGNLASESLCRANITCNKNGIPFDTEKPMITSGIRLGSQAATTRGFGLKEFEKVGNLITKVIKGLSENP

SEQ ID NO: 107188 - protein, 242 aa, Unknown
  Bacterial polypetide isolated from the Sargasso Sea
RQEDHIELIASENYASKRILEAQGSLLTNKYAEGYPSKRYYGGCENVDIAENLAIERAKKLFKADYANVQPHSGSSANAAAYLALLEPNDTILGMSLDHGGHLTHGSKVNFSGRNYKSVQYGLHPETNDINYEEVRSLAKEHRPKLIIAGFSAFSGIVNWKKFREIADEVDAYFLVDMAHVSGLVAADLYPSPVPYADVVTSTTHKTLRGPRSGIILARANQEIEKKLNSAVFPGSQGGPLM

SEQ ID NO: 107189 - protein, 251 aa, Unknown
  Bacterial polypetide isolated from the Sargasso Sea
VEFEKFREVADEVGAFLHGDICHNSGLIAAEMHPSPFPHCHVVSTSTHKSLRGPRGGIILLGSDYENPFGKVAPKSGRIKMMSELIDSAVMPGMQGGPLMHIIAAKAVAFKEALEPSFKTYIRGVLDNAQCFAEEFKSKGYKLISGGTDTHLVLIDLQNKNISGKAAEIALDEAGITVNKNMIPFDPKSPFITSGIRIGSPAMTTRGMGTDEVKIIVDLIDQVILNHDNKEKIQSVKKRVNELCSSFQIYD

SEQ ID NO: 107190 - protein, 117 aa, Unknown
  Bacterial polypetide isolated from the Sargasso Sea
MKSLRSDSIFSNNNTIKDYDNELWASFQHEAERQEDHIELIASENYASKRILEAQGSLLTNKYAEGYPSKRYYGGCENVDIAENLAIDRAKELFKADYANVQPHSGSSANAAAYLAL

SEQ ID NO: 107191 - protein, 155 aa, Unknown
  Bacterial polypetide isolated from the Sargasso Sea
MKQSSNQNIFSTKITKSSKSDSIFSNEESIKNYDAELWKSFEYEADRQEDHIELIASENYASKRILEAQGSLLTNKYAEGYPSKRYYGGCENVDIAENLAIERAKKLFKADYANVQPHSGSSANAAAYLALLEPNDLILGMSLDHGGHLTHGSKG

SEQ ID NO: 107192 - protein, 221 aa, Unknown
  Bacterial polypetide isolated from the Sargasso Sea
AIERAKELFGCKFVNVQPHSGAQANQAVFLSLLQPGDTILGMSLAAGGHLTHGAAPNLSGKWFNAVQYGVDEGTAQIDFDELQKLAEQHKPKMILAGGSAYPRTIDFATFRKIADSVGAYFMVDMAHISGLVAAGVHPSPLPHADVVTSTTHKTLRASRGGLIMTNNEALGKKFNSAVFPGLQGGPLMHAIAGKAAAFAEALRPEFKSYIQTVVSNARILS

SEQ ID NO: 107193 - protein, 291 aa, Unknown
  Bacterial polypetide isolated from the Sargasso Sea
MTNKYAEGYASSRYYGGCEFVDIAEDLAIKRLQKLYKCEYANVQPHSGAQANGAVMLALIKPGDTILGMSLDAGGHLTHGSAPSMSGKWFNAVQYGLEDNGLIDYDEVERLAKEHNPKIIIAGGSAYSRIIDFKKFREICDQVGAFLHVDMAHFSGLVAAEEYPNPLEYADVVTSTTHKTIRGARGGMILSNNLELGKKFNSAVFPGYQGGPLMHVIAGKAVAFGEALKPEFKEYIKQVIANAKILSNTLVNGGLKIVSGGTDTHLILVDLTPMDLTGDSAQTSLEAANIT

SEQ ID NO: 107194 - protein, 261 aa, Unknown
  Bacterial polypetide isolated from the Sargasso Sea
ANMAVYLSILEPGDTVLGMSLDQGGHLTHGSPVNFSGQVYNFVGYGLDEDTELINMETVYNMALEHKPKLIIAGYSSYSQSLDFQKFREIADEVGSHFMVDAAHFIGLVAGKVVDNPTKYADVVTATTHKALRGPRGGIILTREEFAKDIDKNIFPGAQGGALNNQIAAKAVCFKEALTNEYQEYAKQILNNAKALSDSFQEQGLRVISGGTENHIVLVDTRSVDEELTGKEAGILLNDRGVTLNRNAIPFDPRSPFITSG

SEQ ID NO: 107195 - protein, 98 aa, Unknown
  Bacterial polypetide isolated from the Sargasso Sea
MLDKKSSIKTDAIFSNKKDIELYDAELWESFQKEMVRQEEHIELIASENYASKRVLQAQGSVLTNKYAEGYPEKRYYGGCEFVDIAEKLAIERAKELF

SEQ ID NO: 107196 - protein, 297 aa, Unknown
  Bacterial polypetide isolated from the Sargasso Sea
KPGDTILGMSLNSGGHLTHGAKVAQSGKWLNAFHYEVDKVTGLIDYDQVKELALKHKPKLLIAGGSAYSRIIDFKKFREIADSVEAYLMVDMAHFSGLVAGHGYPNPIDYADVVTSTTHKVLRGGRGGIILTNREDLFKKFNSAVFPGYQGGPLMHVIASKAAAFQEALKPEFKEYIKSVLANAKILSETLKNNGFKIFSGGTDTHLMLVDLRPFKVTGKAAEVSLCNSNITCNKNGIPFDTEKMTITSGIRLGSQAATTRGFGLNEFKKIGELITKVVKGLSNSPNDNSKIESEVR

SEQ ID NO: 107197 - protein, 303 aa, Unknown
  Bacterial polypetide isolated from the Sargasso Sea
ATLRESDPEIAAAIEHELIRQQDQIEMIASENIVSVAVMEAQGSVFTNKYAEGYSGRRYYGGCEYMDVVETLAIERAKQLFNCKYVNVQPHSGAQANQAVFLSLLKPGDTILGMSLAAGGHLTHGAAPNLSGKWFKAEQYGVNAETGRIDYDELMVKAKECQPKLILGGGSAYPRTLDFAAFRKIADEVGAYLMVDMAHISGLVAAGVHPNPVEHAHVVTSTTHKTLRAGRGGIILCNDEALGKKFNSAVFPGLQGGPLMHAIAGKAVAFGEALRPEFRDYIERVVANTHILSDTLVERGAAI

SEQ ID NO: 107198 - protein, 231 aa, Unknown
  Bacterial polypetide isolated from the Sargasso Sea
SVEAYLLCDMAHFAGLVAAGLHPSPLPYAHVATTTTHKTLRGPRGGMILSNYQDLGKRFNSAVFPGLQGGPLMHVIAAKAVAFGEALEPKFTDYCHSVVNNADALASTLVDRGLDIVAGGTDTHLVLVDLRPMGLKGNDTEVSLERAGITCNKNAIPFDPEKPAVTSGVRLGTPAATTRGFGIDEFRHVGNLIGDVLDGLAANPEDNSVAENKARKEVAALCSKFPIYQQI

SEQ ID NO: 107199 - protein, 74 aa, Unknown
  Bacterial polypetide isolated from the Sargasso Sea
MVPFDQRSPFITSGIRIGTPAITTRNMGIEEMKDIAKLIDRVIIDPENDENIQKVKSEVEELCESYPIYKEFSN

SEQ ID NO: 107200 - protein, 121 aa, Unknown
  Bacterial polypetide isolated from the Sargasso Sea
MGKTLEKLREDYRDFFDKDLSISDPELFNSIKLELKRQQEHIELIASENIVSKAVLDAQGSILTNKYAEGYPGKRYYGGCEFVDKAEDLALDRVKKLFNCKFANVQPHSGAQANGAVYLAL

SEQ ID NO: 107201 - protein, 164 aa, Unknown
  Bacterial polypetide isolated from the Sargasso Sea
MISDLFKKGIKEADPEVYGTLSRELERQQNQIELIASENIASRSILNAQGSVMTNKYAEGYPGKRYYGGCEFVDQAEEIALERVKKLFNCQYANLQPHSGAQANQAVFLALLQPHDTILGMSLASGGHLTHGAKPNLSGKWFNAVQYGVKKDGNDKDLIDYDEV

SEQ ID NO: 107202 - protein, 299 aa, Unknown
  Bacterial polypetide isolated from the Sargasso Sea
ELIASENFASPAVMAAQGSVLTNKYAEGLPNKRYYGGCEHVDAIEELAIERAKQLFGAEWANVQPHSGAQANFAVFLALLQPGDTILGMDLSHGGHLTHGSPVNVSGKWFKAVHYGVDPDTQRLNLESIRELALEHKPKLIICGYSAYPRTIDFAGFRAIADEVGAYLLADMAHIAGLVAAGVHPNPVPHCHVVTTTTHKTLRGPRGGLILCNDAAFAKQFDKAVFPGTQGGPLEHVVAAKAVAFGEALQPSFRDYSRQVVANAQALAARIQARGIAVVSGGTDNHVVLLDLRGIGMTG

SEQ ID NO: 107203 - protein, 114 aa, Unknown
  Bacterial polypetide isolated from the Sargasso Sea
GTDTHLMLVDLRPFNVKGNLASESLCRANITCNKNGIPFDTEKPMITSGIRLGYQAATTRGFGLKEFEKVGNLITKVIKGLSENPEDNSKVENEVRNEVINLCSNFPIYKNLNK

SEQ ID NO: 107204 - protein, 256 aa, Unknown
  Bacterial polypetide isolated from the Sargasso Sea
KPKVLIAGASSYSQIIDFKKMREIADKVGAYLLVDMAHIAGLVATGCHPSPIPHAHVVTTTTHKTLRGPRGGLILWNDESLTIQINKGVFPGTQGGPLEHVIAAKAVCFKDAASKKFKDYQEQVIKNTKVLADSLMEYDFKLVSGGTQNHLVLINLSGSTVSGKDFEQTLEKIAITVNKNTVPNETRSPFVTSGIRIGTPALTSRHMRESEMKQIAKFIKEAFDAHHNKDDLSHLRKKVVAFAKKFPLYDNWTCGN

SEQ ID NO: 107205 - protein, 171 aa, Unknown
  Bacterial polypetide isolated from the Sargasso Sea
AVFPGLQGGPLMHVIAARAVCFGEALKPEFEEYIKNVIASAKVMAKTLVDRGFRIVTGGTDSHIVWLDLTPKGLTGDKAEKILEEVGLACNKNAIPYDPNPPKITSGLRFGTAAATTRGFNQKDFEQVGNMIADILDSLLLEENERSEVFNKTRKDVIELCKKYPIYSEAF

SEQ ID NO: 107206 - protein, 251 aa, Unknown
  Bacterial polypetide isolated from the Sargasso Sea
LFSVIEKENNRQEQEIELIASENITSLAVMQAQGSVMTNKYAEGYPGRRYYGGCEYVDMAEELAIERIKKLFNCNFANVQPNSGSQANQAVFMSLMKPGDTFLAMDLASGGHLTHGAKPNLSGKWFNAIHYGVNRETEIIDYSQVEELAKLHKPKVIIAGGSAVPRQINFKEFKRIAELVGAYLMVDMAHFSGLAAAGCHPNPLDFADVATSTTHKTLRGPRGGIILTNDEELAKKFNSAIFPGLQGGPLM

SEQ ID NO: 107207 - protein, 228 aa, Unknown
  Bacterial polypetide isolated from the Sargasso Sea
YLALLKPGDTILGMSLNSGGHLTHGAKVAQSGKWLNAFHYEVDKVTGLIDYDQVKELAQKNKPKLLIAGGSAYSRIIDFKKFREIADNIGAYLMVDMAHFSGLVAGHGYPNPIDYADVVTSTTHKVLRGGRGGIILTNREDLHKKFNSAVFPGYQGGPLMHVIAAKAAAFQEALKPEFKNYIKEVLANAKILSETLKNNGFKIFSGGTDTHLMLVDLRPFKVTGKAAE

SEQ ID NO: 107208 - protein, 216 aa, Unknown
  Bacterial polypetide isolated from the Sargasso Sea
MSVNFFNDSIKTSDPEVYATLQKELERQQNQIELIASENIASKAVLNAQGSVMTNKYAEGYPGNRYYGGCEFVDQAENIALERVKKLYNCKYANLQPHSGAQANQAVFLALLQPHDTILGMSLASGGHLTHGAKPNLSGKWFNPVQYGVKKDGNDKDLIDYDEVEALATQHKPKLIIAGASAYPRIIDWKKFRDIADKIGAYFLVDMAHYSGLIAG

SEQ ID NO: 107209 - protein, 108 aa, Unknown
  Bacterial polypetide isolated from the Sargasso Sea
MSSEGEYLNSTYRDFFEKKLSESDPELFKAIDDELKRQQQHIELIASENIVSQAVLEAQGSVLTNKYAEGYPGKRYYDGCEHVDVAENLAIERLKKLFDCKFANAQPH

SEQ ID NO: 107210 - protein, 177 aa, Unknown
  Bacterial polypetide isolated from the Sargasso Sea
KKINTAVFPGYQGGPLMHIVAAKAAGFFEALRPEFKDYIKSVLANAKILSETLKNNGFKIYSGGTDTHLMLVDLRPFNVKGNLAAESLSRANITCNKNGIPFDTESPMITSGIRLGSQAATTRGFGLKEFEKVGELITKVIDGVSKNPNDNSNIEDEVRKEVISLCSSFPIYKNLRK

SEQ ID NO: 107211 - protein, 267 aa, Unknown
  Bacterial polypetide isolated from the Sargasso Sea
NYDEVEELAKEHKPKIIIAGGSAYSRIIDFKRFREIANEVGAFLHVDMAHFSGLVAAEEYPNPLEYADVVTSTTHKTIRGARGGMILSNNPDLGKKFNSAVFPGYQGGPLMHVIAGKAVAFGEALKPEFKDYIKQVIQNAKTLSQTLVDGGLKIVSGGTDTHLILVDLTPMSLTGDAASTSLEESHITCNKNGIPKDPRPPKVTSGIRLGTPAATTRGFKEKEFEIVGNLILETLRGLQQNPENNNEVEKVVKNKVIKLCEQFPIYS

SEQ ID NO: 107212 - protein, 288 aa, Unknown
  Bacterial polypetide isolated from the Sargasso Sea
MGLKISMSGKWFNAIGYDVDKESELIDYDNVEKIALENKPKLIIAGGSAYSRIIDFKRFREIADKVGAYLMVDMAHFSGLVAGKGYPNPCEYAHVVTSTTHKVFRSARGGIILTNHEDLSKKFNSAVFPGYQGGPLMHIIAAKAAGFLEALKPEFKDYIKSVLANAKILSETLKNNGFKIYSGGTDSHLMLVDLRPFGVKGNMAAESLSRANITCNKNGIPFDSESPMITSGIRLGTQAATTRGFGLKEFEKVGKLITKTINGLSKNLNDNSKIEYEVRKEVVDLCSN

SEQ ID NO: 107213 - protein, 214 aa, Unknown
  Bacterial polypetide isolated from the Sargasso Sea
MSSETKYLNSEYKDFFEKSLLDSDPEIYNAINDELVRQQNHIELIASENIVSQAVLEAQGSILTNKYAEGYPGKRYYNGCEHVDVAEQLAIDRLKELFNCKFANAQPHSGAQANGAVFLALLKPGDTFMGMSLNSGGHITHGLKISMSGKWFNAIGYEVDKESELIDYDNVEKLALEHKPKLIIAGGSAYSRVIDFKRFREIADKVGAYLMVDM

SEQ ID NO: 107214 - protein, 267 aa, Unknown
  Bacterial polypetide isolated from the Sargasso Sea
GYSGKRYYGGCEFVDISENLAIERAKKLFNCKFANVQPHSGAQANGAVYLALIKPGDTILGMSLNSGGHLTHGAKPAQSGKWFNAVHYDVKEDTGLIDYENVEKLALEHKPKLIIAGGSAYSRIINFKKFKDICKKVNAYLLVDMAHFSGLVAGGAYPNPLEYADVVTSTTHKVLRGPRGGIILTNDETLYKKFNSAVFPGLQGGPLMHVVAAKAVCFNEALSDEFKKYTSNVISNAKVLSETLIENNFKIFSGGTDTHLMLVDLRP

SEQ ID NO: 107215 - protein, 125 aa, Unknown
  Bacterial polypetide isolated from the Sargasso Sea
SEKLKEKGFKIFSGGTDTHLMLIDLRSFGVTGKDAQASLGRANITCNKNGIPFDSESPMITSGIRLGTPACTTRGFGADEFKLIGDLIYKVIDGLSKNKEDNSKIEKEVQKEIIELCSSFPIYSS

SEQ ID NO: 107216 - protein, 138 aa, Unknown
  Bacterial polypetide isolated from the Sargasso Sea
MSSETKYLNSEYKDFFERSLSEADPDLFKAINDELVRQQNHIELIASENIVSQAVLEAQGSVLTNKYAEGYPGKRYYNGCEHVDVAEQLALERIKKLFNCKYANVQPHSGAQANGSVFLALLKPGDTFLGMSLNSGGH

SEQ ID NO: 107217 - protein, 60 aa, Unknown
  Bacterial polypetide isolated from the Sargasso Sea
VTSGIRIGTPAITTRGLKEEDMGFIAESINDVINNYENNEKLNSISDNVKSEMKDRPLFA

SEQ ID NO: 107218 - protein, 223 aa, Unknown
  Bacterial polypetide isolated from the Sargasso Sea
MKEFFNNSIGSADAQVASFINSEFNRQNEQIELIASENIVSKAVLEAQGSVLTNKYAEGYPGRRYYGGCEFVDLAEKLAQERVKKLFNCLFANVQPHSGAQANQTVFLACLKPGDTILGMSLDAGGHLTHGAPPNQSGKWFDSVQYGVKKDTALIDYEEVEKLAHSHRPKLIIAGGSAYSRIIDFRRFKEIADSVGAYLLVDMAHFSGLVAGGVHPNPCRMPT

SEQ ID NO: 107219 - protein, 200 aa, Unknown
  Bacterial polypetide isolated from the Sargasso Sea
MSQPYSFIEENDSELYKVLLSEVSREEETLELIASENFVSYPVLQMAGSVMTNKYAEGYPGARYYGGCEFVDQAENLARDRAKTLFSCEYANVQPHSGSQANMAVLMTFISVGDTIMGLDLAHGGHLTHGSSVNFSGKLYNTVSYQVDRKTGRVNFDEVRKIAKENKPKLIICGGSAYPRFVEFSNFREIADEVGAYLIA

SEQ ID NO: 107220 - protein, 162 aa, Unknown
  Bacterial polypetide isolated from the Sargasso Sea
MKSEKIIFDLIKKEEERQINGIELIASENFVSENVMKAAGSVLTNKYAEGYPGKRYYGGCEVVDEVESIAIDRAKELFGAEYANVQPHSGSQANASVFHAFLNPGDKLLGFDLSHGGHLTHGSSVNFSGKIYNTSFYGVEKDSGTLDYENILRIAHKEKPQM

SEQ ID NO: 107221 - protein, 286 aa, Unknown
  Bacterial polypetide isolated from the Sargasso Sea
LSYIEKIDPELHEIIQREHKREHSTLELIASENFTSPAILEAAGGIMTNKYAEGYPGKRYYGGCVHVDEAENLAISRLKKLFRVEYCNVQPHSGSQANMAVFMTFLNVGDTIMGLDLAHGGHLTHGNAVNFSGQLYNSVLYQVNKKTGRVDFDNVRKLAKEHKPKIIICGGSAYPRYIEFEIFSEIANEVDAFLMADIAHPSGLIAAGVHPSPVPYCDVITSTTHKTLRGPRGGIIMMGKDKENIWGKVAPKSGRVKMISELLDSSVMPGMQGGPLMHIISAKAIA

SEQ ID NO: 107222 - protein, 226 aa, Unknown
  Bacterial polypetide isolated from the Sargasso Sea
MYDTSLTLTDFDPELAEAVQHEERRQEDHVELIASENYASPLVMAIQNSVFTNKYAEGYPGKRYYSGCEHVDVAERLAIERVKVLFDCDYANVQPHAGAQANAAVFLALTNPGDTVMGMNLAQGGHLTHGNPSNFSGRHYKIVPYGLDPETGLIDYDEMERIALETRPRMLIGGFSAYSRHKDWARMRAIADKAGAIFWVDMAHVAGLVAVGRYPDHCTRSCGDST

SEQ ID NO: 107223 - protein, 273 aa, Unknown
  Bacterial polypetide isolated from the Sargasso Sea
MSSEGKYINNSYKDFFEKSLSETDPELYKAINDELIRQQNHIELIASENIVSQAVLEAQGSVLTNKYAEGYPGKRYYNGCEHVDVAENLAIDRLKKLFDCKFANAQPHSGAQANGAVFLALLKPGDTFMGMSLNSGGHITHGLKISMSGKWFNAVGYDVDKKSELIDYDVVEKLALEHKPKLIIAGGSAYSRIIDFKRFREICDKVGAYFMVDMAHFSGLVAGKGYPNPCEYAHVVTSTTHKVFRSARGGIILTNHEDLAKKFTQQYFQATQE

SEQ ID NO: 107224 - protein, 226 aa, Unknown
  Bacterial polypetide isolated from the Sargasso Sea
MSKFSKYTSNDYQNYFDNDLSNTDPELFSSIKLELQRQQEHIELIASENIVSKAVLDAQGSIMTNKYAEGYPSKRYYGGCEFVDKAEELALERVKKLFNCKYANVQPHSGAQANGAVYLALLNPGDPILGMSLNSGGHLTHGAKVAQSGKWLKAFHYEVDEVTGLIDYDKIEELALEHKPKLIIAGGSAYSRVIDFKKFRKIADKINSYLMVDITHFSGLVAGKGY

SEQ ID NO: 107225 - protein, 195 aa, Unknown
  Bacterial polypetide isolated from the Sargasso Sea
KVFRSARGGIILTNHEDLSKKFNTAVFPGYQGGPLMHIIAAKAVGFKEALKPEFKDYIKTVLANAKILAETLKNNGFKIYSGGTDTHLMLVDLRPFNVKGNVAAESLSKANITCNKNGIPFDSESPMITSGIRLGSQAATTRGFGLKEFQIVGDLITKTIKGLAENPEDNSKTEDEVRKEVVSLCSNFPIYKHLG

SEQ ID NO: 107226 - protein, 147 aa, Unknown
  Bacterial polypetide isolated from the Sargasso Sea
MSSEKNYLNDSYKSFFEDSLSLKDPELYKAIKDELIRQQQHIELIASENIVSQAVLEAQGSVLTNKYAEGYPGKRYYNGCEHVDVAENLAIERLKKLFNCKFANAQPHSGAQANGAVFLALLRPGDTFMGMSLNSRWSPLLIGLKIS

SEQ ID NO: 107227 - protein, 178 aa, Unknown
  Bacterial polypetide isolated from the Sargasso Sea
MQKDKQIFDLIDVEKKRQVEGIELIASENFTSEQVMSATGSILTNKYAEGYPGKRYYGGCQVVDEIETLAISRAKELFGACWANVQPHSGSQANSAVFFACLKPGDTILGFDLAHGGHLTHGSSVNFSGRLYNPVFYGVDETTGMLDYDEIERIANKELPKMIIAGASAYSRDIDLRD

SEQ ID NO: 107228 - protein, 262 aa, Unknown
  Bacterial polypetide isolated from the Sargasso Sea
LALLNAGDTILCMSLAHGGHLTHGATVSSSGKLYKAVQYGLHPETGVIDYAQAEALALEHKPKLIIAGFSAYSGIIDWQKFREIADKVGAYLMVDMAHVAGLVAAGLYPNPVPVADVVTTTTHKTLAGPRGGLILARKNEEIEKKLNSAVFPGGQGGPLMHVIAAKAVAFKEALQPEFKVYQQQVLKNAVAMCDEMIKRGYKIVSGGTQNHLFLMDLIDKDITGKEADAWLGQAHITVNKNSVPNDPRSPFVTSGLRIGTPA

SEQ ID NO: 107229 - protein, 282 aa, Unknown
  Bacterial polypetide isolated from the Sargasso Sea
VQYGVDKETQRLDMEAIRQLALEHKPKLIVCGYSAYPRTIDFASFRAIADEVGAYLLADMAHIAGLVAAGVHPSPVPHCDVVTTTTHKTLRGPRGGLILCRDAEFAKKFDKAVFPGSQGGPLEHVIAAKAVAFGEALQPSFKAYSQQVVANAAALAEQLIARGIDVVSGGTDNHVVLLDLRGIGMTGKVADLLVSDVHITANKNTVPFDPESPFVTSGLRLGTAALTTRGFDAQAFREVADVIADRLLNPEDDAIRQRCLDRVAALCERFPLYADSKQPVLA

SEQ ID NO: 107230 - protein, 208 aa, Unknown
  Bacterial polypetide isolated from the Sargasso Sea
MPKTLENTREDFRDFFDSDLSKTDPKLYNSIKLELQRQQEHIELIASENIVSKAVLDAQGSILTNKYAEGYPGKRYYGGCEFVDKAEELALERVKKLFNCKFANVQPHSGAQANGAVYLALLKPGDTILGMSLNSGGHLTHGAKVAQSGKWLNAFHYEVDKVTGLIDYDQVKELALKNKPKLLIAGGSAYSRIIDFKKFREIADSIGA

SEQ ID NO: 107231 - protein, 170 aa, Unknown
  Bacterial polypetide isolated from the Sargasso Sea
NSSVFPGLQGGPLMHVIAAKAVAFGEALQPEFKTYIQQVKKNASILGEVLMSNGIDIVTGGTDSHMVLVDLRSKNVTGKDAEESLERAGMTCNKNGVANDPNPPTITSGIRLGSPAATTRGFKEEEFKFIGEKISTIINALSSSNADISMTESSILKDVTELCSNFPIYK

SEQ ID NO: 107232 - protein, 201 aa, Unknown
  Bacterial polypetide isolated from the Sargasso Sea
MSSETKYLNSDYKDFFEKGLLDSDPEIYKAINDELVRQQNHIELIASENIVSQAVLEAQGSVLTNKYAEGYPGKRYYNGCEHVDVAEQLAIDRLKELFNCKFANAQPHSGAQANGAVFLALLKPGDTFMGMSLNSGGHITHGLKISMSGKWFNAIGYEVDKASELIDYDNVEKLALEHKPKLIIAGGSAYSRVITLKDLEK

SEQ ID NO: 107233 - protein, 94 aa, Unknown
  Bacterial polypetide isolated from the Sargasso Sea
GSEAELNLEEAGITCNKNGIPNDPHPPKITSGIRLGTPAGTTRGFKEDEFKLVGKLILDVLNGMQGSPEERKSINENVKSKVSALCAEFPIYSN

SEQ ID NO: 107234 - protein, 261 aa, Unknown
  Bacterial polypetide isolated from the Sargasso Sea
MSNLKNQDPDIASIIDSEVKRQNNFLELIASENFTSKAVLEAVGSSLTNKYAEGYPGRRYYGGCIHVDEAENLAIDRAKKLFKAEYANVQPHSGSSSNMGIYLAMLEPGDCIMGLDLSHGGHLTHGSKVSFSGQIYNSVTFHVKKEDGLIDFDDLLKKAKEHKPKLIICGASAYPRQVEFEKFREIADEVGAFLHGDICHNAGLIAAEMHPSPFPYCHVVSTSTHKTLRGPRGGIILLGKDFENPYGIVAPKSGRVKMMSE

SEQ ID NO: 107235 - protein, 303 aa, Unknown
  Bacterial polypetide isolated from the Sargasso Sea
QAVFLALLKPHDTFLGMSLASGGHLTHGAKPNISGKWFNAIQYGVKKDGNDKDLIDYDEVEKLANEHKPKIIIAGASAYPRIIDWKKFRDIADNIGAYFMVDMAHYSGLIAGKQYPNPIEYADIVTSTTHKTLRGARSAMILTNNEDIYKKVNSAVFPGLQGGPLMHVMAAKAVSFGEALKPEFSEYISEVISNAKILANIFIQRGFRVVTGGTDSHIVWLDLSPKNLTGDKAEKLLEDVGIACNKNAIPYDPHPPKITSGIRFGTAAATSRGFNNNDFKEVGNIISDVLDSLLKNAEDQKII

SEQ ID NO: 107236 - protein, 283 aa, Unknown
  Bacterial polypetide isolated from the Sargasso Sea
PNDTILGMSLDHGGHLTHGSKVNFSGRNYKSVQYGLHPETHDINYDEVRSLAIEHQPKLIIAGFSAFTGIIDWKKFREIADEIGAYFLVDMAHVSGLVAAGLYPSPVPYADVVTSTTHKTLRGPRSGIILAKANEKIEKKLNSAVFPGSQGGPLMHVVAAKALCFKEALDPEFKIYIKQVMDNAKIMAETLMSNGIDIVSNGTENHIILVDLRSKGITGKDLERVLGTVNITVNKNSVPNDPASPFVTSGIRIGTPAATTRGFKEKEIIQVANWISDIINDFD

SEQ ID NO: 107237 - protein, 173 aa, Unknown
  Bacterial polypetide isolated from the Sargasso Sea
MERIKFIEAYDPEVANAIKQELNRQRDTIELIASENFTSKEVMDAQGTWLTNKYAEGLPSKRYYGGCEYVDIVEDLARDRAKTLFGADHANVQPHSGAQANVAVFTAFLKPGDTIMGMNLSHGGHLTHGSPVNFSGKFYNIVAYGVDKETGLIDYDALESLAIETQPKLIIGG

SEQ ID NO: 107238 - protein, 193 aa, Unknown
  Bacterial polypetide isolated from the Sargasso Sea
LRGARSAMILTNHEDLYKKINSAVFPGLQGGPLMHVIAARAVCFGEALKPEFEEYIKNVIASAKVMAKTLVDRGFRIVTGGTDSHIVWLDLTPKGLTGDKAEKILEEVGLACNKNAIPYDPNPPKITSGLRFGTAAATTRGFNQKDFEQVGNMIADILDSLLLEENERNVVFNKTRKDVIELCKKYPIYSEAF

SEQ ID NO: 107239 - protein, 292 aa, Unknown
  Bacterial polypetide isolated from the Sargasso Sea
GYPGKRYYGGCEFVDKAETLAIERAKKLFNVNFANVQPHSGAQANGAVFLALLKPGDTILGMGIDQGGHLTHGAPPAQSGKWFNAVHYGVRKDNGLIDYDQVKDLAKKHKPKLIIAGGSAYSRIIDFKIFREVADSVGAYLLVDMAHFSGLVAGKVYPNPCDFADVVTSTTHKVLRGPRGGIILTNNEELAKKFNSAVFPGLQGGPLMHVIAAKAVCFGEALKDEFKIYSRNVVDNAKILSETLKNSGFEIFSGGTDTHLILLDLRPIHVTGKDAEKSMVSANLTCNKNGIP

SEQ ID NO: 107240 - protein, 286 aa, Unknown
  Bacterial polypetide isolated from the Sargasso Sea
GAQANGAVYLALLKPGDTILGMSLNSGGHLTHGAKVAQSGKWLNAFHYEVDKVTGLIDYDQVKELALKNKPKLLIAGGSAYSRIIDFKKFREIADSIGAYLMVDMAHFSGLVAGHGYPNPIDYADVVTSTTHKVLRGGRGGIILTNREDLFKKFNSAVFPGYQGGPLMHVIAAKAAAFQEALKPEFKEYIKSVLANAKILSETLKNNGFKIFSGGTDTHLMLVDLRPFKVTGKAAEVSLCNSNITCNKNGIPFDTEKMTITSGIRLGSQAATTRGFGLNEFKKVGE

SEQ ID NO: 107241 - protein, 253 aa, Unknown
  Bacterial polypetide isolated from the Sargasso Sea
VCGYSAYPRTIDFAAFRSIADEVGAYLLADMAHIAGLVAAGVHPSPVPHCDVVTTTTHKTLRGPRGGLILCRDAEFAKKFDKAVFPGSQGGPLEHVIAAKAVAFGEALQPAFRAYSQQVVANAAALAARLIERGIDVVSGGTDNHVVLLDLRCIGMTGKVADLLVSDVHITANKNTVPFDPESPFVTSGLRLGTAALTTRGFDAEAFREVADVIADRLLNPEDDAIQQRCLSRVEVLCSRFPLYVEQREPAIA

SEQ ID NO: 107242 - protein, 270 aa, Unknown
  Bacterial polypetide isolated from the Sargasso Sea
DALLAAMNAEEQRQEDHIELIASENYTSKRVMEAQGSGLTNKYAEGYPGKRYYGGCEHVDKVEALAIERAKQLFGADYANVQPHSGSSANSAVYLALINAGDTILGMSLAHGGHLTHGAKVSSSGKLYNAVQYGINTDTGLIDYDEVERLAVEHKPKMVVAGFSAYSKTLDFPRFRQIADKVGALLFVDMAHVAGLVAAGLYPNPLPYADVVTTTTHKTLRGPRGGLILAKANEEIEKKLNAAVFPGAQGGPLMHVIAGKAVCFQEALEP

SEQ ID NO: 107243 - protein, 211 aa, Unknown
  Bacterial polypetide isolated from the Sargasso Sea
MSSESKYLNDQYKSFFEDSLSQTDPDLFKAINDELQRQQEHIELIASENIVSKAVLEAQGSVLTNKYAEGYSGKRYYNGCEHVDVAENLANERLKKLFNCKFANSQPHSGAQANGATFLALLKPGDTFMGMSLNSGGHITHGLKISMSGKWFNPIGYDVDKESELIDYDHVEKLALEHKPKLIIAGGSAYSRIIDFKKFREICDKVGAYFM

SEQ ID NO: 107244 - protein, 196 aa, Unknown
  Bacterial polypetide isolated from the Sargasso Sea
HKTLRGPRGGMILTNDSDLAKKFNSAIFPGIQGGPLMHVIAAKAVAFGEALRPEFKHYIKEVIMNAQALSDELIKGGLDTVTHGTDTHVLLVDLRPKGVKGNATEKALERAHITCNKNGVPFDPEKPAVTSGIRLGSPAGTTRGFDENDFRQIGRWIIEVVDGLAKNGEEGNSAVEEKVKSEVATLCAKYPLYPNL

SEQ ID NO: 107245 - protein, 290 aa, Unknown
  Bacterial polypetide isolated from the Sargasso Sea
LANFMGLELSRQEEHIELIASENYASKRVLEAQGSVLTNKYAEGYPNKRYYGGCEHVDGVESIAIERAKKLFSAKFANVQPHSGASANAAVFLALLEPGDTILGMALDQGGHLTHGAKVNFSGRNFNAIQYGLKKDTGTIDYEEVEKLADEHKPKLIIAGFSAYMGIVDWKRFREIADRNNSFLLVDMAHVSGLVAGGVYPNPVEYAHVVTSTTHKSLRGPRSGIILSNEDEEFQKKINFGVFPGSQGGPLMHVIAAKAVCFKEAMTDDFVNYQKQIIKNAKSMCEDFKN

SEQ ID NO: 107246 - protein, 97 aa, Unknown
  Bacterial polypetide isolated from the Sargasso Sea
MDLTGDSAQTSLEAANITCNKNGIPKDPKPPKITSGIRLGTPAATTRGFKENEFKLVGELILETLVGLKSNPTDNSNVEKAVKEKVINLCREFPIYS

SEQ ID NO: 107247 - protein, 263 aa, Unknown
  Bacterial polypetide isolated from the Sargasso Sea
MNPGDKYASLVLSDGGHLSHGLKINISGKYFEPVHYPLIYDEDDDGFETINYDAVREVCLEHKPKMLLCGYSAYPRIIHFDKMREIADECGAYLMCDIAHIAGLVAGGVHPSPFPHAHVVTTTTHKTLRGPRGGLILTNDEKIATRIDRAVFPGSQGGPLMHIISGKAVCFGEALQPDFKDYSRKIVENAQALARGLSSRGFRLVSGGTDNHLMLVDLRDKLPDNTGKEVAVWMESAGMIANHNGIPKDPRPPMQTSGIRLGT

SEQ ID NO: 107248 - protein, 103 aa, Unknown
  Bacterial polypetide isolated from the Sargasso Sea
MSSEGKYLNIEYQNFFEKKLSETDPEVYKAVTDELIRQQNHIELIASENIVSQAVLEAQGSVLTNKYAEGYPGKRYYNGCEYVDVAETLANERLKKLFNCKFA

SEQ ID NO: 107249 - protein, 136 aa, Unknown
  Bacterial polypetide isolated from the Sargasso Sea
TVLANAKILAETLKNNGFKIYSGGTDTHLMLVDLRPFNVKGNVAAESLSRANITCNKNGIPFDSESPMITSGIRLGSQAATTRGFGLKEFQIVGDLITKTIKGLAENPEDNSKTEEEVRKEVVSLCSNFPIYKHLG

SEQ ID NO: 107250 - protein, 279 aa, Unknown
  Bacterial polypetide isolated from the Sargasso Sea
MSTAIKIDQFLNNFFKLSLKESDKELYNSVKDEFVRQQNHIELIASENIVSKAVLEAQGSVLTNKYAEGYPGKRYYGGCEHVDLSETLAIERAKKLFNCNFANVQPHSGAQANGAVYLALIKPGDTILGMSLNSGGHLTHGAKPAQSGKWFNAIHYDVDKNTGLIDYENVEKLAIENKPKLIIAGGSAYSRVIDFKKFREICDKVNAYLLVDMAHFSGLVAGGVYPNPTKYADVVTSTTHKVLRGPRGGIILTNKEDLIKKFNSAIFPGLQGGPLMHVI

SEQ ID NO: 107251 - protein, 124 aa, Unknown
  Bacterial polypetide isolated from the Sargasso Sea
MKSSKSDSIFSNSNSIKDYDSDLWASFEHEADRQEDHIELIASENYASKRILEAQGSILTNKYAEGYPSKRYYGGCENVDIAENLAIERAKKLFKADYANVQPHSGSSANAAAYLALLEQMILS

SEQ ID NO: 107252 - protein, 267 aa, Unknown
  Bacterial polypetide isolated from the Sargasso Sea
NVEKLALEHKPKLIIAGGSAYSRIIDFKRFREIADKVGAYLMVDMAHFSGLVAGKGYPNPCDYAHVVTSTTHKVFRSARGGIILTNHEDLSKKFNTAVFPGYQGGPLMHVIAAKAAGFLEALRPEFKEYIKNVLANAKILSETLKNNGFKIYSGGTDTHLMLVDLRPYNVKGNAAAESLSKANITCNKNGIPFDTEKPMITSGIRLGTQAATTRGFGLNEFKTVGELITKTIKGLSENPNDNSKIEEEVRNEVIDLTSSFPIYKNLT

SEQ ID NO: 107253 - protein, 253 aa, Unknown
  Bacterial polypetide isolated from the Sargasso Sea
NENTRQEQEIELIASENITSLAVMQAQGSVMTNKYAEGYPGRRYYGGCEFVDVAENLAIERVKKLFNCNFANVQPNSGSQANQAVFMSLMKPGDTFLAMDLASGGHLTHGAKPNLSGKWFNAVHYGVRKDTEQIDYEEIRDLAKNHQPRLIIAGGSAVPRQIDFEKFRNIAEEIGSFFMVDMAHFSGLVAAGKHPNPLEFADVATSTTHKTLRGPRGGIILTNDEDHAKKFNSAVFPGLQGGPLMHVIAAKAV

SEQ ID NO: 107254 - protein, 151 aa, Unknown
  Bacterial polypetide isolated from the Sargasso Sea
MLDKKSNIKTDAIFSNKKDIELYDAELWESFQKEMVRQEEHIELIASENYASERVLQAQGSVLTNKYAEGYPDKRYYGGCEFVDIAEKLAIDRAKELFSADYANVQPHSGSSANAAAYLALLEPNDTILGMSLDHGGHLTHGSKVNFSGRN

SEQ ID NO: 107255 - protein, 201 aa, Unknown
  Bacterial polypetide isolated from the Sargasso Sea
PVPYADVVTSTTHKTLRGPRSGIILARENEDIQKKLNSAVFPGSQGGPLMHVVAAKAVCFKEALEPEFKTYMSQVISNAKTMAKTIIGRGVDIVKGGTENHMILVDLRNKGITGKDSEYKLGLANITVNKNAVPNDPQSPFVTSGIRLGTPAVTTRGFKEDEIIQISNWICDIVLDLDNEKKIEEIKDKALSLCKEFPVYK

SEQ ID NO: 107256 - protein, 268 aa, Unknown
  Bacterial polypetide isolated from the Sargasso Sea
MLDYDEMNSLAKEFRPLVIVAGYSAYPRKVNFATIREIADSVGATFMVDMAHFAGLVAGKVFVDDFDPISNAHIVTSTTHKSLRGPRGGIVLSNEEELSEFIDKGCPMVLGGPLANVMAAKAVAFAEARRPEFREYASNVVNNASALASGIEKRGGRLVTGGTENHLVLVDVRKFGLTGRQAESALEDAGVVVNRNSIPFDPNGAWYTSGIRLGTPALTTLGMGENDMDEVADIICSTLEATEPTKTSSGKQSQANYTLANEIQISNR

SEQ ID NO: 107257 - protein, 135 aa, Unknown
  Bacterial polypetide isolated from the Sargasso Sea
MTGQTFFESSLTQTDPTILEAIEKEYHRQNDQIELIASENIVSKAVLEAQGTILTNKYAEGYSGKRYYGGCEHVDVVEDLCIDRIKKLFNADFANVQVHSGSQANQAVFLALLKPGDTIMGMSLAAGGHLTHGAP

SEQ ID NO: 107258 - protein, 223 aa, Unknown
  Bacterial polypetide isolated from the Sargasso Sea
MSSEGKYLNPEYQNFFEKKLSEIDPEISKAIDDELIRQQNHIELIASENIVSQAVLEAQGSVLTNKYAEGYPGKRYYNGCEHVDVAESLAIERLKKLFNCKFANAQPHSGAQANGAVFLALLKPGDTIMGLSLNSGGHLTHGSKAAVSGKWFNAIAYEVDKQTELLDYNEIEKLAVEHKPKMLIAGGSAYSRIIDFKKFREIADKVGAYFMVDMAHFSGLVAG

SEQ ID NO: 107259 - protein, 89 aa, Unknown
  Bacterial polypetide isolated from the Sargasso Sea
MNEFKTNQNKDISNYDPELSVFLDRELNRQEEHIELIASENYASKRILEAQGSVLTNKYAEGYPNKRYYGGCEHVDGAETLAIERAKQL

SEQ ID NO: 107260 - protein, 85 aa, Unknown
  Bacterial polypetide isolated from the Sargasso Sea
MSSEKNYINDSYKSFFEDSLSSKDPDLYKAIQDELLRQQQHIELIASENIVSQAVLEAQGSVLTNKYAERYPGKRYIMVVNMLTL

SEQ ID NO: 107261 - protein, 297 aa, Unknown
  Bacterial polypetide isolated from the Sargasso Sea
SVLTNKYAEGYPGKRYYGGCEFVDKAETLAIERAKKLFNVNFANVQPHSGAQANGAVFLALLKPGDTILGMGIDQGGHLTHGAPPAQSGKWFNAIHYGVRKDNGLIDYDQVKDLAKKHKPKLIIAGGSAYSRIIDFKIFREIADSVGAYLLVDMAHFSGLVAGKVYPNPCDFADVVTSTTHKVLRGPRGGIILTNNEELAKKFNSAVFPGLQGGPLMHVIAAKAVCFGEALKDEFKIYSRNVVDNAKILSETLKNSGFEIFSGGTDTHLILLDLRPIHVTGKDAEKSMVSANLTCNK

SEQ ID NO: 107262 - protein, 146 aa, Unknown
  Bacterial polypetide isolated from the Sargasso Sea
MTFFSSPLQEIDNEIHEAINKELSRQQNQIELIASENIVSKAVLEAQGSVLTNKYAEGYTAARYYGGCEFVDIAEDLAIQRLKKLYKCEYANVQPHSGAQANGAVMLALIKPGDTILGMSLDAGGHLTHGSAPSMSGKWFNAVQYG

SEQ ID NO: 107263 - protein, 250 aa, Unknown
  Bacterial polypetide isolated from the Sargasso Sea
MTFFSSPLQEIDNEIHEAINKELSRQQNQIELIASENIVSKAVLEAQGSVLTNKYAEGYTAARYYGGCEFVDIAEDLAIQRLKKLYKCEYANVQPHSGAQANGAVMLALIKPGDTILGMSLDAGGHLTHGSAPSMSGKWFNAVQYGLDDAGLINYEEVEMLAKEHMPKIIIAGGSAYSRIIDFKRFRDICDQIGAYLHVDMAHFSGLVAAEEYPNPLEFADVVTSTTHKTIRGARGGMILSNNTDLGKKF

SEQ ID NO: 107264 - protein, 196 aa, Unknown
  Bacterial polypetide isolated from the Sargasso Sea
MSTESKYINSEYENFFEKKLSESDPEIFKAINDELIRQQNHIELIASENIVSQAVLEAQGSVLTNKYAEGYPGKRYYNGCEHVDVAEKLAIDRLKSLFECKFANAQPHSGAQANGAVFLALLKPGDTIMGMSLNSGGHLTHGSKASVSGKWFKSIAYDVDKDSELIDYDVVENMALENKPKLIIAGGSAYSRVIDL

SEQ ID NO: 107265 - protein, 146 aa, Unknown
  Bacterial polypetide isolated from the Sargasso Sea
AYPNPTTYADVVTSTTHKVLRGPRGGIILTNKEELIKKFNSAVFPGLQGGPLMHVIAAKAVCFKEALSEDFKIYTKNVVNNSKVLSNRLSEKGFKIFSGGTDTHLMLLDLRSFGVTGKDAQASLGRSNITCNKNGIPFDTESPMIT

SEQ ID NO: 107266 - protein, 105 aa, Unknown
  Bacterial polypetide isolated from the Sargasso Sea
MLVDLRPYNLTGKDAEKSLGNANITCNKNGIPFDTQSPMITSGIRLGTPACTTRGFGKEEFILIGQLITKTLKGLSKNLEDNSKIEQEVKKEVIDLCTSFPIYSN

SEQ ID NO: 107267 - protein, 300 aa, Unknown
  Bacterial polypetide isolated from the Sargasso Sea
MSSEGKYLNSNYKDFFEKKLSETDPELFKALNDELIRQQNHIELIASENIVSHAVLEAQGSVLTNKYAEGYPGKRYYNGCEHVDVAENLANERLKKLFNCKFANSQPHSGAQANGAVFLALLKPGDTIMGMSLNSGGHLTHGSKASVSGKWFNAIAYDVDKKTELLDYESIEKLAVENKPKLIIAGGSAYSRQINFKKFREIADKVGAYFMVDMAHFSGLVAGKGYPNPVEYADVVTSTTHKVFRSARGGIILTNNEALSKKFNSAVFPGYQGGPLMHIIAAKAVGFLKALKPEFRNYIS

SEQ ID NO: 107268 - protein, 263 aa, Unknown
  Bacterial polypetide isolated from the Sargasso Sea
MAIEHKPKIIIAGASAYPRIIDWKKFREISDKVGAYFMVDMAHYSGLIAGKQYPNPVEYSDVVTSTTHKTLRGARSAMILTNNEEIYKKINSAVFPGLQGGPLMHVMAAKAVSFGEALDPSFEEYIKNVISNAKHLSEILVKRGFRIVTGGTDSHIVWLDLTPKKLTGDKAEKILEDVGIACNKNAIPYDPHPPKITSGLRFGTAAATSRGFNESDFELVGEMISDILDSLNSDEEEMKKVSQITKNKVIEMCNKYPIYNEAF

SEQ ID NO: 107269 - protein, 212 aa, Unknown
  Bacterial polypetide isolated from the Sargasso Sea
MSTALKINKFLNDFFKSTLEDSDKELFDSVRKEFIRQQNHIELIASENIVSKAILEAQGSVLTNKYAEGYPGKRYYGGCEHVDLSETLAIERAKKLFNCKFANVQPHSGAQANGAVYLALIKPGDTILGMSLNSGGHLTHGAKPAQSGKWFNAIHYDVDKKTGFIDYEGVEKLALENKPKLIIAGGSAYSRIIDFKKFRDICDKVNAYLLVD

SEQ ID NO: 107270 - protein, 248 aa, Unknown
  Bacterial polypetide isolated from the Sargasso Sea
ELEDPTIWSSIAAEQTRQAEGLEMIASENFTSPAVMQAVGSVLTNKYAEGYPGKRYYGGCEFVDTVEDLARNRAKQLFGAEHVNVQPHSGSQANSAVYLAAIKPGDTVLAFDLAHGGHLTHGMRLNSSGILYRFVHYGVRQDDHLLDFDQIVRLAREHKPKLIVAGASAYPREIPHERFAEIANEVGAKLLVDMAHYAGLVAARCSQQSGASCRLCDKHNTQDFERATWRNCHVPSKTCKRSRPGCVP

SEQ ID NO: 107271 - protein, 241 aa, Unknown
  Bacterial polypetide isolated from the Sargasso Sea
MSSEKNYLNDSYKSFFEDSLSVKDPELYKAIKDELTRQQQHIELIASENIVSQAVLEAQGSVLTNKYAEGYPGKRYYNGCEHVDVAENLANERLKKLFNCKFANAQPHSGAQANGAVFLALLSPGDTFMGMSLNSGGHITHGLKISMSGKWFNAIGYDVDKKSELIDYDNVEKLALEHKPKLIIAGGSAYSRVIDFKRFREIADKVGAYLMVDMAHFSGLVAGKGYPNPCDYAPCCYINNT

SEQ ID NO: 107272 - protein, 164 aa, Unknown
  Bacterial polypetide isolated from the Sargasso Sea
SAVFPGSQGGPLMHVVAAKAVCFKEALEPEFKTYMSQVISNAKTMAKTIIGRGVDIIKGGTENHMILVDLRNKGITGKDSENKLGLANITVNKNAVPNDPQSPFVTSGIRLGTPAVTTRGFKEDEIIQISNWICDIVLDLDNEKKIEGIKNKALSLCKEFPVYK

SEQ ID NO: 107273 - protein, 300 aa, Unknown
  Bacterial polypetide isolated from the Sargasso Sea
MHPENHTSPFVMEAQGSVLTNKYAEGYPSKRYYGGCENVDVVEELAIKRAKELFNADYANVQPHSGSQANASAYMALMKPGDTLLGMSLADGGHLTHGATVSFSGRIYNAVQYGLNADTGEIDYDEVDRLAQEHRPKLIVAGFSAYSKVVDWQKFRDIADSIDAYFLVDMAHVSGLVAAGVYPSPINIADVTTSTTHKTLRGPRGGIILARSNPELEKRLNFSVFPESQGGPLMHVIAAKAICFKEAMDETFKAYQEQTIKNAQAMASGFMKRGFHVISNGTDDHLFLLSLIKQGLTGKE

SEQ ID NO: 107274 - protein, 131 aa, Unknown
  Bacterial polypetide isolated from the Sargasso Sea
MFDNTKTIKDFDPELWSSIDNEMARQEDHIELIASENYTSKRVLEAQGSVLTNKYAEGYPGKRYYGGCENVDIAESLAIERAKEIYGAAFANVQPHSGASANSAVYLALCDAGDTILGMSLDHGGHLTHGA

SEQ ID NO: 107275 - protein, 315 aa, Unknown
  Bacterial polypetide isolated from the Sargasso Sea
LFKADYANVQPHSGSSANAAAFLAMLEPNDTILGMSLDQGGHLTHGAKVNFSGKNYQAIQYGLHPETFDIDYDNVRDLAKKYRPKMIIAGFSAFSGIIDWKIFRDIADETNSYFLVDMAHVSGLVAAGLYPSPVPYADVVTSTTHKTLRGPRSGIIIAKSNENLEKKVNSAVFPGSQGGPLMHVIAAKAVCFKEALEPDFKIYTQQVIDNAKLMCKVIQDRGIDVVTGKTDNHIVLMDLRDKELTGKDCELALGKANITVNKNAVPNDPQSPFVTSGIRLGTPAVTTRGFGNDEIEILTNWICDVVLDHNNADKI

SEQ ID NO: 107276 - protein, 280 aa, Unknown
  Bacterial polypetide isolated from the Sargasso Sea
IHYDVNKETGLIDYENVERLAIENKPKLIIAGGSAYSRVIDFKKFRDICDKVKAYLLVDMAHFSGLVAGGVYPNPTKYADVVTSTTHKVLRGPRGGIILTNNEELIKKFNSAIFPGLQGGPLMHVIAAKAVCFKEALSDEFKDYSKSVIANAKILSEKLIKNGFKIFSGGTDTHLMLVDLRDFNVTGKDAEASLVRSNITCNKNGIPFDTQSPMITSGIRLGTPACTTRGFGPNEFSLIADLISKVVKGLSKNGANNSKIEKEVQKEVIDLCASFPIYSD

SEQ ID NO: 107277 - protein, 203 aa, Unknown
  Bacterial polypetide isolated from the Sargasso Sea
MSVIKLDKYLNSFFKLKLQDADKELYNSIRDEFKRQQNHIELIASENIVSKAVLEAQGSVLTNKYAEGYPSKRYYGGCEHVDVSENLAIERAKKLFDCKFANVQPHSGAQANGAVYLALLKPGDTTLAMSLNSGGHLTHGAKPAQSGKWFNAIHYEVDKETGLIDYDAVEKLALENKPKLIIAGGSAYSRIIDFKKFREICDN

SEQ ID NO: 107278 - protein, 103 aa, Unknown
  Bacterial polypetide isolated from the Sargasso Sea
MSSESKYINDQYKSFFEDSLSKTDPELHKAINDELRRQQQHIELIASENIVSQAVLEAQGSVLTNKYAEGYPGKRYYNGCEHVDVAENLAIERLKKLFNCKFA

SEQ ID NO: 107279 - protein, 289 aa, Unknown
  Bacterial polypetide isolated from the Sargasso Sea
SYKTQDLEVYSIIKDEILRQENELQMIASENYASRAVMDAVGSVLTNKYAEGYPNKRYYGGCRHVDEAEELAILRAKELFGAESVNVQPHSGAQANMAVFLGFLNPGDTVLGMSLDHGGHLSHGSKVNFSGRIYNSVFYGVKEETFLIDYDQVEEMALKHKPKLIIAGWSSYPRDLDYKRFREIADKSGSLLLADIAHPSGLIAADLYSDPIPHCDFVTSTTHKTLRGPRGGIIMMKEEHSKIINSRVFPGTQGGPLMNSIVAKAIAFKEALDDSFKDYQKQVLETPND

SEQ ID NO: 107280 - protein, 91 aa, Unknown
  Bacterial polypetide isolated from the Sargasso Sea
MSSEKKYINSDYQNFFEKSLSEADPDLFNAINDELVRQQNHIELIASENIVSQAVLEAQGSVLTNKYAEGYPGKRYYNGCEHVDVADKLAL

SEQ ID NO: 107281 - protein, 141 aa, Unknown
  Bacterial polypetide isolated from the Sargasso Sea
MTLSENFFSSNLEHADKDLYQSISQELSRQQNQIELIASENIVSKAVLEAQGSIMTNKYAEGYSAKRYYGGCEFVDIAENLAIDRLKQLYGCSYANVQPHSGAQANQAVFLALIKPGDTILGMSLDAGGHLTHGSRPNQSG

SEQ ID NO: 107282 - protein, 284 aa, Unknown
  Bacterial polypetide isolated from the Sargasso Sea
MFSKQDQIQGYDDELLAAIDQEERRQEEHIELIASENYCSQRVMEAQGSGLTNKYAEGYPGKRYYGGCEYVDKVEQLAIDRAKALFGADYANVQPHSGSSANSAVYLALLNAGDTILGMSLAHGGHLTHGAKVSSSGKLYNAVQYGLDTATGLIDYDEVERLAVEHKPKIIVAGFSAYSKTLDFPRFRAIADKVGALLFVDMAHVAGLVAAGLYPNPIPFADVVTTTTHKTLRGPRGGLILAKANEEIEKKLNSAVFPGAQGGPLMHVIAAKAVCFKGAMEPGV

SEQ ID NO: 107283 - protein, 126 aa, Unknown
  Bacterial polypetide isolated from the Sargasso Sea
MKTSRSDSIFSDNDSIKEYDSELWASFEYEAERQEDHIELIASENYASKRILEAQGSIMTNKYAEGYPAKRYYGGCENVDIAENLAIDRAKELFKADYANVQPHSGSSANAAAYLALLEQMIPSLV

SEQ ID NO: 107284 - protein, 122 aa, Unknown
  Bacterial polypetide isolated from the Sargasso Sea
MSSESKYLNDQYKSFFEDSLSKTDPDLYKAINDELQRQQEHIELIASENIVSQAVLEAQGSVLTNKYAEGYSGKRYYNGCEHVDVAENLANERLKKLFNCKFANSQPHSGAQANGATFLALL

SEQ ID NO: 107285 - protein, 176 aa, Unknown
  Bacterial polypetide isolated from the Sargasso Sea
MFNSGKSLAEFDPEISAAIEAERTRQEEHIELIASENHTSPFVMEAQGSVLTNKYAEGYPSKRYYGGCENVDVVEDLAIKRAKELFGADYANVQPHSGSQANASAYMALMKPGDTLLGMSLAHGGHLTHGATVSFSGRIYNSVQYGLNGQTGEIDYDEVDRLAHEHRPKLLLLAFR

SEQ ID NO: 107286 - protein, 252 aa, Unknown
  Bacterial polypetide isolated from the Sargasso Sea
PEFKQIADEVGAFLMADIAHPSGLVAAGIHPSPVPYCDVITTTTHKTLRGPRGGMIMMGKDGLNPWNITAPKSGRVKNISELLDNSVMPGVQGGPLMHIIAAKAVAFGEALLPEFKVYAQQIVANAKEMADEFLKRDYKLVSGGTDTHVVLIDLTNKGITGKVAEKSLEKAGIAVNKNMVPFDEKSPFITSGIRIGTPAITTRGMRKDDMKKIVSLIDIVIKNSNDDHKVASVKAEVNELCKFFPLYPELRD

SEQ ID NO: 107287 - protein, 278 aa, Unknown
  Bacterial polypetide isolated from the Sargasso Sea
TKIHSLVNNFFEDDLKKSDKEIYDSIFQEHERQQFHIELIASENIVSKAVLETQGSVLTNKYAEGYSGKRYYGGCEFVDKAETLAIERAKKLFNCKFANVQPHSGAQANGAVYLALLKPGDTILGMSLNSGGHLTHGAKPAQSGKWFNAVHYDVKKEDGLIDYDSVEKLAIEHKPKLLIAGGSAYSRVIDFKRFKEIASKINAYFLVDMAHFSGLVAGKAYPNPVDYADVVTSTTHKVLRGPRGGIILTNSEDLNKKFNSAVFPGLQGGPLMHVIAAK

SEQ ID NO: 107288 - protein, 122 aa, Unknown
  Bacterial polypetide isolated from the Sargasso Sea
MSSEKNYLNDSYKSFFEDSLSVKDPELYKAIKDELIRQQQHIELIASENIVSQAVLEAQGSVLTNKYAEGYPGKRYYNGCEHVDVAENLAIERLKKLFNCKFANAQPHSGAQANGAVFLALL

SEQ ID NO: 107289 - protein, 146 aa, Unknown
  Bacterial polypetide isolated from the Sargasso Sea
KAVAFKEALDPSFKTYIKGVLDNAQCFAEEFISKGYNLISGGTDTHQVLIDLQNKNITGKAAEIALDEAGITVNKNMIPYDPKSPFITSGIRIGSPAITTRGMGVDEVKIVVDLIDQVILNHDNKEKIQSIKKHVNELCSSFPIYE

SEQ ID NO: 107290 - protein, 233 aa, Unknown
  Bacterial polypetide isolated from the Sargasso Sea
DEVGAYLLADVAHFAGLIAAGVYPSPFPHVHAATSTTHKTLRGPRGGIILTNDEAIAKKANSAIFPGIQGGPLMHVIAAKAVAFGEALRPDFKLYQQQVIKNAQALADTLMTGGLDIVTGGTDTHVMLVDLRPKGVKGNATEIALGRANITCNKNGVPFDDEKPTITSGVRLGSPAGTTRGFGEVEFRQIGEWIIEVVDGLAEHGEGNNGAAEKRVKAAVKELCANYPLYPNL

SEQ ID NO: 107291 - protein, 129 aa, Unknown
  Bacterial polypetide isolated from the Sargasso Sea
SETLKNNGFKIFSGGTDTHLMLVDLRPYNVTGKDAEASLCRANITCNKNGIPFDSAKPTITSGIRLGSQAVTTRGFGLNEFKKVGELITRVIEGLSKNTQDNSKIENEVRNEVIDLCSKFPIYNHLIKK

SEQ ID NO: 107292 - protein, 291 aa, Unknown
  Bacterial polypetide isolated from the Sargasso Sea
GYPGKRYYGGCEFVDQAEEIALERVKKLFNCKFANLQPHSGAQANQAVFLALLQPHDTILGMSLASGGHLTHGAKPNLSGKWFNAVQYGVKKDGNDKDLIDYDEVEALALEHQPKMIIAGASAYPRTIDWKRFREIADKVGAYFLVDMAHYSGLVAGKQYPNPIEHAHVVTSTTHKTLRGARSAMILTNHEDLYKKINSAVFPGLQGGPLMHVIAARAVCFGEALKPEFEEYIKNVIASAKVMAQTLVDRGFRIVTGGTDSHIVWLDLTPKGLTGDKAEKILEEVGLACNK

SEQ ID NO: 107293 - protein, 270 aa, Unknown
  Bacterial polypetide isolated from the Sargasso Sea
DALIDFEQLEADAMKYQPKLIIAGGSAYPRTLDFKRFRQIADKCGAMLLVDMAHISGLVATGEHPSPIPHAHVVTSTTHKTLRCGRGGMILTNHEDIAKKVNSAVFPGLQGGPLMHAIAGKVVGFGEALKPEFREYIKSVLRNAKTLSEGLLKRGLDIVSGGTDTHVVLVDLRPKNLTGNIVEDALERAGITCNKNGIPFDPEKPSITSGIRLGTPAGTSRGFGQEEFSLISNLICDVLDSLNVKSKISSKVELEVKDKIKNLCYQFPIY

SEQ ID NO: 107294 - protein, 243 aa, Unknown
  Bacterial polypetide isolated from the Sargasso Sea
DKFLNNFFSSGLKDSDQELYNSVKDEFIRQQNHIELIASENIVSKAVLEAQGSVLTNKYAEGYPGKRYYGGCEHVDLSETLAIERAKKLFNCKFANVQPHSGAQANGAVYLALIKPGDTILGMSLNSGGHLTHGAKPAQSGKWFNAIHYDVNEKTGLIDYDSVERLSIEHKPKLIIAGGSAYSRVIDFKKFREICDKVNAYFLVDMAHFSGLVAGGVYPNPVVYADAVTSTTHKVLRGPRGGI

SEQ ID NO: 107295 - protein, 203 aa, Unknown
  Bacterial polypetide isolated from the Sargasso Sea
MSSETKYLNSEYKDFFERSLSDADPDLFRAINDELIRQQNHIELIASENIVSQAVLEAQGSVLTNKYAEGYPGRRYYNGCEHVDVAEQLALERIKKLFNCKYANVQPHSGAQANGAVFLALLKPNDTFLGMSLNSGGHITHGLKISMSGKWFNAISYDVDKESELIDYDNVEKLALEHKPKLIIAGGSAYSRVIDFKRFREIA

SEQ ID NO: 107296 - protein, 126 aa, Unknown
  Bacterial polypetide isolated from the Sargasso Sea
AETLKNNGFKIYSDGTDTHLMLVDLRPYNVKGNLAAESLSRANITCNKNGIPFDTEKPMITSGIRLGTQAATTRGFGLSEFKTVGELITKTLKGLSENPTDNSKIENQVKNEVIALTSSFPIYKNL

SEQ ID NO: 107297 - protein, 266 aa, Unknown
  Bacterial polypetide isolated from the Sargasso Sea
YDIDYDNVRDLAKKHRPKMIIAGFSAFSGIIDWKIFRDIADETNSYFLVDMAHVSGLVAAGLYPSPVPYADVVTSTTHKTLRGPRSGIIIAKSNDNLEKKLNSAVFPGSQGGPLMHVIAAKAVCFKEALEPDFKIYTQQVIDNAKLMCKVIQDRGIDIVTGKTDNHIVLMDLRKKELTGKDIELALGQANITVNKNAVPNDPQSPFVTSGIRLGTPAVTTRGFGSDEIEILTNWICDVVLDHNNADKINIIRNKVVEMCKRFPVYK

SEQ ID NO: 107298 - protein, 248 aa, Unknown
  Bacterial polypetide isolated from the Sargasso Sea
GYPGKRYYNGCEHVDVAEQLALERIKKLFNCKYANVQPHSGAQANGAVFLALLKPNDTFMGMSLNSGGHITHGLKISMSGKWFNAISYDVDKKSELIDYDNVEKLALEHKPKLIIAGGSAYSRVIDFKRFREIADKVGAYLMVDMAHFSGLVAGKGYPNPCDYAHVVTSTTHKVFRSARGGIILSNDADLGKKFDTAVFPGYQGGPLMHIIAAKAAGFFEALKPEFQTYIKNVLANAKILAETLKNNG

SEQ ID NO: 107299 - protein, 194 aa, Unknown
  Bacterial polypetide isolated from the Sargasso Sea
KVFRSARGGIILTNLEDLAKKFNTAVFPGYQGGPLMHIIAAKAAGFLEALQPEFQNYIKSVLANAKMLAETLKNNGFKIYSDGTDTHLMLVDLRPYNVKGNLAAESLSRANITCNKNGIPFDTEKPMITSGIRLGTQAATTRGFGLSEFKTVGELITKTLKGLSENPSDNSKIEEEVKNEVISLTSSFPIYKNL

SEQ ID NO: 107300 - protein, 247 aa, Unknown
  Bacterial polypetide isolated from the Sargasso Sea
SRVIDFKRFREIADKVGAYLMVDMAHFSGLVAGKGYPNPCEYAHVVTSTTHKVFRSARGGIILTNHEDLAKKFNSAVFPGYQGGPLMHVIAAKAAGFLEALKPEFKDYIKAVLANAKILSETLKNNGFKIYSGGTDSHLMLVDLRPFNVKGNLAAESLCRANITCNKNGIPFDSESPMVTSGIRLGTQAATTRGFGLKEFEKVGELITKVIDGLSKNPSDNSKVEEEVRKEVISLCSSFPIYKNLRK

SEQ ID NO: 107301 - protein, 109 aa, Unknown
  Bacterial polypetide isolated from the Sargasso Sea
MKSSRSDSIFSNNNTIKDYDNELWASFQHEAERQEDHIELIASENYASKRILEAQGSLLTNKYAEGYPSKRYYGGCENVDIAENLAIDRAKELFKARLCKCSTSFRIIS

SEQ ID NO: 107302 - protein, 304 aa, Unknown
  Bacterial polypetide isolated from the Sargasso Sea
AIERAKALFGADFANVQPHSGSQANAAVYLALLEGGDTVLGMSLADGGHLTHGATVNFSGKLYNPVQYGIDTATGEVDYEDIARLAKEHQPKMIVAGFSAYSRRLDWQKFRDIADSVGAYLLVDMAHVAGLVAADEYPNPVPYADVVTSTTHKTLCGPRGGIILARSNPEIEKKLNSALFPGSQGGPLMHVIAAKAVAFKEAMTPEFKDYQVQTLANARAIAKGLMDRGYSIVSGGTDNHLLLLDLVDKDITGKAADAALGAANITVNKNAVPNDPRSPFVTSGIRIGSPAVTRRGFQEAECRQ

SEQ ID NO: 107303 - protein, 270 aa, Unknown
  Bacterial polypetide isolated from the Sargasso Sea
YGGCEHVDISENLAIERAKKLFNCKFANVQPHSGAQANGAVYLALLKPGDTTLAMSLNSGGHLTHGAKPAQSGKWFNALHYEVDKKTGLIDYEVLEKLAVENKPKLIIAGGSAYSRIIDFKKFREISDKVGAFLLVDMAHFSGLVAGGAYPNPTKYADVVTSTTHKVLRGPRGGIILTNKEDLIKKFNSAIFPGLQGGPLMHVIAAKAVCFKEALSDDFKEYTKNVINNAKVLSDRLTEKGFKIFSGGTDTHLMLIDLRSFGVNGKDAQA

SEQ ID NO: 107304 - protein, 265 aa, Unknown
  Bacterial polypetide isolated from the Sargasso Sea
EKLALEHNPKLIIAGGSAYSRIIDFKRFREIADKVNAYLMVDMAHFSGLVAGSGYPNPTEYAHVVTSTTHKVFRSARGGIILTNDESLSKKINSAVFPGYQGGPLMHIIAAKAAGFLEALKPDFKDYIKSVISNAKILAETLKTNGFKIYSGGTDTHLMLVDLRPFNVKGNITAESLSRANITCNKNGIPFDTESPMITSGIRLGSQAATTRGFGLNEFKKVGELITKIVKGLASNPSNNSKVENEVRNEVIDLCSNFPIYKNLR

SEQ ID NO: 107305 - protein, 89 aa, Unknown
  Bacterial polypetide isolated from the Sargasso Sea
MSVIKLDKYLNSFFKLKLQDADKELYDSIRDEFTRQQNHIELIASENIVSKAVLEAQGSVLTNKYAEGYPSKRYYGGCEHVDVSENLAI

SEQ ID NO: 107306 - protein, 103 aa, Unknown
  Bacterial polypetide isolated from the Sargasso Sea
MDSQADSIFANKKNIEKYDSELWKALSQESSRQEEHIELIASENYASKRVMEAQGGILTNKYAEGYPHKRYYGGCEYVDVAEEIAIKRAKELFKADFANVQPH

SEQ ID NO: 107307 - protein, 89 aa, Unknown
  Bacterial polypetide isolated from the Sargasso Sea
MNEFKKTQNQNISEYDADLATFLDKELLRQEEHIELIASENYASKRVLEAQGSVLTNKYAEGYPNKRYYGGCEHVDGAETLAMKELKNF

SEQ ID NO: 107308 - protein, 197 aa, Unknown
  Bacterial polypetide isolated from the Sargasso Sea
MTPTNLIDNEVSSLIKDEIKRQEFELQMIASENYASPAVMEVMGSVLTNKYAEGYPGKRYYGGCQFVDIAEELAIKRAKKLFGAEAVNVQPHSGAQANMAVFLGFLEPGDTVLGMSLDHGGHLSHGSKVNFSGRIYNSISYGVDENTFLIDYDQIEELAIKNKPKIIIAGWSSYPRDLDYKRFREIADKSGSLLLAD

SEQ ID NO: 107309 - protein, 275 aa, Unknown
  Bacterial polypetide isolated from the Sargasso Sea
SSYDEELSNFMTKEFNRQEEHIELIASENYASKRVLEAQGSVLTNKYAEGYPNKRYYGGCEHVDGVESIAIKRANELFGSKFANVQPHSGASANAAVFLALLEPGDTILGMALDQGGHLTHGAKVNFSGKNFNAVQYGLHSETNEIDYDQVQKLALKHKPKVIIAGFSAFMGIVDWAKFRNIADEVGAYLMVDMAHVSGLVAGGVYPNPVPHAHVVTSTTHKSLRGPRSGIILSNEDEDFQKRLNFAVFPGSQGGPLMHVIAAKAVCFKEALTEE

SEQ ID NO: 107310 - protein, 140 aa, Unknown
  Bacterial polypetide isolated from the Sargasso Sea
MDGFFTTSLVESDPELANSIKEELIRQKDQVELIASENIVSQAVLEAQGSVLTNKYAEGYSGKRYYGGCDFIDQLETLGINRLKKLFGCQFANIQPHSGAQANQAVFMSLLNPGDVIMGMSLAAGGHLTHGAPPNLSGKW

SEQ ID NO: 107311 - protein, 288 aa, Unknown
  Bacterial polypetide isolated from the Sargasso Sea
SGKRYYNGCEHVDVAEKLALERIKKLFNCKYANVQPHSGAQANGAVFLALLKPNDTFMGMSLNSGGHITHGLKISMSGKWFNAISYDVDKKSELIDYDNVEKLALEHKPKLIIAGGSAYSRVIDFKRFREIADKVGAYLMVDMAHFSGLVAGKGYPNPCDYAHVVTSTTHKVFRSARGGIILSNDEDLGKKFDTAVFPGYQGGPLMHIIAAKAAGFYEALKPEFQTYIKNVLANAKMLAETLKNNGFKIYSGGTDTHLMLVDLRPFNVKGNLASESLCRANITCNKNG

SEQ ID NO: 107312 - protein, 274 aa, Unknown
  Bacterial polypetide isolated from the Sargasso Sea
SENIVSKAVLDAQGSVLTNKYAEGYPGKRYYGGCEHVDLSESLAIERAKKLFNCNFANVQPHSGAQANGAVYLALIKPGDTILGMSLNSGGHLTHGAKPAQSGKWFNAIHYDVDKKTGLIDYANIEKLALENKPKLIIAGGSAYSRVIDFKKFREICDKVKAYLLVDMAHFSGLVAGGVYPNPIKYADVVTSTTHKVLRGPRGGIILTNNEDLIKKFNSAIFPGLQGGPLMHVIAAKAVCFKEALSDEFKNYSKNVINNAKILSDTLVKNGFKI

SEQ ID NO: 107313 - protein, 256 aa, Unknown
  Bacterial polypetide isolated from the Sargasso Sea
LIIAGGSAYSRVIDFKRFREIANKVGAYLMVDMAHFSGLVAGKGYPNPVDHAHVVTSTTHKVFRSARGGIILTNHEDLAKKINTAVFPGYQGGPLMHIIAAKAVGFLEALKPEFQTYIKSVLSNAKILSETLINNGFKIYSGGTDTHLMLVDLRPFNVKGNLAAESLDRANITCNKNGIPFDTESPMVTSGIRLGTQAATTRGFGLEEFRKVGNLITKTIKGLSENPEDNSKIEKEVQKEVTDLCSKFPIYKNLRK

SEQ ID NO: 107314 - protein, 176 aa, Unknown
  Bacterial polypetide isolated from the Sargasso Sea
KINTAVFPGYQGGPLMHIIAAKAAGFLEALRPEFKEYIKSVLTNAKILSETLKNNGFKIYSGGTDTHLMLVDLRPFKVKGNLAAESLSRANITCNKNGIPFDSESPMITSGIRLGSQAATTRGFSLKEFEKVGQLITKVIVGLSKNPGDNSKIENEVRKEVVSLCSLFPIYKNLRK

SEQ ID NO: 107315 - protein, 309 aa, Unknown
  Bacterial polypetide isolated from the Sargasso Sea
GMSLISGGHLTHGAKVALSGKWLKAFHYDVNKETGLIDYDQVEKLAKEHKPKLIIAGGSAYSRIINFKKFKDIAKSIDAYLMVDMAHFSGLVAGKGYPNPIEHADVVTSTTHKVLRGGRGGIILTNKEDLFKKINSAVFPGYQGGPLMHVIAAKAAAFHEALQPGFREYIKSVLANAKILSETLKNNGFKIFSGGTDTHLMLVDLRPFMVKGKDAEVSLCRANITCNKNGIPFDTEKPTVTSGIRLGSQAATTRGFGLNEFKKVGELITKVIKGLSENPENNSKIESEVKKEVIELCSKFPIYNHLVKK

SEQ ID NO: 107316 - protein, 232 aa, Unknown
  Bacterial polypetide isolated from the Sargasso Sea
MSIVRKIKSNQNNFFENDLKNSDKELFDSISKEFVRQKNHIELIASENIVSRAVLEAQGSVLTNKYAEGYSGKRYYGGCEFVDISENLAIERAKKLFNCNFANVQPHSGAQANGAVYLALIKPGDTILGMSLNSGGHLTHGAKPAQSGKWFNAVHYDVNKETGLIDYESVEKLALEHKPKLIIAGGSAYSRIIDFKKFKEICEKVDAYLLVDMAHFSGIVAGGAYPNPLEYA

SEQ ID NO: 107317 - protein, 225 aa, Unknown
  Bacterial polypetide isolated from the Sargasso Sea
SMSGKWFNPIGYDVDKKSELIDYDNVEKLALEHEPKLIIAGGSAYSRVIDFKRFREIADKVGAYLMVDMAHFSGLVAGKGYPNPCDYAHVVTSTTHKVFRSARGGIILTNHEELSKKFNTAVFPGYQGGPLMHVIAAKAAGFLEALQPDFQDYIKSVLANAKILAETLKNNGFKIYSDGTDTHLMLVDLRPYNVKGNLAAESLSRANITCNKNGIPFDTEKPMVT

SEQ ID NO: 107318 - protein, 282 aa, Unknown
  Bacterial polypetide isolated from the Sargasso Sea
KYAEGYPGKRYYNGCEHVDVAENLAIERLKKLFNCKFANVQPHSGAQANGAVYLALLKPGDTIMGMSLNSGGHLTHGSKASISGKWFNSIAYDVDEKSELINYDQVEKIALENKPKLIIAGGSAYSRLIDFKKFRNICNNVGAYFMVDMAHFSGLVAGKGYPNPIEYADVVTSTTHKVFRSARGGIILTNDESLSKKINSAVFPGYQGGPLMHIIAAKAAGFLEALKPEFKEYIKSVLANAKILAETLKNNGFKIYSGGTDTHLMLVDLRPFNVKGNLAAES

SEQ ID NO: 107319 - protein, 293 aa, Unknown
  Bacterial polypetide isolated from the Sargasso Sea
MSLAHGGHLTHGSHVNFSGKTYNAIQYGLNEETGEIDYAQVEALALEHKPKMIIAGFSAYSGIVDWAKFREIADKVDAYLFVDMAHVAGLIAAGVYPSPVPFAHVVTTTTHKTLAGPRGGLIISACGDEAIYKKLNSAVFPGGQGGPLCHVIAAKAVAFKEALQPEFKEYQTQVVKNAQAMVSVLQERGYKVVSGKTDNHLFLLDLIDKDITGKDADAALGNANITVNKNSVPNDPRSPFVTSGLRIGSPAITRRGFKEAESKELAGWICDVLDNIADESVQAQVKEKVKAIC

SEQ ID NO: 107320 - protein, 228 aa, Unknown
  Bacterial polypetide isolated from the Sargasso Sea
MVDMAHFSGLVAGHGYPNPIDYADVVTSTTHKVLRGGRGGIILTNREDLFKKFNSAVFPGYQGGPLMHVIAAKAAAFKEALKPEFKEYIKSVLANAKILSETLKNNGFKIFSGGTDTHLMLVDLRPFNVTGKAAEVSLCNSNITCNKNGIPFDTEKMTITSGIRLGSQAATTRGFGLNEFKKVGELITKVVKGLSKNPDDNSIIESEVRKEVIDLCSNFPIYNHLFKN

SEQ ID NO: 107321 - protein, 228 aa, Unknown
  Bacterial polypetide isolated from the Sargasso Sea
GKRYYGGNDFIDEMEQLCKDRALDLYKLNKDEWDVNVQPYSGSPANFATYTALLEPHDRIMGLGLPSGGHLTHGYYNDKKRVSATSIYFESLSYEVNEETGLIDYDELEERAKLFLPKCIIAGGSAYPRDWDYERFSKIASNVGAYLLVDMAHISGLVAVGEANNPFLYADVVTTTTHKSLRGPRSGMIFSKKHLSDKIDFAVFPSLQGGPHNNVISAVAVALKEAST

SEQ ID NO: 107322 - protein, 114 aa, Unknown
  Bacterial polypetide isolated from the Sargasso Sea
SDGTDTHLMLVDLRPYNVKGNLAAESLSRANITCNKNGIPFDTEKPMITSGIRLGTQAATTRGFGLSEFKTVGELITKTLKGLSENPTDNSKIENEVKNEVISLTSSFPIYKNL

SEQ ID NO: 107323 - protein, 246 aa, Unknown
  Bacterial polypetide isolated from the Sargasso Sea
SAYSRIIDFKRFREICDMVGAFLHVDMAHFSGLVAAEEYPNPLEFADVVTSTTHKTIRGARGGMILSNNIDLGKKFNSAVFPGYQGGPLMHVIAGKAVAFGEALKPEFKQYIKQVIKNAQTLSHTLVDGGLKIVSGGTDTHLILVDLTPMDLTGDAASTSLEEAHITCNKNGIPKDPKPPKITSGIRLGTPAATTRGFKEKEFETVGDLILETLSGLKQNPNDNTKVEKIVKEKVINLCNQFPIYN

SEQ ID NO: 107324 - protein, 251 aa, Unknown
  Bacterial polypetide isolated from the Sargasso Sea
MIPSPFEYSDVVTTTTHKSLRGPRGAMIFYRKGQKGVNKKGAPIMYDLEDKINFSVFPGLQGGPHNHTIAGLAVALKQAASPEFKAYQTQVMRNMHAMSERLKSHGIELVSGGTDNHLVLADLRPLGVDGSRVERVLELAHVACNKNTVPGDKSAMVPGGLRLGTPALTTRGFVEADFEKVADFVVRGIHIAKDLKTKLGPKLKDFRDGLANAPEGKFPEIDALKAEVEAFAAEFPTIGFDKAEGKYTQSL

SEQ ID NO: 107325 - protein, 95 aa, Unknown
  Bacterial polypetide isolated from the Sargasso Sea
MSSEKNYLNDSYKSFFEDSLSKKDPELHKAINDELIRQQQHIELIASENIVSQAVLEAQGSVLTNKYAEGYPGKRYYNGCEHVDVAENLAIERLK

SEQ ID NO: 107326 - protein, 117 aa, Unknown
  Bacterial polypetide isolated from the Sargasso Sea
IYSGGTDTHLMLVDLRPFGVKGNAAAESLSRANITCNKNGIPFDTESPMVTSGIRLGSQAATTRGFGLNEFKIVGELITKVIKGLSSNPDDNTKIEDEVRKEVVDLCSNFPIYKNLG

SEQ ID NO: 107327 - protein, 257 aa, Unknown
  Bacterial polypetide isolated from the Sargasso Sea
ASENYASPRILEAQGSILTNKYAEGYPGKRYYGGCEFVDVAEQLAIDRAKELFKADFANVQPHSGASANAAVFLALLNAGDKILGMSLDHGGHLTHGSKVNFSGKIYESYSYGIDETGDIDYEEVQRLANEHKPKLIICGFSAFSGVLDFPKFREIADSIGAYLLADISHVSGLVAAGLYPSPVPYADVVTTTTHKTLIGPRGGLILARENEDLHKKLNSALFPGSQGGPLMHIIAAKAVCFKEAMEPEFIDYQKQI

SEQ ID NO: 107328 - protein, 179 aa, Unknown
  Bacterial polypetide isolated from the Sargasso Sea
IAKKINTAVFPGYQGGPLMHIIAAKAAGFLEALRPEFKDYIKSVLANAKILSETLKNNGFKIYSGGTDTHLMLVDLRPFKVKGNLAAESLSRANITCNKNGIPFDSESPIITSGIRLGSQAATTRGFSLKEFEKVGQLITKVIDGLSKNPNDNSKIENEVRKEVVSLCSLFPIYKNLRK

SEQ ID NO: 107329 - protein, 138 aa, Unknown
  Bacterial polypetide isolated from the Sargasso Sea
FKSYIQQVKKNASILGEVLMSNGIDIVTGGTDSHMVLVDLRSKNVTGKDAEESLERAGMTCNKNGVANDPNPPTITSGIRLGSPAATTRGFKEEEFKFIGEKISTIINNLSVSNSDISMLESSINKEVQDLCSKYPIY

SEQ ID NO: 107330 - protein, 238 aa, Unknown
  Bacterial polypetide isolated from the Sargasso Sea
MGSEEKISDVSAAFNTALDVISTSEPTIADHIRGELANQRSQLKLIASENYASPAVLLAMGNWFSDKYAEGTPGHRFYAGCEYVDKVETLASNHAKELFNANYAYVQPHSGIDANLVAFWSILAHRIEAPFLASHDKRHVNDLTHSDWETLRTSFGNQRMIGMSLDAGGHLTHGFRPNISGKLFDQRSYGVNPETEMLDYAEIDKLAKEFRPLVVVAGYSAHPRKVNFAKMREIADSI

SEQ ID NO: 107331 - protein, 165 aa, Unknown
  Bacterial polypetide isolated from the Sargasso Sea
MKQELDYNFFSSSLSKIDPLISSAIELELQRQKDQIELIASENIVSQAVLEAQGSVLTNKYAEGYPDRRYYGGCEFVDKAEELAIARAKDLFDCKYVNVQPHSGAQANQTVFLSLLEPGDTILGMSLAAGGHLTHGAKPNQSGKWFNAVQYGVKRKSSLIDFDEV

SEQ ID NO: 107332 - protein, 261 aa, Unknown
  Bacterial polypetide isolated from the Sargasso Sea
MFSKQDQIQGYDDELLAAIDQEERRQEEHIELIASENYCSQRVMEAQGSGLTNKYAEGYPGKRYYGGCEYVDKVEQLAIDRAKALFGADYANVQPHSGSSANSAVYLALLNAGDTILGMSLAHGGHLTHGAKVSSSGKLYNAVQYGLDTATGLIDYDEVERLAVEHKPKIIVAGFSAYSKTLDFPRFRAIADKVGALLFVDMAHVAGLVAAGLYPNPIPFADVVTTTTHKTLRGPRGGLILAKANEEIEKKLNSAVVPGAP

SEQ ID NO: 107333 - protein, 283 aa, Unknown
  Bacterial polypetide isolated from the Sargasso Sea
HVDVVEDICIDRIKKLFNADFANVQVHSGSQANQAVFLALLKPGDTIMGMSLAAGGHLTHGAPPNESGKWFNAVQYGVNKDTTLIDFDEVEGLALEHKPKLIIAGGSSYPRIIDFKKFKEIADKVGALFLVDMAHFAGLVATGVYPNPLEFADVVTSTTHKTLRGPRGGIVLTNNPDHAKKINSAVFPGLQGGPLMHVICAKAVAFGEALKPEFKDYINAVVSNSKVLSNVMLERGLAVVSGGTDTHLVLVDLRPKKLTGKAAERSLENAGITCNKNGVPFDP

SEQ ID NO: 107334 - protein, 258 aa, Unknown
  Bacterial polypetide isolated from the Sargasso Sea
MSSENKYLNDQYKGFFEDSLSKTDPELYKAISDELKRQQEHIELIASENIVSQAVLEAQGSVLTNKYAEGYPGKRYYNGCEHVDVAENLAIERLKKLFDCKFANAQPHSGAQANGAVFLALLKPGDTFMGMSLNSGGHITHGLKISMSGKWFNAIGYDVDKESELIDYDYVEKIALENKPKLIIAGGSAYSRVIDFKRFREIADKVDAYLMVDMAHFSGLVAGKGYPNPCEYAHVVTSTTHKVFRSARGGIILTNHED

SEQ ID NO: 107335 - protein, 270 aa, Unknown
  Bacterial polypetide isolated from the Sargasso Sea
ALLKPGDTFMGMSLNSGGHITHGLKISMSGKWFNAVSYDVDKESELIDYDKVEKIATENKPKLIIAGGSAYSRIIDFKRFREIADKVGAYLMVDMAHFSGLVAGKGYPNPCEHAHVVTSTTHKVFRSARGGIILTNHEDLAKKFNSAVFPGYQGGPLMHIIAAKAAGFLEALKPEFKDYIKAVLANAKILSETLKNNGFKIYSGGTDSHLMLVDLRPFNVKGNVAAESLCRANITCNKNGIPFDSESPMVTSGIRLGTQAATTRGFGLKE

SEQ ID NO: 107336 - protein, 207 aa, Unknown
  Bacterial polypetide isolated from the Sargasso Sea
IEYAHVVTSTTHKTLRGARSAMILTNDETLIKKINSAVFPGLQGGPLMHVMAGKAVAFGEALKPEFEDYIKKVIENAKVLASSLVNNGFKIVTGGTDSHIVWLDLTPKNVTGDKAEKILEEVGIACNKNAIPYDPNPPKITSGLRFGTAAATSRGFNETDFSEIGNMISEVLENINQNEDNQKEFISSMKSKVINMCKKYPIYDEAF

SEQ ID NO: 107337 - protein, 288 aa, Unknown
  Bacterial polypetide isolated from the Sargasso Sea
MGAKPAQSGKWFNALHYEVDKETGLIDYKAVEKLAVENKPKLIIAGGSAYSRIIDFKKFREICDKVGAYLLVDMAHLSGLVAGGAYPNPTKYADVVTSTTHKVLRGPRGGIILTNNEELAKKFNSAIFPGLQGGPLMHVIAAKAVCFKEALSEDFKIYTKNVIKNAKVLSKSLSEKGFKIFSGGTDTHLMLLDLRSFKVTGKDAQASLGRANITCNKNGIPFDTESPFITSGIRLGTPACTTRGFKEDEFKLIADLIHKVIQGLSEKKSDNSKIENEVKKRIIDLCSS

SEQ ID NO: 107338 - protein, 254 aa, Unknown
  Bacterial polypetide isolated from the Sargasso Sea
EYQPKLIIAGFSAFTGIFDWKKFREISDDVGAYFLVDMAHVSGLVAAGLYPSPVPYADVVTSTTHKTLRGPRSGIILAKANEEIEKKLNSAVFPGSQGGPLMHVVAAKALCFKEALDPEFKIYIKQVMDNAKTMAETIMSNEIDIVSNGTENHIVLVDLRSKGITGKDLERVLGSVNITVNKNSVPNDPASPFVTSGIRIGTPAATTRGFKEKEIIQVGNWISDIINNFDDKELLNAIRDDVHKLTTNFPVYNL

SEQ ID NO: 107339 - protein, 239 aa, Unknown
  Bacterial polypetide isolated from the Sargasso Sea
MSSEKKYLNENYQDFFEKSLSQSDPDLFKAINDELVRQQNHIELIASENIVSQAVLEAQGSVLTNKYAEGYPGKRYYNGCEHVDVAEKLALERIKKLFNCEYANVQPHSGAQANGAVFLALLKPNDTFMGMSLNSGGHITHGLKISMSGKWFNAISYDVDKKSELIDYDNVEKLALEHKPKLIIAGGSAYSRVIDFKRFREIADKVGAYLMVDMAHFSGLVAGKGYPNPCDYAHVVTST

SEQ ID NO: 107340 - protein, 141 aa, Unknown
  Bacterial polypetide isolated from the Sargasso Sea
KDYIKSVLANAKILAETLKNNGLKIYSGGTDTHLMLVDLRPFNVKGNIAAESLCNANITCNKNGIPFDTEKPMITSGIRLGTQAATTRGFGLKEFQKVGDLITKTIKGLSKNPDDNSKIESEVREEVINLCSSFPIYKNLK

SEQ ID NO: 107341 - protein, 277 aa, Unknown
  Bacterial polypetide isolated from the Sargasso Sea
MNKKLHNVDPVISDIISRENVRQNNVLEMIPSENYASMAVMDAVGSILTNKYSEGYPGARYYQGNDIVDEAENLARDRAKEVFNFAHANVQPHSGTQANMAVYLGLLKPGDTVMGMQLDAGGHLTHGHPVNASGKLYNFVSYGVDRETEIIDYDAMLDIAKSHRPKLLVVGATAYPRQINFAHAREIADEVDAILMADMAHISGLIAGGAHPSPSGFAHVVTSSTHKTLRGPRGGMILCDQDYARRVDRGVFPGSQGGPMMNIIAGKAVMLSEASTQ

SEQ ID NO: 107342 - protein, 167 aa, Unknown
  Bacterial polypetide isolated from the Sargasso Sea
MNILQNLKESDPVIFNFINSEKNRQETHLELIASENFASIAVMQAQGSVLTNKYAEGLPQKRYYGGCEFVDEIEELAIQRAKKLFNANWANVQPHSGAQANAAVFLSLLKPGDTILGMDLSHGGHLTHGSPVNMSGKWFNAVHYGVNKETSELNFDEIREIALETKP

SEQ ID NO: 107343 - protein, 293 aa, Unknown
  Bacterial polypetide isolated from the Sargasso Sea
RFCFTNKYAEGYPGKRYYGGCEVVDIVEQIAIDRAKALFGAEYVNVQPHSGSQANTAVFFACLKPGDKILGFDLSHGGHLTHGSPVNFSGRLYTPVFYGVDQETGMLDYEKIQEIATKEQPKMIIAGASAYSRDMDFAKFRAIADSVGAILLADISHPAGLIAKGLLSDPIPHCHIVTTTTHKTLRGPRGGMIMMGKDFENPWGLKTPKGEIRMMSHVLDMAVFPGNQGGPLMHIIAAKAVAFGEALTDEFFRYTMQVQKNAKAMAEAFVKRGYNIISGGTDNHMMLIDLRNK

SEQ ID NO: 107344 - protein, 132 aa, Unknown
  Bacterial polypetide isolated from the Sargasso Sea
MSSESKYLNDQYKGFFEDSLSKTDPELYGAISDELKRQQEHIELIASENIVSQAVLEAQGSVLTNKYAEGYPGKRYYNGCEHVDVAENLAIERLKKLFDCKFANAQPHSGAQANGAVFLALLKPGDTFMGMS

SEQ ID NO: 107345 - protein, 258 aa, Unknown
  Bacterial polypetide isolated from the Sargasso Sea
QQNHIELIASENIVSQAVLEAQGSVLTNKYAEGYPGKRYYNGCEHVDIAENLAIERLKKLFNCKYANAQPHSGAQANGAVFLALLKPGDTIMGMSLNSGGHLTHGSKAAVSGKWFKSIAYDVDKKTELINYEEVEKIALENNPKLIIAGGSAYSRVIDFKKFRDIADKVGAYLMVDMAHFSGLVAGKGYPNPIEHAHVVTSTTHKVFRSARGGIILTNDETLSKKFNSAVFPGYQGGPLMHIIAAKAVGFYEALKPEF

SEQ ID NO: 107346 - protein, 190 aa, Unknown
  Bacterial polypetide isolated from the Sargasso Sea
THKSLRGPRSGIILSNEDEDFQKKLNFAVFPGSQGGPLMHVIAAKAVCFKEAMTDDFKDYSKQIIKNAQAMCKKFIARGYDLVHPMTENHLLLLDLQKKEVNGKEAEELLGTVNITVNKNSIPNDPESPFITSGIRIGTPAITTRGFKEEEAEQVVDLMCDAIENRNDQASLDRIKDEVKDLCNNFPVYK

SEQ ID NO: 107347 - protein, 143 aa, Unknown
  Bacterial polypetide isolated from the Sargasso Sea
MLDKKSNIKTDAIFSNKKDIELYDAELWESFQKEMVRQEEHIELIASENYASERVLQAQGSVLTNKYAEGYPDKRYYGGCEFVDIAEKLAIDRAKELFNADYANVQPHSGSSANAAAYLALLEPNDTILGMSLDHGGHLTHGS

SEQ ID NO: 107348 - protein, 216 aa, Unknown
  Bacterial polypetide isolated from the Sargasso Sea
MPGKQYPNPIDYAHVVTSTTHKTLRGARSAMILTNDETLIKKINSAVFPGLQGGPLMHVMAGKAVAFGEALKPEFENYIRKVISNAKVLASSLVNNGFKIVTGGTDSHIVWLDLTPKNITGDNAEKILEEVGIACNKNAIPYDPNPPKITSGLRFGTAAATSRGFDENDFSEIGDLISEILDNINQNQDNQKEFISSMKSKVVIMCKKYPIYNEAF

SEQ ID NO: 107349 - protein, 425 aa, Unknown
  Bacterial polypetide isolated from the Sargasso Sea
MYSDYSNVAEFDAELAQAIAHEQQRQEDHIELIASENYASPRVLEMQGSVLTNKYAEGYPGKRYYGGCEFADQVEQLAIERLKHLFSADYANVQPHSGSQANAAVYLALLSPGDVILGMDLSNGGHLTHGSNVNFSGKTYQSYFYGLDDNGEVDYDQVEALAKKHRPKLLVTGFSAYSGVIDWERFRTIADSVNAYMLADIAHVAGLIAAGVYPSPVNIADVTTSTTHKSLRGPRSGVIMAKANPEIEKKLRSAVFPGTQGGPLMHVIAAKAVAFKEAMQPEFIEYAKQVVRNAQAMAKVILDRGYSIVSGGTENHMFLLDLRDYALSGKEVEAILEKAFITTNKNSVPNEPRSPFVTSGVRIGTPAITTRGFKEQESTQLANWICDILDHQGSEQEVQRVLGCVRELCSRFPVYAKPVVTSGAS

SEQ ID NO: 107350 - protein, 331 aa, Unknown
  Bacterial polypetide isolated from the Sargasso Sea
MFSRSNDIATFDADLWAAMEQEAVRQEEHIELIASENYTSPAVMQAQGSVLTNKYAEGYPGKRYYGGCEHVDVVEQLAIDRAKELFGADYANVQPHAGSQANAAVYLALLQAGDTILGMSLAHGGHLTHGASVSSSGKLYNAVQYGINDQGLIDYDEVERLAVEHKPKMIVAGFSAYSQVLDFARFRAIADKVGAYLFVDMAHVAGLVAAGVYPNPVPFADVVTTTTHKTLRGPRGGLILARANEEIEKKLNSAVFPGAQGGPLEHVIAAKAICFKEALQPEFKTYQQQVVKNAQTMAKVFVERGFDVVSGGTQNHLFLLSLIKQDITGKD

SEQ ID NO: 107351 - protein, 383 aa, Unknown
  Bacterial polypetide isolated from the Sargasso Sea
MSSETKYLNSEYKDFFEKSLLESDPEIYKAINDELVRQQNHIELIASENIVSQAVLEAQGSVLTNKYAEGYPGKRYYNGCEHVDVAEQLAIDRLKELFNCKFANAQPHSGAQANGAVFLALLKPGDTFMGMSLNSGGHITHGLKISMSGKWFNAIGYEVDKESELIDYDNVEKLALEHKPKLIIAGGSAYSRIIDFKRFREIADKVGAYLMVDMAHFSGLVAGKGYPNPCDYAHVVTSTTHKVFRSARGGIILTNHEDLSKKFNTAVFPGYQGGPLMHIIAAKAVGFKEALKPEFKDYIKTVLANAKILAETLKNNGFKIYSGGTDTHLMLVDLRPFNVKGNVAAESLSRANITCNKNGIPFDSESPMITSGIRLGSQAATTR

SEQ ID NO: 107352 - protein, 146 aa, Unknown
  Bacterial polypetide isolated from the Sargasso Sea
MNILQNLYESDPVISNFINSEKNRQETHLELIASENFASIAVMQAQGSVLTNKYAEGLPQKRYYGGCEFVDEIEELAIERAKKLFNANWANVQPHSGAQANAAVFLSLLKPGDTIMGNGFISWRTSYSWISSQYEWVVVNAVHYGV

SEQ ID NO: 107353 - protein, 273 aa, Unknown
  Bacterial polypetide isolated from the Sargasso Sea
LIDYDNVEKLALENKPILIIAGGSAYSRVIYFKRFREIADKVGAYLMVDMAHFSGLVAGKGYPNPCDYAHVVTSTTHKVFRSARGGIILTNHEDLAKKFNTAVFPGYQGGPLMHIIAAKAVGFLEALKPEFQNYIKTVLANAKILSETLKNNGFKIYSGGTDTHLMLVDLRPFNVKGNLASESLSRANITCNKNGIPFDTESPMVTSGIRLGSQAATTRGFGLKEFKEVGNLITKTIKGLSMNPNDNSKVEEEVRNEVVSLCSSFPIYKNLYK

SEQ ID NO: 107354 - protein, 345 aa, Unknown
  Bacterial polypetide isolated from the Sargasso Sea
ERAKELFGAAWANVQPHSGAQANFAVFLALLQPGDTIMGLDLSHGGHLTHGSPVNVSGKWFNVVQYGVDRETQRLDMEAIRQLALEHKPKLIVCGFSAYPRTIDFAAFRSIADEVGAFLLADMAHIAGLVAAGVHPSPVPHCDVVTTTTHKTLRGPRGGLILCRDADFAKKFDKAVFPGSQGGPLEHVIAAKAVAFGEALQPAFKAYSLQVVANAAALADRLIARGIDVVSGGTDNHVVLLDLRSVGMTGKVADLLVSDVHITANKNTVPFDPESPFVTSGLRLGTAALTTRGFDVEAFHEVADVIADRLLNPEDDAVQQQCLRRVEALCQRFPLYAVERQPALA

SEQ ID NO: 107355 - protein, 238 aa, Unknown
  Bacterial polypetide isolated from the Sargasso Sea
NKFKDICKKVNAHLLVDMAHFSGLVAGGAYPNPLEYADVVTSTTHKVLRGPRGGIILTNDETLYKKFNSAVFPGLQGGPLMHVVAAKAVCFKEALSEEFKKYTSNVISNAKVLSETLIENNFKIFSGGTDTHLMLVDLRPYGVTGKDAEESLGRANITCNKNGIPFDTQSPMITSGIRLGTPAATTRGFQAEEFKLVGKLITKVIKGLSENPKNNIKIEKEVQKEVVELCSDFPIYSG

SEQ ID NO: 107356 - protein, 424 aa, Unknown
  Bacterial polypetide isolated from the Sargasso Sea
MESKADSIFANRQTIEKYDVELWQALDKESMRQEEHIELIASENYASKRVMEAQGGLLTNKYAEGYPNKRYYGGCEYVDVAEEIAINRAKELFKADYANVQPHSGSSANAAAFLAMLEPNDLILGMSLDQGGHLTHGAKVNFSGKNYQAIQYGLHPETFDIDYDSVRDLAKKHKPKMIIAGFSAFSGIIDWKIFRDIADEVNAYFLVDMAHVSGLVAAGLYPSPVPYADVVTSTTHKTLRGPRSGIIIAKSNENLEKKLNSAVFPGSQGGPLMHVIAAKAVCFKEALEPDFKIYTQQVIDNAKLMCKVIQDRGIDVVTGKTDNHIVLMDLRKKGLTGKDCEHALGHANITVNKNAVPNDPQSPFVTSGIRLGTPAITTRGFGSDEVEILTNWICDVVLDHSNVDKINTIKNKVVEMCKRFPVYQ

SEQ ID NO: 107357 - protein, 330 aa, Unknown
  Bacterial polypetide isolated from the Sargasso Sea
MFSNTSSISAFDSELYDAIQKEENRQEQHIELIASENYASPRVMEAQGSVLTNKYAEGYPSKRYYGGCEYVDIAEDLAIQRVKELYGADYANVQPHSGSQANTAVFLALLNAGDKILGMSLSDGGHLTHGTSVNFSGKLFDAAQYGVNPETGLIDYDEVESLAKKHRPKLLIAGFSAYSRVLDWQKFRDIADSVGAYFLVDMAHVSGLIASGHYPNPVGIADVVTSTTHKTLRGPRGGIILAKENPDLTKKFNSLVFPGTQGGPLMHVIAAKAVAFKEALSPEFKDYQERVIQNAQMMSQTLIDRGYSIVSRGTDNHLVLVSLIDKGLTG

SEQ ID NO: 107358 - protein, 157 aa, Unknown
  Bacterial polypetide isolated from the Sargasso Sea
MSIVKDKDKKIYNIIQSELNRQNGYLELIASENFTSKAVLETAGSVLTNKYAEGYPGKRYYGGCVHVDEAENLAIDRAKRLFKAEYVNVQPHSGSSGVMGVYFAFLQPGDCIMGLDLSHGGHLTHGSKVSFSGQIYNSATFKVKKESGLVDFDDLLK

SEQ ID NO: 107359 - protein, 387 aa, Unknown
  Bacterial polypetide isolated from the Sargasso Sea
ENMASPRVLECQGSVLTNKYAEGYPAKRYYGGCEFVDVAEQLAIDRAKKLFGADWANVQPHSGSQANGAVFHALLEPGDTIMGMSLAHGGHLTHGATVNVSGRIYNAIQYGLNADTGEIDYDEAEKLALENKPKLIITGFSAYSRILDWQRFRDIADKVGALLLSDIAHIAGLVAVGEYPSPIQIADITTTTTHKTLRGPRSGLIMGKSNEEIEKKVNFTVFPSYQGGPLMHIIAAKAVAFKEAMEPEFKTYIQQVKENAKAMAETFVERGLKIVSGGTDNHLFLVDMVDKGLTGKDVDAALGSANITVNKNAVPNDPQSPFVTSGIRIGTPSITTRGFDKSDAIQVANWCCDIMDNMGDDSVIKRVKAEVLELCKSRPLYEFNQDL

SEQ ID NO: 107360 - protein, 232 aa, Unknown
  Bacterial polypetide isolated from the Sargasso Sea
MSSVTKIKRISSNFFERDLKDSDRDLFDSISQEFVRQKNHIELIASENIVSRAVLEAQGSVLTNKYAEGYSGKRYYGGCEFVDISENLAIERAKKLFNCKFANVQPHSGAQANGAVYLALIKPGDTILGMSLNSGGHLTHGAKPAQSGKWFNAVHYEVKEDTGLIDYENVEKLALEHKPKLIIAGGSAYSRIINFKKFKDICKKVNAYLLVDMAHFSGLVAGGAYPQSFRIC

SEQ ID NO: 107361 - protein, 257 aa, Unknown
  Bacterial polypetide isolated from the Sargasso Sea
MSSESKYINNQYQDFFEKSLKQSDPDIYKAINDELIRQQNHIELIASENIVSQAVLEAQGSVLTNKYAEGYPGKRYYNGCEHVDVAEELAIERLKKLFNCKFANAQPHSGAQANGAVFLALLKPGDTFMGMSLNSGGHITHGLKISMSGKWFNAIGYDVDKQSELIDYDNVEKLALEHKPKLIIAGGSAYSRVIDFKRFREIADKIGAYFMVDMAHFSGLVAGKGYPNPVDHAHVVTSTTHKVFRSARGGIILTNHE

SEQ ID NO: 107362 - protein, 163 aa, Unknown
  Bacterial polypetide isolated from the Sargasso Sea
MNSSKSDNIFSNNQSIKDYDSELWLSFQKEAERQEDHIELIASENYASKRILEAQGSLLTNKYAEGYPSKRYYGGCENVDIAENLAIERAKKLFKADYANVQPHSGSSANAAAYLALLEPNDTILGMSLDHGGHLTHGSKVNFSGRNYKSVQYGLHPETNDIN

SEQ ID NO: 107363 - protein, 268 aa, Unknown
  Bacterial polypetide isolated from the Sargasso Sea
MHSGYFTQSLESIDPQVFQSLTAEEQRQQEGIELIASENLVSRATLEALGTAIVNKTVEGYPGARYYGGSQNADRLENLAISRAEQLFECGYANVQPHSGSQANLAVFLAFLKPGDTVLSMDLSAGGHLSHGSPANLTGKWFNIIHYGVSKEDGRIQMDQVWDLADAHQPKLIICGGSAYPRTIDFEGFRKIADDCGAKLIADMAHFAGLVAGGVHPSPIPHAHVVTATTYKNLRGVRGGLILSKETDSERKLNSAVFPGVQGSVILN

SEQ ID NO: 107364 - protein, 310 aa, Unknown
  Bacterial polypetide isolated from the Sargasso Sea
GDTILGMSLNSCGHLTHGAKPAQSGKWFNAIHYDVNKETGLIDYENIEKLALEHKPKLIIAGGSAYSRVIDFKKFRNICDKVNAYLLVDMAHFSGLVAGGVYPNPTEFADVVTSTTHKVLRGPRGGIILTNKEDLIKKFNSAIFPGLQGGPLMHVIAAKAVCFKEALSEDFKIYSKDVINNAKTLSNKLIENGFKIFSGGTDTHLMLVDLREFNVTGKDAEASLGRSNITCNKNGIPFDTQSPMITSGIRLGTPACTTRGFGSNEFILIADLITKVVKGLSKNPENNSKIEKEVQKEVIDLCSSFPIYSN

SEQ ID NO: 107365 - protein, 439 aa, Unknown
  Bacterial polypetide isolated from the Sargasso Sea
MGDINEPYSFIKDKDSQLYNILLDEVSREEETLELIASENFVSYPVLEMAGSVMTNKYAEGYPGARYYGGCEFVDKAENLARERAKTLFKCDYANVQPHSGSQANMAVLMTFISAGDTIMGLDLSHGGHLTHGSSVNFSGQLYNSVSYQVDKETGRINFTDVKKIAKEYKPKLIICGGSAYPRHVEFSHFREIANEVGAYLMADIAHPSGLVATGLHPSPMPHCDVVTTTTHKTLRGPRGGMIMMGKDFENKWGIKALKSGRTKQVSELLDSAVMPGVQGGPLMHIIAAKALAFGEALDPGFKIYTQNIINNAKTMADELLSKDYKLISGGTDTHVILIDLTNKNITGKSAEKALEQAGITVNKNMVPFDERSPFITSGMRIGTPAITTRGMGEVEMVQIVELIDEVINDIENETLIANVKSKVKSLCKSFPIYRELHE

SEQ ID NO: 107366 - protein, 389 aa, Unknown
  Bacterial polypetide isolated from the Sargasso Sea
DSNQHIELIASENIVSQAVLEAQGSVLTNKYAEGYPGKRYYNGCEHVDVAENLANERLKKLFNCKFANSQPHSGAQANGAVFLALLSPGDTFMGMSLNSGGHITHGLKISMSGKWFNAISYDVDKKSELIDYDNVEKLALEHKPKLIIAGGSAYSRVIDFKRFREIADKVGAYLMVDMAHFSGLVAGKGYPNPCDHAHVVTSTTHKVFRSARGGIILTNHEDLAKKFNTAVFPGYQGGPLMHVIAAKAAGFLEALQPEFKDYIKSVLANAKMLAETLKNNGFKIYSNGTDTHLMLVDLRPYNVKGNLAAESLSRANITCNKNGIPFDTEKPMITSGIRLGTQAATTRGFGLNEFKTVGELITKTLKGLSENPNDNSKVENEVKNEVISL

SEQ ID NO: 107367 - protein, 170 aa, Unknown
  Bacterial polypetide isolated from the Sargasso Sea
EKKLNSAVFPGSQGGPLMHVVAAKALCFKEALDPEFKIYINQVMENAKTMASTLMSNGIDIVSNGTENHIILVDLRNKGISGKDLERVLGSVNITVNKNSVPNDPASPFVTSGIRIGTPAATTRGFKEKEIIQVSNWISDIINDFSNEELQKNIKGEVHNLTSNFPVYNV

SEQ ID NO: 107368 - protein, 342 aa, Unknown
  Bacterial polypetide isolated from the Sargasso Sea
FKMNNDKEIFDLIQKEKERQINGLELIASENFASENVMKATGSVLTNKYAEGYPGKRYYGGCEIVDEVENIAISRLKDLFSVEYANVQPHSGSQANTAVFDAFLKPGDKILGLDLSHGGHLTHGSPVNFSGKIYNSSFYTLNKDGVFDYEQILQRAKEENPNLIIVGASAYSRDIDFSKFREIADEVGSILHADIAHPSGLIAKGLLSDPVPYCDVITSTTHKTLRGPRGGIIMMGKDFDNPFGLKFKNGNLKKMSSVLDGAIFPGNQGGPLEHVIAAKAVAFGEALDSSFKDYAKQIQRNSKKLSSDLVDLGFNIVSGGTDNHLLLIDLRNKNVTGKDAET

SEQ ID NO: 107369 - protein, 272 aa, Unknown
  Bacterial polypetide isolated from the Sargasso Sea
LIDYDEVERLAKEHKPKMLIGGFSAYSQIIDWKRMSEIAKSVGAYFHVDMAHVSGLVAAGVYPNPVPYADVVTSTTHKTLRGPRGGIIICKANEELEKKFNSLVFPGTQGGPLMHVIAAKAVAFKEALEPEFKDYMNQVIANANVLAQTMMERGFEIVSGGTKNHLMLVSLVKQGLTGKAADAALHSANITVNKNSVPNDPQSPFVTSGIRLGTPAITTRGFKETETKILGNLICDVLDNIDNEEEIKKIKEKVLNLCSQFPVYSSSKQAVA

SEQ ID NO: 107370 - protein, 236 aa, Unknown
  Bacterial polypetide isolated from the Sargasso Sea
MISDLFTKGIKEADPEVYRTLSRELERQQNQIELIASENIASRSILNAQGSVMTNKYAEGYPGKRYYGGCEFVDQAEEIALDRVKKLFNCKFANLQPHSGAQANQAVFLALLQPHDTILGMSLASGGHLTHGAKPNLSGKWFNAVQYGVKKDGNDKDLIDYDEVEALALEHKPKMIIAGASAYPRTIDWKKFREISDKVGAYFLVDMAHYSGLVAGKQYPNPIEHAHVVTSTTHKL

SEQ ID NO: 107371 - protein, 437 aa, Unknown
  Bacterial polypetide isolated from the Sargasso Sea
MSSESKYLNDQYKSFFEDSLSKTDPDLYKAINDELQRQQEHIELIASENIVSQAVLEAQGSVLTNKYAEGYSGKRYYNGCEHVDVAENLANERLKKLFNCKFANSQPHSGAQANGATFLALLKPGDTFMGMSLNSGGHITHGLKISMSGKWFNPIGYDVDKESELIDYDHVEKLALEHKPKLIIAGGSAYSRVIDFKRFREICDKVGAYLMVDMAHFSGLVAGKGYPNPCEHAHVVTSTTHKVFRSARGGIILTNHEDIAKKINTAVFPGYQGGPLMHIIAAKAAGFLEALRPEFKDYIKSVLANAKILSETLKNNGFKIYSGGTDTHLMLVDLRPFKVKGNLAAESLSRANITCNKNGIPFDSESPMITSGIRLGSQAATTRGFGLKEFEIVGKLITKVIDGLSKNPNDNSKVEDEVRKQVVALCSSFPIYKNLRK

SEQ ID NO: 107372 - protein, 430 aa, Unknown
  Bacterial polypetide isolated from the Sargasso Sea
YLNDQYKGFFEDSLSKTDPELYKAISDELKRQQEHIELIASENIVSQAVLEAQGSVLTNKYAEGYPGKRYYNGCEHVDVAENLAIERLKKLFDCKFANAQPHSGAQANGAVFLALLKPGDTFMGMSLNSGGHITHGLKISMSGKWFNAIGYDVDKESELIDYDNVEKIALENKPKLIIAGGSAYSRVIDFKRFREIADKVGAYLMVDMAHFSGLVAGKGYPNPCEYAHVVTSTTHKVFRSARGGIILTNHEDLAKKFNTAVFPGYQGGPLMHIIAAKAAGFLEALKPEFKDYIKSVLANAKILSETLKNNGFKIYSGGTDSHLMLVDLRPFNVKGNLASESLSRANITCNKNGIPFDSESPMITSGIRLGTQAATTRGFGLKEFEKVGELITKTIKGLSKSPDDNSKIEDEVRAEVVDLCSNFPIYKHLR

SEQ ID NO: 107373 - protein, 438 aa, Unknown
  Bacterial polypetide isolated from the Sargasso Sea
MPKILENTREDYKDFFDNDLSKNDPELYNSIKLELKRQQEHIELIASENIVSKAVLDAQGSILTNKYAEGYPGKRYYGGCEFVDKAEDLALERVKKLFNCKFANVQPHSGAQANGAVYLALLKPGDTILGMSLNSGGHLTHGAKVAQSGKWLNAFHYEVDKVTGLIDYDQVKELALKNKPKLLIAGGSAYSRIIDFKKFREIADSIGAYLMVDMAHFSGLVAGHGYPNPIDYADVVTSTTHKVLRGGRGGIILTNREDLYKKFNSAVFPGYQGGPLMHVIAAKAAAFQEALKPEFKDYIKAVLANAKILSETLKNNGFKIFSGGTDTHLMLVDLRPFKVTGKAAEVSLCNSNITCNKNGIPFDTEKMTITSGIRLGSQAATTRGFGLNEFQKVGELITKVVKGLSQNPNDNKKIESEVRKEVIDLCSNFPIYNHLFKN

SEQ ID NO: 107374 - protein, 423 aa, Unknown
  Bacterial polypetide isolated from the Sargasso Sea
MNILQNLKESDPVISNYINSEKNRQETHLELIASENFASIAVMQAQGSVLTNKYAEGLPQKRYYGGCEFVDEIEELAIQRAKKLFNANWANVQPHSGAQANAAVFLSLLKPGDTIMGMDLSHGGHLTHGSPVNMSGKWFNAVHYGVNKETSELNFDEIREIALETKPKLIICGYSAYPRTIDFESFRNIADEVGAFLMADIAHIAGLVASKLHPNPIPYCDVVTTTTHKTLRGPRGGLILCKDAEFGKKFDKSVFPGTQGGPLEHIIAAKAVAFGEALQRDFVNYSQQVIKNAKVLASTLINRGINIVSGGTDNHIVLLDLRSINMTGKIADLLVSEVNITANKNTVPFDPESPFVTSGLRLGTAALTTRGFNENAFAEVGEIIADRLLNPDDSLIESKCKERVLTLCNHFPLYEGKLEASIK

SEQ ID NO: 107375 - protein, 274 aa, Unknown
  Bacterial polypetide isolated from the Sargasso Sea
QYGLDPSTGEIDYDEVEKLAKAHNPKMIVAGFSAYSGIVDWEKFREVADAVGAYLLVDMAHVSGLIAADEYPSPIPFADVVTTTTHKTLRGPRGGLILAKENEEIHKKLNSGIFPGTQGGPLMHVIAAKAVCFKEALEPGFKDYQKQVKLNAKKMAATFMERGINIVSNGTENHMFLVDLIDKGLTGKEADAALGKANITVNKNAVPNDPESPFVTSGLRIGTPASTTRGFKETEVSEVASWICDILDDIKNEEINREVKNKVKELCSRFPVYS

SEQ ID NO: 107376 - protein, 364 aa, Unknown
  Bacterial polypetide isolated from the Sargasso Sea
MVDKEILDLVLKENIRQTNGIELIASENFTSPDVMNVTGSVLTNKYAEGYPTKRYYGGCEVVDKIEEIAINRAKKLFGCEYANVQPHSGSQANTAVFHAFLSPGDKILGFDLSHGGHLTHGSPVNFSGKLYNANFYGVDRKTGVLDYDEIESIAKKVKPKMIIAGASAYSRDIDFKRFRSIADKMGSFLLADISHPSGMIAAGLLNNPVPHCHVITTTTHKTLRGPRGGLILMGKDFDNPFGQKLKNGSLKKMSNLLNMAVFPGNQGGPLMHVIAAKAIAFREALSPLFIDYQKRVVENSQMMASLFNKLGYKIISNGTDNHLMLIDLRNKNISGKEAEEALVRAEITVNKNMVPFDDKSPFRN

SEQ ID NO: 107377 - protein, 359 aa, Unknown
  Bacterial polypetide isolated from the Sargasso Sea
MFNSGKSLAEFDPEISAAIEAERTRQEEHIELIASENHTSPFVMEAQGSVLTNKYAEGYPSKRYYGGCENVDVVEELAIKRAKELFGADYANVQPHSGSQANASAYMALMKPGDTLLGMSLADGGHLTHGATVSFSGRIYNSVQYGLNGQTGEIDYDEVNRLAHEHRPKLIVAGFSAYSKVVDWQKFRDIADEIGAYFLVDMAHVSGLVAAGVYPSPVNIADVTTSTTHKTLRGPRGGIILARSNPELEKKLNFSVFPESQGGPLMHVIAAKAICFKEAMGENFRKYQEQTVKNAQVMANGFIRRGFEVVSDGTDDHLFLLSLIKQGLTGKDADAALGRANITVNKNAVPNDPNPPFVT

SEQ ID NO: 107378 - protein, 417 aa, Unknown
  Bacterial polypetide isolated from the Sargasso Sea
MLKKDMNIADYDPELFNAIQNETLRQEEHIELIASENYTSPRVMQAQGSQLTNKYAEGYPGKRYYGGCEYVDVVETLAIERAKQLFGATYANVQPHSGSQANSAVYMALLKPGDTVLGMNLAHGGHLTHGSPVNFSGRLYNIIPYGIDESGKIDYDEMERLAVEHKPKMMIGGFSAYSGIVDWARMREIADKIGAYLFVDMAHVAGLIAAGVYPNPVPHAHVVTSTTHKTLAGPRGGIILSAADDEELYKKLNSAVFPGGQGGPLMHVIAGKAVAFKEALEPEFKAYQQQVVKNAKAMVEVFLERGYKIVSGGTDNHLMLVDLIGRDLTGKEADAALGSANITVNKNSVPNDPRSPFVTSGVRIGTPAITRRGFKEAEAKELTGWICDILDDAHNPAVIERVKGQVLALCARFPVYG

SEQ ID NO: 107379 - protein, 420 aa, Unknown
  Bacterial polypetide isolated from the Sargasso Sea
MTFFSSPLQEIDNEIHEAINKELSRQQNQIELIASENIVSKAVLEAQGSVLTNKYAEGYTAARYYGGCEFVDIAEDLAIQRLKKLYKCEYANVQPHSGAQANGAVMLALIKPGDTILGMSLDAGGHLTHGSAPSMSGKWFNAVQYGLDDEGLINYDEVESLAKEHKPKIIIAGGSAYSRIIDFKRFREICDLVGAYLHVDMAHFSGLVAAEEYPNPIEFADVVTSTTHKTIRGARGGMILSNNKDLGKKFNSAVFPGYQGGPLMHVIAGKAVAFGEALKPEFKEYIKQVIKNAQTLSQTLVDGGLKIVSGGTDTHLILVDLTPMDLTGDAASTSLEEAHITCNKNGIPKDPKPPKITSGIRLGTPAATTRGFKEKEFETVGNLILETLSGLKQNPDDNSKVEKIVKEKVINLCNQFPIYN

SEQ ID NO: 107380 - protein, 339 aa, Unknown
  Bacterial polypetide isolated from the Sargasso Sea
MENTGALNTELFETDDEIASLINNDLERQNSHIHLIASENFASKAVMQASGSILTNKYSEGFPGKRYYEGCETVDEIEQLAIDRACKLFEADHANVQPHSGSSANMAVYLNLLEAGDTVMGMALDQGGHLTHGSPVNFSGRIYNFVGYGLDQDTELIDMDKVKQLAEETKPKLLIAGYSSYSQNLDYAAFREIADSVGAYFMVDAAHFIGLVAGKAVENPMKYADVVTATTHKALRGPRGGIILSTEEFAKGVDKNIFPGAQGGALNNQIAAKAVCFKEALSSEFQDYTKQILKNASALSDSFINEGLRVVSGGTTNHIVLVDTGSVDEELTGKMQERY

SEQ ID NO: 107381 - protein, 317 aa, Unknown
  Bacterial polypetide isolated from the Sargasso Sea
MSFFSSPLKDIDNEIHKAINLELDRQQNQIELIASENIVSKAVLEAQGSIMTNKYAEGYASSRYYGGCEFVDIAEDLAIKRLQKLYKCEYANVQPHSGAQANGAVMLALIKPGDTILGMSLDAGGHLTHGSAPSMSGKWFNAVQYGLEDNGLIDYDEVERLAKDHNPKIIIAGGSAYSRIIDFKKFREICDQVGAFLHVDMAHFSGLVAAEEYPNPLEYADVVTSTTHKTIRGARGGMILSNNLELGKKFNSAVFPGYQGGPLMHVIAGKAVAFGEALKPEFKEYIKQVITNAKTLSDTLVSGGLKIVSGGTDTHLI

SEQ ID NO: 107382 - protein, 357 aa, Unknown
  Bacterial polypetide isolated from the Sargasso Sea
MSSESKYLNDQYKSFFEDSLSKTDPDLFKAINDELQRQQEHIELIASENIVSQAVLEAQSSVLTNKYAGSYSGKRYYNGCEHVDVAENLANERLKKLFNCKFANSQPHSGAQANGATFLALLKPGDTFMGMSLNSGGHITHGLKISMSGKWFNPIGYDVDKTSELIDYDHVEKLALEHKPKLIIAGGSAYSRVIDFKRFREICDKVGAYFMVDMAHFSGLVAGKGYPNPCEHAHVVTSTTHKVFRSARGGIILTNHEDISKKINTAVFPGYQGGPLMHIIAAKAAGFLEALRPEFKDYIKSVLANAKILSETLKNNGFKIYSGGTDTHLMLVDLRPFKVKGNLAAESLSRANITCNK

SEQ ID NO: 107383 - protein, 415 aa, Unknown
  Bacterial polypetide isolated from the Sargasso Sea
MFDRAQSTIANVDPELWSVIQQENRRQEEHIELIASENYTSPAVMAAQGSQLTNKYAEGYPGRRYYGGCEYVDIAEQLAIDRVKQLFGAEAANVQPNSGSQANQGVFFAMLKPGDTIMGMSLAHGGHLTHGSPVNMSGKWFNVVSYGLNEAEDIDYEAAEKLAQEHKPKLIVAGASAFALRIDFERLSKIAKSVGAYFMVDMAHYAGLIAAGVYPNPVPHADFVTTTTHKSLRGPRGGVILMKAEFEKQINSAIFPGIQGGPLMHVIAGKAVAFKEALSPEFKAYQQQVVENARVLAETLVKRGLRIVSGRTESHVMLVDLRAKKITGKAAEAALGAAHITVNKNAIPNDPEKPFVTSGVRLGSPAMTTRGFGVKEAEQVGNLIADVLDNPEDAATIERVRAQVAELTQRFPVYR

SEQ ID NO: 107384 - protein, 426 aa, Unknown
  Bacterial polypetide isolated from the Sargasso Sea
MKSSKSDSVFSDKSSIKDFDKDLWLSFENESKRQEDHIELIASENYASKRVLEAQGSILTNKYAEGYPSKRYYGGCENVDIAENLAIERAKELFNADYANVQPHSGSSANSAAFLALLEPNDTILGMSLDHGGHLTHGSKVNFSGRNYKSIQYGLHPETDDINYDEVRTLAKKHNPKLIIAGFSAFSGILDWKKFKDIAEETGALLLVDMAHVSGLVAAGLYPSPIPYADVVTSTTHKTLRGPRSGIILAKKNEEIEKKLNSAVFPGSQGGPLMHVIAAKAICFKEALDPEFKIYTQQVMDNAKLMAETLISNNIDIVTNGTKNHIVLVDLRNKNISGKDLESTLGCVNITVNKNSVPNDPASPFVTSGIRIGTPAVTTRGFKEEEIIKISNWISSIINDFDNVELQNKIKKEVHNMTHEFPVYNL

SEQ ID NO: 107385 - protein, 193 aa, Unknown
  Bacterial polypetide isolated from the Sargasso Sea
MNIADFDPELADAMSKEVERQEHHIELIASENYCSPRVMEAQGSQLTNKYAEGYPGKRYYGGCEHVDVVEQLAIDRAKALFGADYANVQPHAGSQANSAVFMALLDAGDTVLGMSLSEGGHLTHGSHVNFSGKTYNAVQYGLNKETGEIDYAQVEALAKEHKPKMIIGGFSAYSGIVDWAKFREIADSVGAYL

SEQ ID NO: 107386 - protein, 426 aa, Unknown
  Bacterial polypetide isolated from the Sargasso Sea
MKSFKSDNIFSNSSSIKDFDKDLWKSFKNESERQEDHIELIASENYASKRVLEAQGSVLTNKYAEGYPSKRYYGGCENVDIAENLAIERAKELFNADYANVQPHSGSSANAAAFLALLKPNDTILGMSLDHGGHLTHGSKVNFSGRNYKSVQYGLHPETNDINYDEVRSLAKQYNPKLIIAGFSAFSGIVDWKKFRDIADEVGAFFLVDMAHVSGLIAADLYPSPIPYADVVTSTTHKTLRGPRSGIILAKKNEEIEKKLNSAVFPGSQGGPLMHVIAAKAICFKEALDPEFKSYIQQVMDNAKIMAKTIIENGIDVVTNGTENHIVLVDLRNKNITGKDLEHVLGSINITVNKNSVPNDTASPFVTSGIRIGTPAVTTRGFKETEIIQISNWISSIINDFGNVELQNKIKKEVHNLTNEFPVYNL

SEQ ID NO: 107387 - protein, 435 aa, Unknown
  Bacterial polypetide isolated from the Sargasso Sea
MSSEKNYINDSYKSFFEDSLSSKDPDLYKAIQDELLRQQQHIELIASENIVSQAVLEAQGSVLTNKYAEGYPGKRYYNGCEHVDVAENLAIERLKKLFNCKFANAQPHSGAQANGAVFLALLKPGDTFMGMSLNSGGHITHGLKISMSGKWFNPIGYDVDKKSELIDYDNVEKLALEHKPKLIIAGGSAYSRVIDFKRFREIADKVGAYLMVDMAHFSGLVAGKGYPNPCDYAHVVTSTTHKVFRSARGGIILTNHEELSKKFNTAVFPGYQGGPLMHVIAAKAAGFLEALQPDFQDYIKSVLANAKILAETLKNNGFKIYSDGTDTHLMLVDLRPYNVKGNLAAESLSRANITCNKNGIPFDTEKPMVTSGIRLGTQAITTRGFGLNECKKVGELITKTLKGLSENPDDNSKVEDEVRNEVIALTSSFPIYKNL

SEQ ID NO: 107388 - protein, 436 aa, Unknown
  Bacterial polypetide isolated from the Sargasso Sea
MSETTKTAQYEDFEDFFSKSLKEADPKLYESLSQEFDRQQEHIELIASENIVSRSVLDAQGSIMTNKYAEGYSGRRYYGGCEYVDLAEDLAISRACELFDSKYANVQPHSGSQANQAVFQALLKPGDTILGMSLDAGGHLTHGAKPNQSGKLFNAIQYGVKKDDSLIDFNEVESLANQHKPKLIIAGGSAYPRVIDFAKFREIANNVNAYLLVDMAHFAGLVASKTYPSPIAIADIVTTTTHKTLRGPRGGLILTNNEDISKKINSAIFPGIQGGPLMHTILAKAVAFGEALRPEFVNYSQNVIDNAKILSQTLLEDGFDIVSGGTDSHLVLLDLRPKGIKGNEAEDVLGKANITCNKNGVPFDPEKPTITSGIRLGTPAGTTRGFGQAEFHKIGTYICEVLNGFQLDGVDTKAILEVQKKVIDLCRKFPIYGGNL

SEQ ID NO: 107389 - protein, 426 aa, Unknown
  Bacterial polypetide isolated from the Sargasso Sea
MKSSRSDSIFSNNNTIKDYDNELWASFQHEAERQEDHIELIASENYASKRILEAQGSLLTNKYAEGYPSKRYYGGCENVDIAENLAIDRAKELFKADYANVQPHSGSSANAAAYLALLQPNDTILGMSLDHGGHLTHGSKVNFSGRNYKSIQYGLHPETHDIDYDQVRSLAIEHKPKLIIAGFSAFTGIIDWKKFREIADETGAYFLVDMAHVSGLVAADLYPSPLPYADVVTSTTHKTLRGPRSGIILAKANEEIEKKLNSAVFPGSQGGPLMHVVAAKALCFKEALDPEFKIYIKQVMDNAKTMAETIMSNGIDIVSNGTENHIILIDLRSKGITGKDLERVLGSVNITVNKNSVPNDPASPFVTSGIRIGTPAATTRGFKEEEIIQVANWISDIINNFDNEELQKTIKEEVHKLTSNFPVYNL

SEQ ID NO: 107390 - protein, 420 aa, Unknown
  Bacterial polypetide isolated from the Sargasso Sea
MENTGALNTELFETDNEIASLIDNDLARQNSHIHLIASENFASKAVMQASGSILTNKYSEGFPGRRYYEGCETVDEIEQLAIDRACELFEADHANVQPHSGSSANMAVYLNLLEAGDTVMGMSLDQGGHLTHGSPVNFSGRMYNFVGYGLDKETELINMDDVAKLAEETKPKLLIAGYSSYSQELDYKAFREIADSVGAYFMVDAAHFIGLVAGKVVENPMKYADVVTATTHKALRGPRGGMILSTEEFAKGVDKNIFPGAQGGALNNQIAAKAVCFKEALSKDFQDYTAQILKNASALSDSFINEGLRVVSGGTTNHIVLVDTNSVDEELTGKDAGILLNEMGITLNRNAIPFDERSPFVTSGIRMGTPAATTCGMKESELTKVGYLISEILKNRSDSNKLDELKDEVKELASQYKPYV

SEQ ID NO: 107391 - protein, 421 aa, Unknown
  Bacterial polypetide isolated from the Sargasso Sea
MNEFKKTQNQNISEYDADLAIFLDRELVRQEEHIELIASENYASKRVLEAQGSVLTNKYAEGYPKKRYYGGCEHVDGAETLAIDRAKELFKAKFANVQPHSGASANAAVFLALLEPGDTFLGMALDQGGHLTHGAKVNFSGRNFNAIQYGLHPETGEIDYEAVNKLALEHKPKLILAGFSAYMGIVDWQRFREIADSVGAYLMVDMAHVSGLIAAGVYPSPIEHAHVVTSTTHKSLRGPRSGIILSNEDEDFQKKLNFAVFPGSQGGPLMHVIAAKAVCFKEAMTADFKDYSKQIIKNAQAMCKKFGERGYDLVHPMTENHLLLLDLQNKEVNGKEAEELLGTVNITVNKNSIPNDPESPFVTSGIRIGTPAITTRGFKEKEAQSVVDLICDAIENRDDQACLDKIKNEVKELCNNFPVYN

SEQ ID NO: 107392 - protein, 303 aa, Unknown
  Bacterial polypetide isolated from the Sargasso Sea
SGGHITHGLKISMSGKWFNAISYDVDKKSELIDYDNVERLALEHKPKLIIAGGSAYSRVIDFKRFREICDKVGAYLMVDMAHFSGLVAGKGYPNPCDYAHVVTSTTHKVFRSARGGIILSNDLDLGKKFDTAVFPGYQGGPLMHIIAAKAAGFFEALKPEFQTYIKNVLANAKILAETLKNNGFKIYSGGTDTHLMLVDLRPFNVKGNLASESLCRANITCNKNGIPFDTEKPMITSGIRLGSQAATTRGFGLKEFEKVGELITKVIKGLSENPEDNSNVENEVRNEVINLCSNFPIYKNLNK

SEQ ID NO: 107393 - protein, 212 aa, Unknown
  Bacterial polypetide isolated from the Sargasso Sea
MSNTSKSFSHIENSDQQIYDILVRELNREHNTLELIASENFVSYPVLEMAGGIMTNKYAEGYPGARYYGGCQFVDEAENLARDRAKELFQCEYANVQPHSGSQANMATLMTFIDIGDTIMGLDLAHGGHLTHGSKVNFSGQMYNSASYQVDKDTGRVDFDSVKKIAHEYKPKIIICGGSAYPRHVEFSEFKTIADEVGAFLMADIAHPSGLV

SEQ ID NO: 107394 - protein, 348 aa, Unknown
  Bacterial polypetide isolated from the Sargasso Sea
MSNTSKSFSHIENSDQQIYDILVRELNREHNTLELIASENFVSYPVLEMAGGIMTNKYAEGYPGARYYGGCQFVDEAENLARDRAKELFQCEYANVQPHSGSQANMATLMTFIDIGDTIMGLDLAHGGHLTHGSKVNFSGQMYNSASYQVDKETGMVDFDSVKKIAHEYKPKIIICGGSAYPRHVEFSEFKTIADEVGAFLMADIAHPSGLVAAGLHPSPMPYCDVVTTTTHKTLRGPRGGMIMMGKDFENKWNIVAPKSGRVKMVSEILDSAVMPGIQGGPLMHIIAAKAIAFGEALDPSFKVYAQEVINNAQTMAAAFSDKGYDLISGGTDTHVVLIDLSNKNVNG

SEQ ID NO: 107395 - protein, 171 aa, Unknown
  Bacterial polypetide isolated from the Sargasso Sea
MSQQSERSINRDLAQADPAIAGLIDREQNRQETHLELIASENFASSAVMEAQGSVLTNKYAEGLPNKRYYGGCEHVDAIEELAIERAKQLFGAAWANVQPHSGAQANFAVFLALLQPGDTIMGLDLSHGGHLTHGSPVNVSGKWFKVIQYGVDRETQRLDMDAIRALAREH

SEQ ID NO: 107396 - protein, 180 aa, Unknown
  Bacterial polypetide isolated from the Sargasso Sea
SNNLELGKKFNSAVFPGYQGGPLMHVIAGKAVAFGEALKPEFKEYIKQVITNAKTLSDTLVSGGLKIVSGGTDTHLILVDLTPMDLTGDSAQTSLEAANITCNKNGIPKDPKPPKITSGIRLGTPAATTRGFKENEFKLVGELILETLVGLKSNPTDNSNVEKAVKQKVINLCSEFPIYS

SEQ ID NO: 107397 - protein, 229 aa, Unknown
  Bacterial polypetide isolated from the Sargasso Sea
MVAAGIHPSPVPYCNVITTTTHKTLRGPRGGMIMMGKDDLNPWNITAPKSGRVKNISELLDNSVMPGVQGGPLMHIIAAKAVAFGEALLPEFKVYAQQIVANAKEMADEFLKRDYKLVSGGTDTHVVLIDLTNKGITGKVAEKSLEKAGIAVNKNMVPFDEKSPFITSGIRIGTPAITTRGMGKDDMKKIVSLIDIVINNPNDDHKVDSVKAEVNELCKFFPLYPELRD

SEQ ID NO: 107398 - protein, 294 aa, Unknown
  Bacterial polypetide isolated from the Sargasso Sea
GGHLTHGSKVNFSGRNYNSFQYGLNSETHDIDYDQVRDLAKKHNPKLLIAGFSAFSGLVDWSIFREIADEVNAYFLVDMAHISGLVAAGMYPSPVPFADVVTSTTHKTLRGPRSGIILAKENEEIQKKLNSAVFPGSQGGPLMHVVAAKAVCFKEALEPEFKTYMSQVINNAKTMAKTIIGRGVDIVKGGTENHMILVDLRNKGITGKDSEYKLGLANITVNKNAVPNDPQSPFITSGIRLGTPAVTTRGFKEDEIIQISNWICDIVLDLGNEQKIEEIKNKALSLCKEFPVYK

SEQ ID NO: 107399 - protein, 401 aa, Unknown
  Bacterial polypetide isolated from the Sargasso Sea
RRQQQHIELIASENIVSQAVLEAQGSVLTNKYAEGYPGKRYYNGCEHVDVAENLAIERLKKLFNCKFANAQPHSGAQANGAVFLALLKPGDTFLGMSLNSGGHITHGLKISMSGKWFNAIGYDVDKKSELIDYDNVEKLALEHKPKLIIAGGSAYSRVIDFKRFREIADKVGAYLMVDMAHFSGLVAGKGYPNPCDYAHVVTSTTHKVFRSARGGIILTNHEDLSKKFNTAVFPGYQGGPLMHVIAAKAAGFLEALRPDFQDYIKSVLSNAKILAETLKNNGFKIYSGGTDTHLMLVDLRPFNVKGNLAAESLCRANITCNKNGIPFDTESPMVTSGIRLGSQAATTRGFGLKEFEMVGQLITKVIKGLSSNPEDNSKVENEVRQEVIELCSKFPIYKHLG

SEQ ID NO: 107400 - protein, 76 aa, Unknown
  Bacterial polypetide isolated from the Sargasso Sea
MISDLFTKGIKEADPEVYGTLSRELERQHNQIELIASENIASRSILNAQGSVMTNKYAEGYPGKRYYGGCEFVDQA

SEQ ID NO: 107401 - protein, 276 aa, Unknown
  Bacterial polypetide isolated from the Sargasso Sea
MLDKKSNLKTDAIFSNKNDIELYDAELWESFEKEMVRQEEHIELIASENYASQRVLQAQGSVLTNKYAEGYPDKRYYGGCEFVDIAEKLAIDRAKELFNADYANVQPHSGSSANAAAYLALLEPNDAMLGMSLDHGGHLTHGSKVNFSGRNYKSFQYGLNPETHDIDYDQVRDLAKKHNPKLIIAGFSAFSGLVDWSIFREIADEVNAYFLVDMAHISGLVAAGMYPSPVPYADVVTSTTHKTLRGPRSGIILARENEDIQKKLNSASFSRITEGG

SEQ ID NO: 107402 - protein, 74 aa, Unknown
  Bacterial polypetide isolated from the Sargasso Sea
VNKNMVPYDDQSPFVTSGIRIGTPAITTRGLKEVDMGFIAESINDVINNYEDDQKLNSISDNVKSEMKDRPLFA

SEQ ID NO: 107403 - protein, 356 aa, Unknown
  Bacterial polypetide isolated from the Sargasso Sea
MSIALKLNKYLNSFFKLDLKEADKELFKSIQEEFSRQQNHIELIASENIVSRAVLEAQGSVLTNKYAEGYPGKRYYGGCEHVDVSENLAIERAKKLFDCNFANVQPHSGAQANGAVYLALLKPGDTTLAMSLNSGGHLTHGAKPAQSGKWFNALHYEVDQKTGLIDYESVEKIATENKPKLIIAGGSAYSRIIDFKKFREICDKVGAYLLVDMAHFSGLVAGGAYPNPTKYADVVTSTTHKVLRGPRGGIILTNREDLIKKFNSAIFPGLQGGPLMHVIAAKAVCFKEALSADFKDYTKNVINNAKVLSERLTEKGFKIFSGGTDTHLMLIDLRSFGVTGKDAQASLGRSNITCNK

SEQ ID NO: 107404 - protein, 248 aa, Unknown
  Bacterial polypetide isolated from the Sargasso Sea
MSNPNPFFEESLATRDAAVRGAILKELERQQSQVELIASENIVSRAVLEAQGSVLTNKYAEGYPGKRYYGGCEYADVIETLALDRIKQLFNAKFANVQPHSGAQANGAVMLALVKPGDTVLGMSLDAGGHLTHGAKPAMSGKWFNAVQYGVNRDTMLIDYEQIEELAQQHKPALLIAGFSAYPRALDFARLRAIADGVGAKLMVDMAHIAGVIAAGRHQNPVEHAHVVTSTTHKTLRGPRGGFVRPRR

SEQ ID NO: 107405 - protein, 353 aa, Unknown
  Bacterial polypetide isolated from the Sargasso Sea
DRAKRLFKAEYANVQPHSGSSANMGVFLAYLEPGDCIMGLDLSHGGHLTHGSKVSFSGQIYNSTTFKVKENTGLVDFDDMLKKAKEFKPKIIICGASAYPRTVEFEKFREIADEVGAFLHGDICHNSGLIAAEMHPSPFPHCHVVSTSTHKSLRGPRGGIILLGKDYENPFGKVAPKSGRVKMMSELIDSAVMPGIQGGPLMHVIAAKAVGFKEALHPSFKSYIKSVLDNAQCFADEFKNKDYNLISGGTDTHLVLIDLQNKNISGKAAEIALDEAGITVNKNMIPYDPKSPFVTSGIRVGSPAMTTRGMGVEEVKIIVDLIDQVILNHDNKEKINSVRAQVNELCSSYPIYE

SEQ ID NO: 107406 - protein, 429 aa, Unknown
  Bacterial polypetide isolated from the Sargasso Sea
MLDKKSNLKTDAIFSNKKDIELYDVQLWESFEKEMVRQEEHIELIASENYASQRVLQAQGSVLTNKYAEGYPDKRYYGGCEFVDIAEKLAIDRAKELFNADYANVQPHSGSSANAAAYLALLEPNDAILGMSLDHGGHLTHGSKVNFSGRNYKSFQYGLNPETHDIDYDQVRDLAKKHNPKLIIAGFSAFSGLVDWSIFREIADEVNAYFLVDMAHISGLVAAGMYPSPVPFADVVTSTTHKTLRGPRSGIILARENEDIQKKLNSAVFPGSQGGPLMHVVAAKAVCFKEALEPEFKTYISQVISNAKTMAKTIIGRGIDIVKGGTENHMILVDLRNKEITGKDSEYKLGLANITVNKNAVPNDPQSPFITSGIRLGTPAVTTRGFKEDEIIQISNWICDIVLDLDNEQKIEEIKNKALSLCKEFPVYK

SEQ ID NO: 107407 - protein, 423 aa, Unknown
  Bacterial polypetide isolated from the Sargasso Sea
MNILQNLKESDPVISNFINSEKNRQETHLELIASENFASIAVMQAQGSVLTNKYAEGLPQKRYYGGCEFVDEIEELAIQRAKKLFNANWANVQPHSGAQANAAVFLSLLKPGDTIMGMDLSHGGHLTHGSPVNMSGKWFNAVHYGVNKETSELNFDEIREIALETKPKLIICGYSAYPRTINFESFRNIADEVGAFLMADIAHIAGLVASKLHPNPIPYCDVVTTTTHKTLRGPRGGLILCKDAEFGKKFDKSVFPGTQGGPLEHIIAAKAVAFGEALQPDFVNYSQQVIKNAKVLASTLINRGINIVSGGTDNHIVLLDLRSINMTGKIADLLVSEVNITANKNTVPFDPESPFVTSGLRLGTAALTTRGFNEDAFAEVGEIIADRLLNPDDSLIESQCKERVLSLCNRFPLYEGKLEASIK

SEQ ID NO: 107408 - protein, 371 aa, Unknown
  Bacterial polypetide isolated from the Sargasso Sea
MQKDILGKRYYNGCEHVDVAENLANERLKKLFDCNFANSQPHSGAQANGAVFLALLKPGDTFMGMSLNSGGHITHGLKIAMSGKWFNAIGYDVDEKSELIDYDKVEKIALENKPKLIIAGGSAYSRVIDFKRFREIADKVGAYLMVDMAHFSGLVAGKGYPNPVKFAHVVTSTTHKVFRSARGGIILTNDEGLSKKINSAVFPGYQGGPLMHIIAAKAVGFLEALKPEFETYIKNVMSNAKILSKNLINNGFKIYSGGTDTHLMLVDLRPFNVKGNAAAESLSRANITCNKNGIPFDTESPMVTSGIRLGTQAATTRGFGVDEFNKVGDLITKTIKGLSEKPNDNSKIESEVRAEVVELCSKFPIYKNLRK

SEQ ID NO: 107409 - protein, 76 aa, Unknown
  Bacterial polypetide isolated from the Sargasso Sea
MLDQLNNKSGFFTDTLAQSDAELFASISSELGRQRDEIELIASENIVSAAVMEAQGSALTNKYAEGYPGRRYYGGC

SEQ ID NO: 107410 - protein, 429 aa, Unknown
  Bacterial polypetide isolated from the Sargasso Sea
MISDLFTKGIKEADPEVYGTLSRELERQQNQIELIASENIASKSILNAQGSVMTNKYAEGYPGKRYYGGCEFVDQAEEIALERVKKLFNCQYANLQPHSGAQANQAVFLALLQPHDTILGMSLASGGHLTHGAKPNLSGKWFNAVQYGVKKDGNDKDLIDYDEVEALALEHKPKMIIAGASAYPRIIDWKKFRDISDKVGAYFLVDMAHYSGLVAGKQYPNPIEHAHIVTSTTHKTLRGARSAMILTNHEDLYKKINSAVFPGLQGGPLMHVIAARAVCFGEALKPEFENYIKNVIASAKVMSQTLVDRGFRIVTGGTDSHIVWLDLTPKGLTGDKAEQILEEVGLACNKNAIPYDPNPPKVTSGLRFGTAAATTRGFNQEDFRQVGNMIADILDSLLLSENERQEVFNKTRKNVIQLCSRYPIYDEAF

SEQ ID NO: 107411 - protein, 405 aa, Unknown
  Bacterial polypetide isolated from the Sargasso Sea
MKTLDKKIEQILEKESIRQRNSAVFIASENYASERVRNYSNSIFTNKYAEGYPGKRYYAGCENADEVENLAISRGKKLFSSKHINVQPHSGSQANMAAYVSLLKPGDKILSLSLDHGGHLSHGHNVNFSGKIYEIHNYYLNRDSELLDYDQINEIAEKVKPKLIICGYSAYSRIIDFNKFKTISQKVGSLLMADIAHIAGLVVSGKHPSPVGIADIITSTTHKTLRGPRGGLAIIREDLSSKYDRGVFPAIQGGPLMNTILAKAAAFEEALSDNFIEYSQQIIDNAKVLANLFIDRGLRLVSGGTDNHLMLIDTRSIGINGDEAENKLNEVGIVVNKNAIPFDPMPPKITSGIRIGTPAITSRQISNEDLIKIGNVIVDCLSTSSKNTSVFTKEVQKIMNKLPLP

SEQ ID NO: 107412 - protein, 165 aa, Unknown
  Bacterial polypetide isolated from the Sargasso Sea
MSIVKDKDKKIYDIIQSELNRQNGYLELIASENFTSKAVLETAGSVLTNKYAEGYPGKRYYGGCIHVDEAENLAIDRAKRLFKAEYANVQPHSGSSGVMGVYLAFLQPGDCIMGLDLSHGGHLTHGSKVSFSGQIYNSATFKVKKDSGLVDFDDLLKRAREFKPK

SEQ ID NO: 107413 - protein, 143 aa, Unknown
  Bacterial polypetide isolated from the Sargasso Sea
EFKDYIKSVLSNAKILSETLKNNGFKIYSGGTDTHLMLVDLRPFNVKGNVAAESLSKANITCNKNGIPFDSESPMITSGIRLGSQAATTRGFGLKEFEIVGNLITKLIKGLSINTKDNSKIEDEVRKEVVELCSKFPIYKHLR

SEQ ID NO: 107414 - protein, 167 aa, Unknown
  Bacterial polypetide isolated from the Sargasso Sea
MNILQHLKESDPVISNFINSEKNRQETHLELIASENFASMAVMQAQGSVLTNKYAEGLPQKRYYGGCEFVDEIEELAIQRAKKLFNANWANVQPHSGAQANAAIFLSLLKPGDTIMGMDLSHGGHLTHGSPVNMSGKWFNAVHYGVNKETSVLNFDEIREIALKTKP

SEQ ID NO: 107415 - protein, 146 aa, Unknown
  Bacterial polypetide isolated from the Sargasso Sea
KAVCFKEAMTDDFVNYQKQIIKNAKSMCEDFQKLGFETVQPQTDNHLLLLDLRNKNITGKDAEELLGKVNITLNKNSIPNDPESPFVTSGVRIGTAAVTTRGFKEEECSEIVKLIGEAIENKDKPEILQKVKMKASDLCSKFPVYK

SEQ ID NO: 107416 - protein, 336 aa, Unknown
  Bacterial polypetide isolated from the Sargasso Sea
MSSESKYINDQYKSFFEDSLSKTDPELYKAINDELQRQQEHIELIASENIVSQAVLEAQGSVLTNKYAEGYPGKRYYNGCEHVDVAEDLANERLKKLFNCKFANSQPHSGAQANGATFLALLKPGDTFMGMSLNSGGHITHGLKISMSGKWFNPIGYDVDKQSELIDYDHVEKLALEHKPKLIIAGGSAYSRVIDFKRFREIADKVDAYLMVDMAHFSGLVAGKGYPNPCDYAHIVTSTTHKVFRSARGGIILTNHEDIAKKINTAVFPGYQGGPLMHIIAAKAAGFLEALRPDFKDYIKSVLANAKILSETLKNNGFKIYSGGTDTHLMLVDLRP

SEQ ID NO: 107417 - protein, 289 aa, Unknown
  Bacterial polypetide isolated from the Sargasso Sea
MTLSENFFSSNLEHADKDLYQSISQELSRQQNQIELIASENIVSKAVLEAQGSIMTNKYAEGYSAKRYYGGCEFVDIAENLAIDRLKQLYGCSYANVQPHSGAQANQAVFLALIKPGDTILGMSLDAGGHLTHGSRPNQSGKYFNAVQYGINPETSLIDYDEVERLAIEHKPTLIIAGGSAYPRNIDFKKFRDIADKIEAYLLVDMAHYSGLVAAKEYPDPLPHAHVVTSTTHKTIRGPRGGMILSNDLDLGKKFNSSVFPGLQGGPLMHVIAAKAVAFGEALQPEFKT

SEQ ID NO: 107418 - protein, 426 aa, Unknown
  Bacterial polypetide isolated from the Sargasso Sea
MKSSKSDSVFSDKSSIKDFDKDLWLSFENEAQRQEDHIELIASENYASKRVLEAQGSLLTNKYAEGYPSKRYYGGCENVDIAENLAIERAKELFNADYANVQPHSGSSANSAAFLALLEPNDTILGMSLDHGGHLTHGSKVNFSGRNYKSIQYGLHPETDDINYDEVRDLAKKHNPKLIIAGFSAFSGIVDWEKFKDIAEEVGAFLLVDMAHVSGLIAAGLYPSPIPYADVVTSTTHKTLRGPRSGIILAKKNEEIEKKLNSAVFPGSQGGPLMHVIAAKAICFKEALDPEFKIYTKQVMDNAKLMAETLISNNIDIVTNGTKNHIVLVDLRNKNISGKDLESTLGHVNITVNKNSVPNDPASPFVTSGIRIGTPAVTTRGFKEAEIIKISNWISSIINDFDNVELQNKIKKEVHNLTHEFPVYNL

SEQ ID NO: 107419 - protein, 187 aa, Unknown
  Bacterial polypetide isolated from the Sargasso Sea
MTKTPLKTSDPELYNILLKEVVREDTTLELIASENFVSYPVLEMAGGVMTNKYAEGYPGNRYYGGCEFVDQAENIAKDRANKLFGVKYSNVQPHSGSQANMAVLMTYLNPGDTILGLDLAHGGHLTHGSKVNFSGKLYNSIFYQVDKGSGLVNFNEVLKLAREHKPKLIICGGSAYPRFIEFPEFKQ

SEQ ID NO: 107420 - protein, 270 aa, Unknown
  Bacterial polypetide isolated from the Sargasso Sea
MIDYDNVEKLALEHKPKLIIAGGSAYSRVIDFKRFREIADKVGAYLMVDMAHFSGLVAGKGYPNPCDYAHVVTSTTHKVFRSARGGIILSNDEDLGKKFDTAVFPGYQGGPLMHIVAAKAAGFFEALKPEFQTYIKNVLANAKMLAETLKNNGFKIYSGGTDTHLMLVDLRPFNVKGNMASESLCRANITCNKNGIPFDTEKPMITSGIRLGSQAATTRGFGLKEFEKVGNLITKVIKGLSENPEDNSKVEEEVRNEVLIYVLTFQFIKI

SEQ ID NO: 107421 - protein, 314 aa, Unknown
  Bacterial polypetide isolated from the Sargasso Sea
PGDTFMGMSLNSGGHITHGLKISMSGKWFNPIGYDVDKNSELIDYDKVEKLALEHKPKLIIAGGSAYSRVIDFKKFRIIADKVGAYLMVDMAHFSGLVAGKGYPNPCEYAHVVTSTTHKVFRSARGGIILTNHEDIAKKINTAVFPGYQGGPLMHIIAAKAAGFLEALRPEFKDYIKSVLANAKILSETLKNNGFKIYSGGTDTHLMLVDLRPFNVKGNLAAESLSKANITCNKNGIPFDSESPMITSGIRLGSQAATTRGFGLKEFEKVGELITKVIDGLSKNPNDNSKIEDEVRKEVVSLCSSFPIYKNLRK

SEQ ID NO: 107422 - protein, 334 aa, Unknown
  Bacterial polypetide isolated from the Sargasso Sea
NSQPHSGAQANGATFLALLKPGDTFMGMSLNSGGHITHGLKISMSGKWFNPIGYDVDKESELIDYDHVEKLALEHKPKLIIAGGSAYSRVIDFKRFREICDKVGAYLMVDMAHFSGLVAGKGYPNPCEHAHVVTSTTHKVFRSARGGIILTNHEDIAKKINTAVFPGYQGGPLMHIIAAKAAGFLEALRPEFKDYIKSVLANAKILSETLKNNGFKIYSGGTDTHLMLVDLRPFKVKGNLAAESLSRANITCNKNGIPFDSESPMITSGIRLGSQAATTRGFGLKEFEMVGKLITKVIDGLSKNPDDNSKVEDEVRKQVVTLCSSFPIYKNLRK

SEQ ID NO: 107423 - protein, 417 aa, Unknown
  Bacterial polypetide isolated from the Sargasso Sea
MFDNNKTLKDFDPDLWSSIDNEKTRQEDHIELIASENYTSKRVLEAQGSVLTNKYAEGYPGARYYGGCENVDIAESLAIERAKKIYGAAYANVQPHSGASANAAVYLALCEAGDSILGMSLDHGGHLTHGAKVNFSGKTYESFQYGLDPSTGEIDYEEVEKLAKQHNPKMIVAGFSAYSGIVDWEKFREVADAVGAYLLVDMAHVSGLIAADEYPSPIPFADVVTTTTHKTLRGPRGGLILAKENEEIHKKLNSGIFPGTQGGPLMHVIAAKAVCFKEALEPSFKDYQKQVKLNAKKMAATFMERGINIVSNGTENHMFLVDLIEKGLTGKDADAALGQANITVNKNAVPNDPQSPFVTSGLRIGTPASTTRGFKEAEVAEVTSWICDILDDINNEQVINEVKNKVKDICSRFPVYS

SEQ ID NO: 107424 - protein, 310 aa, Unknown
  Bacterial polypetide isolated from the Sargasso Sea
MNSSKSDNIFSNNQSIKDYDSELWLSFQKEAERQEDHIELIASENYASKRILEAQGSLLTNKYAEGYPSKRYYGGCENVDIAENLAIERAKELFKADYANVQPHSGSSANAAAYLALLEPNDTILGMSLDHGGHLTHGSKVNFSGRNYKSIQYGLHPETNDINYEEVRSLAKKHKPRLIIAGFSAFSGIVNWKKFREIADEVDAYFLVDMAHVSGLVAADLYPSPVPYADVVTSTTHKTLRGPRSGIILAKANQEIEKKLNSAVFPGSQGGPLMHVVAAKALCFKEALNPEFKIYIQQVMQNAKIMAETI

SEQ ID NO: 107425 - protein, 435 aa, Unknown
  Bacterial polypetide isolated from the Sargasso Sea
MSSEKNYLNDSYKSFFEDSLSLKDPELYKAIKDELVRQQQHIELIASENIVSQAVLEAQGSVLTNKYAEGYPGKRYYNGCEHVDVAENLAIERLKKLFNCKFANAQPHSGAQANGAVFLALLSPGDTFMGMSLNSGGHITHGLKISMSGKWFNAVGYDVDKESELIDYDNVEKLALEHKPKLIIAGGSAYSRVIDFKRFRDIADKVGAYLMVDMAHFSGLVAGKGYPNPCDYAHVVTSTTHKVFRSARGGIILTNHEDLAKKFNTAVFPGYQGGPLMHIIAAKAAGFLEALQPEFQDYIKSVLANAKILAETLKNNGFKIYSDGTDTHLMLVDLRPYNVNGNLAAESLSRANITCNKNGIPFDKEKPMITSGIRLGTQAATTRGFGLSEFKTVGELITKTLKGLSENPTDNSKIENEVKNEVISLTSSFPIYKNL

SEQ ID NO: 107426 - protein, 151 aa, Unknown
  Bacterial polypetide isolated from the Sargasso Sea
QEALKPEFKEYIKSVLANAKILSETLKNNGFKIFSGGTDTHLMLVDLRPFKVTGKAAEVSLCNSNITCNKNGIPFDTEKMTITSGIRLGSQAATTRGFGLNEFKKVGELITKVVKGLSKNPDDNSKIESEVRKEVIDLCSNFPIYNHLFKN

SEQ ID NO: 107427 - protein, 304 aa, Unknown
  Bacterial polypetide isolated from the Sargasso Sea
MSSEKNYLNDSYKSFFEDSLSVKDPELYKAIKDELIRQQQHIELIASENIVSQAVLEAQGSVLTNKYAEGYPGKRYYNGCEHVDVAENLAIERLKKLFNCKFANAQPHSGAQANGAVFLALLSPGDTFMGMSLNSGGHITHGLKISMSGKWFNAIGYDVDKESELIDYDNVEKLALEHKPKLIIAGGSAYSRVIDFKRFREIADKVGAYLMVDMAHFSGLVAGKGYPNPCDYAHVVTSTTHKVFRSARGGIILTNHEDLAKKFNTAVFPGYQGGPLMHIIAAKAAGFLEALQPEFQNYIKSVLA

SEQ ID NO: 107428 - protein, 424 aa, Unknown
  Bacterial polypetide isolated from the Sargasso Sea
MSNTQPFFSQPLAERDAPVRSAILKELERQQSQVELIASENIVSRAVLEAQGSVLTNKYAEGYPGKRYYGGCEFADEVEALAIERVKQIFNAGYANVQPHSGAQANGSVMLALAKPGDTVLGMSLDAGGHLTHGAKPALSGKWFNAVQYGVNRDTMLIDYDQVEELAQQHKPNLIIAGFSAYPRALDFARFRAIADGVGAKLMVDMAHIAGVIAAGRHANPVEHAHVVTSTTHKTLRGPRGGFVLTNDEEIAKKINSAVFPGLQGGPLMHVIAGKAVAFGEVLHADFKTYIDNVLANAQALGEVLKAGGVDLVTGGTDNHLLLVDLRPKGLKGAPVEQALERAGITCNKNGIPFDTEKPTVTSGIRLGTPAGTTRGFGVAEFREVGRLILEVFDALRANPEGDHATEQRVRREIFALCERFPIY

SEQ ID NO: 107429 - protein, 418 aa, Unknown
  Bacterial polypetide isolated from the Sargasso Sea
MFITQKNLKEFDPELWSSINNETSRQEEHIELIASENYTSKSILEVQGSVLTNKYAEGYPGKRYYGGCEHVDVAESLAIDRAKELYGAAYANVQPHSGASANSAVYLALCEAGDSILGMSLDHGGHLTHGAKVNFSGKTYESFQYGLDPSTGELNYQEVEDLAKKHNPKMIVAGFSAYSGIVDWERFRKIADSVDAYLLVDMAHVSGLVAAGEYPSPIPYADVVTTTTHKTLRGPRGGLILAKENEEIHKKLNSAIFPGTQGGPLMHVIAAKAVCFKEALDPAFKNYQKQVKANAKQMAATFMERGIKIVSNGTENHMFLVDLVEKGLTGKDADAALGQANITVNKNAVPNDPQSPFVTSGLRIGTPAATTRGFKEEEITLVATWICDVLEDINNEQVIEEVKTKVIELCSRFPVYSN

SEQ ID NO: 107430 - protein, 317 aa, Unknown
  Bacterial polypetide isolated from the Sargasso Sea
NAAAYLALLDPNDTILGMSLDHGGHLTHGSKVNFSGRNYKSYQYGLHPGTNDINYDEVRSLAKEHNPKLIIAGFSAFTGIIDWQEFRKIADEVGAYFLVDMAHVSGLVAADLYPSPIPYADVVTSTTHKTLRGPRSGIILAKENKEIEKKLNSAVFPGSQGGPLMHVVAAKALCFKEALEPDFKIYIQQVMDNAKIMAKTIMSNGIDIVCNGTENHIVLVDLRSKNITGKDLERVLGDVNITVNKNSVPNDPASPFITSGIRIGTPAVTTRGFKEKEIIQISNWISDIIDDFENTELQKSIKEKVLNLTSNFPVYSV

SEQ ID NO: 107431 - protein, 123 aa, Unknown
  Bacterial polypetide isolated from the Sargasso Sea
LKNNGFKIYSDGTDTHLMLVDLRPYNVKGNLAAESLSRANITCNKNGIPFDTEKPMITSGIRLGTQAATTRGFGLNEFKTVGELITKTLKGLSENPTDNSKIEDEVKNEVISLTSSFPIYKNL

SEQ ID NO: 107432 - protein, 417 aa, Unknown
  Bacterial polypetide isolated from the Sargasso Sea
MTFSETLSKLDPDLATAIESEQKRQEEHIELIASENYTSSEVMEIQGSVLTNKYAEGYPGRRYYGGCEHVDEAEVLAIERVKELFNADYANVQPHSGSQANMAVYMSLLDQGDKILGMSLSDGGHLTHGAKVNFSGQLYEFFSYGINPDTGRIDYDQVSALAEKHRPKMIVAGFSAYSRLVDWTKFREIADSIDAYFMVDMAHISGLIAGDCYPNPVPIADVTTSTTHKTLRGPRGGIILARENEEIQKAINKQVFPGTQGGPLMHVIAAKAHAFKEALRPEFKTYQQAVVKNAQAMASRFQELGYKIVSDGTDCHLFLVDLSDTDITGADGEKVLGKANITLNKNSVPNEQRSPMVTSGLRIGSPAITTRGFDVNESVYVVDLIHSVLGDIDNESNISSVKNKVTDLCKGFPVYLK

SEQ ID NO: 107433 - protein, 219 aa, Unknown
  Bacterial polypetide isolated from the Sargasso Sea
MKQSSNYNIFTTKIEKSSKSDNIFANKESIKDYDSELWTSFEYEAHRQEDHIELIASENYASKRILEAQGSLLTNKYAEGYPSKRYYGGCENVDIAENLAIKRAKQLYKADYANVQPHSGSSANAAAYLALLEPNDTILGMSLDHGGHLTHGSKVNFSGKNYKSVQYGLHPETHDINYDQVRALAKEHKPKLIIAGFSAFTGIIDWKKFREISDEVGAY

SEQ ID NO: 107434 - protein, 436 aa, Unknown
  Bacterial polypetide isolated from the Sargasso Sea
MSSETKYLNSEYKDFFEKSLLDSDPEIHKAINDELVRQQNHIELIASENIVSQAVLEAQGSVLTNKYAEGYPGKRYYNGCEHVDVAEQLAIERLKKLFNCKFANAQPHSGAQANGAVFLALLKPGDTFMGMSLNSGGHITHGLKISMSGKWFNAIGYEVDKESELIDYDNVEKLALEHKPKLIIAGGSAYSRVIDFKRFREIADKVGAYLMVDMAHFSGLVAGKGYPNPCDYAHVVTSTTHKVFRSARGGIILTNHEDLSKKFNTAVFPGYQGGPLMHIIAAKAVGFKEALKPEFKDYIKTVLANAKILAETLKNNGFKIYSGGTDTHLMLVDLRPFNVKGNVAAESLSRANITCNKNGIPFDSESPMITSGIRLGSQAATTRGFGLKEFQIVGDLITKTIKGLAENPEDNSKIEDEVRKEVVSLCSNFPIYKHLG

SEQ ID NO: 107435 - protein, 386 aa, Unknown
  Bacterial polypetide isolated from the Sargasso Sea
KAVLDAQGSILTNKYAEGYPGKRYYGGCEFVDKAEELALDRVKKLFNCKFANVQPHSGAQANGAVYLALLNPGDPILAMSLNSGGHLTHGAKVAQSGKWFKAFHYEVNKETGLIDYDQIQKLATEHKPKILIAGGSAYSRIIDFKKFRKIADSVNAYLMVDMAHFSGLVAGKGYPNPVEYADVVTSTTHKVLRGGRGGIILTNREDLHKKFNSAVFPGYQGGPLMHVVAAKAVAFHEALQPNFREYIKSVLENAKILSETLKNNGFKIFSGGTDTHLMLVDLRPFKVTGKAAEVSLCNSNITCNKNGIPFDTEKMTITSGIRLGSQAATTRGFGLNEFKKVGELITKVIKGLSANPDDNSKTESEVRKEVIELCSKFPIYNHLFKN

SEQ ID NO: 107436 - protein, 426 aa, Unknown
  Bacterial polypetide isolated from the Sargasso Sea
MNSSKSDNIFSNNQSIKDYDSELWLSFEKEAERQEDHIELIASENYASKRILEAQGSLLTNKYAEGYPSKRYYGGCENVDIAENLAIERAKELFKADYANVQPHSGSSANAAAYLALLEPNDTILGMSLDHGGHLTHGSKVNFSGRNYKSVQYGLHPETNDINYEEVRSLAKEHKPKLIIAGFSAFSGIVNWKKFREIADEVDAYFLVDMAHVSGLVAADLYPSPVPYADVVTSTTHKTLRGPRSGIILAKANQEIEKKLNSAVFPGSQGGPLMHVVAAKALCFKEALNPEFKIYIQQVMQNAKIMAETIMSNDVDVVSNGTENHIVLVDLRNKDMTGKDLEKVLGSVNITVNKNSVPNDPASPFVTSGIRIGTPAVTTRGFKEKEIIQVSEWICEIINNFDDEKLQNNIKKEVSNLTDNFPVYNS

SEQ ID NO: 107437 - protein, 68 aa, Unknown
  Bacterial polypetide isolated from the Sargasso Sea
MSDSTASSINTGLAAADPAIAALIEKEQQRQETHLELIASENFASRAVMDAQGSVLTNKYAEGLPSKR

SEQ ID NO: 107438 - protein, 145 aa, Unknown
  Bacterial polypetide isolated from the Sargasso Sea
VALKEAMTAEFRAYQKQVVINAQAMADVFMKRGFDVVSNGTDNHMFLLSLVSKGMTGKEADAILNSVNITVNKNTVPNDPQSPFVTSGIRIGTPAVTSRNFSEEDCAQLAHWICDVLTAPEDNAVVQQVIDKVATLTAARPVYTK

SEQ ID NO: 107439 - protein, 326 aa, Unknown
  Bacterial polypetide isolated from the Sargasso Sea
TSSGAQANQTVFLSLLEPGDTILGMSLAAGGHLTHGAKPNQSGKWFNAVQYGVKKETSLIDFDEVATLAKAHRPKLIIAGGSAYARIIDFKRFREIADAIGAYLLVDMAHFSGLVAGGVYPNPLRYAHVVTSTTHKTLRGPRGGIILTNDENLAKKINSGLFPGLQGGPLMHVIAAKAVAFGEAQHETFKNYVSQVISNANELSNQLKSRGIDIVSGGTDTHLVLVDLRSLKITGLLAETSLESVGITCNKNGVPFDPEKPTVTSGIRLGTPAATTRGFREMDFKKIADLIANVLKNLSEQKSLDVEVSQQTCMEVRSLCERFPIY

SEQ ID NO: 107440 - protein, 429 aa, Unknown
  Bacterial polypetide isolated from the Sargasso Sea
MLENKSNLKTDAIFSNKKDIELYDAELWESFEKEMVRQEEHIELIASENYASQRVLQAQGSVLTNKYAEGYPDKRYYGGCEFVDIAERLAIDRAKELFNADYANVQPHSGSSANAAAYLALLEPNDAILGMSLDHGGHLTHGSKVNFSGRNYKSFQYGLNPETHDIDYDQVRDLAKKHNPKLIIAGFSAFSGLVDWSIFREIADEINAYFLVDMAHISGLVAAGMYPSPVPYADVVTSTTHKTLRGPRSGIILARKNEKIQKKLNSAVFPGSQGGPLMHVVAAKAVCFKEALEPEFKTYMSQVISNAKTMAKTIIGRGVDIVKGGTENHMILVDLRNKGITGKDSEYKLGLANITVNKNAVPNDPQSPFITSGIRLGTPAVTTRGFKEDQIIQISNWICDIVLDLDNEKKIEGIKDKALSLCKEFPVYK

SEQ ID NO: 107441 - protein, 100 aa, Unknown
  Bacterial polypetide isolated from the Sargasso Sea
MKSSRSDSIFSNNNTIKDYDNELWASFQHEAERQEDHIELIASENYASKRILEAQGSLLTNKYAEGYPSKRYYGGCENVDIAENLAIDRAKELFKADYAN

SEQ ID NO: 107442 - protein, 100 aa, Unknown
  Bacterial polypetide isolated from the Sargasso Sea
MSSEKNYLNDSYKSFFEDSLSVKDPELYKAIKDELIRQQQHIELIASENIVSQAVLEAQGSVLTNKYAEGYPGKRYYNGCEHVDVAENLAIERLKKLFNC

SEQ ID NO: 107443 - protein, 105 aa, Unknown
  Bacterial polypetide isolated from the Sargasso Sea
MSNSKKIFDLIKKEEQRQLSGIELIASENFTSPDVMLACGSVLTNKYAEGYPGKRYYGGCEVVDEIETLAIERAKSLFGAEYANVQPHSGSQANAAVFHAFLKPR

SEQ ID NO: 107444 - protein, 190 aa, Unknown
  Bacterial polypetide isolated from the Sargasso Sea
MNPWNIVAPKSGRVKNISEVLDNSVMPGIQGGPLMHIIAAKAVAFGEALKPEFKLYAQQIIDNAKIMADEFISKEYQLISGGTDTHVILIDLTNKKITGKAAEKTLEVAGITINKNMVPYDEKSPFVTSGIRIGTPAVTTRGMQGEEMKKIVSLIDSAISNHDNQQKLLSIKDEVNDLCKSFPLYSELQN

SEQ ID NO: 107445 - protein, 200 aa, Unknown
  Bacterial polypetide isolated from the Sargasso Sea
PHAHVVTSTTHKTLAGPRGGLILSAADDEELYKKLNSAVFPGGQGGPLMHVIAGKAVAFKEALEPEFKTYQAQVVKNAKAMAATFIERGYKIVSGGTDNHLMLVDLIGRELTGKDADAALGKANITVNKNSVPNDPRSPFVTSGVRIGTPAITRRGFKEAESIQLTNWICDVLDNHDNDAVLATVREQVLDICRRFPVYA

SEQ ID NO: 107446 - protein, 365 aa, Unknown
  Bacterial polypetide isolated from the Sargasso Sea
MSSEGKYLNVDYKNFFEKKLSETDPEVYKAVTDELIRQQNHIELIASENIVSQAVLEAQGSVLTNKYAEGYPGKRYYNGCEHVDVAESLANERLKKLFNCKFANSQPHSGAQANGAVFLALLKPGDTFMGMSLDSGGHITHGLKISMSGKWFNAISYDVDKKTELLDYDVIEKMALEHKPKLIIAGASAYSRVIDFKKFREICDKIGAYLMVDMAHFSGLVAGKGYPNPVDHAHVVTSTTHKVFRSARGGIILTNHEDLAKKFNTAVFPGYQGGPLMHIIAAKAVGFLEALKPEFREYISSVLANAKMLAETLKNNGFKIYSGGTDTHLMLVDLRPFNVKGNIAADSLSKANITCNKNGIPFRYR

SEQ ID NO: 107447 - protein, 98 aa, Unknown
  Bacterial polypetide isolated from the Sargasso Sea
MSSESDYINAQHQSFFEDSLSKTDPELFKAINEELNRQQEHIELIASENIVSQAVLEAQGSVLTNKYAEGYPGKRYYNGCEHVDVAEQLALERIKKLF

SEQ ID NO: 107448 - protein, 339 aa, Unknown
  Bacterial polypetide isolated from the Sargasso Sea
MYTENLSIQSFDEELWSSLENEKKRQEEHIELIASENYTSPRVLEAQGSVLTNKYAEGYPGKRYYGGCEFVDVAEQLAIDRAKELFGADYANVQPHSGASANAAVFLALCDAGDKVLGMSLDQGGHLTHGAKVNFSGKIYESFSYGLDKSGDINYDEVQALAEEHKPKVIISGFSAFSGIIKWDRFREIADSVGAYLLADMSHVSGLVAAGIYPSPVPYADVVTTTTHKTLVGPRGGLILAKENEDIHKKLNSALFPGSQGGPLMHVIAAKAVCFKEAMEPEFKEYQNQVLKNAQHLSKKIMDKGIDIVSNGTNNHMFLVNLVSKDLTGKEVDNALGRA

SEQ ID NO: 107449 - protein, 287 aa, Unknown
  Bacterial polypetide isolated from the Sargasso Sea
MFTMDMKIAGFDDELNDAMRKEIKRQEEHVELIASENYASPRVLEAQGSLMTNKYAEGYPGKRYYGGCENVDVAEQLAIDRLKELYGADYANVQPHSGSQANAAVYLALLKPGDTILGMSLDAGGHLTHGAKVNFSGKIFNAVQYGINEDGLIDYDEVERLAKEHKPKMLIGGFSAYSQIIDWKRMSEIAKSVGAYFHVDMAHVSGLVAAGVYPNPVPYADVVTSTTHKTLRGPRGGIIVCKANEELEKKFNSLVFPGTQGGPLMHVIAAKAVAFKEALEPEFKEYM

SEQ ID NO: 107450 - protein, 403 aa, Unknown
  Bacterial polypetide isolated from the Sargasso Sea
MNSQEKIFSLIEKEKIRQLGGLELIASENFTSEDVMKATGSILTNKYAEGYPGKRYYGGCEVVDQIELTAIDRLKELFKVEYANVQPHSGSQANTAVFDAFLKPGDKILGLDLSHGGHLTHGSNVNFSGKIYSSSFYGVTKEGIFDYSEILTKAKEVMPNLIIVGASAYSRDIDFSKFREIADEVGAFLHADIAHPSGLIAKGFLSDPVPYCHVITSTTHKTLRGPRGGIIMMGKDFDNPFGLKLKNGNLKKMSSILDSAIFPGNQGGPLEHVIAAKGIAFGEALESNFEKYIGQVIINAKRLSENLINMGYNIVSGGTDNHLILIDLRNKNITGKEAERVLGISNITVNKNMVPFDDQSPFVTSGIRIGTPAITTRGLNEQDMDFVAETINSSIENSEKENL

SEQ ID NO: 107451 - protein, 402 aa, Unknown
  Bacterial polypetide isolated from the Sargasso Sea
MNEFKLTQNQNIEEYDPDLANFMGLELSRQEEHIELIASENYASKRVLEAQGSVLTNKYAEGYPNKRYYGGCEHVDGVESIAIERAKKLFGAKFANVQPHSGASANAAVFLALLEPGDTILGMALDQGGHLTHGAKVNFSGRNFNAIQYGLKKDTGTIDYEEVEKLADKHKPKLIIAGFSAYMGIVDWKRFREIADRNKSFLLVDMAHVSGLVAGGVYPNPVEYAHVVTSTTHKSLRGPRSGIILSNENEEFQKKLNFGVFPGSQGGPLMHVIAAKAVCFKEAMTDDFVNYQKQIIKNAKSMCEDFQKLGFETVQPQTDNHLLLLDLRNKNISGKDAEELLGKVNITLNKNSIPNDPESPFVTSGVRIGTAAITTRGFKEEECSEIVKLISEAIENENKPEI

SEQ ID NO: 107452 - protein, 436 aa, Unknown
  Bacterial polypetide isolated from the Sargasso Sea
MSSEGKYTNIEYQNFFEKNLSDTDPEIYKAINDELARQQQHIELIASENIVSNALLEAQGSVLTNKYAEGYPGKRYYNGCDHVDVAENLANERLKKLFNCKFANSQPHSGAQANGAVFLALLKPGDTIMGMSLNSGGHLTHGSKASVSGKWFNAIAYDVDKKTELLDYESIEKLAVENKPKLIIAGGSAYSRQIDFKKFREIADKVGAYFMVDMAHFSGLVAGKGYPNPVEYADVVTSTTHKVFRSARGGIILTNNEALSKKFNSAVFPGYQGGPLMHIIAAKAVGFLEALKPEFRNYISNVMANAKILAETLKNNGFKIYSGGTDTHLMLVDLRPFNVKGNIAADSLCRANITCNKNGIPYDTESPMITSGIRLGTQAATTRGFGLDEFKKVGELITKTIKGLSANPDDNAKVEAEVREEVISLCSKFPIYKNLK

SEQ ID NO: 107453 - protein, 122 aa, Unknown
  Bacterial polypetide isolated from the Sargasso Sea
MNSSKSDNIFSNNQSIKDYDSELWLSFQKEAERQEDHIELIASENYASKRILEAQGSLLTNKYAEGYPSKRYYGGCENVDIAENLAIERAKKLFKADYANVQPHSGSSANAAAYLALLEPND

SEQ ID NO: 107454 - protein, 230 aa, Unknown
  Bacterial polypetide isolated from the Sargasso Sea
FSPSGLIAKGILNDPLPYCHVVTTTTHKTLRGPRGGLILMGKDFENPFGKKFKNGNLKPMSNLLDLAVFPGNQGGPLEHIIGAKAIAFGEAIEDSFMDYIVRVRNNAKTMANELISRNYNIISRGTDNHMMLIDLRNKNINGKDAEKALVNADITANKNMVPFDDKSPFITSGIRFGTAAVTTRGLKENDMKIIVDFIDQTITNHENENLITKIKSEVNEFMSDLPLFRP

SEQ ID NO: 107455 - protein, 436 aa, Unknown
  Bacterial polypetide isolated from the Sargasso Sea
MSSEKDYKNSEFKNFFEKSLLDTDPDIYNAINDELIRQQNHIELIASENIVSQAVLEAQGSVLTNKYAEGYPGKRYYNGCEHVDVAESLAIERLKKLFDCKFANAQPHSGAQANGAVFLALLKPGDTFMGMSLNSGGHITHGLKISMSGKWFNAIGYDVDKESELIDYDNVEKLALEHKPKLIIAGGSAYSRVIDFKRFREIADKVGAYLMVDMAHFSGLVAGKGYPNPCDYAHVVTSTTHKVFRSARGGIILTNHEDLSKKINTAVFPGYQGGPLMHIIAAKAVGFHEALKPDFKEYIKSVLANAKILSETLKNNGFKIYSGGTDTHLMLVDLRPFNVKGNLAAESLSKANITCNKNGIPFDSESPMITSGIRLGSQAATTRGFGLNEFKIVGELITKTIKGLSENPDDNSKVENEVKKEVVDLCSNFPIYKHLR

SEQ ID NO: 107456 - protein, 158 aa, Unknown
  Bacterial polypetide isolated from the Sargasso Sea
IAAKAAGFLEALKPEFKDYIKAVLANAKILSETLKNNGFKIYSGGTDSHLMLVDLRPFNVKGNLAAESLCRANITCNKNGIPFDNESPMVTSGIRLGTQAATTRGFGLKEFEKVGELITKVIDGLSKNPSDNSKVEEEVRKEVVSLCSSFPIYKNLRK

SEQ ID NO: 107457 - protein, 420 aa, Unknown
  Bacterial polypetide isolated from the Sargasso Sea
MDFFSKPLNEIDQEISFAIDQELSRQQNQIELIASENIVSKAVLEAQGSVLTNKYAEGYVSARYYGGCEFVDIAEDLAIKRLKELYKCEYANVQPHSGAQANGAVFLALIKPGDTILGMSLDAGGHLTHGSAPSLSGKWFNAVQYGLDDKGLINYDEVEFLAIEHKPKIIIAGGSAYSRIIDFKRFREIADKVGAYLHIDMAHFSGLVAAGEYPNPLEYADVVTSTTHKTIRGARGGMILSNDKELGKKFNSAVFPGYQGGPLMHVIAAKAVAFGEALKPEFKEYIKQVVLNAKKLSEVLVHGGLKIVSGGTDTHLLLVDLTPKSLTGAAASTSLENANITCNKNGIPKDPNPPKVTSGIRLGTPAGTTRGFKEEEFEKVGELILETLNGLQENPNDNSLVESKVRQKVKELCDKFPIYR

SEQ ID NO: 107458 - protein, 390 aa, Unknown
  Bacterial polypetide isolated from the Sargasso Sea
IASKAVLNAQGSVMTNKYAEGYPGNRYYGGCEFVDQAENIALERVKKLYNCKYANLQPHSGAQANQAVFLALLQPHDTILGMSLASGGHLTHGAKPNLSGKWFNPVQYGVKKDGNDKDLIDYDEVEALAIQHKPKLIIAGASAYPRVIDWKKFRDIADKVGAYFLVDMAHYSGLIAGKQYPNPIEYAHVVTSTTHKTLRGARSAMILTNDETLIKKINSAVFPGLQGGPLMHVMAGKAVAFGEALKPEFEDYIKKVIENAKVLASSLVNNGFKIVTGGTDSHIVWLDLTPKNVTGDKAEKILEEVGIACNKNAIPYDPNPPKITSGLRFGTAAATSRGFNENDFSEIGNMISEVLENINQNEDNQKEFISSMKSKVINMCKKYPIYDEAF

SEQ ID NO: 107459 - protein, 423 aa, Unknown
  Bacterial polypetide isolated from the Sargasso Sea
MFSVDTKIAGFDDELNEAIKREIKRQEEHVELIASENYTSPRVLEAQGSVLTNKYAEGYPSKRYYGGCENVDVAEQLAIERLKELYSCDYANVQPHSGSQANAAVYLALLNAGDTILGMSLDAGGHLTHGSKVNFSGKLFNAIQYGIDDNGLLDYEQIEKLATEHKPKLLIGGFSAYSQIIDWERMSEIAKKVGAYFLVDMAHVSGLVAGGVYPSPVPYADVVTSTTHKTLRGPRGGIIISKSNPELEKKFNSLVFPGTQGGPLMHVIAAKAVAFKEALEPEFKIYMKNVVNNADILAKTIIDRGYDIVSGGTKNHLMLVSLVKQGLTGKAADAALHKANITVNKNSVPNDPQSPFVTSGIRLGTAAITTRGFMESETKILGNLICDVLDDIENEKNISSVKEKVLNLTSQFPVYSSDKKAVA

SEQ ID NO: 107460 - protein, 152 aa, Unknown
  Bacterial polypetide isolated from the Sargasso Sea
MSDLFKKGIKEADPEVYGTLSRELERQQNQIELIASENIASRSILNAQGSVMTNKYAEGYPGKRYYGGCEFVDQAEEIALERVKKLFNCKYANLQPHSGAQANQAVFLALLQPHDTILGMSLASGGHLTHGAKPNLSGKWFNAVQYGVKKRW

SEQ ID NO: 107461 - protein, 161 aa, Unknown
  Bacterial polypetide isolated from the Sargasso Sea
FMHIIAAKAVGFKEALKPEFIEYIKTVLANAKILAETLKNNGFKIYSGGTDTHLMLVDLRPFNVKGNVAAESLSRANITCNKNGIPFDSESPMVTSGIRLGSQAATTRGFGLKEFQKVGDLITKTIQGLSENPDDNSKIENEVRKEVVSLCSNFPIYKHLG

SEQ ID NO: 107462 - protein, 95 aa, Unknown
  Bacterial polypetide isolated from the Sargasso Sea
MSSVKKFSKLSNKFFDENLKSADKDIFNSIKNELNRQQNHIELIASENIVSKAMLEAQGSIMTNKYAEGYSGKRYYGGCEHVDVAENLAIERAKK

SEQ ID NO: 107463 - protein, 218 aa, Unknown
  Bacterial polypetide isolated from the Sargasso Sea
PYCDVITSTTHKTLRGPRGGIIMMGRDKENIWGKIAPKSGRVKMISELLDSSVMPGMQGGPLMHIISAKAIAFGEAMKDEFKVYANKIVQNAKLMAQEFMNMDYDIISGGTDTHVILADLTNKNISGKVAEKALEKAGITVNKNMVPFDQRSPFITSGIRIGTPAITTRNMGAQEMKEIAKLVDSVIMDPENDKNIKKVKSEVEELCESYPIYKEFSN

SEQ ID NO: 107464 - protein, 162 aa, Unknown
  Bacterial polypetide isolated from the Sargasso Sea
PLEHIIAAKAVAFGEALQPGFVNYSQQVIKNAKVLASTLINRGINIVSGGTDNHIVLLDLRSINMTGKIADLLVSEVNITANKNTVPFDPESPFVTSGLRLGTAALTTRGFNEDAFAEVGEIIADRLLNPDDSLIESQCKERVLTLCNRFPLYEGKLEASIK

SEQ ID NO: 107465 - protein, 262 aa, Unknown
  Bacterial polypetide isolated from the Sargasso Sea
RLALEHKPKMIIAGGSAYSRIIDFKRFRDICDKIDAYLHVDMAHYSGLIAAEEYPNPIEHAHVVTSTTHKTIRGPRGGMILSNDLDLGKKFNSSVFPGLQGGPLMHVIAAKAVAFGEALDPSFKEYIKQVLKNAHVLSETLVEGGLKIISGGTDTHLMLVDLTAKNVTGSEAELNLEEAGITCNKNGIPNDPHPPKITSGIRLGTPAGTTRGFKENEFKLVGELILDVLNGMQGSPEERKSINENVKSKVGALCAEFPIYSN

SEQ ID NO: 107466 - protein, 215 aa, Unknown
  Bacterial polypetide isolated from the Sargasso Sea
MPVDVNTRVYLRFFSSPINLWPLWYHITHGLKISMSGKWFNAIGYEVDKESELIDYDNVEKLALEHKPKLIIAGGSAYSRVIDFKRFREIADKVGAYLMVDMAHFSGLVAGKGYPNPCDYAHVVTSTTHKVFRSARGGIILTNHEDLSKKFNTAVFPGYQGGPLMHIIAAKAVGFKEALKPEFKDYIKTVLANAKILAETLKNNGFKIYSGGTDT

SEQ ID NO: 107467 - protein, 114 aa, Unknown
  Bacterial polypetide isolated from the Sargasso Sea
ARGYDLVHPMTENHLLLLDLQKKEVNGKEAEELLGTVNITVNKNSIPNDPESPFITSGIRIGTPAITTRGFKEEEAEQVVDLMCDAIENRNDQASLDRIKDEVKDLCNNFPVYK

SEQ ID NO: 107468 - protein, 421 aa, Unknown
  Bacterial polypetide isolated from the Sargasso Sea
MNEFKKTQNQNISEYDADLATFLDKELLRQEEHIELIASENYASKRVLEAQGSVLTNKYAEGYPNKRYYGGCEHVDGAETLAIERAKELFKAKFANVQPHSGASANAAVFLALLEPGDTFLGMALDQGGHLTHGAKVNFSGRNFNAIQYGLHPETGEIDYEAVNELALKHKPKLILAGFSAYMGIVDWKKFREIADSVGAYLMVDMAHVSGLVAAEVYPNPIEYAHVVTSTTHKSLRGPRSGIILSNEDEDFQKKLNFAVFPGSQGGPLMHVIAAKAVCFKEAMTDDFKDYSKQIIKNAQAMCKKFIARGYDLVHPMTENHLLLLDLQKKEVNGKEAEELLGTVNITVNKNSIPNDPESPFITSGIRIGTPAITTRGFKEEEAEQVVDLMCDAIENRNDQASLDRIKDEVKDLCNNFPVYK

SEQ ID NO: 107469 - protein, 69 aa, Unknown
  Bacterial polypetide isolated from the Sargasso Sea
MSSETKYINPSYQDFFEKSLSKADPDLFKAINDELIRQQNHIELIASENIVSQAVLEAQGSVLTNKYAE

SEQ ID NO: 107470 - protein, 156 aa, Unknown
  Bacterial polypetide isolated from the Sargasso Sea
AKAAGFLKALRPEFKDYIKSVLANAKILSETLKNNGFKIYSGGTDTHLMLVDLRPFKVKGNLAAESLSRANITCNKNGIPFDSESPMITSGIRLGSQAATTRGFGLKEFEKVGELITKVIDGLSKNPDDNSKVEDEVRKQVVSLCSSFPIYKNLRK

SEQ ID NO: 107471 - protein, 275 aa, Unknown
  Bacterial polypetide isolated from the Sargasso Sea
MNEFKKTQNQNISEYDADLATFLDRELIRQEEHIELIASENYASKRVLEAQGSVLTNKYAEGYPKKRYYGGCEHVDGAETLAIDRAKELFKAKFANVQPHSGASANAAVFLALLEPGDTFLGMALDQGGHLTHGAKVNFSGRNFNAIQYGLHPETGEIDYEAVNKLALEHKPKLILAGFSAYMGIIDWQKFREIADSVGAYLMVDMAHVSGLIAAGVYPSPIEHAHVVTSTTHKSLRGPRSGIILSNEDEDFQKKLNFAVFPGSQGGPFMHVIAA

SEQ ID NO: 107472 - protein, 432 aa, Unknown
  Bacterial polypetide isolated from the Sargasso Sea
MFITDKGLEEFDPELWQSISKESVRQEEHIELIASENYTSKGILEIQGSVLTNKYAEGYPGKRYYGGCENVDVAESLAIERAKELYGAAYANVQPHSGASANSAVFLALCDAGDTILGMSLDHGGHLTHGAKVNFSGKTYNSFQYGLDPKTGELNYQEVEDLAREHNPKLIIAGFSAYSGIVDWAKFREIADSVNAYLLVDMAHVSGLVAAKEYPSPIPHADVVTTTTHKTLRGPRGGLILAKDNEEIHKKLNSAIFPGTQGGPLMHVIAAKALCFKEALDPAFKDYQKQVKANAKQMAATFMERGINIVSNGTENHMFLVDLVEKGLTGKDADAALGKANITVNKNAVPNDPQSPFVTSGLRIGTPAATTRGFKEPEVTLVANWICDILEDINNQILINDVKGKVIELCSSYPVYSDELCTAPTVASLIQK

SEQ ID NO: 107473 - protein, 429 aa, Unknown
  Bacterial polypetide isolated from the Sargasso Sea
MLDKKSNLKTDAIFSNKKDIELYDAELWESFEKEMVRQEEHIELIASENYASQRVLQAQGSVLTNKYAEGYPDKRYYGGCEFVDIAEKLAIDRAKELFNADYANVQPHSGSSANAAAYLALLEPNDVMLGMSLDHGGHLTHGSKVNFSGRNYKSFQYGLNPETHDIDYDQVRDLAKKHNPKLIIAGFSAFSGLVDWSIFREIADEVNAYFLVDMAHISGLVAAGMYPSPVPYADVVTSTTHKTLRGPRSGIILARENEDIQKKLNSAVFPGSQGGPLMHVVAAKAVCFKEALEPEFKTYMSQVISNAKTMAKTIIGRGVDIVKGGTENHMILVDLRNKGITGKDSEYKLGLANITVNKNAVPNDPQSPFVTSGIRLGTPAVTTRGFKEDEIIQISNWICDIVLDLDNEKKIEGIKNKALSLCKEFPVYK

SEQ ID NO: 107474 - protein, 174 aa, Unknown
  Bacterial polypetide isolated from the Sargasso Sea
MNSEYKDFFEKSLLESDPEIYKAINNELVRQQNHIELIASENIVSQAVLEAQGSVLTNKYAEGYPGKRYYNGCEHVDVAEQLAIDRLKELFNCKFANAQPHSGAQANGAVFLALLKPGDTFMGMSLNSGGHITHGLKISMSGKWFNAIGYEVDKDSELIDYDNVEKLALEHKPK

SEQ ID NO: 107475 - protein, 317 aa, Unknown
  Bacterial polypetide isolated from the Sargasso Sea
MSTIEKINNFLNNFFDDSLEKADMELYKSIKAESDRQQNHIELIASENIVSKAVLEAQGSLLTNKYAEGYPNKRYYGGCEYVDISENLAIERAKKLFDSSFANVQPHSGAQANGAVYLALVKPGDTILSMSLNSGGHLTHGAKPAQSGKWFKAIHYEVDKDTGLIDYESVEKLALENNPKIIIAGGSAYSRIIDFKKFRDIADKVKAYLMVDMAHFSGLVAGGAYPNPIKYADVVTSTTHKVLRGPRGGIILTNKEELAKKFNSAVFPGLQGGPLMHVIAAKAVCFHEALSPNFKKYTQDVIKNANALAESLIKNNL

SEQ ID NO: 107476 - protein, 341 aa, Unknown
  Bacterial polypetide isolated from the Sargasso Sea
MVVHNSSNIFQSDPEVYKILQSEETREERTIELIASENFTSVPILEMAGSVMTNKYAEGYPGKRYYGGCEFVDQIEDIANSRLAKLFNAGYTNVQPHSGSQANMAVFMSFLKEDDLVIGLDLAHGGHLTHGSRVNFSGKLYNFLSYGVSKDTERVDFDLVNKICKENKPKLIICGGSAYPRFIEFALFREIADSIGATLMADIAHPSGLIAAGVHPSPFPFCDVVTSTTHKTLRGPRGGIIMMGENKENPWGIVAPKSGRTKLIGEIIDSSVMPGIQGGPLMHIIGAKAIAFGEALKPEFKKYANNVVKNAKCMANELLSLDYKLTSGGTDTHVILIDLTN

SEQ ID NO: 107477 - protein, 291 aa, Unknown
  Bacterial polypetide isolated from the Sargasso Sea
MSLNFFNDEIIKTDPEVYATLKKELERQQNQIELIASENIASKAVLNAQGSVMTNKYAEGYPGNRYYGGCEFVDEAENIALERVKKLYGCNYANLQPHSGAQANQAVFLALLQPHDTILGMSLASGGHLTHGAKPNLSGKWFNPIQYGVKKDGNDKDLIDYEEVESLAIEHNPKLIIAGASAYPRIIDWKKFREIADKVGAYFLVDMAHYSGLIAGKQYPNPIEHAHVVTSTTHKTLRGARSAMILTNDETLIKKINSAVFPGLQGGPLMHVMAGKAVAFGEALKPEFENY

SEQ ID NO: 107478 - protein, 385 aa, Unknown
  Bacterial polypetide isolated from the Sargasso Sea
MKICFTSSFDAQGSILPNKYAEGYSGKRYYGGCEFIDDLETIGINRVKKLFNCKYANIQPHSGAQANQAVFMSLIKPGDTILGMSLAAGGHLTHGAPPNLSGKWFNAIQYGVRKQDALIDFDQLEADAIKYKPKLIIAGGSAYPRTLDFKRFRQIADKCGSMLLVDMAHISGLVATGDHPSPIPHAHVVTSTTHKTLRCGRGGMILTNDEDIAKKINSAVFPGLQGGPLMHAIAGKVVGFGEALKPEFKEYIKSVLRNARTLSEELLKRGLDIVSGGTDTHVVLVDLRPKNLTGNIVEDALERAGITCNKNGIPFDPEKPSVTSGIRLGTPAGTSRGFGQAEFSLIANLICDVLDSLNEKSEISSKVELEVKDKIKNLCYKFPIY

SEQ ID NO: 107479 - protein, 260 aa, Unknown
  Bacterial polypetide isolated from the Sargasso Sea
MSSESKYLNDQYKSFFEDSLSKTDPDLYKAINDELQRQQEHIELIASENIVSQAVLEAQGSVLTNKYAEGYSGKRYYNGCEHVDVAENLANERLKKLFNCKFANSQPHSGAQANGATFLALLKPGDTFMGMSLNSGGHITHGLKISMSGKWFNPIGYDVDKESELIDYDHVEKLALEHKPKLIIAGGSAYSRVIDFKRFREICDKVDAYLMVDMAHFSGLVAGKGYPNPCDHAHVVTSTTHKVFRSARGGIILTNHEDIA

SEQ ID NO: 107480 - protein, 403 aa, Unknown
  Bacterial polypetide isolated from the Sargasso Sea
LIRQQNHIELIASENIVSQAVLEAQGSVLTNKYAEGYPGKRYYNGCEHVDVAEELAIQRLKKLFNCKFANAQPHSGAQANGAVFLALLKPGDTFLGMSLNSGGHITHGLKISMSGKWFNAIGYDVDKKSELIDYDNVEKLALENKPKLIIAGGSAYSRVIDFKRFREIADKVGAYLMVDMAHFSGLVAGKGYPNPCDYAHVVTSTTHKVFRSARGGIILTNHEDLAKKFNTAVFPGYQGGPLMHIIAAKAVGFLEALKPEFQDYIKTVLANAKILSETLKNNGFKIYSGGTDTHLMLVDLRPFNVKGNLASESLSRANITCNKNGIPFDTESPMVTSGIRLGSQAATTRGFGLKEFEEVGNLITKTIKGLSMNPNDNSKVEEEVRNEVVSLCSSFPIYKNLYK

SEQ ID NO: 107481 - protein, 436 aa, Unknown
  Bacterial polypetide isolated from the Sargasso Sea
MSSEKKYLNTQYENFFEKKLSEADPEIFDAVNKELIRQQNHIELIASENIVSQAVLEAQGSVLTNKYAEGYPGKRYYNGCEHVDVAESLANDRLKKLFNCKFANSQPHSGAQANGAVFLALLKPGDTFMGMSLNSGGHITHGLKIAMSGKWFNAISYDVDKTSELIDYDEVERLAIENKPKLIIAGGSAYSRVIDFKRFREIADKVGAFFMVDMAHFSGLVAGKGYPNPVDHAHVVTSTTHKVFRSARGGIILTNHEDIYKKINTAVFPGYQGGPLMHIIAAKAVGFKEALDPSFKEYISNVLANAKILAETLKTNGFKIYSGGTDTHLMLVDLRPFGVKGNAAAESLSRANITCNKNGIPFDTESPMVTSGIRLGSQAATTRGFGLNEFKIVGELITKVIKGLSSNLEDNTKIEDEVRKEVVDLCSNFPIYKNLG

SEQ ID NO: 107482 - protein, 417 aa, Unknown
  Bacterial polypetide isolated from the Sargasso Sea
MFDNSKTIKEFDPELWSSIENEMIRQEDHIELIASENYTSKRVLEAQGSVLTNKYAEGYPGKRYYGGCENVDIAEGLAIERAKEIYGAAFANVQPHSGASANSAVYLALCDAGDTILGMSLDHGGHLTHGAKVNFSGKTYQSFQYGLDPSTGEINYAEVEKLAKKHNPKMIIAGFSAYSGIVDWEKFREVADAVGAYLLVDMAHVSGLIAAGEYPSPIPFADVVTTTTHKTLRGPRGGLILAKENEEIHKKLNSAIFPGTQGGPLMHVIAAKAVCFKEALEPSFKEYQKQVKLNAKQMVTTFMERGINIVSNGTENHMFLVDLIEKGLTGKEADAALGRANITVNKNAVPNDPQSPFVTSGLRIGTPASTTRGFKETEISEVASWICDILDDVNNEEIISEVRNKVKNLCSRFPVYS

SEQ ID NO: 107483 - protein, 301 aa, Unknown
  Bacterial polypetide isolated from the Sargasso Sea
MFITEKNLKEFDPELWNSINNETARQEEHIELIASENYTSKSVLEVQGSVLTNKYAEGYPGKRYYGGCEHVDVAESLAIDRAKELYGAAYANVQPHSGASANSAVYLALCEAGDSILGMSLDHGGHLTHGAKVNFSGKTYESFQYGLDPSTGELNYQEVEDLARQHNPKMIVAGFSAYSGIVDWERFRSIADAVGAYLLVDMAHVSGLVAAGEYPSPIPFADVVTTTTHKTLRGPRGGLILAKENEEIHKKLNSAIFPGTQGGPLMHVIAAKAVCFKEALDPAFKDYQKQVKVNAKRMAET

SEQ ID NO: 107484 - protein, 426 aa, Unknown
  Bacterial polypetide isolated from the Sargasso Sea
MKSSKSDNIFSNISSIKEYDRDLWTSFENEAQRQEDHIELIASENYASKRILEAQGSLLTNKYAEGYPSKRYYGGCEFVDVAENLAIERAKQLFDADYANVQPHSGSSANAAAFLALLEPNDTILGMSLDHGGHLTHGSKVNFSGRNYKSIQYGLHPETNDINYDEVLSLAKEHKPKLIIAGFSAFSGIVDWKKFREIADEVGAYFLVDMAHVSGLVAAKLYPSPVPYADVVTSTTHKTLRGPRSGIILAKENEEIEKKLNSAVFPGSQGGPLMHVIAAKALCFKEALEPDFKNYIQDVMDNAKLMATTIMSRDINVVSNGTENHIVLVDLRSKNITGKDLEKVLGSVNITVNKNSVPNDTASPFITSGIRIGTPAITTRGFGKKEVVQVANWIADIIENIDDELVHEKVKNEVSSLTSEYPVYRL

SEQ ID NO: 107485 - protein, 294 aa, Unknown
  Bacterial polypetide isolated from the Sargasso Sea
MSSESKYINSSYQDFFEKSLSEADPDLFKAINDELIRQQNHIELIASENIVSQAVLEAQGSVLTNKYAEGYPGKRYYNGCEHVDVAEELAIERLKKLFNCKFANAQPHSGAQANGAVFLALLKPGDTFMGMSLNSGGHITHGLKISMSGKWFNAIGYDVDKKSELIDYDHVEKLALENKPKLIIAGGSAYSRVIDFKRFREIADKVGAYLMVDMAHFSGLVAGKGYPNPCEYAHVVTSTTHKVFRSARGGIILTNHEDLAKKFNTAVFPGYQGGPLMHIIAAKAVGFLEALKPD

SEQ ID NO: 107486 - protein, 157 aa, Unknown
  Bacterial polypetide isolated from the Sargasso Sea
GGPLMHVVAAKALCFKEALNPEFKLYIQQVMQNAKVMAETIISNGVDVVSNGTQNHIVLVDLRNKNITGKDLEKVLGSINITVNKNSVPNDPASPFVTSGIRIGTPAVTTRGFKEKEIIQVSNWICEIINNFDNEELQNKIKNEVSNLTNNFPVYNL

SEQ ID NO: 107487 - protein, 120 aa, Unknown
  Bacterial polypetide isolated from the Sargasso Sea
MSSETKYLNSDYKDFFEKSLSQSDPDLFKAINDELIRQQNHIELIASENIVSQAVLEAQGSVLTNKYAEGYPGKRYYNGCEHVDVAEKLALERIKKLFNCKYANVQPHSGAQANGAVFLA

SEQ ID NO: 107488 - protein, 417 aa, Unknown
  Bacterial polypetide isolated from the Sargasso Sea
MLKKDMNIADYDPELFNAIQNETLRQEEHIELIASENYTSPRVMQAQGSQLTNKYAEGYPGKRYYGGCEYVDVVETLAIERAKQLFGATYANVQPHSGSQANSAVYMALLKPGDTVLGMNLAHGGHLTHGSPVNFSGRLYNIIPYGIDESGKIDYDEMERLAVEHKPKMMIGGFSAYSGIVDWARMREIADKIGAYLFVDMAHVAGLIAAGVYPNPVPHAHVVTSTTHKTLAGPRGGIILSAADDEELYKKLNSAVFPGGQGGPLMHVIAGKAVAFKEALEPEFKAYQQQVVKNAKAMVEVFLERGYKIVSGGTDNHLMLVDLIGRDLTGKEADAALGSANITVNKNSVPNDPRSPFVTSGVRIGTPAITRRGFKEAEAKELTSWICDILDDAHNPAVIERVKGQVLALCARFPVYG

SEQ ID NO: 107489 - protein, 198 aa, Unknown
  Bacterial polypetide isolated from the Sargasso Sea
YKKEYEQAINSAVFPGLQGGPHNHSIGALAVALKQAQTPEFVKYQEQVIKNCASMAERLMALGYSLVSGGTDNHLILCDLRPKGIDGARVEKILDMAHITLNKNSVPGDTSALVPGGIRIGSPAMTTRGMTEEDFVRVADLIDKGVNIAIDIKKKTEGGKLKDFKAYLEQNKVPAIAELRAEVEAFADEFHMPGGPVI

SEQ ID NO: 107490 - protein, 436 aa, Unknown
  Bacterial polypetide isolated from the Sargasso Sea
MSSENKYLNDQYKSFFEDSLSKTDPDLYKAISDELKRQQEHIELIASENIVSQAVLEAQGSVLTNKYAEGYPGKRYYNGCEHVDVAENLAIERLKKLFNCKYANAQPHSGAQANGAVFLALLKPGDTFMGMSLNSGGHITHGLKISMSGKWFNAIGYDVDKESELIDYDNVEKIALENKPKLIIAGGSAYSRVIDFKKFREIADKVGAYLMVDMAHFSGLVAGKGYPNPCEHAHVVTSTTHKVFRSARGGIILTNHEDLAKKFNSAVFPGYQGGPLMHIIAAKAAGFLEALRPEFKDYIKSVLANAKILSETLKNNGFKIYSGGTDSHLMLVDLRPFGVKGNLAAESLSRANITCNKNGIPFDSESPMITSGIRLGTQAATTRGFGLKEFQKVGELITKVIKGLSENHKDNSKTENEVKNEVIKLTSSFPIYKNLK

SEQ ID NO: 107491 - protein, 425 aa, Unknown
  Bacterial polypetide isolated from the Sargasso Sea
MNILQNLKESDSVISNFINSEKNRQETHLELIASENFASTAVMQAQGSVLTNKYAEGLPQKRYYGGCEFVDKIEELAIQRAKKLFNSNWANVQPHSGAQANAAVFLSLLKPGDTIMGMDLSHGGHLTHGSPVNMSGKWFNAVHYGVNKETSELNFDEIREIAMQTKPKLIICGYSAYPRTIDFESFRKIADEVGAFLMADIAHIAGLVASKLHPNPIPYCDVVTTTTHKTLRGPRGGLILCKDAEFGKKFDKAVFPGTQGGPLEHIIAAKAVAFGEALQPDFVDYSQQVIKNAKVLASTLINRGIDIVSGGTDNHIVLLDLRSINMTGKIADLLVSEVNITANKNTVPFDPESPFVTSGLRLGTAALTTRGFNENAFAEVGEIIADRLLNPNDSLIESQCKERVLTYVIVFLFMKANLKHQLNES

SEQ ID NO: 107492 - protein, 109 aa, Unknown
  Bacterial polypetide isolated from the Sargasso Sea
THLMLVDLRPYNVKGNFAAESLSRANITCNKNGIPFDTEKPMITSGIRLGTQAATTRGFGLSEFKTVGELITKTLKGLSENPTDNSKIENEVKNEVIALTSSFPIYKNL

SEQ ID NO: 107493 - protein, 90 aa, Unknown
  Bacterial polypetide isolated from the Sargasso Sea
LGRANITVNKNSVPNDPQSPFVTSGIRVGTPAPTTRGFKEAECKDIVDWMCDVIENMDNDEVINEVKNKVVGLCKKFPVYGKSQSKAAAA

SEQ ID NO: 107494 - protein, 83 aa, Unknown
  Bacterial polypetide isolated from the Sargasso Sea
MFDNNKTLKDFDPDLWSSIDKEKTRQEDHIELIASENYTSQRVLEAQGSVLTNKYAEGYPGARYNGGCENVDIAESLAMKELK

SEQ ID NO: 107495 - protein, 227 aa, Unknown
  Bacterial polypetide isolated from the Sargasso Sea
MSSEKNYINDNYKSFFEDSLSSKDPELYKAIQDELLRQQQHIELIASENIVSQAVLEAQGSVLTNKYAEGYPGKRYYNGCEHVDVAENLAIERLKQLFNCKFANAQPHSGAQANGAVFLALLKPGDTFMGMSLNSGGHITHGLKISMSGKWFNPIGYDVDKKSELIDYDNVEKLALEHKPKLIIAGGSAYSRVIDFKRFREIADKVGAYLMVDMAHFSGLVAEKDIQ

SEQ ID NO: 107496 - protein, 91 aa, Unknown
  Bacterial polypetide isolated from the Sargasso Sea
MKSSKSDNIFSNISSIKEYDKDLWTSFENEAQRQEDHIELIASENYASKRILEAQGSLLTNKYAEGYPSKRYYGGCEFVDVAENLAIERAK

SEQ ID NO: 107497 - protein, 248 aa, Unknown
  Bacterial polypetide isolated from the Sargasso Sea
MKSSRSDSIFSNDNPIKDYDSELWASFESEAERQEDHIELIASENYASKRILEAQGSVLTNKYAEGYPSKRYYGGCENVDIAENLAIERAKKLFKADYANVQPHSGSSANAAAYLALLEPNDTILGMSLDHGGHLTHGSKVNFSGRNYKSVQYGLHPETHDINYDEVRSLAKEHRPKLIIAGFSAFTGIIDWKKFREIADEVGAYFLVDMAHVSGLVAADLYPSPVPYADVVTSTTHKTLRGPRSGII

SEQ ID NO: 107498 - protein, 483 aa, Unknown
  Bacterial polypetide isolated from the Sargasso Sea
MESEENISDVSTAFSKALEVISTSEPTVAEHIRGELDNQRSQLKLIASENYASPAVLLAMGNWFSDKYAEGTPGHRFYAGCEFVDKVETLASNHAKELFSANYAYVQPHSGIDANLVAFWSILAHRIEAPFLASHGKRHVNDLTDSDWETLRTSFGNQRMIGMSLDAGGHLTHGFRPNISGKLFDQRSYGVNPETEILDYDEINTLAKEFRPLVIVAGYSAYPRKVNFAKIREIADSVDATFMVDMAHFAGLVAGKVFADDFDPISNAHIVTSTTHKSLRGPRGGIVLSNEEELAEFIDKGCPMVLGGPLANIMAAKAVAFAEARQPEFREYASNVVNNASALASGIEKRGGRLVTGGTENHLVLVDVRKFGLTGRQAESALEDAGVVVNRNSIPFDPNGAWYTSGIRLGTPALTTLGMGEDDMDEVADIICSTLKAAEPTKTSSGEQSKANYILASEIQASNRERAGDLLRLNPLYPDLNLI

SEQ ID NO: 107499 - protein, 180 aa, Unknown
  Bacterial polypetide isolated from the Sargasso Sea
MSSEKNYLNDSYKSFFEDSLSVKDPELYKAIKDELIRQQQHIELIASENIVSQAVLEAQGSVLTNKYAEGYPGKRYYNGCEHVDVAENLAIERLKKLFNCKFANAQPHSGAQANGAVFLALLSPGDTFMGMSLNSGGHITHGLKISMSGKWFNAIGYDVDKESELIDYDNVEKLALEHKQ

SEQ ID NO: 107500 - protein, 336 aa, Unknown
  Bacterial polypetide isolated from the Sargasso Sea
MSKIKKDISNYYQDYFDKNLSERDPDLYNSINDELNRQQQHIELIASENIVSKAVLDAQGSILTNKYAEGYPGKRYYGGCEFVDKAEELALDRVKKLFDCKFANVQPHSGAQANGAVYLALLNPGDPILAMSLNSGGHLTHGAKVAQSGKWFKAFHYEVDKETGLIDYDQIQKLATEHKPKILIAGGSAYSRIIDFKKFREIADSVNAYLMVDMAHFSGLVAGKGYPNPVKYADVVTSTTHKVLRGGRGGIILTNREDLYKKFNSAVFPGYQGGPLMHVIAAKAAAFHEALQPNFREYIKSVLENAKILSETLKNNGFKIFSGGTDTHLMLVDLRP

SEQ ID NO: 107501 - protein, 206 aa, Unknown
  Bacterial polypetide isolated from the Sargasso Sea
MDFFRDKLDVSIDEYDKELSVFINAEKERQEKHIELIASENYASKRILEAQGSVLTNKYAEGYPAKRYYGGCEFVDGAENLAIERAKSLFKAKFANVQPHSGASANAAVFLALLEPGDTVLGMALDQGGHLTHGSKVNFSGRNYNSVQYGLDNVSKEIDYDQVQSLAEEHKPKLIIAGFSAYMGIVDWKKFREIADSVSAYLLVDM

SEQ ID NO: 107502 - protein, 423 aa, Unknown
  Bacterial polypetide isolated from the Sargasso Sea
MNILQNLKESDPVISNFINSEKNRQETHLELIASENFASIAVMQAQGSVLTNKYAEGLPQKRYYGGCEFVDEIEELAIQRAKKLFNANWANVQPHSGAQANAAVFLSLLKPGDTIMGMDLSHGGHLTHGSPVNMSGKWFNAVHYGVNKETSQLHFDEIREIALETKPKLIICGYSAYPRMIDFESFRNIADEVGAFLMADIAHIAGLVASKLHPNPIPYCDVVTTTTHKTLRGPRGGLILCKDEEFGKKFDKSVFPGTQGGPLEHIIAAKAVAFGEALQPDFVNYSQQVIKNAKVLASTLISRGIDIVSGGTDNHIVLLDLRSINMTGKIADLLVSEVNITANKNTVPFDPESPFVTSGLRLGTAALTTRGFNESAFAEVGEIIADRLLNPNDSSIESQCKERVLALCKRFPLYEGKLEASIK

SEQ ID NO: 107503 - protein, 226 aa, Unknown
  Bacterial polypetide isolated from the Sargasso Sea
MVDMAHFSGIVAGKGYPNPCDHAHVVTSTTHKVFRSARGGIILTNHEDLAKKINTAVFPGYQGGPLMHIIAAKAVGFFEALKPDFQDYIKSVLANAKILSEKLISNGFKIYSGGTDTHLMLVDLRPFNVKGNMAAESLSRANITCNKNGIPFDTESPMITSGIRLGSQAATTRGFGLNEFKLVGDLITKIIKGLSNNTTDNSKIEDEVRKEVVDLCSNFPIYKNLG

SEQ ID NO: 107504 - protein, 429 aa, Unknown
  Bacterial polypetide isolated from the Sargasso Sea
MLDNKSNLKTDAIFSNKKDIELYDAELWESFEKEMVRQEEHIELIASENYASQRVLQAQGSVLTNKYAEGYPDKRYYGGCEFVDIAEKLAIDRAKELFNADYANVQPHSGSSANAAAYLALLEPNDAILGMSLDHGGHLTHGSKVNFSGRNYKSFQYGLNPETHDIDYDQVRDLAKKHNPKLIIAGFSAFSGLVDWGIFREIADEINAYFLVDMAHISGLVAAGMYPSPVPYADVVTSTTHKTLRGPRSGIILARENEDIQKKLNSAVFPGSQGGPLMHVVAAKAVCFKEALEPEFKTYMSQVISNAKTMAKTIIGRGVDIVKGGTENHMILVDLRNKGITGKDSEYKLGLANITVNKNAVPNDPQSPFVTSGIRLGTPAVTTRGFKEDEIIQISNWICDIVLDLDNEKKIEEIKDKALSLCKEFPVYK

SEQ ID NO: 107505 - protein, 428 aa, Unknown
  Bacterial polypetide isolated from the Sargasso Sea
MSIVKEKDKKIYDIIQSELNRQNNYLELIASENFTSKAVLETAGSVLTNKYAEGYPGKRYYGGCIHVDEAENLAIDRAKRLFKAEYANVQPHSGSSGNMGVYLAYLQPGDCIMGLDLSHGGHLTHGSKVSFSGQIYNSVTFQVKQDTGLVDFDDLLKKAREYKPKIIICGASAYPRTIEFEKFREVADEVGAFLHGDICHNSGLIAAEMHPSPFPYCHVVSTSTHKSLRGPRGGIILLGSDYKNPFGKVAPKSGRVKMMSELIDSAVMPGMQGGPLMHIIAAKAVAFKEALEPSFKTYIRGVLDNAQCFAEEFKSKGYELISGGTDTHLVLIDLQNKNISGKAAEIALDEAGITVNKNMIPFDPKSPFVTSGIRIGSPAMTTRGMGVDEVKIIVDLIDQVILNHDNKDKIQSVKKHVNELCSSFQIYD

SEQ ID NO: 107506 - protein, 204 aa, Unknown
  Bacterial polypetide isolated from the Sargasso Sea
MLKRDMTIAGYDPELWQAITDETRRQEEHIELIASENYTSPRVMEAQGSQLTNKYAEGYPSKRYYGGCEYVDVVETLAIERAKELFGATYANVQPHSGSQANSAVYMALLQPGDTVLGMNLAHGGHLTHGSPVNFSGKLYNIIPYGIDESGKIDYDDMERQAVEHKPKMMIGGFSAYSGIVDWARMREIADKVGAWLFVDMAHV

SEQ ID NO: 107507 - protein, 417 aa, Unknown
  Bacterial polypetide isolated from the Sargasso Sea
MTFSETLSKLDSELASAIESEQKRQEEHIELIASENYTSKEVMEIQGSVLTNKYAEGYPGRRYYGGCVHVDEAEVLAIERVKQLFDADYANVQPHSGSQANMAVYMSLLDHGDKILGMSLSDGGHLTHGAKVNFSGQMYEFFSYGINPDTGRIDYDQVSKLAETHRPKMIVAGFSAYSRLVDWNVFRDIADSIGAYFMVDMAHVSGLIAGGCYPNPVPIADVTTSTTHKTLRGPRGGIILARENEDIEKAINKQVFPGTQGGPLMHVIAAKAHAFNEALKPEFKTYQEAVVKNAKAMASRFQEHGYQIVSDGTDCHLFLVDLSNTDITGADGERVLGEANITLNKNSVPNEQRSPMITSGLRIGSPAITTRGFGVSEAEYVVDLIHEVLSDINNQSNISSVKNKVKDLCKGFPVYLQ

SEQ ID NO: 107508 - protein, 253 aa, Unknown
  Bacterial polypetide isolated from the Sargasso Sea
LIIAGGSAYSRVIDFKKFRDICDKVKAYLLVDMAHFSGLVAGGVYPNPTKYADAVTSTTHKVLRGPRGGIILTNNEELIKKFNSAIFPGLQGGPLMHVIAAKAVCFKEALSDEFKSYSQNVISNAKILSNKLIENGFKIFSGGTDTHLMLVDLRDFNVTGKDVEASLVRANITCNKNGIPFDTQSPMITSGIRLGTPACTTRGFGPNEFRLIADLISKVVKGLSKNGQNNSKIEKEVQKEVIDLCSSFPIYSD

SEQ ID NO: 107509 - protein, 173 aa, Unknown
  Bacterial polypetide isolated from the Sargasso Sea
TAVFPGYQGDPLMHIIAAKAAGFLEALRPDFKDYIKSVLANAKILSETLKNNGFKIYSGGTDTHLMLVDLRPFKVKGNLAAESLSRANITCNKNGIPFDSESPMITSGIRLGSQAATTRGFGLKEFEKVGELITKVIDGLSKNPNDNTKVEDEVRKQVVSLCLSFPIYKNLRK

SEQ ID NO: 107510 - protein, 311 aa, Unknown
  Bacterial polypetide isolated from the Sargasso Sea
MISDLFTKGIKEADPEVYGTLSRELERQQNQIELIASENIASRSILNAQGSVMTNKYAEGYPGKRYYGGCEFVDQAEEIALERVKKLFNCKFANLQPHSGAQANQAVFLALLQPHDTILGMSLASGGHLTHGAKPNLSGKWFNAVQYGVKKDGNDKDLIDYDEVEALALEHKPKMLIAGASAYPRTIDWKKFREITDKVGAYFLVDMAHYSGLVAGKQYPNPIEHAHVVTSTTHKTLRGARSAMILTNHEDLYKKINSAVFPGLQGGPLMHVIAARAVCFGEALKPEFEEYIKNVIASAKVMAKTLVDRGF

SEQ ID NO: 107511 - protein, 407 aa, Unknown
  Bacterial polypetide isolated from the Sargasso Sea
MNILQNLKESDPIISNLINSEKNRQETHLELIASENFASMAVMQAQGSVLTNKYAEGLPQKRYYGGCEFVDEIEELAIERAKQLFDADWANVQPHSGAQANAAVFLSLLKPGDTILGMDLSHGGHLTHGSPVNMSGKWFNAVHYGVDKETNKLNFKEIRDIALATKPKLIICGYSAYPRKIDFESFRRIADEVGAFLMADIAHIAGLVATKLHPNPIPYCDVVTTTTHKTLRGPRGGLILCKDKEFGKKFDKSVFPGTQGGPLEHIIAAKAVAFGEALQPNFINYSKQVINNAKVLSSTLIKRGIDIVSGGTDNHIVLLDLRSINMTGKVADLLVSEVNITANKNTVPFDPESPFVTSGLRLGTAALTTRGFNDDAFVEVGEIIADRLLNPDDLLIEKKCKERGINF

SEQ ID NO: 107512 - protein, 429 aa, Unknown
  Bacterial polypetide isolated from the Sargasso Sea
MFNLEQNDPELYDVLNREAEREESTLELIASENFTSKAVMEMAGGVMTNKYAEGYPGKRYYGGCEVVDEAENIARDRLKKLFGCEYANVQPHSGSQANMAVFMTFLEPGDTIMGLDLAHGGHLTHGSHVNFSGQLYKSVSYHISKTNGRVDFDEVFSLAKEHKPKLIICGGSAYPRFIEFEMFREVADTVGAHLMSDIAHPSGLVAAGVHPSPMQYCDIVTSTTHKTLRGPRGGIIMMGKDFENPWGKIAPKSGRIKLVSELIDSMVMPGVQGGPLMHIIAAKAVAFGEALRPDFKKYAKDIVSNAKVMAEEFLHLGYDLVSGGTDTHVLLIDLSNKDITGKHAENILGKAGIALNKNMVPFDRRSPFVTSGIRVGTPALTTRGMGETEMRKVVQWIDSAISDPDNDQLLTSIRSDVEALCSNFPIYEH

SEQ ID NO: 107513 - protein, 435 aa, Unknown
  Bacterial polypetide isolated from the Sargasso Sea
MSSEKSYLNDSYKSFFEDSLSVKDPELYKAIKDELIRQQQHIELIASENIVSQAVLEAQGSVLTNKYAEGYPGKRYYNGCEHVDVAENLAIERLKKLFNCKFANAQPHSGAQANGAVFLALLSPGDTFMGMSLNSGGHITHGLKISMSGKWFNAIGYDVDKESELIDYDNVEKLALEHKPKLIIAGGSAYSRVIDFKRFREIADKVGAYLMVDMAHFSGLVAGKGYPNPCDYAHVVTSTTHKVFRSARGGIILTNHEDLAKKFNTAVFPGYQGGPLMHIIAAKAAGFLEALQPEFQDYIKSVLANAKILAETLKNNGFKIYSDGTDTHLMLVDLRPYNVKGNLAAESLSRANITCNKNGIPFDTEKPMITSGIRLGTQAATTRGFGLNEFKTVGELITKTLKGLSENPTDNSKIENEVKNEVISLTSSFPIYKNL

SEQ ID NO: 107514 - protein, 144 aa, Unknown
  Bacterial polypetide isolated from the Sargasso Sea
MKSFKSDNIFSDASSIENFDKELWESFKNEAERQEDHIELIASENYASKRVLEAQGSVLTNKYAEGYPSKRYYGGCENVDIAENLAIERAKELFNADYANVQPHSGSSANAAAFLALLNPNDTILGMSLDHGGHLTHGSKVNFS

SEQ ID NO: 107515 - protein, 259 aa, Unknown
  Bacterial polypetide isolated from the Sargasso Sea
MSTAIKINKFLNNFFKSSLKDSDKELYDSVKNEFIRQQNHIELIASENIVSKAVLEAQGSVLTNKYAEGYPGKRYYGGCEHVDLSESLAIERAKKLFNCNFANVQPHSGAQANGAVYLALIKPGDTILGMSLNSGGHLTHGAKPAQSGKWFNAIHYDVDKDTGLLDYENIERLALEHKPKLIIAGGSAYSRIIDFKKFRDICDKVNAYFLVDMAHFSGLVAGGVYPNPVMYADVVTSTTHKVLRGPRGGIILTNKEDLI

SEQ ID NO: 107516 - protein, 272 aa, Unknown
  Bacterial polypetide isolated from the Sargasso Sea
MSSETKYLNSNYQDFFEKSLSKSDPDLFKAINDELIRQQNHIELIASENIVSQAVLEAQGSVLTNKYAEGYPGKRYYNGCEHVDVAEQLAIERIKKLFNCKYANVQPHSGAQANGAVFLALLKPNDTFMGMSLNSGGHITHGLKISMSGKWFNAISYDVDKKSELIDYDNVEKLALEHKPKLIIAGGSAYSRVIDFKRFREIADKVGAYLMVDMAHFSGLVAGKGYPNPCDYAHVVTSTTHKVFRSARGGIILSNDIDLGKKFDTAVFPGYQ

SEQ ID NO: 107517 - protein, 74 aa, Unknown
  Bacterial polypetide isolated from the Sargasso Sea
MSSEKNYLNDSYKSFFEDSLSLKDPELYKAIKDELIRQQQHIELIASENIVSQAVLEAQGSVLTNKYAEGYPGK

SEQ ID NO: 107518 - protein, 243 aa, Unknown
  Bacterial polypetide isolated from the Sargasso Sea
SNRFCKFREIANNINAYLLVDMAHFAGLVASKTYPSPIAIADIVTTTTHKTLRGPRGGLILTNNEDISKKINSAIFPGIQGGPLMHTILAKAVAFGEALRPEFVNYSQNVIDNAKILSQTLLEDGFDIVSGGTDSHLVLLDLRPKGIKGNEAEDVLGKANITCNKNGVPFDPEKPTITSGIRLGTPAGTTRGFGQAEFHKIGTYICEVLNGFQLDGVDTKAILEVQKKVIDLCRKFPIYGGNL

SEQ ID NO: 107519 - protein, 336 aa, Unknown
  Bacterial polypetide isolated from the Sargasso Sea
AKELFEMPHANVQPHSGAQANMAAYFAVLEPGDTVLGMRLDQGGHLTHGAKVSFSGNLYNFIPYGVTKDSETIDYNEIESLAKEHSPKLIVAGCSAYPRVLDFQKLKTIADNAGALLMVDMAHISGLIAGGAHPSPAGFADIITSTTQKTLRGPRGGIILTTEDLAKKVDYGVFPYSQGGPFMHVIAAKAVCFGEALTPEFSNYAHQVVRNADLMAKQLAESGMRLISGGTDNHLILADVTPLGLTGQDAERTLQDIGVIVNKNSIPWDPKPARVTSGLRVGTAAITSRGFTEPEVIEVSEIIISALSNHTDTSLLGQLADQVKNLASSHPVPGID

SEQ ID NO: 107520 - protein, 240 aa, Unknown
  Bacterial polypetide isolated from the Sargasso Sea
FRDIADSVNAYLMVDMAHFSGLVAGKGYPNPVKYADVVTSTTHKVLRGGRGGIILTNREDLYKKFNSAVFPGYQGGPLMHVIAAKAAAFHEALQPNFREYIKSVLENAKILSETLKNNGFKIFSGGTDTHLMLVDLRPFKVTGKAAEVSLCNSNITCNKNGIPFDTEKMTVTSGIRLGSQAATTRGFGLNEFKKVGELITKVIKGLSNSPNDNSKTESEVRKEVIELCSKFPIYNHLFKN

SEQ ID NO: 107521 - protein, 261 aa, Unknown
  Bacterial polypetide isolated from the Sargasso Sea
DHVRDLAKKHNPKMIIAGFSAFSGTIDWKIFRDIADEVGSYFLVDMAHVSGLVAAGVYPSPVPYADVVTSTTHKTLRGPRSGIIIAKSNEALEKKLNSAVFPGSQGGPLMHVIAAKAICFKEALEPNFKIYMQQVIDNAKLMCKVIQDRGIDVVTGKTDNHIVLMDLRSKGLTGKDCELALGQANITVNKNAVPDDPQSPFVTSGIRLGTPAITTRGFRNDEVEQLTNWICDIVLDLGNPDKINLIKDQVVQLCSKFPVYK

SEQ ID NO: 107522 - protein, 237 aa, Unknown
  Bacterial polypetide isolated from the Sargasso Sea
IDWKKFRDIADEVGAYFLVDMAHVSGLVAANLYPSPIPFADVVTSTTHKTLRGPRSGIILAKANEEIEKKLNSAVFPGSQGGPLMHVVAAKALCFKEALDPEFKIYIQNVMDNAKIMAKTLMSNGIDIVSNGTENHIILVDLRSKGITGKDLEKLLESINITVNKNSVPNDPASPFVTSGIRIGTPAVTTRGFKEKEIIQVSNWISNIINDFDNDELQKNIKEEVQNLTSNFPVYNV

SEQ ID NO: 107523 - protein, 279 aa, Unknown
  Bacterial polypetide isolated from the Sargasso Sea
GVDRETQRLDMEAIRQLAVEHKPKLIVCGYSAYPRTIDFAAFRAIADEVGAFLLADMAHIAGLVAAGVHPSPVPHCDVVTTTTHKTLRGPRGGLILCRDADFAKKFDKAVFPGSQGGPLEHVIAAKAVAFGEALQPAFKTYSQQVVANAAALAERLIARGIDVVSGGTDNHVVLLDLRSVGMTGKVADLLVSDVHITANKNTVPFDPESPFVTSGLRLGTAALTTRGFDADAFREVADVIADRLLNPEDDAVQQQCLRRVEALCQRFPLYAAARQPALA

SEQ ID NO: 107524 - protein, 388 aa, Unknown
  Bacterial polypetide isolated from the Sargasso Sea
IHLIASENFASQAVMEASGSILTNKYSEGFPGRRYYEGCETVDEIEQIAIDRACELFEADHANVQPHSGSSANMAVYLNLLEPGDTVMGMSLDQGGHLTHGSPVNFSGRTYNFVGYGLDRETELINMEEVAELASKTKPKLLIAGYSSYSQDLDFKGFREIADSIGAYFMVDAAHFIGLVAGKVVENPVPYADVITATTHKALRGPRGGLILSKEEFAKGIDQNIFPGAQGGAINNQIAAKAVCFKEAMSEEYKSYAQQILDNAHALAESFKAEGLRVVSGGTSNHIVLVDTGSVDDELTGKEAGILLNDMGITLNRNAIPFDERSPFITSGIRMGTPAITTCGMKEEESTKVGYLISEALKNRDNEDRRQELEEEIRNLAKAFQPYE

SEQ ID NO: 107525 - protein, 260 aa, Unknown
  Bacterial polypetide isolated from the Sargasso Sea
RPKLIIAGASAYSRHIDFEKIRLIANKVEAYLLADIAHYSGLIAAGEYPNPLKYAHVATTTTHKTLRGPRGGMILSNDIELGKLFDKAIFPGIQGGPLMHVIAAKAAAFGEALKPNFKQYVLQIINNAKALANELENQGVKIVSGGTDSHVILCDLRPLNITGKISEESLDRAGITCNKNAVPYDTQKPFITSGLRIGTPAVTTRGFKEKEMLKIGQLIGKVLKSIAKNSDDLASVEEEVKKEVITLCKEFPLYSSLSYN

SEQ ID NO: 107526 - protein, 357 aa, Unknown
  Bacterial polypetide isolated from the Sargasso Sea
MNKKGASQESLNNVDAEISELIDNDLNRQNTHIHLIASENFASKAVMEASGSILTNKYSEGFPGRRYYEGCETVDQIEQLAIDRACELFEADHANVQPHSGSSANMAVYLSILEPGDTVLGMSLDQGGHLTHGSPVNFSGQVYNFVGYGLDEDTELINMETVYNMALEHKPKLIIAGYSSYSQSLDFQKFREIADEVGAHFMVDAAHFIGLVAGKVVDNPTKYADVVTATTHKALRGPRGGIILTREEFAKDIDKNIFPGAQGGALNNQIAAKAVCFKEALTNEYQEYAKQILKNAKALSDSFQEQGLRVISGGTENHIVLVDTRSVDEELTGKEAGILLNDRGVTLNRNAIPFDPR

SEQ ID NO: 107527 - protein, 431 aa, Unknown
  Bacterial polypetide isolated from the Sargasso Sea
KTTQYEDFENFFSKSLKESDPKLYDSLAQEFSRQQEHIELIASENIVSRSVLDAQGSIMTNKYAEGYSGRRYYGGCEYVDLAEDLAISRACELFESKFANVQPHSGSQANQAVFQALLKPGDTILGMSLDAGGHLTHGAKPNQSGKLFNAIQYGVRKEDSLIDFDEVETLANKHKPKLIIAGGSAYPRVIDFVKFKEIADKVNAYFLVDMAHFAGLVASKTYPSPLPHADIVTTTTHKTLRGPRGGLILTNNEDIAKKINSAIFPGIQGGPLMHTILAKAVAFGEALKPEFAHYSQNVIDNAKILSQTLLEDGFDIVSGGTDSHLVLLDLRPKGIKGNEAEDVLGKANITCNKNGVPFDPEKPTITSGIRLGTPAGTTRGFGQAEFHKVGTYICEVLNGFQSEGINTQSIFEVQQKVIDLCRKFPIYGGSL

SEQ ID NO: 107528 - protein, 309 aa, Unknown
  Bacterial polypetide isolated from the Sargasso Sea
MRMLKREMNIADYDAELWQAMEQEKVRQEEHIELIASENYTSPRVMQAQGSQLTNKYAEGYPGKRYYGGCEYVDIVEQLAIDRAKELFGADYANVQPHSGSQANFAVYTALLQPGDTVLGMNLAQGGHLTHGSPVNFSGKLYNIIPYGIDESGKIDYEDMAKQAKEHKPKMIIGGFSAYSGVVDWAKMREIADSIGAYLFVDMAHVAGLIAAGVYPNPVPHAHVVTTTTHKTLAGPRGGLILAKGGDEELYKKLNSAVFPSAQGGPLMHVIAAKAVALKEAMEPEFKVYQQQVAKNAKAMVEVFLNRGY

SEQ ID NO: 107529 - protein, 279 aa, Unknown
  Bacterial polypetide isolated from the Sargasso Sea
NVKKLAIGQVVYTAMCYENGTMIDDGTLFKLGDANFRWVGGSDYSGEWLRELGKKLDLRVSVRSSSDQLHNISVQGPNSRKVLSKIMWTTPASPGIEDLKWFHFNISRLNDHLGIPVMLSRTGYTGELGYEVYCHPKDGPKVWDAIWEAGQEFDIVPMGFAALDMLRIEAGLILGGNEFSDETDPFEAGISFTVPLKSKDANFIGRDALVKRKESPLRKLVGLEIEGNEHCGNGDCVHIGRGQVGVITSSMISPTLNKNIALCRIDIHSSDEGTEVEVG

SEQ ID NO: 107530 - protein, 293 aa, Unknown
  Bacterial polypetide isolated from the Sargasso Sea
MNYTLTKNIKKLSIGQIVYSAMCYENGMMFDDGTLLKLSDTGYRWICGDEYGGEWLKEIAKKKNYKVIIKNSTDQISNVSIQGPNSRKILNKIIYTPPTQPSIDELQWFRFTICRIDNLNGIPLVISRTGYTGELGYEIWCHHKDASKVWDKLMESGKDEGLIPAGFAALDKLRIEAGLILFGNEFDGQQDPFEAGIGFAVPLKTKEDDFIGKKILIDRKANPQKKLVGLELISKEPAAHGDCVHIGRSQVGIVTSGCFSTILNKNISLCRIDQKYSEIGTDVEVGKIDGHQK

SEQ ID NO: 107531 - protein, 109 aa, Unknown
  Bacterial polypetide isolated from the Sargasso Sea
MDLLKSPLYSKYVESNAKLVDFAGWEMPISFSGLIKEHESVRSSAGLFDISHMGVISIKGVNPKDYIQKLFPTNLYSFSEGQGLYTVMLNDKGGIIDDLIIYDLGIQEN

SEQ ID NO: 107532 - protein, 214 aa, Unknown
  Bacterial polypetide isolated from the Sargasso Sea
MEIKKTPLFKLHTAYGAKFVEFAGYQMPIQYKNGVIQEHNITRTKSGIFDVSHMGQLFIKGKEELINDLEKILPTDLNKLSINQCKYSFLMKDNGGIYDDLIITKIENGFMIILNAACKENDLKILSSVLENKYSLNLREDLSLVAIQGPESKDILEKIIKGISNLKFMNGNKFNYKSTSLYITRSGYTGEDGFEISLPNNIAEEFVKKLIENG

SEQ ID NO: 107533 - protein, 323 aa, Unknown
  Bacterial polypetide isolated from the Sargasso Sea
KKKEFTKSFAFRMKADSETKLTKNTGFYERTSKLTRNFVDARGYWLPNDYTKHGVINEYTACREKAVVIDLSSLRKFEILGPDAEELMNYTLTRNVKKLSVGQVVYSSMCYENGSMFDDGTLLKMSDHGFRWVCGDEYAGEWLKEQAKKKNYKVLIKNSTDQINNISLQGPNSRKILEKFIFTPPTQPSISELEWFRFTICRVKELSGIPLMISRTGYTGELGYEIWCHPSDAPKVWDEVMEAGKDEGLIPAGFGALDLLRIEAGLILFGNEFDGQVDPFEAGVGFTVPLKTKTDNFIGKENLIKRKENPQKKLVGLELISKE

SEQ ID NO: 107534 - protein, 300 aa, Unknown
  Bacterial polypetide isolated from the Sargasso Sea
GVGEEYNACREKAVLIDLTSLRKFEIIGPDAEELMNFTLTRNIKKLSIGQVVYSAMCYENGMMFDDGTLLRLSETGFRWICGDEYAGEWLKEVAKKKKFKVNIKNSTDQISNVSVQGPKSREILKKLIFTPPTQPSIDELEWFRFTICRVEDLQGIPLIISRTGYTGELGYEVWCHPKHAPEVWDKLMESGKNEGLIPAGFAALDKLRIEAGLILFGNEFDGQQDPFEAGIGFAVPLKTKEDDFIGKNVLKERKANPQKKLVGLELIGKEIASHGDCVHVGRSQVGIITSGCLSTKLNKN

SEQ ID NO: 107535 - protein, 261 aa, Unknown
  Bacterial polypetide isolated from the Sargasso Sea
VPGSNAACKAQDLAHLQAHIGSRCEVQPLFEERALLALQGPAAVKVLERLAPEVAGMIFMQLRRVKLLDVDCFVSRSGYTGEDGYEISVPVNAADALARRLLAEPEVQPIGLGARDSLRLEAGLCLYGHDMNTETTPIEASLLWAISKVRRAEGARAAGFPGAEAIFAHVRDGVARKRVGLLPQERTPVREGADIVDANDKPVGKVCSGGFGPTLAAPVAMGYIDSEHAALDTALFAVVRGKKVALKVSKMPFVTPRYYRG

SEQ ID NO: 107536 - protein, 322 aa, Unknown
  Bacterial polypetide isolated from the Sargasso Sea
FYTSSTGLNSVISDESYALPGDYVMFKALKDLTIGTTACPSDIDPCNSWNPTDIFVRTYDKKKEFSKSFAFRMKTDSEKKLTRNSGFHDRTSKLTRNFIDTRGFWLPNDYTKHGLVEEYTACREKAVLIDLSSLRKFEIIGPDAEELMNYTLTRNIKKLSVGKVVYSAMCYENGMMFDDGTLLRLSETGFRWICGDEYSGEWLKEIAKKKNYKVSIKNSTDQISNVSIQGPKSREILKKIIFTPPTQPSIDELEWFRFTVCRVEELQGIPLIVSRTGYTGELGYEIWCHPKHAPEVWDKLMVAGKDDGLIPAGFAALDKLRI

SEQ ID NO: 107537 - protein, 149 aa, Unknown
  Bacterial polypetide isolated from the Sargasso Sea
METQRTALYNYHKSLGAKFVPFAGYEMPVQYSSGIVDEHKLTRSSAGMFDVSHMGQLSIEGNEELAIELEKIIPTDLKKIKLNQSKYSFLTNEEGGIYDDLIVTKVEKGFNIILNAACKNSDFKIISSLLKNKFKIILHKNLSLIACKD

SEQ ID NO: 107538 - protein, 221 aa, Unknown
  Bacterial polypetide isolated from the Sargasso Sea
MIALQGPKAVEILEKLIPGVAKLKFMTGDYFKFDDENLYITRSGYTGEDGFEISIPNLKVEKLIKFLNENKVHPVGLGARDTLRLEAGLCLYGHDLNEKINPIEANLKWAIAKRRREEGGFNGWEKIKDLITNGSEKKRVGILPEGRIIARENTKVFSETGDEIGLITSGTFGPSVNAPVAMGYVSKDFAEVGTKIQLEVRGKKHGGKVSELPFFKKSYVK

SEQ ID NO: 107539 - protein, 127 aa, Unknown
  Bacterial polypetide isolated from the Sargasso Sea
MLENEIKSSPIEEIHSLNDAKFVNFAGWSMPIQFPDGIINEHISTRSSCGLFDISHMGQILINGDESRLLLEKITPTDISKIQTGKVRYSFLLNNEGGIIDDLMITNEGDCFYLVVNASRINEDLEE

SEQ ID NO: 107540 - protein, 276 aa, Unknown
  Bacterial polypetide isolated from the Sargasso Sea
DMMDSSGFWIPNKFNNYGTIKEYTECRNNVVMMDLSSLRKFEVVGPDAEELLNVALTRNIKKLSVGQVVYTAMCYENGTMIDDGTLYKLGDHNFRWICGSDYSGEWLTELSEEFKLHVNIKSSTDHLHNISVQGPNSRKVLSKIIWTPPAHPDVNNLEWFHFTISRIGDHTGIPVMLSRTGYTGELGYEIYCHPDDAANVWDIVWEAGKEFNIAPMGFEALDMLRIEAGLILGGNEFSDETDPFEAGISFTVPLKSKEQNFIGKEALIERKAHPHR

SEQ ID NO: 107541 - protein, 330 aa, Unknown
  Bacterial polypetide isolated from the Sargasso Sea
NMGLVNEYNACRNDAVLIDLSSLRKFEIIGPDAEELMNFTLTRNIKKLSVGQVVYSAMCYENGMMFDDGTLLRLSETGFRWICGDEYAGEWLKEIAKKKNFNAIVKNSTDQISNVSLQGPKSREILKKIIFTPPTQPSIDELGWFRFTICRIEELQGIPLIVSRTGYTGELGYEVWCHPKNAPEVWDKLMEAGKDEGLIPAGFAALDKLRIEAGLILFGAEFDGEQDPFEAGIGFAVPLKTKEEDFIGKEELIKRKANPQKKLVGLELNGKEIAGHGDCVHIGRSQVGIVTSGCLSSTLNKNIALCRIDVQYSEIGTEVEIGKIDVIKKG

SEQ ID NO: 107542 - protein, 72 aa, Unknown
  Bacterial polypetide isolated from the Sargasso Sea
MPQIKLDKTPLEMFHKEHGATMVEFAGYSMPLQYQLGIKREHLHTRSKSGLFDVSHMGQIRLKGEGVLKDLE

SEQ ID NO: 107543 - protein, 323 aa, Unknown
  Bacterial polypetide isolated from the Sargasso Sea
VMRVVRDTVGRHDTFNYACTAKYYEDMGYFGHINCSTNFNNALKKYDVKPRKGWIAINLFFNTAIDANNVASFDEPWSRPGDYVLFRALKDLTCASSACPCDIDAANGWNPTDIFVRTYAKDKKISKGVAFRVNTDSEPKLTRETGFHAKTSKLTKNFINYNGYWLANNYTSYGAVKEYTSCRESAIATDLSPLRKFEILGPDAENLMQYTLTRNVKKLSSGQVVYSAMCYENGCMIDDGTLMKFGQDNFRWIGGQEYGGEWLKEQAKKKNFKVWVKSSTDQIHNIAVQGPNSRKILEKFVWTPDTQPSIKDLEWFRLTIGRI

SEQ ID NO: 107544 - protein, 291 aa, Unknown
  Bacterial polypetide isolated from the Sargasso Sea
RNFIDARGFWLPNDYTKHGVVEEYNACRENAVLIDLSSLRKFEIIGPDAEELMNYTLTKNIKKLSVGQVVYSAMCYENGMMFDDGTLLRLSETGFRWICGDEYAGEWLKEVVKKKNYKVNIKNSTDQISNVSIQGPKSREILKKLIFTPPTQPSIDELEWFRFTICRIEELQGIPLIVSRTGYTGELGYELWCHPKHAPEVWDKLMKAGKDKGLIPAGFAALDKLRIEAGLILFGNEFDGQQDPFEAGIGFAVPLKTKEEDFIGKDILKERKSNPQKKLVGLELIGKEASG

SEQ ID NO: 107545 - protein, 47 aa, Unknown
  Bacterial polypetide isolated from the Sargasso Sea
SPTLNKSIALARVPAATGDRAEVEIRGKWYPVRVVRPGFVRNGKTLI

SEQ ID NO: 107546 - protein, 189 aa, Unknown
  Bacterial polypetide isolated from the Sargasso Sea
MIKKTPLYNLHIQHGAKMVEFAGYQMPIQYKSGIIQEHKFTRENAGIFDVSHMGQLFITGSDQLTDDLEKIFPVNLKNLKINQSKYSFLMNEQGGIYDDLIITKLKDGYLIILNAACKKQDFEIIKTKLDDKYELNLDESLSLIAIQGPKAKDVLGKAVSNITNLKFMNGGEFEYDNSIYLHNKIWLYW

SEQ ID NO: 107547 - protein, 129 aa, Unknown
  Bacterial polypetide isolated from the Sargasso Sea
MDLLKSPLHSKYVQSNAKLVNFAGWEMPISFSGLLKEHESVRSSAGLFDISHMGVISIKGINPKDYIQKFFPTNLYSFSEGQGLYTVMLNEKGGIIDDLIIYDLGIQENDITEVLLIVNASRYDIDFQW

SEQ ID NO: 107548 - protein, 271 aa, Unknown
  Bacterial polypetide isolated from the Sargasso Sea
VKKGFNIILNAACKNNDYKIFKSVLKNKYKLFLQDNLSLLALQGPKSSQILENLLKGVSSLKFMNGNSFLFEATDLNNSFTFKSLKSIYVTRSGYTGEDGFEISIPNNAVEEFARSLIKLGAKPAGLGARDTLRLEAGLCLYGHDINESTSPIEANLKWAISKRRIEEGGFSGYEKIKSDMNGSLARLRVGIKPEGKIIAREGVKVFSDDNNEIGSITSGTFGPSVNRSIAMGYVKINFSKPGTKVYLEVRGKKHEAKISELPFYKKSYVR

SEQ ID NO: 107549 - protein, 166 aa, Unknown
  Bacterial polypetide isolated from the Sargasso Sea
IWDAVWSAGQEFNITPMGFEALDMLRIEAGLVLGGNEFSDETDPFEAGIGFTVPLKTKEQNFIGKEALIKRKEHPQKKLVGLDIEGNEKVNHGDCVHSGRGQVGIITSGTFSPTLNKNIALCRLDIHSSELGTKLEVGKLDGHQKRIPATVVRFPFYDPDKSRVRS

SEQ ID NO: 107550 - protein, 89 aa, Unknown
  Bacterial polypetide isolated from the Sargasso Sea
MTNIYKSTENLLKTSLHSWHNVHGGKMINFGGWEMPLHYETGILKEHLVTRRYGGLFDVSHMGRFHIKGNDKTAYLQYVLSSNVASLQP

SEQ ID NO: 107551 - protein, 129 aa, Unknown
  Bacterial polypetide isolated from the Sargasso Sea
MTSPELLRTPLHAWHCENGGKMVPFGGWDMPVQYADGILSEHLATRRCGGLFDVSHMGRFRVEGGDTMAFLQRVLTNDASLLEPWQAQYTLIANENGGVIDDAYLYHPEGEFLIVVNASNRKKDWEHFQ

SEQ ID NO: 107552 - protein, 199 aa, Unknown
  Bacterial polypetide isolated from the Sargasso Sea
MEIKKTSLNKLHQDNQAKFVEFAGYEMPIQYSKGVIEEHKFTRAHAGIFDVSHMGQLFVYGNENLTSDLEKIFPLDLKNLQQNCSKYSFLMNEEAGVYDDLIITKLKDGYLIILNAACKEKDFEILSTKLSKKYKMELNTDRALVAIQGPKSVDILNEIINGVKDLTFMTGNWFEFNDQKVFVTRSGYTGEDGLKFDHK

SEQ ID NO: 107553 - protein, 121 aa, Unknown
  Bacterial polypetide isolated from the Sargasso Sea
IDFKQQRVFVTRSGYTGEDGFEISIINNLAEEFTQKLIDKGAQLIGLGARDTLRLEAGLCLYGHELDINKTPVEANLKWAISKERLSNGGFIGSKKIINQIQGGTSQIRVGIKPEGRLIAR

SEQ ID NO: 107554 - protein, 261 aa, Unknown
  Bacterial polypetide isolated from the Sargasso Sea
FCCFNAACKDSDIVHLRTLLEPDISIEEIENRALIALQGPASEAVLGEFNSQIAAMKFMDVETLSIAGAECWISRSGYTGEDGFEISIPSSAAELVTRSILSKDEVEFIGLGARDSLRLEAGLCLYGHDIDEATTPVEASLTWAIQKARRAHGERAGGFMGSEIISQQLEEGTDKKRVGFLPQTRAPMREGVEIFATETSKNVIGKITSGGFGPTVGYPIAMGYIASEFANSEDDLFGELRGKRVPVKVAKIPFVPLNFKR

SEQ ID NO: 107555 - protein, 293 aa, Unknown
  Bacterial polypetide isolated from the Sargasso Sea
KDLTIGTTACPSDIDACNSWNPTDIFVRTYDKNKEFSKSFAFRMKTDSEKKLTRNSGFYERTSKLTRNFVDARGFWLPNDYTKHGLVNEYNACRKDAVLIDLSSLRKFEIIGPDAEELMNYTLTRNIKKLSVGQVVYSAMCYENGMMFDDGTLLRLSETGFRWICGDEYAGEWLKEIAKKKNFNANVKNSTDQISNVSLQGPKSREILKKIIFTPPTQPSIDELGWFRFTICRIEELQGIPLIISRTGYTGELGYEIWCHPKHAPKVWDKLMEAGKDDGLIPAGFAALDKLRI

SEQ ID NO: 107556 - protein, 313 aa, Unknown
  Bacterial polypetide isolated from the Sargasso Sea
DSEKKLTRISGFYKKTSKLTRNFIDARGFWLPNDYTKHGVVEEYSACREKAVLIDLSSLRKFEVIGPDAEELMNYTLTRNIKKLSVGQIVYSAMCYENGMMFDDGTLFRLSETGFRWICGDEYAGQWLRDIARKKNYKVNIKDSTDQISNVSIQGPESRKILEKLIFTPPTQPSIAELEWFRFTICRIESLQGIPLIVSRTGYTGELGYEVWCHPKHAPEVWDKLMEAGKKEGLIPAGFAALDKLRIEAGLILFGNEFDGQQDPFEAGIGFAVPLKTKKDNFIGKKILVERKLNPQKKLVGLELIGKEASGHG

SEQ ID NO: 107557 - protein, 87 aa, Unknown
  Bacterial polypetide isolated from the Sargasso Sea
MTSHELLKTPLHAWHCENGGKMVPFGGWDMPVQYADGILSEHLATRRCGGLFDVSHMGRFRVEGRDTMAFLLRVLTNDASLWNQAGP

SEQ ID NO: 107558 - protein, 189 aa, Unknown
  Bacterial polypetide isolated from the Sargasso Sea
SRSGYTGEDGFEISMKDELTEEFATDLLKGDDVKLAGLGARDSLRLEGSLCLYGQDIKEDISPVEAGLTWAIQKSRREDGERGRNFPGAAVIYDQIRNGVEKVRIGLIPEGRAPVRGGVKLFKEQEGTSLIGEVTSGGYSPSLGHPISMGYLFSKTRNDFGDTIFAEVRGKLLPISVVDIPFVPNRFKR

SEQ ID NO: 107559 - protein, 273 aa, Unknown
  Bacterial polypetide isolated from the Sargasso Sea
KFEILGPDSEELMNYTLTRNVKKLSVGQVVYSSMCYENGTMFDDGTLLKMSDHGFRWICGDEYAGEWLKEQAKKKNYKVFIKNSTDQINNISLQGPNSRKILEKFIFTPPTQPSISELQWFRFTICRVKDLKGIPLIVSRTGYTGELGYEIWCHPLDAPKVWDQVMESGKDEGLIPAGFGALDLLRIEAGLILFGNEFDGQVDPFEAGVGFTVPLKTKTEDFIGKESLIKRKENPQKKLVGLELIGKEKANHGDCVHLERSQIGIITSGCISP

SEQ ID NO: 107560 - protein, 293 aa, Unknown
  Bacterial polypetide isolated from the Sargasso Sea
KKLSINQSKYSFLMKENGGIYDDLIITKIEDGYMVILNAACKENDLSIIKSKLDSKFELILRDDLSLVAIQGPESKDILEKIIPGVKKIKFMNGNKFSFNSVDIYITRSGYTGEDGFEISIKNNLVNKLVEKMIELGSNLIGLGARDTLRLEAGLCLYGHDINEETSPIEANLKWAISKNRINDEFTGAKEIKRQFDEGVKKLRVGIKPDSRVIARESTKIFDEKNNQIGKITSGTFGPSVNGPIAMGYVSNLFSKSNTRVFLEVRGKKIPASICDLPFYKKNYVKGEINVRS

SEQ ID NO: 107561 - protein, 221 aa, Unknown
  Bacterial polypetide isolated from the Sargasso Sea
AFRMKTDSEKKLTKNSGFYERTSKLTRNFIDARGFWLPNDYTKHGLVNEYNACRDKAVLIDLSSLRKFEILGPDAEELMNYTLTRNVKKLSVGQVAYSAMCYENGQMFDDGTIFKLSDHGFRWICGDEYSGEWLKEIAKKKNYKVVIKNSTDQISNVSIQGPNSRKILNKIIFTPPTQPSIDELQWFRFTICRVEDLQGIPLVISRTGYTGELGYEIWCHP

SEQ ID NO: 107562 - protein, 250 aa, Unknown
  Bacterial polypetide isolated from the Sargasso Sea
CKQNDLQIIKNKLNDQSLDINNDLSLVAIQGPESKTILENVVSNVSKLKFMNGDNFTFKNKEIYITRSGYTGEDGFEISLPNKVAISFVEELISKGSTLIGLGARDTLRLEAGLCLYGHDINENTSPVEANLKWAISKNRMNDNFTGSQKIKKQIEEGVSKLRVGIKPETRVIARESTKIFDEKNNEIGKVTSGTFGPSVNASIAMGYISNSHSKTDTKVYLEVRGKKVPANVCDLPFYKKSYVKGEANV

SEQ ID NO: 107563 - protein, 122 aa, Unknown
  Bacterial polypetide isolated from the Sargasso Sea
MGVQKTALYDLHKSLGAKFVPFAGYEMPIQYKDGIVKEHISTRTHAGFFDVSHMGQFFVEGDETLIEALEKIIPSDLKSLKVNHSKYSFLLNDNGGIIDDLIVTKTNKGFCIILNAACKEND

SEQ ID NO: 107564 - protein, 239 aa, Unknown
  Bacterial polypetide isolated from the Sargasso Sea
IAKCLDSESKYELRKDLSLIALQGPKSESILDFIVNGVKQLKFMNGNYFEFQGKKIYVTRSGYTGEDGFEISVPNTNAENFTKLLSNKGAKPIGLGARDTLRLEAGLCLYGHELNQDINPIQANLKWAISKRRREEGGFKGWESIKNDLQNGVSKIRVGIKPSGRIIAREGTKIFSSSGEEIGVITSGTFGPSVNSPVAMGYIKSKFSEINNKILLEVRGKKHDAVVSKLPFYKKSYVK

SEQ ID NO: 107565 - protein, 204 aa, Unknown
  Bacterial polypetide isolated from the Sargasso Sea
MGVSNLKFMTGNNFNFDNENLYITRSGYTGEDGFEISISNKKVEKLINFLISNGVKPIGLGARDTLRLEAGLCLYGHDLNEKINPIEANLKWAIAKKRKDVGGFNGWDKIKNLLTNGSEKIRVGIKPEGKVIARENTKIFSTDEKEIGLVTSGTFGPSVKAPVAMGYVKSNFAKVGTSIKLEVRGKKYEGKVSELPFYKKSYVK

SEQ ID NO: 107566 - protein, 308 aa, Unknown
  Bacterial polypetide isolated from the Sargasso Sea
MGFYEKTSKLTRNFVYARGFWLPNDYTKHGVINEYTACREKSVVIDLSSLRKFEILGPDAEELMNYTLTRNVKKLSVGQVVYSSMCYENGLMFDDGTLLKLSDHGFRWVCGDEYAGEWLKEQAKKKNYKVLIKNSTDQINNLSLQGPNSRKILEKFIFTPPTQPTISELQWFRFTICRIEDLNGIPLIVSRTGYTGELGYEIWCHPSDAPKVWDKVMEAGKDEGIIPAGFGALDLLRIEAGLILFGNEFDGQVDPFEAGVGFTVPLKTKTDDFIGKESLIKRKENPQKKLVGLELTGKEKQITVIVFI

SEQ ID NO: 107567 - protein, 174 aa, Unknown
  Bacterial polypetide isolated from the Sargasso Sea
FEISISNDKAENFVENLIEKGAQLIGLGARDTLRLEAGLCLYGHELDINKTPVEANLRWAISKSRLSNGDFIGSKKIMNQMQDGASQIRVGIKPEGRLIAREKTKIFDDTDTQIGEITSGTFGPSVNGPIAMGYVNKDFSKVDTKILLEVRGKKHPANVCALPFYKKNYVKGVN

SEQ ID NO: 107568 - protein, 291 aa, Unknown
  Bacterial polypetide isolated from the Sargasso Sea
CNSWNPTDIFVRTYDGKKEFKRSFAFRMKTDSEKKLTKHSGFYERTSKLTRNFVDARGFWLPNDYTKNGLVNEYNACREKAVLIDLSALRKFEILGPDAEELMNYTLTRNVKKLSIGQVVYSAMCYENGMMFDDGTLLKLSDTGYRWICGDEYGGEWLKEVAKKKNFKVIIKNSTDQISNVSIQGPNSRKILNKIIFTPPTQPTIDELQWFRFTICRMDDLNGIPLVISRTGYTGELGYEVWCHPKDAPKVWDKLMDAGKNDGLIPAGFAALDKLRIEAGLILFGNEFDGQ

SEQ ID NO: 107569 - protein, 110 aa, Unknown
  Bacterial polypetide isolated from the Sargasso Sea
MTSPELLKTPLHAWHCENGGKMVPFGGWDMPVQYADGILSEHLATRRCGGLFDVSHMGRFRVEGRDTMAFLQRVLTNDASLLEPWQAQYTLIANENGEVIDDAYLYHPEA

SEQ ID NO: 107570 - protein, 237 aa, Unknown
  Bacterial polypetide isolated from the Sargasso Sea
MDLLKSPLYSKYVESNAKLVDFAGWEMPISFSGLIKEHESVRSSAGLFDISHMGVISIKGINPKDYIQKLFPTNLYSFSAGQGLYTVMLNDKGGIIDDLIIYDLGIQENDISELLLIVNASRYEEDFQWIKNNLNMSEISITNFKKDKVLLALQGKNSFNLFEEWIESSISHIPNFGCEYKIFEHISPKEKIFFSKTGYTGENGLEILLSKKAATNLWDFSISKNVAPCGLGAQRYS

SEQ ID NO: 107571 - protein, 212 aa, Unknown
  Bacterial polypetide isolated from the Sargasso Sea
METKKTSLYQLHQDCKAKFVEFAGYQMPIQYSEGIVEEHKFTRNHSGIFDVSHMGQLFIYGGEELIKDLEKIFPLDLKNLKLNHSKYSFLMDKDAGIQDDLIITKIDEGFLIILNAACKDNDFKILKELLKEKYKMVLDESRSLIAIQGPKSSQILNDVIDGVKDLNFMSGNWFLFDNQKVYITRSGYTGEDGFEISIQNNFAEKLTRELID

SEQ ID NO: 107572 - protein, 287 aa, Unknown
  Bacterial polypetide isolated from the Sargasso Sea
SKLTRNFVDARGFWLPNDYTKHGLVNEYNACRNDAVLIDLSSLRKFEIIGPDAEELMNYTLTRNIKKLSVGQVVYSAMCYENGMMFDDGTLLRLSETGFRWICGDEYGGEWLKEIAKKKNFNAIVKNSTDQISNVSLQGPKSREILKKIIFTPPTQPSIDELGWFRFTICRIEELQGIPLIVSRTGYTGELGYEVWCHPKHAPEVWDKLMEAGKDDGLIPAGFAALDKLRIEAGLILFGAEFDGEQDPFEAGIGFAVPLKTKEENFIGKEELTKRKANPQKKLVGLE

SEQ ID NO: 107573 - protein, 261 aa, Unknown
  Bacterial polypetide isolated from the Sargasso Sea
KLTRNFIDARGFWLPNDYTKHGVVEEYNACREKAVLIDLSSLRKFEIIGPDAEELMNYTLTRNIKKLAVGQVVYSAMCYENGMMFDDGTLLRLSETGFRWICGDEYGGEWLKEIAKKKNFKVNVKNSTDQISNVSIQGPKSREILKKLIFTPPTQPTIEELEWFRFTICRVENLQGIPLIVSRTGYTGELGYEVWCHPKHASNVWDKLMEAGKDEGLIPAGFAALDKLRIEAGLILFGNEFDGQQDPFEAGIGFAVPLKTK

SEQ ID NO: 107574 - protein, 210 aa, Unknown
  Bacterial polypetide isolated from the Sargasso Sea
FRKISNHNINSLKFYHFCYVSINGIDLMISRTGYTGELGYELYVKSDKLVELWKYIINEGKNLGIEPVGLGCRDTLRMEMNYLLYGSDINEKTNPIEAGLKWITKFEEKEFIGKNNLKKLYKTPFKKLICIEMKERAIPRNGNSIYYNNDLIGEVTSGTMSPSLKKGICLGYIYSKQSQIGTNLLIDIRGKKKKGCIVDPPFYKNGSLMN

SEQ ID NO: 107575 - protein, 212 aa, Unknown
  Bacterial polypetide isolated from the Sargasso Sea
MIIKKTSLNNLHQKYRAKLVEFAGYEMPIQYKDGIVQEHKFTRSNSGVFDVSHMGQLFVSGHEDLAHDLEKIFPANLQSLNLNQSKYSFLMNDNGGIQDDLIITKTKDGFLIILNAACKLNDYEIIKSKLKNKYKIKLDETLSLVAIQGPDAKNILDKIIPGCNDLKFMNGNNYNFEGSNIYITRSGYTGEDGFEISIKNEKAENFVEKLIE

SEQ ID NO: 107576 - protein, 286 aa, Unknown
  Bacterial polypetide isolated from the Sargasso Sea
MGQLFITGSDDLINELEKIFPTDLKNLSINKSKYSFLMNDNAGIHDDLIITKVKNGFMIILNAACKENDLKIIEKKLDKKFDLKIREDLSLVALQGPEAKNVLEKIIPQTNNLKFMHGNSFTFKDISIYITRSGYTGEDGFEISIDNSKVESLVEILLNSGSKLIGLGARDTLRLEAGLCLYGHDLNEKISPIEANLKWAIPKSRINSIFPGSNIIKKQIDEGVEKIRVGIKPATKVIAREKTKIFDQNDKLIGNVTSGTFGPSVQGPICMGYVSNDHSSLNTKFI

SEQ ID NO: 107577 - protein, 162 aa, Unknown
  Bacterial polypetide isolated from the Sargasso Sea
VEKFIDFLIKHNVKPIGLGARDTLRLEAGLCLYGHDLNEKINPIEANLKWAIAKNRKETGGFNGWEKIKKLLENGCEKTRVGIKPDGKIIARENTKIFSIDDKEIGFITSGTFGPSVNAPVAMGYLNSDFTAVGTKIQLEVRGKKYGGKVTELPFYKKSYVK

SEQ ID NO: 107578 - protein, 269 aa, Unknown
  Bacterial polypetide isolated from the Sargasso Sea
SENKLTRNTGFYERTSKLTRNFVDARGFWLPNDYTKHGVINEYNACREDAVLIDLSSLRKFEILGPDAEELMNYTLTRNVKKLSVGQIVYSAMCYENGTMFDDGTLLKLSDHGFRWVCGDEYGGEWLKEQAKKKNYKAHIKNSTDQINNLSLQGPKSRKILEKIIFTPPTQPSISELEWFRFTICRLEELNGIPLIVSRTGYTGELGFEIWCHPSDAPTVWDKVMEAGKDEGLIPAGFAALDLLRIEAGLILFGNEFDGQQDPFEAGIG

SEQ ID NO: 107579 - protein, 137 aa, Unknown
  Bacterial polypetide isolated from the Sargasso Sea
MGGEDGEQAVETTPLHDCHVAAGAKMVPFAGYAMPLNYPAGIIAEHLHTREKASLFDVSHMGQISIWGDGAAHALESLVPGDIIGLQTWRSRYTQFTNNNGGIIDDLIVTNASGRLMLVVNADHKHADLNHLETTFS

SEQ ID NO: 107580 - protein, 173 aa, Unknown
  Bacterial polypetide isolated from the Sargasso Sea
EISIVNDFVDQLTRELINKGSKLIGLGARDTLRLEAGLCLYGHDLDKNKTPVEANLKWAISKERISKGDFIGSDIIIKQLNDGVSKIRVGIKPEGRIIAREKTKIFNQSDIHIGEITSGTFGPSVNGPVAMGYVENEFSKKNTKVFLEVRGKKHPASICSLPFYKKSYVKGVN

SEQ ID NO: 107581 - protein, 295 aa, Unknown
  Bacterial polypetide isolated from the Sargasso Sea
SAMCYDNGCMVDDGTLLKFGQDIFRWVGGQEYGGEWLKEQAKKKNFKVWVKSSTDQIHNIAVQGPNSRKILKKFVWTPDTQPSIDDLQWFRLTIARIDSVTGTPIVISRTGYTGELGFEIWCHPKDASTVWDKVWEAGKEFNISPLGLEALDMLRIEAGLIFYGYEFDDKTDPFEAGIGFTVPLKTKEDDFIGKEELIKRKNNPQKKLVGLELVGHEPATNGNSVHIGRGQVGIITSAMLSKTLNKNIALCRIDSKYSEIGTEVEVGKIDGHQKRIPAKVIQFPFYDPQKLKVKA

SEQ ID NO: 107582 - protein, 194 aa, Unknown
  Bacterial polypetide isolated from the Sargasso Sea
GNNFNYDGENLYITRSGYTGEDGFEISISNKKVEKLINFLISNDVKPIGLGARDTLRLEAGLCLYGHDLNEKINPIEANLKWAIAKKRKDVGGFNGWDKIKILLTNGSEKIRVGIKPEGKVIARENTKIFSADDSEIGLVTSGTFGPSVNAPVAMGYVKSNFAEIGTPIKLEVRGKKYQGKVSELPFYKKNYVK

SEQ ID NO: 107583 - protein, 186 aa, Unknown
  Bacterial polypetide isolated from the Sargasso Sea
MEIQKTALYNYHKNLGAKFVPFAGYEMPIQYKEGIVKEHISTRTHAGFFDVSHMGQFFLEGDETLIESLEKIIPADLKNLKINHSKYSFLLNNEGGIIDDLIITRTEKGFCIILNAACKENDIKQISQFLKDNHKHLLNNNLSLIALQGPKSVEILDKLIPGVANLKFITGNNFDYDGEKLYVTRS

SEQ ID NO: 107584 - protein, 252 aa, Unknown
  Bacterial polypetide isolated from the Sargasso Sea
WIGGEDFGGEWLRQQAAKLGMKVWIKSASEQIHNIAVQGPLSRTLLSQMIWTPATQPTLEELGWFRFLIGRLNDYDGPPVMVSRTGYTGELGYEIWCHPDHAMQVWQRLWQLGEPLGLAPLGLHALDMLRIEAGLIFAGYEFSDQTDPFEAGIGFCVPLKSKQDDFIGRAALLRRKEHPQQRLVGLELDGNEPAAHGDCVHVGRAQVGVVTSATRSPSLGKNIALCRLAVDYCEPGTRVEISKLDGQQKRIG

SEQ ID NO: 107585 - protein, 98 aa, Unknown
  Bacterial polypetide isolated from the Sargasso Sea
MLHTPLFELCREAGGRMVPFAGWEMAVQFEGLMAEHRAVRQRSGVFDISHMGVLTLRGSGVKDKLQGLVPSDLQRIGPGEAQYTVLLNETGGIRDDLI

SEQ ID NO: 107586 - protein, 307 aa, Unknown
  Bacterial polypetide isolated from the Sargasso Sea
NTSAGGLNSVLSDESFARPGDYVLFKALKDITCGTSACPSDIDACNSWNPTDIFVRTYDKKKEFKKSFAFRMKTDSEKKLTKNSGFYERTSKLTRNFIDARGFWLPNDYTKHGLVNEYNACRDKAVLIDLSSLRKFEILGPDAEELMNYTLTRNVKKLSVGQVAYSAMCYENGQMFDDGTVFKLSDHGFRWICGDEYGGEWLKEIAKKKNYKVVIKNSTDQISNVSIQGPNSRKILNKIIFTPPTQPSIDELQWFRFTICRVEDLQGIPLVISRTGYTGELGYEVWCHPKDAPKVWDKLMEAGEKDG

SEQ ID NO: 107587 - protein, 323 aa, Unknown
  Bacterial polypetide isolated from the Sargasso Sea
KMTKETGFHKKTSKLTRNFIDYNGYWLANNYTKYGTIKEYNSCREKAIAIDLSPLRKFEINGPDAESLMQYALTRNVKKLSIGQVSYSAMCYENGCMIDDGTIFRLGKENFRWIGGQEYGGTWLRELAKKKNYNAWVRSSTDQIHNISVQGPNSRKILEKFFWSSPLQPTLNELQWFRFSIGRIGNEMGTPIIISRTGYTGELGFEVWCHPKDASEVWDKVWENGKDLGIVPMGLEALDMVRIEAGLIFYGYEFDDQVDPFEAGIGFAVALKTKEDDFVGKESLIKRKSSPQKKLVGLELIGKEQANHGDCVHVGKAQIGIIT

SEQ ID NO: 107588 - protein, 280 aa, Unknown
  Bacterial polypetide isolated from the Sargasso Sea
NSVTSDESYARPGDYVIFKALKDLTCGTTACPSDIDSCNGWNPTDIFVRTYEKSKEFTKSYGFRMKTDSENKLTRNTGFYERTSKLTRNFVDARGFWLPNDYTKHGVINEYNACREDAVLIDLSSLRKFEILGPDAEELMNYTLTRNVKKLSVGQIVYSAMCYENGTMFDDGTLLKLSDHGFRWICGDEYGGEWLKEQAKKKNYKVHIKNSTDQINNLSLQGPKSRKILEKIIFTPPTQPSILELEWFRFTICRLEELNGIPLIVSRTGYTGELGFEIWC

SEQ ID NO: 107589 - protein, 191 aa, Unknown
  Bacterial polypetide isolated from the Sargasso Sea
MDLLKSPLYSKYVEANAKLVDFAGWEMPISFSGLIKEHESVRSSAGLFDISHMGVISIKGINPKDYIQKLFPTNLYSFSEGQGLYTVMLNDKGGIIDDLIIYDLGIQENDISELLLIVNAIRYEEDFQWIKNNLNKYEISITNFKKDKVLLALQGKNSFDLFEEWIESSISHIPNFGCEYKIFEHISPKEK

SEQ ID NO: 107590 - protein, 267 aa, Unknown
  Bacterial polypetide isolated from the Sargasso Sea
DLSSLRKFEIIGPDAEELMNYTLTRNIKKLSVGQIVYSAMCYENGTMFDDGTLLRLSETGFRWVCGDEYAGEWLKEQAKKKNFKVIIKNSTDQINNISVQGPNSRKILEKIIFTPPTQPTISELQWFRFTICRLEELNGIPLIVSRTGYTGELGYEVWCHPDHAPQVWDKVMEAGKDDGIIPAGFGALDLLRIEAGLVLFGNEFDGQQDPFEAGIGFAVPLKTKTDDFIGKESLIKRKETPQKKLVGLELIGKEKANHGDCVHMEEH

SEQ ID NO: 107591 - protein, 259 aa, Unknown
  Bacterial polypetide isolated from the Sargasso Sea
ACREKAVLIDLSSLRKFEIIGPDAEELMNYTLTRNIKKLSVGQVVYSAMCYENGMMFDDGTLLRLSETGFRWICGDEYSGEWLKEIAKKKNYKVNIKNSTDQISNVSIQGPKSREILKKIIFTPPTQPSIDELEWFRFTICRVEELQGIPLIVSRTGYTGELGYEIWCHPKHAPEVWDKLMAAGKDEGLIPAGFAALDKLRIEAGLILFGNEFDGQQDPFEAGIGFTVPLKTKEGDFIGKEVLKERKVNPQKKLVGLEL

SEQ ID NO: 107592 - protein, 306 aa, Unknown
  Bacterial polypetide isolated from the Sargasso Sea
SFLYTSAGGLNSVTSDESYARPGDYVIFKALKDLTCGTTACPSDIDSCNGWNPTDIFVRTYEKSKEFTKSYGFRMKTDSENKLTRNTGFYERTSKLTRNFVDARGFWLPNDYTKHGVINEYNACREKAVLIDLSSLRKFEILGPDAEELMNYTLTRNVKKLSVGQIVYSAMCYENGTMFDDGTLLKLSDHGFRWVCGDEYGGEWLKEQAKKKNYKVHVKNSTDQINNLSLQGPKSRKILEKIIFTPPTQPSISELEWFRFSICRLEELNGIPLIVSRTGYTGELGFEIWCHPSDAPTVWDKVMEAR

SEQ ID NO: 107593 - protein, 211 aa, Unknown
  Bacterial polypetide isolated from the Sargasso Sea
MNIKKTALYELHKKHNAKFVEFAGYSMPIQYSEGIVKEHNITRNKSGIFDVSHMGQLIIKYSDDITDKLQEILPTDLKNLKINQSKYSFLMKENGGIYDDLIITRKKDHYMIILNAACKQNDLQIIKNKLNDLNLDINNDLSLIAIQGPESKIILENVVSNVSKLKFMNGGDFYFKDNEIFITRSGYTGEDGFEISLPNKVAIPFVEELIS

SEQ ID NO: 107594 - protein, 257 aa, Unknown
  Bacterial polypetide isolated from the Sargasso Sea
LNAACKENDLLIIKSKIDSQFQLNLRNDLSLIAIQGPESKDILEKIIPGVNKLKFMNGSKFNFNSEKIYITRSGYTGEDGFEISIKNNIVNELVEKMIQLGSSLVGLGARDTLRLEAGLCLYGHDINEETSPIEANLKWAIPKSRINDEFTGATEIKKQFEKGVNRLRVGIKPDTRVIAREFTKIFDNKNNEIGKITSGTFGPSVNSPIAMGYVSNIFSKSNTKVFLEVRGKKIPASICDLPFYKKNYVKGEINDRS

SEQ ID NO: 107595 - protein, 113 aa, Unknown
  Bacterial polypetide isolated from the Sargasso Sea
MKNFHQNNGAKILPFAGFNMPINYKTGIINEHKNVRNHSGIFDVSHMGQILIENNNSYLHKLEKYIPLQLKKLIKNRSHYSFLLNKDGGVIDDLIISNIDIKDKSYLYIVYNA

SEQ ID NO: 107596 - protein, 114 aa, Unknown
  Bacterial polypetide isolated from the Sargasso Sea
MTSPELLKTPLHGWHCENGGKMVPFGGWDMPVQYADGILSEHLATRRSGGLFDVSHMGRFRVEGRDTMTFLQRVLTNDASLLEPWQAQYTLIANENGGVIDDAYLYHLEGEFLI

SEQ ID NO: 107597 - protein, 314 aa, Unknown
  Bacterial polypetide isolated from the Sargasso Sea
NLNDSMKKYGVKKKKGWHAINLFFNTSSGGQNSVTSDESYARPGDYVIFKALKDLTCGTTACPSDIDSCNGWNPTDIFVRTYEKSKEFTKSYGFRMKTDSENKLTRNTGFYERTSKLTRNFVDARGFWLPNDYTKHGVINEYNACREDAVLIDLSSLRKFEILGPDAEELMNYTLTRNVKKLSVGQIVYSAMCYENGTMFDDGTLLKLSDHGFRWVCGDEYGGEWLKEQAKKKNYKVHIKNSTDQINNLSLQGPKSRKILEKIIFTPPTQPSISELEWFRFTICRLEELNGIPLIVSRTGYTGELGFEIWCHPK

SEQ ID NO: 107598 - protein, 192 aa, Unknown
  Bacterial polypetide isolated from the Sargasso Sea
MNIKKTALYELHKKHNAKFVEFAGYSMPIQYSEGIVKEHNITRNKSGIFDVSHMGQLFIKYSNDITDKLQEILPTDLKNLKINQSKYSFLMKENGGIYDDLIITRMKDQYMIILNAACKQNDLQIIKNTLDDQNLDMNNNLSLVAIQGPESKTILENVVSNVSKLKFMNGENFTFKNNEIYITRSGYTGEDG

SEQ ID NO: 107599 - protein, 314 aa, Unknown
  Bacterial polypetide isolated from the Sargasso Sea
ALKDITVGTSACPSDIDACNSWNPTDIFVRTYDGKKEFKKSFAFRMKTDSEKKLTKHSGFYERTSKLTRNFVDARGFWLPNDYTKSGITNEYNACREKAVLIDLSALRKFEILGPDAEELLNYTLTRNIKKLSVGQVVYSAMCYENGMMFDDGTLLKLSDTGYRWICGDEYGGEWLKQIAKKKNYKVIIKNSTDQISNVSIQGPNSRKILNKLIFTPPTQPTIDELQWFRFTICRMDDLNGIPLLISRTGYTGELGFEVWCHPKDAPKVWDKLMDAGKEDGLMPAGFAALDKLRIEAGLILFGNEFDGQPRSLS

SEQ ID NO: 107600 - protein, 323 aa, Unknown
  Bacterial polypetide isolated from the Sargasso Sea
DLICASSACPCDVDPANGWNPTDIFVRTYPKEQKYSKAIAFRMKEDSEPKLTKETGFHKKTSKLTRNFVDYNGYWLANNYTNYGTIKEYTACREKAIAIDLSPLRKFEIVGPDSENLMQHALTRNVKKIAIGQVSYSAMCYENGCMIDDGTIFRLGKDNFRWIGGQEYGGTWLRELAKKKNYKAWVKSSTDQIHNISVQGPNSRKILEKFVWTAPAQPTIKELQWFRFSIARIDDHVGIPIIVSRTGYTGELGFEIWCHPNDASKVWEKVFEHGKDLGITPMGLEGLDMVRIEAGLIFYNYEFNDQTDPFEAGIGFSVPLKTK

SEQ ID NO: 107601 - protein, 269 aa, Unknown
  Bacterial polypetide isolated from the Sargasso Sea
GKVVYSAMCYENGMMFDDGTLLRLSETGFRWICGDEYSGEWLKEIAKKKNYKVSIKNSTDQISNVSIQGPKSREILKKIIFTPPTQPSIDELEWFRFTVCRVEELQGIPLIVSRTGYTGELGYEIWCHPKHAPEVWDKLMVAGKDDGLIPAGFAALDKLRIEAGLILFGNEFDGQQDPFEAGIGFAVPLKTKEEDFIGKEVLKERKINPQKKLVGLELIGKEASGHGDCVHVGRSQVGVITSGCLSTTLNKNIALCRIDTQYSSEGTEV

SEQ ID NO: 107602 - protein, 311 aa, Unknown
  Bacterial polypetide isolated from the Sargasso Sea
FEILGPDAEELMNYTLTRNVKKLSVGQIVYSAMCYENGTMFDDGTLLKLSDHGFRWICGDEYGGEWLKEQAKKKNYKVHIKNSTDQINNLSLQGPKSRKILEKIIFTPPTQPSILELEWFRFTICRLEELNGIPLIVSRTGYTGELGFEIWCHPSNATTVWDKVMEAGKDEGLIPAGFAALDLLRIEAGLILFGNEFDGQQDPFEAGIGFSVPLKSKTEDFIGRENLIKRKENPQKKLVGLELIGKEIANHGDCVHIGRSQVGIITSGCISPTLNKNIALCRIDVGHSELGNEVEIGKIDGHQKRIPAKIV

SEQ ID NO: 107603 - protein, 127 aa, Unknown
  Bacterial polypetide isolated from the Sargasso Sea
SSMCYENGFTFDDGTLLKLSDHGFRWVCGDEYAGEWLKEQAKKKNYKVLIKNSTDQINNISLQGPNSRKILEKFIFTPPTQPTICELQWFRFTICRVEDLNGIPLIVSRTGYTGELGYEIWCHPSDA

SEQ ID NO: 107604 - protein, 268 aa, Unknown
  Bacterial polypetide isolated from the Sargasso Sea
LTRNIKKLAVGQVVYSAMCYENGMMFDDGTLLRLSETGFRWICGDEYGGEWLKEIAKKKNFKVNVKNSTDQISNVSIQGPKSREILKKMIFTPPTQPSIDELEWFRFTICRIENLQGIPLIVSRTGYTGELGYEVWCHPSHASDVWDKLMEAGKNEGMIPAGFAALDKLRIEAGLILFGNEFDGQQDPFEAGIGFAVPLKTKDEDFIGKEVLKERKANPQKKLVGLELIGKEAAGHGDCVHVGRSQVGVITSGCLSTTLNKNIALCRI

SEQ ID NO: 107605 - protein, 78 aa, Unknown
  Bacterial polypetide isolated from the Sargasso Sea
METQKTTLYEYHKSLGAKFVPFAGYEMPVQFSSGIVDEHKLTRSSAGMFDVSHMGQLSLEGNEELATELEKIIPIDLK

SEQ ID NO: 107606 - protein, 156 aa, Unknown
  Bacterial polypetide isolated from the Sargasso Sea
MHLSLPQRFVSDSPPVRTALYACHLESEAKMVDFHGFELPIWYSSIQEEHLACRSSAGMFDVSHMGFFSFRGDKVRQWLESISTQRVSSFAPGRCGYTHFLDHEGQIIDDMIFAIKSDDCVLGVPNASMVPTMWKWFSELLPDDGSVTVENLSDET

SEQ ID NO: 107607 - protein, 290 aa, Unknown
  Bacterial polypetide isolated from the Sargasso Sea
DLSALRKFEIIGPDAEELMNYTLTRNIKKLAVGQVVYSAMCYENGMMFDDGTLLRLSETGFRWICGDEYGGEWLKEIAKKKNFKVNVKNSTDQISNVSIQGPKSREILKKMIFTPPTQPSIDELEWFRFTICRIENLQGIPLIVSRTGYTGELGYEVWCHPSHASDVWDKLMEAGKNEGMIPAGFAALDKLRIEAGLILFGNEFDGQQDPFEAGIGFAVPLKTKDEDFIGKEVLKERKANPQKKLVGLELIGKEAAGHGDCVHVGRSQVGVITSGCLSTTLNKNIALCRI

SEQ ID NO: 107608 - protein, 122 aa, Unknown
  Bacterial polypetide isolated from the Sargasso Sea
MEKTALYNFHKNLGAKFVAFAGYEMPIQYKDGIVKEHISTRQTAGFFDVSHMGQLFISGSKSLEQNLEKIIPLDFKEIKINQSKYSFLINDKGGVIDDLIITRVDGGFNIILNAACKDNDTK

SEQ ID NO: 107609 - protein, 289 aa, Unknown
  Bacterial polypetide isolated from the Sargasso Sea
VVGIAEGRVRYSMFLNETGGVLDDLMIARLDGMLQLVVNAGRAEQDIAHLEANLAASVDMTVRRERALLALQGPAAPDVLARLGVDLDGFFFMQVGHFDIAGIPCIITRSGYTGEDGFEISIPVEAAQTLAERLVADEDVSLAGLGARDTLRLEAGLPLWGHELDETINPVAAGLRFTLSKRRREAGDFPGAGLVMQDFTKGAPRVLTGLLPQGGRPVRDGAELALDGNIVGHVTSGGFAPSLDAPAALGFVDAALATPGTEIMAVVRGRETPVFTAALPLVPHRYIRG

SEQ ID NO: 107610 - protein, 291 aa, Unknown
  Bacterial polypetide isolated from the Sargasso Sea
MCYENGCMIDDGTIFRLAKDNFRWIGGQEYGGTWLRELAKKKNYKVWVKSSTDQIHNISVQGPNSRKILEKFVWTPPTQPTINELQWFRFAIARIDDHIGIPIIVSRTGYTGELGYEIWCHPKDASTVWDKVFDHGKDLGIIPMGLEGLDMVRIEAGLIFYGYEFNDQTDPFESGIGFSVPLKTKEDDFVGKESLIKRKASPQKKLVGLELIGKEQAINGDGVHVGRATVGVVTSGMISPILNKNIALCRMDVKYSEIGTKVEIGKIDGHQKRIGAKVVKFPFYDPDKTKV

SEQ ID NO: 107611 - protein, 224 aa, Unknown
  Bacterial polypetide isolated from the Sargasso Sea
VDARGFWLPNDYTKHGVVNEYTACREKAVIVDLSSLRKFEILGPDSEELMNYTLTRNIKKLSVGQVVYSSMCYENGLMFDDGTLFKMSDHGFRWICGDEYAGEWLKEQAKKKNYNVLIKNSTDQINNISLQGPNSRKILEKFIFTPPTQPSVSELEWFRFTICRVKELNGIPLIVSRTGYTGELGYEIWCHPSDAPKVWDVVTEHGKNEGLIPAGFAALDFVKN

SEQ ID NO: 107612 - protein, 111 aa, Unknown
  Bacterial polypetide isolated from the Sargasso Sea
MFFHRMPSARNMEGGLIRTSLFDSHVSAGAKMVDFHGYELPIWYSSIQEEHMQTRRSAGLFDVSHMGLFRFRGEGVRSWLSEVSTQNYMKFQPGRCGYCHFLDYDGKIIDD

SEQ ID NO: 107613 - protein, 300 aa, Unknown
  Bacterial polypetide isolated from the Sargasso Sea
FIFYTSAGGLNSVISDESYSRPGDYVMFKALKDLTIGTTACPSDIDPCNSWNPTNIFVRTYDKNKEFRKSFGFRMKTDSENKLTRNSGFYERTSKLTRNFVDARGFWLPNDYTKHGLVNEYNACRNDAVLIDLSSLRKFEIIGPDAEELMNYTLTRNIKKLSVGQVVYSAMCYENGMMFDDGTLLRLSETGFRWICGDEYGGEWLKEIAKKKNFNAIVKNSTDQISNVSLQGPKSREILKKIIFTPPTQPSIDELGWFRFTICRIEELQGIPLIVSRTGYTGELGYEVWCHPKHAPRSLG

SEQ ID NO: 107614 - protein, 217 aa, Unknown
  Bacterial polypetide isolated from the Sargasso Sea
QGPKSVEILEKLIPGVSSLKFMTGNKFNYDSENLYITRSGYTGEDGFEISISNKKVEKLINFLISNEVKPIGLGARDTLRLEAGLCLYGHDLNEKINPIEANLKWAIAKKRKDVGGFNGWDKIKNLLTKGSEKIRVGIKPEGKVIARENTKIFSTEDNEIGLVTSGTFGPSVNAPVAMGYVKSNFAKVGTAIKLEVRGKKYGGKVSELPFYKKSYVK

SEQ ID NO: 107615 - protein, 104 aa, Unknown
  Bacterial polypetide isolated from the Sargasso Sea
MEKTALYNFHKNSGAKFVPFAGYEMPIQYKDGIVKEHINTRQSAGFFDVSHMGQFFVSGGRSTELSLEKIIPLDFKEIKMNQSKYSFLINDEGGVIDDLIYNKS

SEQ ID NO: 107616 - protein, 301 aa, Unknown
  Bacterial polypetide isolated from the Sargasso Sea
MNYTLTRNIKKLSVGQVVYSAMCYENGMMFDDGTLLKLSETGFRWICGDEYAGEWLKEIAKKKNFNANIKNSTDQISNVSLQGPKSREILKKIIFTPPTQPSIDELGWFRFTICRIEELQGIPLIISRTGYTGELGYEIWCHPKHAPEVWDKLMEAGKDDGLIPAGFAALDRLRIEAGLILFGNEFDGQQDPFEAGIGFAVPLKTKEEDFIGKEELIKRKANPQKKLVGLELVGKEIAGHGDCVHIGRSQVGIVTSGCLSSTLNKNVALCRIDLQYSEIGTEVEVGKIDGHQKRINAKVVG

SEQ ID NO: 107617 - protein, 280 aa, Unknown
  Bacterial polypetide isolated from the Sargasso Sea
GLNSVISDESYSRPGDYVMFRALKDLTIGTTACPSDIDPCNSWNPTNIFVRTYDKNKEFKKSFGFRMKTDSENKLTRNSGFYERTSKLTRNFVDARGFWLPNDYTKHGLVNEYNACRNDAVLIDLSSLRKFEIIGPDAEELMNYTLTRNIKKLSVGQVVYSAMCYENGMMFDDGTLLRLSETGFRWICGDEYGGEWLKEIAKKKNFNAIIKNSTDQISNVSLQGPKSREILKKIIFTPPTQPSIDELNWFRFTICRIEELQGIPLIVSRTGYTGELGYEV

SEQ ID NO: 107618 - protein, 261 aa, Unknown
  Bacterial polypetide isolated from the Sargasso Sea
MGFYKRTSKLTRNFVDARGFWLPNDYTKHGIINEYTACREKSVVIDLSSLRKFEILGPDAEELMNYTLTRNIKKLSVGQVVYSSMCYENGFMFDDGTLLKLSDHGFRWVCGDEYAGEWLKEQAKKKNYKVLIKNSTDQINNISLQGPNSRKILEKFIFTPPTQPTISELQWFRFTICRVEDLNGIPLIVSRTGYTGELGYEIWCHPSDAPKVWDKVMEAGKDEGIIPAGFGALDLLRIEAGLILFGNEFDGQVDPFEAGVG

SEQ ID NO: 107619 - protein, 190 aa, Unknown
  Bacterial polypetide isolated from the Sargasso Sea
MGVQKTALYDLHKSLGAKFVPFAGYEMPIQYKDGIVKEHISTRTHAGFFDVSHMGQFFLEGDETLVESLEKIIPSDLKSLKVNHSKYSFLLNESGGIIDDLIVTKTNKGFCIILNAACKENDIKHISKFLDKNHKYFLNNDLSLIALQGPKSVEILEKLIPGVSELKFMSGNNFSYDSESLYITRSGYTG

SEQ ID NO: 107620 - protein, 269 aa, Unknown
  Bacterial polypetide isolated from the Sargasso Sea
GVIDDLIIPRVENGFNIILNAACKDNDIKEITKCLNSESKYELRKDLSLIALQGPKSETILETIIKGVKELKFMNGNYFEFLDKKIYITRSGYTGEDGFEISVPNSIVENLIKLLTDKNAKPIGLGARDTLRLEAGLCLYGHELNQKINPIQANLKWAISKKRRETGGFKGWENIKKDLQNGVSKIRVGIKPAGKIIAREGTKIYSNTGQEIGVITSGTYGPSVNSPVAMGYVKSKFSEIDNKILIEVRGKRHEGTISKLPFYKKSYVK

SEQ ID NO: 107621 - protein, 309 aa, Unknown
  Bacterial polypetide isolated from the Sargasso Sea
CVSSACPDDTSPANGWQPTDIHVRIYPEKNNFTKAITTRMTPDSDAKLTQETAFHPRTSALTRNFTEYRGYWLPTCFRNKGAVEEYYACREKAILTDLSPLRKFEVLGPDAEALLQWTLTRNVRKLAVGQVVYSSMCYPNGGMMDDGTLLRLGQDNFRWIGGDDYGGIWLREQAQKLGLKVWVKSSTDQIHNIAVQGPKSREILKEVVWTPPTQPKLEEITWFRFTVGRIGDMNGIPIMVSRTGYTGELGYEVWCHPKDAAEVWDAVWESGQAHEIMPLGLDALDLLRIESGLVFAGYEFSDETDPLKQ

SEQ ID NO: 107622 - protein, 182 aa, Unknown
  Bacterial polypetide isolated from the Sargasso Sea
VTRSGYTGEDGFEISISNKKVEKLIDYLISNEVKPIGLGARDTLRLEAGLCLYGHDLNEKINPVEANLKWAIAKKRKEVGGFNGWEKIKNLLANGSEKIRVGIKPDGKVIARENTKIFSSNNDEIGFVTSGSFGPSVNASVAMGYVKSEYSEIGTSIQLEVRGKKYGGKISELPFYKKSYVK

SEQ ID NO: 107623 - protein, 72 aa, Unknown
  Bacterial polypetide isolated from the Sargasso Sea
MEEILNFQTLIYSLQDQDIQGEDGFEISIKNNYVEKFVEEMLSNGSKMIGLGARDTLRMEAGLCLYGNDIDK

SEQ ID NO: 107624 - protein, 166 aa, Unknown
  Bacterial polypetide isolated from the Sargasso Sea
MTEKNISTEDLLRTSLYSWHTANGGKMVDFGGWEMPVQYENGILKEHLGTRRYGGLFDVSHMGRFRIQGQDTIAFLQHVLSNNAESLEPWQAQYTLIPNNNGGLLDDAYLYRPGNEYFLVVNASNRDKDWNHLHEQAKAYDVSIEDQTSQISMIAFQGPLTGRILA

SEQ ID NO: 107625 - protein, 212 aa, Unknown
  Bacterial polypetide isolated from the Sargasso Sea
GKIISGVNKLKFMHGNKFKFNSDDVYITRSGYTGEDGFEISIKNKDVVQLVEKMIKLGSKMIGLGARDTLRLEAGLCLYGHDINEETSPIEANLKWAISKKRIADDFPGSEKIRKQLNEGVNKLRVGIKPDNKIIAREFTKIFDDKNNEIGNVTSGTFGPSVNGPIAMGYVSNNFSKLNTKVFLEVRGKKISACICELPFYKKNYLKGEANV

SEQ ID NO: 107626 - protein, 272 aa, Unknown
  Bacterial polypetide isolated from the Sargasso Sea
DIDACNSWNPTNIFVRTYDKKKEFTKSFAFRMKTDSEKKLTRNSGFYERTSKLTRNFIDARGFWLPNDYTKHGLVNEYNACRNDAVLIDLSSLRKFEIIGPDAEELLNYTLTRNIKKLSVGQVVYSAMCYENGMMFDDGTLLRLSETGFRWICGDEYGGEWLKEIAKKKNFNANIKNSTDQISNVSLQGPKSREILKKIIFTPPTQPSIDELGWFRFSICRIEELQGIPLIVSRTGYTGELGYEIWCHPKHASEVWDKLMEAGKKDGLIPAG

SEQ ID NO: 107627 - protein, 172 aa, Unknown
  Bacterial polypetide isolated from the Sargasso Sea
MEKTALYNFHKNLGAKFVAFAGYEMPIQYKDGIVKEHISTRQTAGFFDVSHMGQLFISESKSLEQNLEKIIPLDFKEIKINQSKYSFLINDKGGVIDDLIITRVEGGFNIILNAACKDNDTKEIAKCLDSDSKYELKKDLSLVALQGPKSETILESIIPGVKQLKFMNGDYF

SEQ ID NO: 107628 - protein, 219 aa, Unknown
  Bacterial polypetide isolated from the Sargasso Sea
MIILNAACKVSDLKIIERKLSKNFNLKIRDDLSLVALQGPDSKNVLEKIIPQSSELKFMHGNNFTFEDINIYITRSGYTGEDGFEISIDNSKVESFVEILLKNGSKLIGLGARDTLRLEAGLCLYGHDINEKISPIEANLKWAISKNRINSSFPGSSIIKKQIDEGVKKIRVGIKPETKVIAREKTKIFDQNDKLIGSVTSGTFGPSVQGPIAMGYVTN

SEQ ID NO: 107629 - protein, 239 aa, Unknown
  Bacterial polypetide isolated from the Sargasso Sea
LLALQGPLSEKILKSLVPNVARMQFLNVLDFIFQNEECWISRSGYTGEDGFEISLPDSIVENFVSKLLQNPEVELIGLGARDSLRMEAGLCLYGNELSRSITPVEAGLTWAIKKNRLFDKFNDESFVGAKKILEQLKNGVNFKRVGLLPVGRAPIRQEVELFAEEHSKQVIGKVTSGGFSPTLNKPISIARLENKYCEINKQVFAEVRGVRLPVTVCKLPFIKLNYRRKRKNDEIYSRT

SEQ ID NO: 107630 - protein, 266 aa, Unknown
  Bacterial polypetide isolated from the Sargasso Sea
MIVHNFDSVLVDLGFFQIKWYSIAYILGIVLGWVYALKIIKNEKLTNNKIKISDFDDLIVYLIIGIILGGRLGYIIFYNFEYYSENFFEIFKIWRGGMSFHGGLIGVIIGTFIFSKKTSNNFFQLTDIVACVAPIGLFFGRIANFINGELYGKISNLPWTVIFPEAGNLPRHPSQIYESILEGILLFIILNYLALKKNLLLKSGYISVLFLILYSILRIFSETFREPDAHIGYIYNYFSMGTLLSIITLLAGVIIIFFIKKNEQNN

SEQ ID NO: 107631 - protein, 264 aa, Unknown
  Bacterial polypetide isolated from the Sargasso Sea
LNITRTEKVFCIILNAACKENDIKQISQFLLKNHKYLLNNDLSLIALQGPKSVEILEKLIPGVANLKFMTGNNFNYEGEKLYVTRSGYTGEDGFEISISNQKVEKLIDYLVSNEVKPIGLGARDTLRLEAGLCLYGHDLNEKINPVEANLKWAIAKKRKEAGGFNGWDKIKNLLVNGSEKIRVGIKPDGKVIARENTKIFSLDNNEIGFVTSGTFGPSVNAPVAMGYVKSEFSEIGTSVQLEVRGKKYGGKISELPFYKKSYVK

SEQ ID NO: 107632 - protein, 160 aa, Unknown
  Bacterial polypetide isolated from the Sargasso Sea
EILKKGAKLIGLGARDTLRMEAGLCLYGNDIDKNTTPIEANLKWAISKNRIDTDYPGSKIIKKQIQSGVEKIRVGIKPESRVIARGNTKIFSNDDKEIGKITSGTFGPSVDHSIAMGYVDNKYSDLNTKLFLEIRGKKIPANVCNLPFYKKNYVKGGINV

SEQ ID NO: 107633 - protein, 247 aa, Unknown
  Bacterial polypetide isolated from the Sargasso Sea
IYQSLNQNWGEKFELTLKDDSSLVAIQGPESKDILEKIIPGVNKLRFMNGNKFNFNAEDTYITRSGYTGEDGFEISIKNNVVIKLVEKMIELGSNLIGLGARDTLRLEAGLCLYGHDINEETSPIEANLKWAISKNRINEEFPGAKEIKKQFNEGVKKLRVGIKPDNRVIARESTKIFDDKNNEIGKITSGTFGPSVKGPIAMGYVSNIFSKLNTKVFLEVRGKKIPASICELPFYKKNYVKGEINV

SEQ ID NO: 107634 - protein, 286 aa, Unknown
  Bacterial polypetide isolated from the Sargasso Sea
CGTSACPSDIDPCNSWNPTDIFVRTYDKKKEFTKSFAFRMKADSEAKLTKNTGFYKKTSKLTRNFIDARGYWLPNDYTKHGVINEYTACREKAVVIDLSSLRKFEILGPDAEELMNYTLTRNIKKLSVGQIVYSSMCYENGSMFDDGTLLKMSDHGFRWVCGDEYAGDWLKEQAKKKNYNVLIKNSTDQINNISLQGPKSRKILEKFIFTPPTQPSISELQWFRFTICRVKKLNGIPLIVSRTGYTGELGYEIWCHPSDAPKVWDEVMEAGKDEGLIPAGFGALDL

SEQ ID NO: 107635 - protein, 288 aa, Unknown
  Bacterial polypetide isolated from the Sargasso Sea
LKKIKLNQSKYSFLTNEEGGIYDDLIVTKVEKGFNIILNAACKNNDFKIISSSLKNKFKITLHQNLSLIALQGPQSSQILEKIINGVSSLKFMNGNKFFYNSKDVYITRSGYTGEDGFEISISNELAEDFAKKLISEKVKPIGLGARDTLRLEAGLCLYGHDINESTSPIEANLKWAISKRRREEGGFVGYNKIQSDLNGSLSRLRVGLKPEGKIIAREGVKIFSENGKEIGSITSGTFGPSVNGSIAMGYVKLNFSKPGTKIFLEVRGKKHEAKVSELPFYKKSYVR

SEQ ID NO: 107636 - protein, 196 aa, Unknown
  Bacterial polypetide isolated from the Sargasso Sea
MNGNKFSYKDENIYITRSGYTGEDGFEISISNKLAEDLAKKLISQKVKPIGLGARDTLRLEAGLCLYGHDINKSTSPIEANLKWAISKRRREEGGFVGYEKIKSDLNGSLSRLRVGIKPEGKIIAREGVKVFSDDDKEIGSITSGTFGPSVNGPIAMGYVKLNFSKPGTKVFLEVRGKKHEAKIAELPFYKKRYVR

SEQ ID NO: 107637 - protein, 204 aa, Unknown
  Bacterial polypetide isolated from the Sargasso Sea
MIPTSDITGLILAGGRGSRMGGVDKGLQTFRGAPMAMHTLMRLSPQVGHMLINANRNLAAYESFGVPVVADSVPDFAGPLAGILAGLEQCETRYLLTAPCDSPFVPTDLAVKLSHAMDEARARIAMPVTMEPDEQGHPRRQVQPVFCLIDALLADDLIVYLQGGGRKIESWTARHPTVDVLFDDSSAFANINTLEELHQLAERR

SEQ ID NO: 107638 - protein, 295 aa, Unknown
  Bacterial polypetide isolated from the Sargasso Sea
DLTCGTTACPFDIDACNSWNPTDIFVRTYDKKKEFTKSFAFRMKTDSETKLTRNTGFYERTSKLTRNFIDARGFWLPNDYTKHGVINEYTACREKSVVIDLSSLRKFEILGPDAEELMNYTLTRNIKKLSVGQVVYSSMCYENGFMFDDGTLLKLSDHGFRWVCGDEYAGEWLKEQAKKKNYKVLIKNSTDQINNISLQGPNSRKILEKFIFTPPTQPTISELQWFRFTICRVEDLNGIPLIVSRTGYTGELGYEIWCHPSDAPKVWDKVMEAGKDEGIIPAGFGALDLLRIEAG

SEQ ID NO: 107639 - protein, 288 aa, Unknown
  Bacterial polypetide isolated from the Sargasso Sea
DESFARPGDYVLFRALKNLTCGTTACPSDIDPCNSWNPTDIFVRTYDKKKEFTKSFAFRMKADSEKKLTRNTGFHERTSKLTRNYVDARGFWLPNDYTKHGIINEYTACREKAVVIDLSSLRKFEILGPDAEELMNFTLTRNIKKLSVGQIVYSSMCYENGTMFDDGTLFKLSDHGFRWICGDEYAGEWLKEQAKKKNYKVLIKNSTDQISNISLQGPNSRKILEKFIFTSPTQPSISELQWFRFSICRIEDLNGIPLIISRTGYTGELGYEIWCSPSDAPKVWDKVF

SEQ ID NO: 107640 - protein, 424 aa, Unknown
  Bacterial polypetide isolated from the Sargasso Sea
ERKKGWHAINLFFNTSAGGLNSVLSDESFARPGDYVLFKALKDITCGTSACPSDIDACNSWNPTDIFVRTYDKKKEFKKSFAFRMKTDSEKKLTKNSGFYERTSKLTRNFIDARGFWLPNDYTKHGLVNEYNACRDKAVLIDLSSLRKFEILGPDAEELMNYTLTRNVKKLSVGQVAYSAMCYENGQMFDDGTVFKLSDHGFRWICGDEYGGEWLKEIAKKKNYKVVIKNSTDQISNVSIQGPNSRKILNKIIFTPPTQPSIDELQWFRFTICRVEDLQGIPLVISRTGYTGELGYEVWCHPKDAPKVWDKLMEAGKNEGLIPAGFAALDKLRIEAGLILFGNEFDGQQDPFEAGIGFSVPLKTKEDDFIGKKVLIERKANPQKKLVGLELIAKEPAGHGDCVHIGRSQIGVVTSACFSTILNK

SEQ ID NO: 107641 - protein, 418 aa, Unknown
  Bacterial polypetide isolated from the Sargasso Sea
SPANGWNPTDIYVRTYKDNKLFSKSIAFRKNAEAKPFMTKNTGFHEKTSELTRNMMDSSGYWIPTKYNNYGPAVEYNACRTNVVMMDLSSLRKFEILGPDSEELMNIALTRNVKKLSIGEVVYSALCYENGMMIDDGTLYKLGDHNFRWICGNDYSGEWLRELAEKLKLDVWVKSSTDQLNNLSVQGPNSRNLLKEIIWTPPAQPKLEELKWFHFSVGRLFKDQGTPIMVSRTGYTGELGYEIFCHPKDGNQIWEAIWNEGKKYKIVPMGFDALDILRIEAGLILGGNEFSDQTDPFEAGIGFTIPLKSKNVDFIGKNALIERKNHPQKKLVGLEIEGNEKANHGDLVHSGRGQVGIITSGTMSPILNKNIAMCRVDTKYSEIGTSLEIGKLDSHQKRLMAKVVKFPFYDPDKSRVKS

SEQ ID NO: 107642 - protein, 127 aa, Unknown
  Bacterial polypetide isolated from the Sargasso Sea
MINKNDSSDPIDNLEYEKVLEEEIINSYESKFQKDTDENSKKIKFYRLKRTPLEILNRTFFLFFIGSFLFSLFLAYSESKLWFILYVISALSCVFYTPNRKALKELIAAWPNIEDLIKGRSLWRKGK

SEQ ID NO: 107643 - protein, 596 aa, Unknown
  Bacterial polypetide isolated from the Sargasso Sea
IKKESCISYEVKEGDYIQVISPTGRQCSDFVAFDTRKLEKGIEKGLDWQTTRTFMGNTFPGPGLFSKFYDTDHEPLVEVIRDTVGKHDTFNLACTSKYYEDSGYFGHPNCSDNLTESMSKYGVQKQKGWHAINLFFNTSAGGLNSVISDESYSRPGDYVMFKALKDLTIGTTACPSDIDPCNSWNPTNIFVRTYDKNKEFKKSFGFRMKTDSENKLTRNSGFYERTSKLTRNFVDARGFWLPNDYTKHGLVNEYNACRNDAVLIDLSSLRKFEIIGPDAEELMNYTLTRNIKKLSVGQVVYSAMCYENGMMFDDGTLLRLSETGFRWICGDEYGGEWLKEIAKKKNFNAIVKNSTDQISNVSLQGPKSREILKKIIFTPPTQPSIDELGWFRFTICRIEELQGIPLIVSRTGYTGELGYEVWCHPKHAPEVWDKLMEAGKDDGLIPAGFAALDKLRIEAGLILFGAEFNGEQDPFEAGIGFAVPLKTKEEDFIGKEELIKRKANPQKKLVGLELNGKEIAGHGDCVHIGRSQVGIVTSGCLSSTLNKNIALCRIDVQYSEIGTEVEIGKIDGHQKRIGAKVVGFPFYDPTKSRVRA

SEQ ID NO: 107644 - protein, 127 aa, Unknown
  Bacterial polypetide isolated from the Sargasso Sea
MINKKDSSDPIDNLEYEKVLEEEIINSYESKFQKDTEEDSKKIKFYRLKRTPLEILNRSFFFFFIGSFLFSLFLAYSESKLWFILYVISALSCVFYTPNRKALKELIAAWPNIEDLIKGRSLWRKGK

SEQ ID NO: 107645 - protein, 778 aa, Unknown
  Bacterial polypetide isolated from the Sargasso Sea
MKTSFDIKEPGLNVLPPGVERHVINGGGLTGLQIFPDDEIEIINDEGNQVCEIVVFDKDGKSDLGILNLKENSKNSEIKKILTSKDESSLIANHQLKKRNLDITKSKSSLIFSKDSISGDKINFKSKDKCYVIFAAPGEDMLVHEQNPVTDLTIFIKRANVINDKELSVIPDPVYDPKHEQNIDRTTAISYEVKEGDYIQVITPTGRQCSDFVAFDTQKLDKKIEKGLDWQTTRTFMGHTFPGPGLFSKFYDTDHQPLVEVIRDTVGRHDTFNLACTSKYYEDAGYFGHANCSDNLSNAMEQYGVQRKKGWHAINLFFNTSAGGLNSVLSDESFARPGDYVLFKALKDITVGTSACPSDIDACNSWNPTDIFVRTYDGKKEFKKSFAFRMKTDSEKKLTKHSGFYDRTSKLTRNFVDARGFWLPNDYTKSGLVNEYNTCREKAVLIDLSALRKFEILGPDAEELMNYTLTRNIKKLSIGQVVYSAMCYENGMMFDDGTLLKLSDTGYRWICGDEYGGEWLKEVAKKKKYKVIIKNSTDQISNVSIQGPKSRKILNKIIFTPPTQPTINELQWFRFTICRMDDLNGIPLVISRTGYTGELGYEVWCHPKDAPKVWDKLMDAGKDDGLIPAGFAALDKLRIEAGLILFGNEFDGQQDPFEAGIGFAVPLKTKEDDFIGKKVLVERKTNPQKKLVGLELIAKEPAAHGDCVHVGRAQIGIVTSACFSTILNKNIALCRIDPKYAEIGTEVEVGKIDGHQKRISAKVVRFPFYDPDKTKVRS

SEQ ID NO: 107646 - protein, 433 aa, Unknown
  Bacterial polypetide isolated from the Sargasso Sea
LKDLTIGTTACPSDIDPCNSWNPTNIFVRTYDKNKEFRKSFGFRMKTDSENKLTRNSGFYERTSKLTRNFVDARGFWLPNDYTKHGLVNEYNACRNDAVLIDLSSLRKFEIIGPDAEELMNYTLTRNIKKLSVGQVVYSAMCYENGMMFDDGTLLRLSETGFRWICGDEYGGEWLKEIAKKKNFNAIVKNSTDQISNVSLQGPKSREILKKIIFTPPTQPSIDELGWFRFTICRIEELQGIPLIVSRTGYTGELGYEIWCHPKHAPEVWDKFMEAGKDDGLIPAGFAALDKLRIEAGLILFGAEFDGEQDPFEAGIGFAVPLKTKEEDFIGKEELIKRKANPQKKLVGLELAGKEAAGHGDCVHVGRSQVGIVTSGCLSSTLNKNIALCRIDVQYSEIGTDVEIGKIDGHQKRISAKVVSFPFYDPTKSRVKA

SEQ ID NO: 107647 - protein, 314 aa, Unknown
  Bacterial polypetide isolated from the Sargasso Sea
MNYTLTRNVKKLSVGQVVYSSMCYENGFMFDDGTLLKLSDHGFRWVCGDEYAGEWLKEQAKKKNYKVLIKNSTDQINNISLQGPNSRKILEKFIFTPPTQPTISELQWFRFTICRVEDLNGIPLIVSRTGYTGELGYEIWCHPTDAPKVWDKVMEAGKDEGIIPAGFGALDLLRIEAGLILFGNEFDGQVDPFEAGVGFTVPLKTKTDDFIGKESLIKRKENPQKKLVGLELTGKEKANHGDCVHIGRSQVGVITSGCISPTLNKNIALCRIDIGHSELETEVEVGKIDGHQKRIPAKIVTFPHYDPAKSRVRS

SEQ ID NO: 107648 - protein, 196 aa, Unknown
  Bacterial polypetide isolated from the Sargasso Sea
MTGNNFDYEGEKLYVTRSGYTGEDGFEISISNKKVEKFIDYLISNEVKPIGLGARDTLRLEAGLCLYGHDLNEKINPVEANLKWAIAKKRKEVGGFNGWEKIKTLLAIGSEKIRVGIKPDGKVIARENTKIFSSDNNEIGFVTSGTFGPSVNAPVAMGYVKSEFSEIGTSIQLEVRGKKYGGKISELPFYKKSYVK

SEQ ID NO: 107649 - protein, 1097 aa, Unknown
  Bacterial polypetide isolated from the Sargasso Sea
MKRMLINATQSEELRVALVDGQQLYDLDIESPGHEQKKSNIYKGKITRVEPSLEAAFVDYGAERHGFLPLKEIAREYFPKGYSFQGRPNIKEVVSEGQEVIVQIDKEERGNKGAALTTFISLAGSYLVLMPNNPRAGGISRRIEGDERTELKEAMADLEVPAGMGLIVRTAGVGKESTELKWDLKVLQHHWAAITEAAQSKAAPFLIHQESNVIVRAIRDYLRRDVGEILIDHPRIFEEAKQHIALVRPDFVERVKLYEAEVPLFTHFQIESQIESAFQREVRLPSGGSIVIDPTEALTSIDINSARATKGGDIEETALNTNLEAADEIARQLRLRDLGGLVVIDFIDMTPVRHQREVENRLRDAVHHDRARVQLGRISRFGLMEMSRQRLRPSLEESAAHICPRCHGQGTIRSTESLALSILRLMEEEAIKENTSQIEAIVPVDVAAFLLNEKRKAIRITEQRHDVEVYVIPDPHMMTPDYRVIRHRTDDEIDESSYKRIEQPEAKLYEPRKLERTAAPAPALKGFAAPQKVEQAAAPAANKVEATEPGFFSKLFSAIGAFFSSSDKPAAEKTTETKKSDSQTANANRRNRRNDTRRTRNNQDADKAKEGTREPRTRNAKKSADAPQAQERPAREKDENAKRTKPEPKSRNQAPKEVVAESQDDTPKQEVARERRQRRNMRRKVRIDNANDTTEAPIQEEVVLAEVAAVNAANTDVATEPQAETKAPRSRRQPRKEAAVANETAEATDTVSQAEASAEVAVEAPVVENRADAPADVTESVKTEAETDADNADVSADADDKAKRESRDGQRRSRRSPRHLRAAGQRRRRDEDEQGASAPAQFVPNDALGDDQDYPAPSAQTAEAPETTEAKAIAVVAEPTVTSPATVVEAADVSVVAETTANNAVETEVVEAVATEQVAEIKAEVAATEAPADTAVNNKAETSVKTEEVAVEPVKTVEAVTEAVVAPAETPAQPKAEAKAVAVEAVTPEADQAEAKEAVKSVASAPMAKPAPIVKPQAKPVVTQAAAASTAEAVVSKPKAASRFGSMVSSEMTKPTVEVRAQVEVPKGREYDSVASAEAAAPKLKHSNSAESDMARP

SEQ ID NO: 107650 - protein, 657 aa, Unknown
  Bacterial polypetide isolated from the Sargasso Sea
MLGTSKDIKYPGLNILPPGVERHVVNGGGLTGFQIFPDDEVEIINNEGNQICEIICFGKDGNSDLGILNLKSNNEKNFIRNILNGNDETILATNYQLKKRNLKISNSKSSIIFDLDAEPGEKIKLKSKDKCYAIFSAPGEDMDVTKQNPPTDLTIFVKRAKIVNDKELNVIPDPVFEPVYEENINKETSISYEVKEGDYIQVISPTGRQCSDFVAFDTRKLEKGIEKGLDWQTTRTFMGNTFPGPGLFSKFYDTDHEPLVEVIRDTVGKHDTFNLACTSKYYEDAGYFGHPNCSDNLTESMSKYGVQKQKGWHAINLFFNTSAGGLNSVISDESYSRPGDYVMFKALKDLTIGTTACPSDIDPCNSWNPTNIFVRTYDKNKEFRKSFGFRMKTDSENKLTRNSGFYERTSKLTRNFVDARGFWLPNDYTKHGLVNEYNACRNDAVLIDLSSLRKFEIIGPDAEELMNYTLTRNIKKLSVGQVVYSAMCYENGMMFDDGTLLRLSETGFRWICGDEYGGEWLKEIVKKKNFNAIVKNSTDQISNVSLQGPKSRGILKKIIFTPPTQPSIDELGWFRFTICRIEELQGIPLIVSRTGYTGELGYEIWCHPKHAPEVWDKLMEAGKDDRLIPAGFAALDKLRIEAGLILFGAEFDGEQDP

SEQ ID NO: 107651 - protein, 479 aa, Unknown
  Bacterial polypetide isolated from the Sargasso Sea
MSKFGVQKQKGWHAINLFFNTSAGGLNSVISDESYSRPGDYVMFKALKDLTIGTTACPSDIDPCNSWNPTNIFVRTYDKNKEFRKSFGFRMKTDSENKLTRNSGFYERTSKLTRNFVDARGFWLPNDYTKHGLVNEYNACRNDAVLIDLSSLRKFEIIGPDSEELMNYTLTRNIKKLSVGQVVYSAMCYENGMMFDDGTLLKLSETGFRWICGDEYGGEWLKEIAKKKNFNAIVKNSTDQISNVSLQGPKSREILKKIIFTPPTQPSIDELGWFRFTICRIEELQGIPLIVSRTGYTGELGYEIWCHPKHATEVWDKLMEAGKDDGLIPAGFAALDKLRIEAGLILFGAEFDGEQDPFEAGIGFAVPLKTKEEDFIGKEELVKRKANPQKKLVGLELAGKEIASHGDCVHIGRSQIGIVTSGCLSSTLNKNIALCRIDVQYSEIGTDVEIGKIDGHQKRIGAKVVGFPFYDPTKSRVKA

SEQ ID NO: 107652 - protein, 354 aa, Unknown
  Bacterial polypetide isolated from the Sargasso Sea
NDYTKHGVINEYNACREDAVLIDLSSLRKFEILGPDAEELMNYTLTRNVKKLSVGQVVYSAMCYENGTMFDDGTLLKLSDHGFRWVCGDEYGGEWLKEQAKKKNYKVHIKNSTDQINNLSLQGPKSRKILEKIIFTPPTQPSISELEWFRFTICRLEELNGIPLIVSRTGYTGELGFEIWCHPSDAPTVWDKVMKAGQDEGLIPAGFAALDLLRIEAGLILFGNEFDGQQDPFEAGIGFSVPLKSKVEDFIGRENLIKRKENPQKKLVGLELIGKEIANHGDCVHIGRSQVGIITSGCISPTLNKNIALCRIDVGHSEIGNDVEVGKIDGHQKRIPAKIVGFPHYDPKKTKVRS

SEQ ID NO: 107653 - protein, 714 aa, Unknown
  Bacterial polypetide isolated from the Sargasso Sea
MKTSFDIIEPGLNVLPPGVERHVVNGGGLTGLQIFPDDEIEIINDEGNQICEIVVFDKDGKSDPGILNLKENTKNSEIKKILSSKDESSLVASYQLKKRNFDVLKSKSSLVFSKDSVSGDKINFKSKDKCYVIFAAPGKDMLVHEQNPSTDLTLFIKRSKIVNDKELSVIPDPVFDPKYEKNIDRATAISFQVKEGDYIQVITPTGRQCSDFVAFDTQKLDKRIEKGLDWQTTRTFMGQTFPGPGLFSKFYDTDHEPLVEVIRDTVGRHDTFNLACTSKYYEDAGYFGHPNCSDNLSNTMEKYGLERKKGWHAINLFFNTSAGGLNSVLSDESFARPGDYVLFKALKDITCGTSACPSDIDACNSWNPTDIFVRTYDKKKEFKKSFAFRMKTDSEKKLTKNSGFYERTSKLTRNFIDARGFWLPNDYTKHGLVNEYNACRDKAVLIDLSSLRKFEILGPDAEELMNYTLTRNVKKLSVGQVAYSAMCYENGQMFDDGTIFKLSDHGFRWICGDEYGGEWLKEIGKKKNYKVVIKNSTDQISNVSIQGPNSRKILNKIIFTPPTQPSIDELQWFRFTICRVEDLQGIPLVISRTGYTGELGYEVWCHPKDAPKVWDKLMDAGKNDGLIPAGFAALDKLRIEAGLILFGNEFDGQQDPFEAGIGFSVPLKTKEDDFIGKKVLIERKANPQKKLVGLELIAKEPAGHGDCVHIGRSQ

SEQ ID NO: 107654 - protein, 778 aa, Unknown
  Bacterial polypetide isolated from the Sargasso Sea
MPTSLDIREPGLNTLPLGVERHVVNGGGLTGVQIFPDDEIEIVNDEGNQICEILVFNKDGKSELSILNLKENKDSSEINKILSKKDESSFIALYQLKKRNLDVKKSKSAVVFDKDSTSGEKIKLVSKDKCYCIFSAPGTDMLIHEQNPSTSLTVFVKRANIVNDKEHSIIPDPMFDPLNETNIDKKTAISFEVKEGDYIQIICPTGRQCSDFVAFDTSKLSKGIEKGLDWQTTRTFMGNTFPGPGLFSKFYDTDHEPLVEVIRDTVGRHDTFNLACTSKYYEDAGYFGHPNCSDNLSNSMGKFGVEKKKGWHAINLFFNTSAGGQNSLFSDESFARPGDYVIMRALKDLTCGTSACPSDIDPCNSWNPTNIFVRTYDKKKEFTKSFAFRMKADSETKLTKNTGFYERTSKLTRNFIDARGYWLPNDYTKHGVINEYTACREKAVVIDLSSLRKFEILGPDSEELMNYTLTRNIKKLSVGQIVYSSMCYENGTMFDDGTLLKMSDHGFRWVCGDEYAGEWLKEQAKKKNYKVLIKNSTDQINNISLQGPNSRKILEKFIFTSPAQPTISELEWFRFTICRVKDLNGIPLMVSRTGYTGELGYEIWCHPSDAPKVWDEVMEAGKNEGLIPAGFGALDLLRIEAGLILFGNEFDGQVDPFEAGVGFTVPLKTKTDDFIGKESLIKRKENPQKKLVGLELISKEKANHGDCVHIGRSQVGVITSGCISPTLSKNIALCRIDISHSEIGTEVEVGKIDGEQKRIAAKIVGFPHYDPKKTRVRS

SEQ ID NO: 107655 - protein, 779 aa, Unknown
  Bacterial polypetide isolated from the Sargasso Sea
MLGTSKEIKYPGLNILPPGVERHIVNGGGLTAFYIFPDDEIEIINNDGNQICEIICFNKDGKSDVGILNLKSNNNKNFIRDILSKKDESILATNYQLKKLNLNISNSKSSIVFDIDSQIGEKIKLKSKDNCFAIFAAPGQDMDVTKQNPPTDLIIYIKRANIIDDKELNVIPNPVFEPSHEENIKKASSISYEVKEGDYIQVISPTGRQCSDFVAFDTKKLEKGIEKGLDWQTTRTFMGNTFPGPGLFSKFYDTDHEPLVEVIRDTVGKHDTFNLACTSKYYEDAGYFGHANCSDNLTESMSKYGLQKQKGWHAINLFFNTSEGGLNSVISDESYSRPGDYVMFRALKDLTIGTTACPSDIDPCNSWNPTNIFVRTYDKKKEFTKSFAFRMKTDSEKKLTRNSGFYERTSRLTRNFIDARGFWLPNDYTKHGLVNEYNACRNDAVLIDLSSLRKFEIIGPDAEELLNYTLTRNIKKLSVGQVVYSAMCYENGMMFDDGTLLRLSETGFRWICGDEYGGEWLKEIAKKKNFNANIKNSTDQISNVSLQGPKSREILKKIIFTPPTQPSIDELGWFRFSICRIEELQGIPLIVSRTGYTGELGYEIWCHPKHAPEVWDKLMEAGKEDGLIPAGFGALDKLRIEAGLILFGNEFDGQQDPFEAGIGFAVPLKTKEEDFIGKEELIKRKNNPQKKLVGLELAGKEIAGHGDCVHIGRSQVGVVTSGCLSSTLNKNIALCRIDMQYSEIGTEVEVGKIDGHQKRIAAKVVAFPFYDPTKSRVRS

SEQ ID NO: 107656 - protein, 151 aa, Unknown
  Bacterial polypetide isolated from the Sargasso Sea
MKKTPLYNLHQKHGAKFVQFAGYEMPIQYETGIVKEHITTRNNSGIFDVSHMGQLFLKGGDELTNDLQKIFPIDLAKISINQSKYSFLMKDNGGIYDDLIITKLKDGYMIILNAACKEADLNILKSKIGEKYQINLSDNLSLIAIQGPKAK

SEQ ID NO: 107657 - protein, 88 aa, Unknown
  Bacterial polypetide isolated from the Sargasso Sea
MSDYKKTILYDSHKTLKAKLVPFSGFWMPLQYSSIVKEHHHVRQKCGIFDVSHMGEFIVSGQNAEKFLQMVTTNDVTVLKPRKVQYSA

SEQ ID NO: 107658 - protein, 604 aa, Unknown
  Bacterial polypetide isolated from the Sargasso Sea
MQTSLNIKEPGLNVFPLGVERYVVNGGGLTGVQILPDDEIEIINDEGNQICEITVFNKDGKSELGILNLKESKNSSEIKKILFNKNETSLQALYQLKKRNLDIEKSKSAILFNKDTVAKETIKLKSKDKCYCIISAPGNAMLVHEQNPSTDLTVLVKRAEKKQDKEFSVIPDPVYDPSGEIDIKRTTADAYQVKEGDYIQVITPTGRQCSDFVAFDTAKLDKGQENGLDWQTTRTFMGHTFPGPGLFSKFYDIDHEPLIEVIRDTVGIHDTFNLACTSKYYEDAGYFGHANCSDNLNESMEKYGVQKKRGWHAINLFFNTSAGGQNSVLSDESYARPGDYVIFRALKDLTCGTTACPSDIDSCNGWNPTDIFVRTYDKKKEFTKSFGFRMKTDSENKLTRNTGFYERTSKLTRNYVDARGFWLPNDYTKHGVINEYTACREKAVVIDLSSLRKFEIIGPDAEELMNYTLTRNVKKLSVGQIVYSAMCYENGMMFDDGTLLRLSETGFRWVCGDEYAGEWLKEQAKKKNYKVIIKNSTDQINNISLQGPNSRKILEKFIFTPPTQPTISELQWFRFTICRADDLKGIPLIVSRTGYTGELGFEIW

SEQ ID NO: 107659 - protein, 289 aa, Unknown
  Bacterial polypetide isolated from the Sargasso Sea
HGGMMDDGTLLRLGPDNFRWIGGDDYGGIWLREQAQKLGLKVWVKSSTDQIHNIAVQGPKSREILKEVVWTPPTQPKLEEITWFRFTVGRIGDMNGIPIMISRTGYTGELGYEVWCHPKDAPEVWDAVFEAGQVHEIMPLGLDALDLLRIESGLVFAGYEFSDETDPFEAGVGFTVPLKTKEDDFVGREVLINRKANPQRKLVGLELEGNEPASHGDCVNVGRGQVGVITSGMRSPILRKNIALCRIDVTNSEIGTEVQVGKLDGHQKRIPAVVVPFPFYDPEKLKPRS

SEQ ID NO: 107660 - protein, 354 aa, Unknown
  Bacterial polypetide isolated from the Sargasso Sea
MEPLVEVVQDTIGRHDTFGTACTRKLYEDQGYFGHINCSDNFNYALDKYGVEKRNGWAAINLFFNTGIDANNVIFSDMPWSRPGDYVLFKAQKDLVCVSSSCPDDIDTANDWNPTDIYVRVYSEKNSFAKSIGYRKNASSDFMLTKETGFHPRTSKLTNDMMDSSGFWIPNKFNNYGTIKEYTECRNNVVIMDLSSLRKFEILGPDAEELMNVALTRNVKKLSIGQVVYSAMCYENGTMIDDGTLYKMGENNFRWICGNDYSGEWLNKLSEELKLHANIKSSTDQLHNISIQGPNSRKVLSKIIWTSPAHPDVNNLDWFNFTISRISDSSGIPIMLSRTGYTGELGFEIYCHPR

SEQ ID NO: 107661 - protein, 187 aa, Unknown
  Bacterial polypetide isolated from the Sargasso Sea
MLKTIFHQNHVDNSAKMVDFAGWDMPINYPTGIIKEANFVRQDSGFFDVSHMGRVEIFGKDRESFIEKILPINLESLDIGSAKYTLLIDENQKILDDLIVYKYSDHFLLIINASNTKKDLDWINSQITGDTKIKNVTSETGMLAIQGPNVLEKLQTLSSSFNEVGRYKFKNISIEDNMIFVARTGYT

SEQ ID NO: 107662 - protein, 779 aa, Unknown
  Bacterial polypetide isolated from the Sargasso Sea
MLEENLRINEPGLNVLPPGVERYVVNGGGLTGVQVFPDDEIEIINNEGNQICEIVVFNSDGNSDPSILNLKSSKSENDIIKILNRNEESSKIALRQLEKRNLKIAKSKSSILFDKDTPPGEKIKISSKDKCYCIFSAPGNDMLVHEQNPPTELTLFIKRNNIVDYKEHRIIPDPIFDPLDEKNIAKQSAISFEVKEGDYIQIICPTGRQCSDFVAFDTAKLGKGIEKGLDWQTTRTFMGNTFPGPGLYSKFYDTDHEPLVEVIRDTVGRHDTFNLACTSKYYEDAGYFGHPNCSDNLSGAMENFGVNRQKGWHAINLFFNTSAGGLNTVLSDESFARPGDYVILRALKDLTCGTSACPSDIDPCNSWNPTDIFVRTYEKKREFTKSFAFRMKPDSELKLTKNTGFHERTSKLTRNFVDARGYWLPNDYTKHGVINEYTACREKAVLIDLSSLRKFEILGPDAEELMDYTLTRNVKKLSVGQIVYSSMCYENGSMFDDGTLLKMSDHGFRWVCGDEYAGEWLKEQAKKKKFNVLVKNSTDQINNISLQGPNSRKILEKFIFTPPTQPSISELQWFRFTICRVKELSGIPLMVSRTGYTGELGYEIWCHPSDAPAVWDVLMEAGKDEGIIPAGFGALDLLRIEAGLILFGNEFDGQVDPFEAGVGFTVPLKTKTADFIGKEALIKRKENPQKKLVGLELVGKEKANHGDCVHIGRSQVGVVTSGCLSPTLNKNIALCRIDVGHSEIGMNVEVGKIDGHQKRIPAKVVGFPHYDPQKTRVKS

SEQ ID NO: 107663 - protein, 472 aa, Unknown
  Bacterial polypetide isolated from the Sargasso Sea
QNPPSDLTVLVKRANIKNSEKEFSIIPDPIYDPDYEVNIDRKTATGYQVKAGDYIQIITPTGRQCSDFVAYDTAKLEKGKERGLDWQTTRTFMGNTFPGPGLFSKFYDTDHEPLVEVIRDTVGIHDTFNLACTSKYYEDSGYFGHANCSDNLNDSMKKYGVEEKKGWHAINLFFNTSSGGQNSVTSDESYARPGDYVIFKALKDLTCGTTACPSDIDSCNGWNPTDIFVRTYEKSKEFTKSYGFRMKTDSENKLTRNTGFYERTSKLTRNFVDARGFWLPNDYTKHGVINEYNACREDAVLIDLSSLRKFEILGPDAEELMNYTLTRNVKKLSVGQIVYSAMCYENGTMFDDGTLLKLSDHGFRWVCGDEYGGEWLKEQAKKKKYKVHIKNSTDQINNLSLQGPKSRKILEKIIFTPPTQPSISELEWFRFTICRLEELNGIPLIVSRTGYTGELGFEIWCHPSDAPKVWDK

SEQ ID NO: 107664 - protein, 252 aa, Unknown
  Bacterial polypetide isolated from the Sargasso Sea
MDSKNVIAAISLSAAVIILYSLFFAPSPQELNKINKDNVKNELSSETPMLEENNKLTEVSRIDALNLNKRFSFKNKQMTGSISLIGGVIDDLTFENYTQTLNGNDKIVLLNPKQVKNGYFVETGWVTNNKNIDIPNSKTEWSISGNNKLTPNNPVTLVWKNNQNLEFQKTFNIDDNFLFNVDQKIINKSEKIFNFYPYGQIIRNEAPEVTNFYILHEGLIGVFDEELVEEDYDDIVDKKFSQKCRSRLVWNY

SEQ ID NO: 107665 - protein, 701 aa, Unknown
  Bacterial polypetide isolated from the Sargasso Sea
MPTSLDIKEPGLNVLPLGVERHIVNGGGLTGIQIFPDDEIEIINDEGNQICEISVFNKEGKSELSILNLKENRNSSEIKKILSKKDESSLIASYQLKKRNLDINKSKSAIVFDKDATLGEKVKLVSNDKCYCIFSAPGADMLIHEQNPTTNLTIFVKRANIIKDKEHSIIPDPIYDPLNETNIDRKTAISFEVKEGDYIQIICPTGRQCSDFVAFDTSKLSKGIEKGLDWQTTRTFMGNTFPGPGLFSKFYDTDHEPLVEVIRDTVGRHDTFNLACTAKYYEDAGYFGHPNCSDNLSNSMEEFGVAKKKGWHAINLFFNTSAGGQNSLLSDESFARPGDYVIMRALKDLTCGTSACPSDIDPCNSWNPTDIFVRTYDKKKEFTKSFAFRMKADSETKLTKNTGFYERTSKLTRNFVDARGYWLPNDYTKHGIINEYTACREKAVLIDLSSLRKFEILGPDSEELMNYTLTRNVKKLSVGQIVYSSMCYENGTMFDDGTLLKMSDHGFRWVCGDEYAGEWLKEQAKKKNYKVLIKNSTDQINNISLQGPNSRKILEKFIFTSPAQPTISELEWFRFTICRVKDLNGIPLMVSRTGYTGELGYEIWCHPSDAPKVWDVVMEAGKDEGLIPAGFGALDLLRIEAGLILFGNEFDGQVDPFEAGVGFTVPLKTKNDNFIGKESLIKRKENPQKKLVGLELISKEK

SEQ ID NO: 107666 - protein, 155 aa, Unknown
  Bacterial polypetide isolated from the Sargasso Sea
EDVKLAGLGARNSLRMEAGLCLYGNDISILTSPVEAGLTWSIPKERIENGGFIGHENIKKDLIDGVEKKLVGIKPLGKLPAREGTQILSKNGKIIGEITSGGYSPSLQAPIAMGYINAEILQKNCEILLNVRGNSLPAEIVSLPFVEHKYFRGKK

SEQ ID NO: 107667 - protein, 779 aa, Unknown
  Bacterial polypetide isolated from the Sargasso Sea
METSLSIKEPGLNVLPPGVERYVVNAGGITGIQISPEDEIKIINNEGNQICEINIFDKHGKSELGILNLKENTKSSEIKKILLKNEESSLQALLQLKKRNLQIEKAASSVIFDKNTSAGEEIILNSKDDCYCIFAAPGANMLVHDQNPPSDLTVLVKRAKIKNSEKEFSIIPDPIYDPDYEVNIDRKTATGYQVKAGDYIQIITPTGRQCSDFVAYDTAKLEKGIERGLDWQTTRTFMGHTFPGPGLFSKFYDTDHEPLVEVVRDTVGIHDTFNLACTSKYYEDSGYFGHANCSDNLNDSMKKYGVEEKKGWHAINLFFNTSSGGQNSVTSDESYARPGDYVIFKALKDLTCGTTACPSDIDSCNGWNPTDIFVRTYEKSKEFTKSYGFRMKTDSENKLTRNTGFYERTSKLTRNFVDARGFWLPNDYTKHGVINEYNACREDAVLIDLSSLRKFEILGPDAEELMNYTLTRNVKKLSVGQIVYSAMCYENGTMFDDGTLLKLSDHGFRWICGDEYGGEWLKEQAKKKNYKVHIKNSTDQINNLSLQGPKSRKILEKIIFTPPTQPSILELEWFRFTICRLEELNGIPLIVSRTGYTGELGFEIWCHPSNATTVWDKVMEAGKDEGLIPAGFAALDLLRIEAGLILFGNEFDGQQDPFEAGIGFSVPLKSKTEDFIGRENLIKRKENPQKKLVGLELIGKEIANHGDCVHIGRSQVGIITSGCISPTLNKNIALCRIDVGHSELGNEVEIGKIDGHQKRIPAKIVGFPHYDPKKTKVRS

SEQ ID NO: 107668 - protein, 663 aa, Unknown
  Bacterial polypetide isolated from the Sargasso Sea
QIGGEKIKLKSKDKCYCIFAAPGEVMLIHEQNPPTDLTIFIKRAKITKDKELSVIPDPMFDPLDEINIERQTAISFQVKEGDYIQIISPAGRQCSDFVAFDTDKLDKKIEKGLDWQTTRTFMGNTFPGPGLFSKFYDTDHEPLIEVVRDTVGRHDTFNLACTSKYYEDAGYFGHPNCSDNLNSSMEKFGVQKKRGWHAINLFFNTSAGGLNSVLSDESFARPGDYVIFKALKDLTCGTTACPSDIDACNSWNPTDIFVRTYDKKKEFTKSFAFRMKADSETKLTRNTGFYEKTSKLTRNFVDARGFWLPNDYTKHGVINEYNACREKAVVIDLSSLRKFEILGPDAEELMNYPLTRNIKKLSVGQVVYSSMCYENGSMFDDGTLLKMSDHGFRWICGDEYAGEWLKDQAKKKNYKVFIKNSTDQISNISLQGPNSRKILEKFIFTPPTQPSISELQWFRFTICRVNDLKGIPLIVSRTGYTGELGYEIWCHPSDAPKVWDTVMEAGKDEGLIPAGFGALDLLRIEAGLILFGNEFDGQIDPFEAGVGFTVPLKTKTDDFIGKESLVKRKENPQKKLVGLELIGKEKANHGDCVHIERSQIGVITSGCISPTLNKNIALCRIDVNHSKMGTKVEVGKIDGHQKRISAKVVGFPFYDPEKTKVKA

SEQ ID NO: 107669 - protein, 779 aa, Unknown
  Bacterial polypetide isolated from the Sargasso Sea
MQTSLAIKEPGLNVLPPGVERYIVNAGGITGIQIFPDDEIQIINNEGNQICEINSFDKNGKSELSLLNLKEDKNSSEIKKILFKKEESSMQALLQLSKRNLKIEKAKSAILFDKNTKAGEKIILKSKDKCYCIFAAPADDMLVHDQNPPSDLTIIIKRAKIKNNDKEFSLIPDPIYDPDHEVNIDRKTANGYQVKAGDYIQIITPTGRQCSDFVAYDTAKLEKGLERGLDWQTTRTFMGHTFPGPGLYSKFYDTDHEPLIEVIRDTVGIHDTFNLACTSKYYEDSGYFGHANCSDNLNDSMEKYGVEKKKGWQAINLFFNTSAGGLNSVTSDESYARPGDYVIFKALKDLTCGTTACPSDIDSCNGWNPTDIFVRTYEKSKEFTKSYGFRMKTDSENKLTRNTGFYERTSKLTRNFVDARGFWLPNDYTKHGVINEYNACREKAVLIDLSSLRKFEILGPDAEELMNYTLTRNVKKLSVGQIVYSAMCYENGTMFDDGTLLKLSDHGFRWVCGDEYGGEWLKEQAKKKNYKVHIKNSTDQINNLSLQGPKSRKILEKIIFTPPTQPSISELEWFRFTICRLEELNGIPLIVSRTGYTGELGFEIWCHPSDAPTVWDKVMEAGKDEGMIPAGFAALDLLRIEAGLILFGNEFDGQQDPFEAGIGFSVPLKSKTEDFIGRENLIKRKENPQKKLVGLELIGKEQANHGDCVHIGRSQVGVITSGCISPTLNKNIALCRIDVGHSEIGNEVEIGKIDGHQKRIPAKIVGFPHYDPKKTKVRS

SEQ ID NO: 107670 - protein, 385 aa, Unknown
  Bacterial polypetide isolated from the Sargasso Sea
MDLRNVIFAIALSFAVLFGWSVIFETPEIEKQKKLEQAESQDQESSAPSVNLENTSTPIVTREEAIKSTDRISFENENVKGTIAIKGGIIDDITFKKYNKTIQSDNKVTYLNPSETNEGYFVETGWAASNLGKMSLPNTETIWKVKGNKKLSDGSPVIIEWNNNSGLIFRKKIELDDKFLFRITQEIQNKSSQKIELYPYAQITRNQNPDVTDFYILHEGFIGVFDEELKEESYKDIEERKKEFNAEDGWLGITDKYWMTALVPEKNQPFKGEFVFKNGFKANYIQNKPVLIQPSASGTSKTNIFIAAKEVKVIDGYAESEGINKFDLTIDWGWFYFFTKPLFFIMNYLFELTKNFGIAILLVTAAVRLLFFPLANYSFRSMAKM

SEQ ID NO: 107671 - protein, 321 aa, Unknown
  Bacterial polypetide isolated from the Sargasso Sea
GPDAEDLMNYTLTRNIKKLSVGQVVYSAMCYENGMMFDDGTLLRLSETGFRWICGDEYAGEWLKKIAKTKNYKVNIKNSTDQISNVSIQGPKSREILKKLIFTPPTQPSIDELEWFRFTICRVEELQGIPLIVSRTGYTGELGYEVWCHPKHASEVWDKLMEAGKGEGLIPAGFAALDKLRIEAGLILYGNEFDGQQDPFEAGIGFAVPLKTKEEDFVGKNILKERKANPQKKLVGLELIGKEASGHGDCVHVGRSQVGVVTSGCLSTTLNKNIALCRIDTQYSEPGTEVEVGKIDGHQKRISAKVVAFPHFDPKKTRVRS

SEQ ID NO: 107672 - protein, 101 aa, Unknown
  Bacterial polypetide isolated from the Sargasso Sea
MEGQKTALYNIHKNLGAKFVPFAGYEMPIQYKDGIVKEHISTRTYAGFFDVSHMGQFFLEGDETLTEALERIIPADLKSLKINHSKYSFLLNNDGGIIDDL

SEQ ID NO: 107673 - protein, 395 aa, Unknown
  Bacterial polypetide isolated from the Sargasso Sea
MEGRNVIIAIALSLSVILFWEAFMTVPKKELQSNSTSQSKQSKEANDNNKDDSIAPSINENKIPKSVSRNESIGSVQRIKINNEKIEGSISLKGGIIDDVSFKNYKQSLEKNDNVVFLNPKQTTDGYFVETGWTSIGNKIKVPNINSNWKVKGNNILSPDKPVILEWSNQEGLIFRKKINLDKKYLFNIDQEVQNNTSQTIQLYPYAQITRNKKPDDLMGFYILHEGFIGVFDEELKEDDYDDVEDKKIVREATSGWLGITDKYWVTAIVPPKNENFKSTFLFKNNYKANYILNNPINLAPSTKKNNQVRLFVAAKEVNTIDGYAESQNIEKFDLVIDWGWFYFFTKPLFFLIDYLFKMTGNFGVAIILITAAIRIIFFPLANYSFRSMAKMKAL

SEQ ID NO: 107674 - protein, 203 aa, Unknown
  Bacterial polypetide isolated from the Sargasso Sea
MGEDPNLQNLRRTPLYPLYAQHGAKVAPFAGFELPLSFDGVISEHLATRTSAGLFDVSHMGIVDLVPKRGQSLETVSRALEKITPAGIADLGNDQLQYALLTNAHGGIVDDFIVSRNESRLRLVLNASRTDRDLAYIQDAMHEVTEINLRQDLAQVALQGPEAEAILGLFHQGVANLSFMQSVRLQLDGVDCEVSRSGYTGEE

SEQ ID NO: 107675 - protein, 137 aa, Unknown
  Bacterial polypetide isolated from the Sargasso Sea
MLENEIKSSPIEEIHSLNDAKFVNFAGWSMPIQFPDGIINEHISTRSSCGLFDISHMGQILINGDESRLLLEKITPTDISKIQTGKVRYSFLLNNEGGIIDDLMITNEGDCFYLVVKRSRINEDLEEINKASKSFSK

SEQ ID NO: 107676 - protein, 132 aa, Unknown
  Bacterial polypetide isolated from the Sargasso Sea
RVEAGMNLNGTDMTIKNNPFESNLGWVVDFDDAQRDFIAKENLIEIKKNNKLNLVGVLLDEKGILRGGQKIIKDDFEGEITSGTFSPFMKKSIGLARVPFDMKEDANVHIRNKLLKVRILSLPFVRKGKIVL

SEQ ID NO: 107677 - protein, 262 aa, Unknown
  Bacterial polypetide isolated from the Sargasso Sea
QGPQSEEVISEFLESGSLPERRHNRLSKISIMGEEMLISRTGYTGEPLCFEMFMSADAVTGIWGKLHQSGISKGMTAAGLGARDTLRLEARLPLYGHELGDDPEGAEILAYAFPLSAYAVSFSEAKGDFIGKEALLQQHRDLEELRSGNAQETPALPKRIFALHLQDRGVMRQGDGVYQGDIRLGSVTSGTVVPYWKFSDSGESSKITEQQDRRSIGLALLNARTQIGTELEIEVRGRRLKAIVVRRHGSSKTPPYFRALIP

SEQ ID NO: 107678 - protein, 226 aa, Unknown
  Bacterial polypetide isolated from the Sargasso Sea
MERELFSPKEQISQAPRQRGQRRVNMEIKKTSLNKLHQSNNAKFVEFAGYEMPIQYSKGIIEEHKFTRSHSGIFDVSHMGQLFIYGNESLTEELEKIFPLDLKNLKQNCSKYSFLMNEDAGIYDDLIITKIEEGYLIILNAACKDKDFEILSNLLGSKFKMNLDNNRSLIAIQGPKSVEILNSIINGVDQLNFMTGNWFDSDNQKLFVTRSGYTGEDGIEISISND

SEQ ID NO: 107679 - protein, 80 aa, Unknown
  Bacterial polypetide isolated from the Sargasso Sea
MTEEALQNIYLKDFHRKNDAKFVPFAGYEMPINYKLGIINEHIHVRTHAGLFDVSHMGQILIPLTSENIIALEIYIPLDI

SEQ ID NO: 107680 - protein, 587 aa, Unknown
  Bacterial polypetide isolated from the Sargasso Sea
CEISVLTKEGKSEPAILNLKENKDASEIKKILLKKDESSLIALHQLKKRNLDILKSKSSIVFDKDTGWGEKVKIKSKDKCYCIFAAPGAEMLIHEQNPPTDLTIFVKRAKITKDKEHHVIPDPMFDPLSETNIDRATAISFQVKEGDYIQVISPTGRQCSDFVAFDTAKLNKRIEKGLDWQTTRTFMGSTFPGPGLFSKFYDTDHEPLIEVIRDTVGKHDTFNLACTSKYYEDSGYFGHANCSDNLNSSMEKFGVQKKKGWHAINLFFNTSAGGLNSVLSDESFARPGDYVTFRALKDLTCGTTACPSDIDACNSWNPTDIFVRTYDKKNEFTKSFGFRMKTDSENKLTRNTGFYERTSKLTRNFVDARGFWLPNDYTKHGLINEYTACREKSVVIDLSSLRKFEILGPDAEELMNYTLTRNVKKLSVGQVVYSSMCYENGFMFDDGTLLKLSDHGFRWICGDEYAGEWLKEQAKKKNYKVLIKNSTDQINNISLQGPNSRKILEKFIFTPPTQPTISELQWFRFTICRIEDLNGIPLIVSRTGYTGELGYEIWCHPSDAPSVWDKVMEAGKDEGIIPAGFGALDLL

SEQ ID NO: 107681 - protein, 260 aa, Unknown
  Bacterial polypetide isolated from the Sargasso Sea
MSIEKIINDAWEIRDKIKPDTDQNLNQSVKEMIDGLNDGKIAISEKQGNEWKVNGWVQKGILLSFRINKRKIISGPYNAWNDFEHLPGKTAGWTEKEFEKAGFRLIPNAVVRNGCFVGRGAVIMPNSFMNIGSHLGERSMLDGGARLGSGSYLGDDCHLSGGAALGGILEPYGSRPTIVEEKTFIGANSEIAEGVIVRKGSVISMGCQIGKSTKIVNRETGEITSGEVPEGSVVVPGTLPSKKLGGPNLYCVVIIKKVDE

SEQ ID NO: 107682 - protein, 109 aa, Unknown
  Bacterial polypetide isolated from the Sargasso Sea
MEVQKTALYDYHKNLGAKFVPFAGYEMPIQYKDGIVKEHISTRTHAGFFDVSHMGQFFLEGDETLITALEKIIPADLNNLKINHSKYSFLLNNEGGIIDDLIITRTEKG

SEQ ID NO: 107683 - protein, 195 aa, Unknown
  Bacterial polypetide isolated from the Sargasso Sea
NGDYFKFQGKKIYVTRSGYTGEDGFEISLSNTNAENFTKLLSNKGAKPIGLGARDTLRLEAGLCLYGHELNQDISPIQANLKWAISKRRREEGGFKGWENIQNDLKNGVSKIRVGIKPSGKIIAREGTKIFSSSGDEIGVVTSGTFGPSVNAPVAMGYIQSKFSEIDNKILLEVRGKKHDAVVSKLPFYKKSYVK

SEQ ID NO: 107684 - protein, 218 aa, Unknown
  Bacterial polypetide isolated from the Sargasso Sea
MEIKKTSLNKLHQNNNAKFVEFAGYEMPIQYSKGIIEEHKFTRSNSGIFDVSHMGQLFIYGDESLTEELEKIFPLDLKNLKQNCSKYSFLMNEDAGIYDDLIITKIKEGYLIILNAACKDKDFEILSNLLGSKFKMNLDNNRSLIAIQGPKSVEILNSVINGVDQLNFMTGNWFDSDNQRLFVTRSGYTGEDGFEISISNEKAEKFVENFIGKGAQLI

SEQ ID NO: 107685 - protein, 220 aa, Unknown
  Bacterial polypetide isolated from the Sargasso Sea
MSPGHAAPPKAQAAAERSGKRTGNRPQRCGRSLAGERWPHRKETVCRPSTEGANRTASQGAAVNLSGKADSRANPVATLWLRPPFAPESAMSATAPLLTTPLNALHIELGARMVPFAGYSMPVQYPAGLMAEHVHTRTAAGLFDVSHMGQLKLIGADAAAAFETLMPVDVIDLPVGKQRYGLLLTDEGTIIDDLMFFNQGVVDGEPTLFVIVNGACKVGD

SEQ ID NO: 107686 - protein, 654 aa, Unknown
  Bacterial polypetide isolated from the Sargasso Sea
MLGTSKEIKYPGLNILPPGVERHIVNGGGLTGFQIFPDDEIEIINNEGNQTCEIICFDKDGNSDVGILNLKSNNDKNFIRNILSGNDETILATNYQLKKRNLKISNSKSSIIFDLDTKPGEKIKLKSKDKCYTIFSAPGEDMDVTKQNPPTDLTIFVKRAKIVNDKELNVIPDPVFEPAYEENINKESCISYEVKEGDYIQVISPTGRQCSDFVAFDTKKLEKGIEKGLDWQTTRTFMGNTFPGPGLFSKFYDTDHEPLVEVIRDTVGKHDTFNLACTSKYYEDSGYFGHPNCSDNLTESMSKYGVQKQKGWHAINLFFNTSAGGLNSVISDESYSRPGDYVMFKALKDLTIGTTACPSDIDPCNSWNPTNIFVRTYDKNKEFRKSFGFRMKTDSENKLTRNSGFYERTSKLTRNFVDARGFWLPNDYTKHGLVNEYNACRNNAVLIDLSSLRKFEIIGPDAEELMNYTLTRNIKKLSVGQVVYSAMCYENGMMFDDGTLLRLSETGFRWICGDEYGGEWLKEIAKKKNFNAIVKNSTDQISNVSLQGPKSREILKKIIFTPPTQPSIDELGWFRFTICRIEELQGIPLIVSRTGYTGELGYEVWCHPKHAPEVWDKLMEAGKDDGLIPAGFAALDKLRIEAGLILFGAEFDGE

SEQ ID NO: 107687 - protein, 492 aa, Unknown
  Bacterial polypetide isolated from the Sargasso Sea
FGHINCSDNFNYSLSSYGIEKRNAWQAVNLFWNTGIDEANTFTSEMPWSRPGDYVLFQAQKDLVCVSSGCPDDIDPANDWNPTDIFVRIYSEKNKFSKSIGYRKSADSDFMLTKETGFHPRTSKLTKDMMESAGYWIPSKYNNYGSIAEYTACRENVVMMDLSSLKKFEVVGPDAEELMNTALTRNVKKLSIGQVVYSAMCYENGTMIDDGTLYRMTEHNFRWICGSDYSGEWLRELSKKLDLRAWIKSSSGQLHNISIQGPNSRKVLSKIIWTTPNQPQLNDLQWFHFSISRIGDHKGVPIMVSRTGYTGELGYEIYCHPKDAVSVWDAVWEAGKEFEITPMGFEALDKLRIEAGLILAGHEFSDQTDPFEAGIGFTVPLKSKEANFIGKEELIKRKNNPQKKLVGLEITGNEIAQHGDCVHIGRGQVGVVTSGTLSPSLDKNIALCRIDVKYSDLNTQVEIGKLDGHQKRIPAKVIGFPFYDPTKSRVKA

SEQ ID NO: 107688 - protein, 442 aa, Unknown
  Bacterial polypetide isolated from the Sargasso Sea
KQHGLLWEIHFQDPGLFSKFYDADHEPLVEVIRDTVGRHDTFNLACTSKYYEDSGYFGHPNCSDNLNDCMEKFGAQKKKGWHAINLFFNTSAGGLNSVLSDESFARPGDYVIFKALKDLTCATTACPSDIDACNSWNPTDIFVRTYDKKKEFSKSFAFRMKTDSEKKLTRNSGFYEKTSKLTRNFIDARGFWLPNDYTKHGVVEEYNACREKAVLIDLSALRKFEIIGPDAEELMNYTLTRNIKKLAVGQVVYSAMCYENGMMFDDGTLLRLSETGFRWICGDEYAGEWLKEIAKKKNFKVNVKNSTDQISNVSIQGPKSREILKKLIFTPPTQPTIEELEWFRFTICRVETLQGIPLIVSRTGYTGELGYEVWCHPKHASDVWDKLMEAGKNEGLIPAGFAALDKLRIEAGLILFGNEFDGQQDPFEAGIGFAVPLKTKEE

SEQ ID NO: 107689 - protein, 407 aa, Unknown
  Bacterial polypetide isolated from the Sargasso Sea
FVRTYDKKKEFTKSFAFRMKADSETKLTKNTGFYEKTSKLTRNFVDARGYWLPNDYTKHGVINEYTACREKAVVIDLSSLRKFEILGPDAEELMNYTLTRNVKKLSVGQIVYSSMCYENGSMFDDGTLLKMSDHGFRWVCGDEYAGDWLKEQAKKKNYNVLIKNSTDQINNISLQGPNSRKILEKFIFTPPTQPSISELQWFRFTICRVKELSGIPLMVSRTGYTGELGYEIWCHPTDAPKVWDEVMEAGKDEGLIPAGFGALDLLRIEAGLILFGNEFDGQVDPFEAGVGFTVPLKTKTDDFIGKENLIKRKENPQKKLVGLELISKEKANHGDCVHIGRSQVGIITSGCISPTLSKNIALCRIDIGHSEIGTEVEVGKIDGEQKRIPATVVDFPHYDPQKTRVRS

SEQ ID NO: 107690 - protein, 241 aa, Unknown
  Bacterial polypetide isolated from the Sargasso Sea
IKNNINISEILIFNFKKDKVLLALQGKNSFDLFEEWIKSSISYIPNFGCEYKIFEHISPIEKIFVSKTGYTGENGLEILLSKKAAINLWDFSISKNVAPCGLGARDTLRLEAGMHLYGQDINEETSPYEAGLGWLVHLENNHEFIGRRFLEEQSRLGIQKKLVGLSIDGKAIGRKGCAVLKGEENIGTITSGSWSPTKHQAIAFAYINTSHALINNEVQILIRGKKFKGVITKRAFYKKNY

SEQ ID NO: 107691 - protein, 307 aa, Unknown
  Bacterial polypetide isolated from the Sargasso Sea
EEHKVTRSNAGLFDVSHMGQLLIEGNENLVTELEKIIPTDLKKTKLNQSKYSFLMNEQGGIYDDLIITKVEKGFIIILNAACKNNDFKIIKNALGSKFQLTLYKNLSLVALQGPKSSEILEKTINGISSLKFMNGNKFSYNGKDIYITRSGYTGEDGFEISIPNQLVEDFAKKLIAHGVKPIGLGARDTLRLEAGLCLYGHDINESTSPIEANLKWAISKRRREEGGFVGYNKIKSDMNGSLARLRVGVNPEGKIIAREGVKIFSKDNEEIGLVTSGTFGPSVNRSIAMGYVKLNFSKPGTKVLLGS

SEQ ID NO: 107692 - protein, 250 aa, Unknown
  Bacterial polypetide isolated from the Sargasso Sea
MEIKKTSLNKLHQDNQAKFVEFAGYEMPIQYSKGVIEEHKFTRAHAGIFDVSHMGQLFVYGNENLTSDLEKIFPLDLKNLQQNCSKYSFLMNEEAGVYDDLIITKLKDGYLIILNAACKEKDFEILSTKLSKKYKMELNSDRALVAIQGPKSVDILNEIINGVKDLTFMTGNWFEFNDQKVFVTRSGYTGEDGFEVSIINDEAEEFTKSLINKGAKLIGLGARDTLRLEAGLCLYGHELDLNKTPVEANL

SEQ ID NO: 107693 - protein, 294 aa, Unknown
  Bacterial polypetide isolated from the Sargasso Sea
MNKKTSLYQNHLEAKAKMVDFHGWDMPINYGSQIEEHHSVRQGCGIFDVSHMTILDFDGSESELFIRKLIANDVRKLSENYSGLYSAMLNDKGCVIDDLIAYRMNKGFRLVVNCATRGEDLKWISARAKEYDVNMLEREDLSMVAIQGPQSPNVLKNFPAPIDFLKEKKRQQGIFQDDIFAAKTGYTGELGFEVILPNEKAIDLWNIAISEGAKPIGLAARDTLRLEAGMNLYGFEMDETISPFECNMGWTVCWQDDQRDFFGKESLIKQKESNDLKELVGIITDEKVILRQGQ

SEQ ID NO: 107694 - protein, 252 aa, Unknown
  Bacterial polypetide isolated from the Sargasso Sea
MRDELVRTALYDFHVSAGAKIVDFHGYELPIWYSSIQEEHLATRSSAGLFDVSHMGLFRFQGEEVRSWLSSVSTQEYMKFQPGRCGYTHFLDHDGRIIDDMIFAVSGESEVLGVPNSTMVGIMFQWLSDQLPSDGSVTILDMSDNTSIIALQGPLSGKIISEVLGFDNGVGVFRCQEIKQNELGISGWIQGTGYTGEAGVEIFVPNEQAPLLWDALNAHPSSTPVGLGARDTLRMEKGYLLSGQDFLWPGIS

SEQ ID NO: 107695 - protein, 263 aa, Unknown
  Bacterial polypetide isolated from the Sargasso Sea
MSNLLTTQFYNFHLEQKSKLIEFAGWDMPFSYDGTLKEHNYVRNDCGFFDVSHMGRIVLNIDQIENISKLICSNILNLENTKALYTIFTDINGKALDDVIFWKFENKLILICNASNREKISKHLTSNNIEFEDKTFDTSLIAIQGPNSAKHLKKLLDLPEHFSAKDSGEYIYARTGYTGEDGFEIMFDNSKVEEILNFITNNDIKPCGLGSRDTLRLEASLPLYGFELTEEISPVEANLKWVLTNENNYLGKDVIDDELNNGN

SEQ ID NO: 107696 - protein, 198 aa, Unknown
  Bacterial polypetide isolated from the Sargasso Sea
QEIGFDSDNQKLFVTRSGYTGEDGFEISISNDKAEKFVENLIEKGAQLIGLGARDTLRLEAGLCLYGHELDINKTPVEANLRWAISKSRLSSGDFIGSKKIMNQMQDGASQIRVGIKPEGRLIAREKTKIFNDTDKQIGEITSGTFGPSVNGPIAMGYVDKDFSKVDTKILLEVRGKKYPANICALPFYKKNYVKGVN

SEQ ID NO: 107697 - protein, 239 aa, Unknown
  Bacterial polypetide isolated from the Sargasso Sea
NNLNMSEISITNFKKDKVLLALQGKNSFNLFEEWIESSISHIPNFGCEYKIFEHISPKEKIFFSKTGYTGENGLEILLSKKAAINLWDFSISKNVAPCGLGARDTLRLEAGMHLYGQDINEETSPYEAGLGWLVHLENNHEFFGRRFLEEQSRLGIQKKLVGLSIEGKAIGRKGCAVFKGEENIGTITSGSWSPTKQQAIAFAYINTSHALINNEVQISIRGKKFKGVITKRAFYKKNY

SEQ ID NO: 107698 - protein, 299 aa, Unknown
  Bacterial polypetide isolated from the Sargasso Sea
TKNNIISLEKFIPLNLDNLKLGKSYYSFILNDKGGIIDDIIVSLANINNHENFYIVYNSSRKNTDEKIFKSIVENYSILENNSLIAIQGPISKDALDFLKIDYPNSFMKNISVKFCNETILISRTGYTGEDGFEISIPNSIVEKFINDLIKFENIKLCGLGSRDSLRLEAGLSLYGNDLNEEITPIEAQFKWAIDKDRLFNSSLNGYKILNSQINDGVKKIKVGLKLLSNSIIRSKMKLFDLEDNEIGLITSGGFSPSLKVSIGIGYINSEYRYDKVKSVIRKSMENINIVNLPFIPHI

SEQ ID NO: 107699 - protein, 138 aa, Unknown
  Bacterial polypetide isolated from the Sargasso Sea
KGGVIDDLIITRVDGGFNIILNAACKDNDTKEIAKCLDSDSKYELKKDLSLVALQGPKSETILEAIIPGVKQLKFMNGDYFKFQGKRIYVTRSGYTGEDGFEISLSNTNAENFTKLLSNKGAKPIGLGARDTLRLEAK

SEQ ID NO: 107700 - protein, 283 aa, Unknown
  Bacterial polypetide isolated from the Sargasso Sea
DLKNLKQNCSKYSFLMNEDAGIYDDLIITKIEEGYLIILNAACKDKDFEILSNLLGSKFKMNLDNNKSLIAIQGPKSVEILNSIINGVDQLNFMTGNWFDSDNQKLFVTRSGYTGEDGFEISISNDKAEKFVENLIEKGAQLIGLGARDTLRLEAGLCLYGHELDINKTPVEANLRWAISKSRLSNGGFIGSKKIMNQMQDGASQIRVGIKPEGRLIAREKTKIFNDTGKQIGEITSGTFGPSVNGPIAMGYVDKEFSKVDTKILLEVRGKKHPANVCALPFY

SEQ ID NO: 107701 - protein, 123 aa, Unknown
  Bacterial polypetide isolated from the Sargasso Sea
NILNKIVPGCIDLKFMNGNNYSIEGSNIYVTRSGYTGEDGFEISIKNEKAEIFVEKLLENGSKLIGLGARDTLRLEAGLCLYGNDLDIKTSPIEAKFKWAIPKSRINTEYPGSKILNFQLKRS

SEQ ID NO: 107702 - protein, 299 aa, Unknown
  Bacterial polypetide isolated from the Sargasso Sea
MYELHKKHNAKFVEFVGYSMPIQYSEGIVKEHNITRNKSGIFDVSHMGQLFIKYSDDVTDKLQEILPTDLKNLKINQSKYSFLMKENGGIYDDLIITRMKDHYMIILNAACKQNDLQIIKNKLNDKDLDMNNDLSLIAIQGPESKIILENVVSNVSKLKFMNGGNFSFENNEIFITRSGYTGEDGFEISIPNKVAISFVEELILKGSTLIGLGARDTLRLEAGLCLYGHDINENTSPVEANLKWAISKKRINDNFTGSQKIKKQIEEGVSKLRVGIKPETRVIARESTKIFDEKNMRLE

SEQ ID NO: 107703 - protein, 289 aa, Unknown
  Bacterial polypetide isolated from the Sargasso Sea
CRESAIVTDLSPLRKFEILGPDAENLMQYTLTRNVKKLSAGQVVYSAMCYENGCMIDDGTLMKFGQDNFRWIGGQEYGGEWLKEQAKKKNFKVWVKSSTDQIHNIAVQGPNSRKILEKFVWTPDTQPSIKDLEWFRLTIARIDSVTGTPIMISRTGYTGELGFEIWCHPKDAGTVWDKVFESGKEFKISPLGLEALDMVRIEAGLIFYGYEFDDKTDPFEAGIGFTVPLKTKEDDFIGKEELIKRKNNPQKKLVGLELVGHEPAVTGNTVHIGRGQVGVITSGMLSKTL

SEQ ID NO: 107704 - protein, 255 aa, Unknown
  Bacterial polypetide isolated from the Sargasso Sea
MTSPELLKTPLHAWHSEKGGKMVPFGGWDMPVQYSNGILSEHLATRRCGGLFDVSHMGRFRVEGRDTMTFLQRVLTNDASQLEPWQAQYTLIANENGGVIDDAYLYHPGGEFLIVVNASNRKKDWEHFQEQARQFEDLRLEDLSEEVAMIAVQGPQSEELISEFLKSGSLPERRHNRLSKISIMGEEMLISRTGYTGEPLCFEMFMSADAVTGIWEKLLQSGISRGMTAAGLGRSDTLRLEARLPLYGHELGDDP

SEQ ID NO: 107705 - protein, 229 aa, Unknown
  Bacterial polypetide isolated from the Sargasso Sea
MEKTALYNFHKNLGAKFVAFAGYEMPIQYKDGIVKEHISTRQTAGFFDVSHMGQLFISGSKSLEQNLEKIIPLDFKEIKINQSKYSFLINDKGGVIDDLIITRVEGGFNIILNAACKDNDTKEIAKCLDSDSKYELKKDLSLLALQGPKSETILEAIIPGVKQLKFMNGDYFKFQGKKIYVTRSGYTGEDGFEISLSNTNAENFTKLLSNKGAKPIGLGARDTLRLEAR

SEQ ID NO: 107706 - protein, 198 aa, Unknown
  Bacterial polypetide isolated from the Sargasso Sea
MTKNFINYNGYWLANNYTKYGAVKEYTSCRESAIVTDLSPLRKFEILGPDAENLMQYTLTRNVKKLSVGQVVYSAMCYENGCMIDDGTLMKFGQDNFRWIGGQEYGGEWLKEQAKKKNFKVWVKSSTDQIHNIAVQGPNSRKILEKFVWTPDTQPSIKDLQWFRLTIGRIDSVTGTPIMVSRTGYTGELGFEIWCHPK

SEQ ID NO: 107707 - protein, 249 aa, Unknown
  Bacterial polypetide isolated from the Sargasso Sea
SCHAANIEKDWEWIQKNLKNYDCAIKNLSDEIGLISVQGPNSLNLINEVFNFDFSQLKKFSFHNIKINNKSIIVSNTGYTGSKGYELYIDVNIVSDIWNQLFLKGEKYQIQAIGLGARDTLRMEMGYCLYGNDIDDTTTPFEANLMWVTNIEKDFIGKEKLLNSISSSSKKMINFKMVDRGIPRNGYDICNKEGDKIGNVTSGTFSPTNKVGIGIGYVNIKHSLGDEIFLLIRDKLVKAEITKLPLKNG

SEQ ID NO: 107708 - protein, 193 aa, Unknown
  Bacterial polypetide isolated from the Sargasso Sea
METQKTALYDYHKSLGAKFVPFAGYEMPVQYSSGIVDEHKLTRSSAGMFDVSHMGQLSIEGNEDLANELEKIIPIDLKKIKLNQSKYSFLTNEEGGIYDDLIVTKVEKGFNIILNAACKNNDFKIISDSLKNKFKITLHNNLSLIALQGPKSSQILEKIISGVSSLKFMNGNKFSFKNTDVYITRSGYTGEDG

SEQ ID NO: 107709 - protein, 278 aa, Unknown
  Bacterial polypetide isolated from the Sargasso Sea
MEIKKTSLNKLHQSNNAKFVEFAGYEMPIQYSKGIIEEHKFTRSHSGIFDVSHMGQLFIYGDESLTEELEKIFPLDLKNLKKNCSKYSFLMNEDAGIYDDLIITKIEEGYLIILNAACKDKDFEILYNLIGSKFKMSLDNTRSLIAIQGPKSVEILNSIINGVDQLNFMTGNWFDSDNKKLFVTRSGYTGEDGFEISISNENAEKFVENLIEKGAQLIGLGARDTLRLEAGLCLYGHELDINKTPVEANLKWAISKSRLSNGGFIGSKKIMHQMQDGA

SEQ ID NO: 107710 - protein, 236 aa, Unknown
  Bacterial polypetide isolated from the Sargasso Sea
MIKKTPLYNLHIQHGAKMVEFAGYQMPIQYESGIIQEHKFTRENAGIFDVSHMGQLFVTGSDQLTDDLEKIFPVNLKNLKTNQSKYSFLMNEKGGIYDDLIITKLKDSYLIILNAACKKQDFEIIKKKLDDKYELNLDESLSLIAIQGPKAKDVLGKVVSNTSNLKFMNGEEFEYDNSNIYITRSGYTGEDGFEVSLKNEKVEKFVDQLINHGARLIGLGARDTLRLEAGLCLYGN

SEQ ID NO: 107711 - protein, 251 aa, Unknown
  Bacterial polypetide isolated from the Sargasso Sea
MNKTYLNKFHQENNGHLVDFAGWEMPINYGSQINEHNLVRMDVGIFDVSHMAVFDLLGSNQTEFLKFLIPNDVRKILDSKRALYSPLLNESGGILDDLIVYHLGNDNFRIVSNCATREQNYAWFNKIASEFNVQIDFKSDASIIALQGPNSINNLSSLYNVELERFHLYQDDDVMIARTGYTGELGVEIISNASKGLEIWEHFISKDIQPIGLAARDTLRLEAGFNLYGSDMTAKNNPYDSNLEWTVDHSD

SEQ ID NO: 107712 - protein, 303 aa, Unknown
  Bacterial polypetide isolated from the Sargasso Sea
MGGEDLTADLEKIFPLDLKNLKQNCSKYSFLMNDSAGIYDDLIITKIENGYLIILNAACKDNDFKILSDLLNSKYEMALDDQRALIAIQGPKSVEILNNTIEGVEKLNFMTGNWFDYKDQKIFITRSGYTGEDGFEVSINNDLAEGFTQNLMEKGAQLIGLGARDTLRLEAGLCLYGHELDTEKTPIEANLKWAISKERISNGGFVGSDKIMKEIKEGTSKIRIGIKPEGRLIAREKTKIFDESEKLIGEVTSGTFGPSVNGPIAMGYIDKEFSKVDTKVLLEVRGKKHPASVCGLHFIKKVI

SEQ ID NO: 107713 - protein, 283 aa, Unknown
  Bacterial polypetide isolated from the Sargasso Sea
MPIQYSEGIVEEHKFTRNHSGIFDVSHMGQLFIYGGDELIKDLEKIFPLDLKNLKLNHSKYSFLMDKDAGIQDDLIITKINEGFLIILNAACKDNDFKILKELLNEKYKMVLDENRSLIAIQGPKSSQILNDVIDGVKDLNFMSGNWFLFDNQKVYITRSGYTGEDGFEISIPNNFADKLTRELIDKGSKLAGLGARDTLRLEAGLCLYGHDLDKDKTPVEANLKWAISKERISEGGFIGSDIIIKQLNNGVTKIRVGIKPEGRVIAREKTKIFNQSDVHMER

SEQ ID NO: 107714 - protein, 218 aa, Unknown
  Bacterial polypetide isolated from the Sargasso Sea
QGKHSEALVQKLCDTSLSEIEYYHFKKAKIYNYECIVARTGYTGEDGFEIYTDSNDIQSIFKKIIEQGKPFNLQPIGLGARDTLRLEMGYALYGNEINENSNPLEAGLGWVIKLKKDDFLGKSILKKQNDAGLSRKLVGIRLLERGVPRPHYRVLHEGSAVGELTSGTFSPSLNTGIGLCYVSTKYAKPGTKLDLEIRKSSVPAEVVKPPFLPSRVKK

SEQ ID NO: 107715 - protein, 292 aa, Unknown
  Bacterial polypetide isolated from the Sargasso Sea
CISSACPCDVDAANGWNPTDIFVRTYAKNNKYSKAITFRMKTDSEPKLTQETGFHKKTSELTRNFVEYKGFWLANNFTNSGTIKEYNACRESAIATDLSPLRKFEILGPDAENLMQYTLTRNVKKLSVGQVVYTAMCYENGCMLDDGTLFKFGQDNFRWIGGDEYSGEWLKEQAKKKNYKVWIKSATDHIHNIAVQGPNSRKILEKFVWTAPIQPSITELEWFRFNIARIDHETGTPIVISRTGYTGELGYEIWCHPKDASEVWDKVWEAGKEFDITPLGLEALDMGRIEAG

SEQ ID NO: 107716 - protein, 277 aa, Unknown
  Bacterial polypetide isolated from the Sargasso Sea
IYRWVNRVSMDIKKTSLNKLHQDSEAKFVEFAGYEMPIQYSKGVIEEHKFTRSHAGIFDVSHMGQLFIYGNENLTSDLEKIFPLDLKNLQQNCSKYSFLMNEEAGIYDDLIITKLEDGYLIILNAACKEKDFEILSNILSKKYKMELSNNRALVAIQGPKAVEILNETINGVKNLTFMTGDWFDYNSQKLFITRSGYTGEDGFEVSIINALAEEFTKSLIKKGAELIGLGARDTLRLEAGLCLYGHELDLNKTPVEANLKWAISKERLSNGGFVGSG

SEQ ID NO: 107717 - protein, 270 aa, Unknown
  Bacterial polypetide isolated from the Sargasso Sea
RVITKWEKTALYNYHKDLGAKFVSFAGYQMPIQYKDGIVKEHISTRSYAGFFDVSHMGQFFLEGDGTLADALEKIIPADLKSLKLNHSKYSFLLNNEGGIIDDLIITKTSKGFCIILNAACKENDVKQIQKFLHKDHNYFLNNDLSLIALQGPKAVEILEKLIPEVSNLKFMTGDNFRFDNENLYITRSGYTGEDGFEISIPNNKVEKLISFLKENKVIAVGLGARDTLRLEAGLCLYGHDLNEKINPIEANLKWAIAKRRREEGGFNGW

SEQ ID NO: 107718 - protein, 103 aa, Unknown
  Bacterial polypetide isolated from the Sargasso Sea
MKSTALLQFHIKLGAKMAEFAGYNMPISYTSINEEHDCVRNNVGVFDVSHMGEFLISGSGAKELVQKVTSNNVNTLEPGKAQYSCFPNKSGGIVDDLIVYCLK

SEQ ID NO: 107719 - protein, 310 aa, Unknown
  Bacterial polypetide isolated from the Sargasso Sea
MGQLFIYGDESLTEELEKIFPLDLKNLKQNCSKYSFLMNEDAGIYDDLIITKIEDGYLIILNAACKDKDFEILFSLLGLKFKMNLVKNRSLIAIQGPKSVEILNSFINGVDELNFMTGNWFDYDNQKIFVTRSGYTGEDGFEISISDDKAEKFVENLIEKGAQLIGLGARDTLRLEAGLCLYGHELDINKTPVEANLRWAISKSRLSNGGFIGSKKIMNQIQDGASQIRVGIKPEGRLIAREKTKIFDNKDTQIGEITSGTFGPSVNGPIAMGYVDKEFSKVDTKILLEVRGKKYPANVCALPFFKKNYV

SEQ ID NO: 107720 - protein, 297 aa, Unknown
  Bacterial polypetide isolated from the Sargasso Sea
KIFPTDLKNISVNQSKYSFLMNDNAGIYDDLIITKVKNGFNIVLNAACKNSDFKILKKLLKNKYEMNLKESYSLIAIQGPESVKVLEKVVSGVSELKFMHGNYFNYLDENIYITRSGYTGEDGFEISIKNKNVERLTETLIKEGGKLIGLGARDTLRLEAGLCLYGHDMDINKSPVEANLKWAISKNRISSGGFIGFKKIKSQIENGVKKVRVGIKPDGKIIAREKTVIFSEDNKNIGEITSGTFGPSVKAPVAMGYIENSFAKTNTKIFLEVRGKKHPASISNLPFYKKKLCERSK

SEQ ID NO: 107721 - protein, 210 aa, Unknown
  Bacterial polypetide isolated from the Sargasso Sea
MSNLLTTQLYNFHVDQKSKLIEFAGWNMPFSYDGTLKEHNYVRNNCGFFDVSHMGRLVLDIDQIQNVSKLICSDILNLGNSKALYTIFTNENGKALDDVIFWKFEDKLILICNASNREKISKHLINNNIEFEDETFNTCLIAIQGPNTENLLKEYLDLPEHFSAVDNGEYICARTGYTGEDGFEIMFKNSKIDEILNYIVSNEIKPCGLG

SEQ ID NO: 107722 - protein, 283 aa, Unknown
  Bacterial polypetide isolated from the Sargasso Sea
MEIKETSLINLHKSHGAKLVEFAGYHMPIQYSEGILSEHRFTRSNCGIFDVSHMGQLFIYSNENLTKDLEKIFPIDLQSLKINQSKYSFLMNEKGGICDDLIITKINKGYMIILNAACKNNDFKILKEKLNDNYKLELKENLSLIALQGPGAKTILGKIIPEITNLKFMHGGEFSYNDLKIYITRSGYTGEDGFEISIPNEIAEHFTKVLLKNGSKLIGLGARDTLRLEAGLCLYGNDLDTETTPIEANLKWAISKKRIDDQYPGSEIIKKQIETGVKKLRVE

SEQ ID NO: 107723 - protein, 227 aa, Unknown
  Bacterial polypetide isolated from the Sargasso Sea
METKKTSLYNLHQKNGAKFVDFAGYQMPVQYKEGIIEEHKYTRACSGIFDVSHMGQLFINGNDDLTKELEKIFPTDLTNLSINKSKYSFLMNENAGIHDDLIITKIENGFMIILNAACKENDFKIIKKKLDKKFDLKIREDLSLVALQGPEAKNVLEKIIPQSNNLKFMHGNSFPFKDINIYITRSGYTGEDGFEISIDNSKAESFVEVLLKNGSKLIGLGARDTLR

SEQ ID NO: 107724 - protein, 269 aa, Unknown
  Bacterial polypetide isolated from the Sargasso Sea
MSELLNPWQAHYTLIPNNNGGLIDDAYLFRTGDEYFLVVNASNREKDWNHLHGQAGSFNVSLEDQTSHISMIAFQGPLTESILVKLLEGGSMPETSRNRLSEITVAGTKIIVSRTGYTGEPLGFELFIPSEKVEEVWNCLYQAGFDDGIVTVGLGARDTLRLEAGMPLFGHEFGMDQEGKEIPAFAFPLTSVAVKFSARKGDFIGRQALNDQFKEVRKLKMGQYQSSEILPKRILPLALTDNGIARQGDPVFLNGSKVGLVTSGTMVPY

SEQ ID NO: 107725 - protein, 320 aa, Unknown
  Bacterial polypetide isolated from the Sargasso Sea
ELPLDIPLKNFHEANGAKMVTFAGFNMPINYKPGIINEHKNVRNHSGIFDVSHMGQVLIEVNSLNIKNLEKYIPLKLNNLRKNKSNYTFLLNKNGGVVDDLIVSLIEINSKSFLYIVYNASRKNEDEKIFFKCAPNAEILHVKNCLFAIQGPESIEVLNNIIELPIDMNFLDIDVIKYKKNSVIISRSGYTGEDGFEISISTEDSEVFIKDLLKNKNTMLCGLGSRDSLRLEAGLSLYGHELNESITPIEAGLLWALDKDRLKDSALNGNKILSDQLYNKPSIKKIGLVSANRSMLRDGMILFDNNKKNIGKITSGCFSP

SEQ ID NO: 107726 - protein, 264 aa, Unknown
  Bacterial polypetide isolated from the Sargasso Sea
KITGGYLIILNAACKENDFKIIKEKLNDKYDLQLSDKYSLIAIQGPEAKNILEKNINGVNKLKFMNGGNFKFQSSDVYVTRSGYTGEDGFEISIGNNYAESFVEEMLNMGAKLVGLGARDTLRLEAGLCLYGNDIGMNTTPIEANLRWAISKNRIDTEYPGSRIIKNQIKSGVDKIRVGIKPENRVIARGNTKIFNNEKKEIGKITSGTFGPSVEHSIAMGYVENKYAVLNTKLFLEVRGKKIPANVCNLPFYKKNYVKGEINV

SEQ ID NO: 107727 - protein, 294 aa, Unknown
  Bacterial polypetide isolated from the Sargasso Sea
FKNFHELNGAKMIEFAGYKMPIHYKSGIINEHKNVRKKSGIFDVSHMGQILIPDNEINILNLEKYIPLNLNRLFSNKSNYSFLLNNNAGIIDDILISKIEYEKKSYFYIVYNASRKIIDEDIFINSTNNFKILNNNCLIAIQGPESENVLKSIIEIPKEMNFLDIQTYNYNSKDIIISRTGYTGEDGFEISISKDHAENFIKKLILNNKSILCGLGSRDSLRLEAGLSLYGHELNEQITPIDAGLSWAINKDRLKDDSLNGNKILLDKLNNNPTNNKIGIISLNKSMIRDGMKL

SEQ ID NO: 107728 - protein, 282 aa, Unknown
  Bacterial polypetide isolated from the Sargasso Sea
GQLFLKGGDELTNDLQKIFPIDLAKISINQSKYSFLMKENGGIYDDLIITKLKDGYMIILNAACKEADLNILKNKIGEKYQINLSDNLSLIAIQGPKAKDVLDSIVPGVTKLKFMNGNQFKYNDLDIYITRSGYTGEDGFEISIDNKIVESFVEKLIEKGSTMIGLGARDTLRLEAGLCLYGHDLDENTSPIEANLKWAISKSKINEKFPGSDFIKKQYNEGVSKLRVGIKPETKVIARESTKIFDEKDNEIGKVTSGTFGPSVNGPIAMGYIHNDYSKKNT

SEQ ID NO: 107729 - protein, 198 aa, Unknown
  Bacterial polypetide isolated from the Sargasso Sea
MSNLLTTQFYNFHLEQKSKLIEFAGWDMPFSYDGTLKEHNYVRNDCGFFDVSHMGRIVLNIDQIENISKLICSDIVSLENTKALYTIFTDINGKALDDVIFWKFENKLVLICNASNREKISKHLTNNNIEFKDQTFDTSLIAIQGPNSANYLNKLLDLPEHFFAKESGEYIYARTGYTGEDGFEIMFDNSKVEEILNF

SEQ ID NO: 107730 - protein, 100 aa, Unknown
  Bacterial polypetide isolated from the Sargasso Sea
MIKTTPLYNSHVKLGAKMVDFAGYKMPIQYTGITAEHLNVRDNVGIFDVSHMGEFIVHGPESEQFLNYICSNKIENIKIGKAQYNLLINKNGGIIDDLIV

SEQ ID NO: 107731 - protein, 199 aa, Unknown
  Bacterial polypetide isolated from the Sargasso Sea
MSGNWFKFENQKVYITRSGYTGEDGFEISIANDFVDKLTRELINKGSKLIGLGARDTLRLEAGLCLYGHDLDKDKTPVEANLKWAISKERISKGDFIGSDIIIKQLNDGVSKIRVGIKPEGRIIAREKTKIFNQSDVHIGEITSGTFGPSVNGPVAMGYVENEFSKKNTKVFLEVRGKKHPASICSLPFYKKSYVKGVN

SEQ ID NO: 107732 - protein, 211 aa, Unknown
  Bacterial polypetide isolated from the Sargasso Sea
GLFEEWIESSISHIPNFGCEYKIFEHISPKEKIFFSKTGYTGENGLEILLSKKAAINLWDFSISKNVAPCGLGARDTLRLEAGMHLYGQDINEETSPYEAGLGWLVHLENNHEFIGRRVLEEQSRLGIQKKLVGLSIKGKAIGRKGCAVLKGDENIGTITSGSWSPTKQQAIAFAYINTSHALINNEVQISIRGKKFKGVITKRVFYKKNY

SEQ ID NO: 107733 - protein, 270 aa, Unknown
  Bacterial polypetide isolated from the Sargasso Sea
MITNEGDGYFLVVNASRTKEGLDEIEHAADSFSEININHLEENGMIAIQGPKAKDVAGEYFKEVNETMYFMDFINTKYNGNEVRISRIGYTGEDGFEISSNSETIFEITKSISSDERVTMCGLGARDTLRLEAGLPLYGNELNEDITPVQADLSFAISPSRINEKNFRGAERIINEIKNGSEYTRIGLLPEGRRPVRKGTEIIKNGKKIGEISSGGYGPTIKSPIAMGIIKSEFLNLNENLQAKLGDSLITMKIIELPFVEHKYYRKGKN

SEQ ID NO: 107734 - protein, 264 aa, Unknown
  Bacterial polypetide isolated from the Sargasso Sea
YSGEWLRELANKLKLSAWVKTSTDQLHNISVQGPNSRKLLSKVIWTAPDHPSVNDLKWFNFTISRIGDHKGAPLMVSRTGYTGELGYELYCHPKDAPTIWDAVWSAGQEFNITPMGFEALDMLRIEAGLVLGGNEFSDETDPFEAGIGFTVPLKTKEQNFIGKEALIKRKEYPQKKLVGLEIEGNEKVNHGDCVHSGRGQVGIITSGTFSPTLNKNIALSRVDIHSSDLETKLEIGKLDGHQKRIRAKVVKFPFYDPDKTRVRS

SEQ ID NO: 107735 - protein, 148 aa, Unknown
  Bacterial polypetide isolated from the Sargasso Sea
RKNGADEIGLGARDVLRLEASLPLHGNEITENTNPFAAKLGMFVKLDRENYLINSKLTSLKSTSQEKVLVGFEIQGRNIARSHNSVLDSENNIIGEVTSGSFSPTLNTSIGLAYVKNSFTDLNSEVKINIRSKNITAKIIKTPFYKRS

SEQ ID NO: 107736 - protein, 178 aa, Unknown
  Bacterial polypetide isolated from the Sargasso Sea
KNSFDLFEEWIGSSISHIPNFGCEYKIFEHISPKEKIFFSKTGYTGENGLEILLSKKAAINLWDFSISKNVAPCGLGARDTLRLEAGMHLYGQDINEETSPYEAGLGWLVHLENNHEFFGRRFLEEQSRLGIQKKLVGLSIEGKAIGRKGCAVLKGEENIGTITSGSWSPTKQQAIAF

SEQ ID NO: 107737 - protein, 291 aa, Unknown
  Bacterial polypetide isolated from the Sargasso Sea
ISTRQAAGFFDVSHMGQLFISGDKSSEKSLERIIPLDFKEIKINQSKYSFLINDKGGVIDDLIITRVDGGFNIILNAACKDNDIKEIAKCLNSESKYELRKDLSLIALQGPKSETILESFVGGVKELKFMNGNYFKFQGKKIYITRSGYTGEDGFEISVPNTDAENFTKLLSDKGAKPIGLGARDTLRLEAGLCLYGNELNQDISPVQANLKWAISKRRREEGGFKGWENIKNDLLNGVSKIRVGIKPSGRVIAREGTKIFSSSGEEIGIVTSGTFGPSVNAPVSMGYIQE

SEQ ID NO: 107738 - protein, 152 aa, Unknown
  Bacterial polypetide isolated from the Sargasso Sea
MTELKKTALFDLHRSLGAKAIPFAGYEMPVNYPLGIMKEHLYCRKSAGLFDVSHMGQLVISSNTQSMQFIASELEKLLPIDVLGLSEDRQRYGFLPNKEGGIIDDLMVSNRGDHYFVVINASRKEIDFKYLRENISKEIDVDFIKTRALIAI

SEQ ID NO: 107739 - protein, 291 aa, Unknown
  Bacterial polypetide isolated from the Sargasso Sea
STSPTWGVLTLTGPGVKDTLQGLVPSDLQRIGPGEAQYTVLLNEAGGIRDDLIVYDRNDNEVLVVINAACADSDTAWLKAQLEPQGVTVSDRKDGGVLLALQGPEAVGRLEQICSESLAGVPRFGHRDLHINGSTIFAARTGYTGEDGFELLLSAQAGAELWQQLLASGVTPCGLGARDSLRLEAAMHLYGNDMDEQTSPLECSLGWLVHLEMPIDFIGREALERQTSEGVKRRLVGLQLPGRTIARHDYPVLHGGERVGVVTSGTFSPTLQQPIALASVPAGLAKVGTEL

SEQ ID NO: 107740 - protein, 340 aa, Unknown
  Bacterial polypetide isolated from the Sargasso Sea
FAGYEMPIQYKDGIVNEHKTTRTKSGIFDVSHMGQLFIYEADYLTEDLEKIFPIDLKKLNLNQSKYSFLMNEDGGIFDDLIITKIKEGYLIILNAACKNNDFKIISSKLNNKYKIKLSDELSLIAIQGPESKNVLGKVIPEIANLRFMHGESFEFKSSNIYITRSGYTGEDGFEISIHNDKAENFVKQLLEYGSKLIGLGARDTLRLEAGLCLYGNDIDIKTSPIEANLKWAIAKNRINSNYPGSKIIKNQIESGVKKLRVGIKPETRTIARGETKIFNDQNKEIGKVTSGTFGPSVEHSIAMGYVDNNYTSINTKVFLEVRGKKIPANICNLPFYKKNM

SEQ ID NO: 107741 - protein, 214 aa, Unknown
  Bacterial polypetide isolated from the Sargasso Sea
MNPKEKELILKTKLFDLHAVYGARFIEFAGYLVPLAYGTGTIKETIVSRQTASAFDVSHMGQINIFGDSASSEIDKLVPSNISSLELNKSCYSVLLNSNGGIIDDLIITKKNNCLSLVVNASQKTKVMKILSEQLTSKLTVESLDQNSLISVQGPKSSEVLKVYFKGIDKLKFMHGYNATYNNTEIYISRSGYTGEDGFELSLPNDSVENFFET

SEQ ID NO: 107742 - protein, 335 aa, Unknown
  Bacterial polypetide isolated from the Sargasso Sea
EHISTGQSAGFFDVSHMGQLFISGNKSSEQSLEKIIPLDFKEIKINQSKYSFLINDKGGVIDDIIITRVEGGFNIILNAACKDNDIKEIAKCLNSDSKYELKKDFSLIALQGPKSENILDSIVQGVKQLKFMNGDYFKFEGQEIYITRSGYTGEDGFEISVQNKNVENFIKLLSNKGAKPIGLGARDTLRLEAGLCLYGHELNQDISPVQANLKWAISKRRRKEGGFNGWKNIKNDLQNGVSKIRVGIKPSGRIIAREGTKIFSPSGEEIGIVTSGTFGPSVNAPVAMGYILSKFSEINNKILLEVRGKKHDAVISKLPFYKKKLCQIGGKMRKK

SEQ ID NO: 107743 - protein, 219 aa, Unknown
  Bacterial polypetide isolated from the Sargasso Sea
PEAKNILNKIVPGCIDLKFMNGNNYSIEGSNIYVTRSGYTGEDGFEISIKNEKAEIFVEKLLENGSKLIGLGARDTLRLEAGLCLYGNDLDIKTSPIEANLKWAIPKSRINTEYPGSKILKFQIEKGVKKIRVGIKPETKVIARSDTKIFNDSNEEIGKITSGTFGPSVEHSIAMGYVENNYSSLDTKVFLEVRGKKVPANVCNLPFYKKNYFKGEINV

SEQ ID NO: 107744 - protein, 312 aa, Unknown
  Bacterial polypetide isolated from the Sargasso Sea
ATRRYGGIFDVSHMGRFRIFGKDTVSFLQHTLTNNVESIDSWQAQYTLIANENGGVIDDAYLYHPGEEYFLVVNASNREKDWNHLHKQSENFDVILVDETTKVGMIAFQGPLSGQILSEIKREGTMPETFRNSLSKITILGTEVLLARTGYTGEPLGFELFAPAEKISSIWARIEEEGHNKGVVAAGLGARDTLRLEAGMPLYGHEFGIDPEGNEIPAFAFPLTTVAVSFSERKGNFIGRNALRKQFEEVRKIRLGTYEPSAILPKRFLPLAVKDKGVARQGDEIFLSEKKVGFVTSGTMVPYWKFEGERCD

SEQ ID NO: 107745 - protein, 275 aa, Unknown
  Bacterial polypetide isolated from the Sargasso Sea
EEAGIYDDLIITKIEEGYLIILNAACKDKDFQILSKLLGSNFKMILDNERSLIALQGPKSVEILNSILNGVDKLNFMTGKWIDFKQQRVFVTRSGYTGEDGFEISIINNLAEEFTQKLIDKGAQLIGLGARDTLRLEAGLCLYGHELDINKTPVEANLKWAISKERLSNGGFIGSKKIINQIQGGTSQIRVGIKPEGRLIAREKTKIFRETDKQIGEITSGTFGPSINGPIAMGYVDKEFSKIDTKILLEVRGKKYPANICGLPFYKKNYVKGAN

SEQ ID NO: 107746 - protein, 119 aa, Unknown
  Bacterial polypetide isolated from the Sargasso Sea
MNKRTSLYQAHVELNAKMVDFHGWSMPINYGSQITEHNEVRESCGIFDVSHMTILDFHGKDSELFIRKLIANDVKKLKQDFEGLYSAMLNDNGGVIDDLIAYRLDSGYRLVVNCATRGE

SEQ ID NO: 107747 - protein, 171 aa, Unknown
  Bacterial polypetide isolated from the Sargasso Sea
MSQMKLEKTPLEMLHKENGATMVEFAGYNMPLQYRLGIKGEHLHTRSNSGLFDVSHMGQVLLRGESVLKDLEKLVPSDLQALEVGGMRYTVFTNEWGGIIDDLIVTRCDGYVLLVLNAAFKETDITLIRKNLNCEIEVMTDSALLALQGPASEKILNEIVPGVKELFFLQA

SEQ ID NO: 107748 - protein, 298 aa, Unknown
  Bacterial polypetide isolated from the Sargasso Sea
AKFVPFAGYEMPIQYKDGIVKEHISTRTHAGFFDVSHMGQFFLEGDETLIESLEKIIPADLKNLKTNHSKYSFLLNNEGGIIDDLIITRTEKGFCIILNAACKENDIKQISQFLKNNHKHLLNNDLSLIALQGPKSVEILDKLIPGVANLKFMTGNNFNYDGEKLYVTRSGYTGEDGFEISISNKKVEKFIDYLISNEVKPIGLGARDTLRLEAGLCLYGHDLNEKINPVEANLKWAIAKKRREVGGFNGWETIKELLAKGSEKIRVGIKPDGKVIARENTKIFSSENNEIGFVTSGT

SEQ ID NO: 107749 - protein, 201 aa, Unknown
  Bacterial polypetide isolated from the Sargasso Sea
MEVQKTALYNYHKNLGAKFVPFAGYEMPIQYKDGIVKEHISTRTHAGFFDVSHMGQFFLEGDETLIMSLEKIIPADLKNLKVNHSKYSFLLNNEGGIIDDLIITRTEKGFCIILNAACKENDIKQILQFLNKDHKHLLNNDLSLIALQGPKSVEILEKLIPGVANLKFMTGSNFDYEGEKLYVTRSGYTGEDGLKSQFLIQ

SEQ ID NO: 107750 - protein, 225 aa, Unknown
  Bacterial polypetide isolated from the Sargasso Sea
MGIQKTALYNFHKNLGAKFVPFAGYEMPIQYKDGIVKEHINTRQSAGFFDVSHMGQFFVSENNSSEQSLEKIIPLDFKEIKMNQSKYSFLINDKGGVIDDLIITRVEGGFNIILNAACKDNDVKEIAKCLNSKSKYELRKDISLIALQGPKSESILESIVKGVKQLKFMNGGYFEFKAKKIYITRSGYTGEDGFEISVPDSNVENFTKLLSDKGAKPIGLGARDT

SEQ ID NO: 107751 - protein, 248 aa, Unknown
  Bacterial polypetide isolated from the Sargasso Sea
MEVQKTALYNYHKNLGAKFVPFAGYEMPIQYKDGIVKEHISTRTHAGFFDVSHMGQFFLEGDETLVEALEKIIPADLKNLKINHSKYSFLLNNEGGIIDDLIITRTEKGFCIILNAACKENDIKQISQFLKKNHKYLLNNDLSLIALQGPKSVEILEKLITGVANLKFMTGSNFEYEGEKLYVTRSGYTGEDGFEISISNTKVEKLIDYLISNQVKPIGLGARDTLRLEAGLCLYGHDLNEKINPVEA

SEQ ID NO: 107752 - protein, 271 aa, Unknown
  Bacterial polypetide isolated from the Sargasso Sea
YSVITNNEGGIIDDIIVYKFNNEKFRVVSNCSTFHDVNNFFESNIIKFDCEFLHKPSLGILAIQGPKSEIALENILELELSNYRSFSFTERNELFVSRTGYTGEDGFEVIGEPEELQSIWDLCISESIPPIGLAARDTLRIEAGMNLNGADMTMKNNPFESNLGWVVDFSDVERDFIAKENLIEIKNTNKVKLVGVLLNEKGILRSGQKIIKDNFEGEVTSGTFSPYIKKSIGLARIPMDINENANVLIRNKLLNVKILSLPFIRKGKIMI

SEQ ID NO: 107753 - protein, 209 aa, Unknown
  Bacterial polypetide isolated from the Sargasso Sea
IDKSLETVWIAVQGPKTIELIDDRFEIPEKFSTAKSDNFMYARTGYTGEDGIEIMANNAEADSLISFLIEKGIKPCGLGSRDTLRLEASLPLYGFELTEDITPVEASLSWTITNELDFLGSERIKAQLEDGNHKSLKKFTIESRKIARTETIGMAGDISGVVTSGNFSPILNKSIGFILFENKPSQDLIEFDIRGNLIEGNIVNKRFLS

SEQ ID NO: 107754 - protein, 192 aa, Unknown
  Bacterial polypetide isolated from the Sargasso Sea
MTPLNDAHVALGAKMVPFAGYSMPVQYPTGIKAEHAAVRETAGLFDVSHMGEFIVRGPEALGLIQRISVNDASIIQVGQAQYSAMCLETGCVIDDLIIYRFPDQFMLVVNASNLAKDWAWVSKHASDFEVEVKDVSDQTALLALQGPCAREILRPLASLNVEEVKYYRFAEGEVAGVPAVISGTGYTGEDGF

SEQ ID NO: 107755 - protein, 204 aa, Unknown
  Bacterial polypetide isolated from the Sargasso Sea
MSDYRKTKLYDSHQSLKAKLVPFSGFWMPLQYSSIIKEHHHVRSKCGLFDVSHMGEFIVSGNNAKTFLQNVTTNDIRNLEAGKVQYSAFCNDSGVVIDDLLVYHLGDYYMLVVNASNIEKNSKWLSSKLIDDVSLEDKSDTMSLLALQGPLSRTHLKKLYPKIKDLKYYETLLPDKNEVIVARTGYSGELGFEIYAPNSIILKL

SEQ ID NO: 107756 - protein, 166 aa, Unknown
  Bacterial polypetide isolated from the Sargasso Sea
MKKTILNEIHKELGAKMGEFAGYEMPIQYAGVKHEHLNVRNNVGVFDVSHMGEFVVSGPNAEKLLQKICSNDIQKIKVGQAQYNCLPNEKGGVIDDLIIYRTKKEEYLLVVNASNIKKDWNWIIKWNMIYNAEINDISDETCLIAIQGPNAMKLVKKLSKIDSLPY

SEQ ID NO: 107757 - protein, 291 aa, Unknown
  Bacterial polypetide isolated from the Sargasso Sea
MYQLHKDSNAKFVEFAGYQMPIQYSEGIVEEHKFTRNHSGIFDVSHMGQLFIYGGEDLIKDLEKIFPLNLKNLKLNHSKYSFLMDKDAGIHDDLIITKINEGFLIILNAACKDNDFKILKELLNEKHKMVLDVNRSLIAIQGPKSSQILNEIVDEVKNLNFMSGNWFLFENQKVYITRSGYTGEDGFEISIPNNFADKLTRELINKGSKLVGLGARDTLRLEAGLCLYGHDLDKDKTPVEANLKWAISKERISKGDFIGSDIIIKQLTDGVSKIRVGIKPEGRIIAREKQK

SEQ ID NO: 107758 - protein, 196 aa, Unknown
  Bacterial polypetide isolated from the Sargasso Sea
MTSPELLKTPLHAWHSENGGKMFPFGGWDMPVQYADGILSEHLATRRCGGLFDVSHMGRFRVEGRDTMAFLQRVLTNDASLLEPWQAQYTLIANENGGVIDDAYLYHPEGEFLIVVNASNRKKDWEHFQEQARQFEDLRLEDLSEKVAMIAVQGPQSEELISEFLESGSLPERRHNRLSKISIMGEEMLISRTGYT

SEQ ID NO: 107759 - protein, 207 aa, Unknown
  Bacterial polypetide isolated from the Sargasso Sea
MTEKNISTENLLRTSLYSWHTANGGKMVDFGGWEMPVQYENGILKEHLGTRRYGGLFDVSHMGRFRIQGKDTIAFLQHVLSNNAESLEPWQAQYTLIPNNNGGLLDDAYLYRPGGEYFLVVNASNREKDWNHLHEQAKAYDVSMEDQTSQISMIAFQGPLTGRILARLLEGGSMPETFRNSISEIMLAGTRIIAARTGYTGEPVGFE

SEQ ID NO: 107760 - protein, 301 aa, Unknown
  Bacterial polypetide isolated from the Sargasso Sea
TDIFVRTYPKEKKISKGVAFRVNTDSEPKLTQETGFHKKTSNLTKNFINYNGFWLANNYTKYGAVKEYTACRESAIVTDLSPLRKFEILGPDAENLMQYTLTRNVKKLSVGQIVYTAMCYENGCMIDDGTIMKLGQDNFRWVGGQEYGGEWLKEQAKKKNFKVWIKSSTDQIHNIAVQGPNSRKILQKFVWTPDTQPSIESLEWFRLTIARIDSVTGIPIVVSRTGYTGELGYEIWCHPKDAGALWDKVWEAGKEFNISPLGLEALDMVRIEAGLIFYGYEFDDKTDPFEAGIGFTVPLKQ

SEQ ID NO: 107761 - protein, 282 aa, Unknown
  Bacterial polypetide isolated from the Sargasso Sea
INPKDYIQKLFPTNLYSFSEGQGLYTVMLNDKGGIIDDLIIYDLGIQENDLSELLLIVNASRYEEDFQWIKNNLYMSEISTTNFKKDKVLLALQGKNSFDLFEEWIESPISHIPNFGCEYKIFEHISPKEKIFVSKTGYTGENGLEILLSKKAAVNLWDFLISKNVAPCGLGARDTLRLEAGMHLYGQDINEETSPYEAGLGWLVHLENNHEFFGRRFLEEQSRLGIQKKLVGLSIEGKAIGRKGCAVLKGEENIGTITSGSWSPTKQQAIAFAYINTSHAL

SEQ ID NO: 107762 - protein, 261 aa, Unknown
  Bacterial polypetide isolated from the Sargasso Sea
MGVQKTALYDLHKSLGAKFVPFAGYEMPIQYRDGIVKEHISTRTHAGFFDVSHMGQFFLEGDETLEEALEKIIPSDLKSLKLNHSKYSFLLNDNGGIIDDLIVTKTNKGFCIILNAACKENDIKHISKFLDKNHNYFLNNDLSLIALQGPKSVEILEKLIPGVSELKFMTGNNFSYDSESLYITRSGYTGEDGFEISISNKKVKNLINFLIKNGVKPIGLGARDTLRLEAGLCLYGHDLNEKINPIEANLKWAIAKKRKET

SEQ ID NO: 107763 - protein, 248 aa, Unknown
  Bacterial polypetide isolated from the Sargasso Sea
MNIKKTSLNNLHIKYGAKLVEFAGYQMPIQYKDGIIQEHKYTRSHSGIFDVSHMGQLFISGGDDLTNDLEKIFPADLKKLKTNQSKYSFLMNNKGGIQDDLIITKTSDGFLIILNAACKYNDYEVIKSKLDNQYKLNLDESLSLIALQGPEAKNVLNKVIPGCNSLKFMNGNNHVYKNEKVYITRSGYTGEDGFEISIKNSDAETFVESLIENGSKLIGLGARDTLRMEAGLCLYGNDLDNDTSPIEA

SEQ ID NO: 107764 - protein, 196 aa, Unknown
  Bacterial polypetide isolated from the Sargasso Sea
MGGDFNYNNFNLYVTRSGYTGEDGFEISIPNEIAENFTKILLKNGSKLIGLGARDTLRLEAGLCLYGNDLDTETTPIEANLKWAISKKRIDDQYPGSEVIKKQFFSGVKKLRVGIKPDTKVIARANTKIYNDDNKEIGKITSGTFGPSVEYPISMGYIDNNYSSIDTKIFLEIRGKKIAANVCKLPFYQKNYLKEI

SEQ ID NO: 107765 - protein, 72 aa, Unknown
  Bacterial polypetide isolated from the Sargasso Sea
MKKTPLYDWHISNSNNLVPFGGFLLPVYYSSIVEEHKNVRSRAGLFDVSHMGEFIISGSASEKFMQLVTIND

SEQ ID NO: 107766 - protein, 177 aa, Unknown
  Bacterial polypetide isolated from the Sargasso Sea
MKFKKTTLYENHKSLKGNMVNFAGFLLPTHYSSIKEEHLSVRHFAGLFDVSHMGEIIIEGPNAKRFLQFITTNNIELLSYGKAQYSIICNHEGGIIDDVLIYQKQKNYMMVVNASNKQKIVKWLNSYDLKGVNIKDISDEIGLIAIQGPKSIKILDKALNLNLNHLLFYRFIDKKVK

SEQ ID NO: 107767 - protein, 231 aa, Unknown
  Bacterial polypetide isolated from the Sargasso Sea
MDTKKTPLYQLHQDSKAKFVEFAGYQMPIQYAEGIVEEHRYTRNHSGIFDVSHMGQLFIYGQEDLVDDLERIFPLDLKNLKLNHSKYSFLMSDNAGIYDDLIITKIKDGFLIILNAACKENDYKILKELLNDKYKMILDEERSLIAIQGPKSVEILKSVIQGVENLNFMSGNWFTLDDHNIYVTRSGYTGEDGFEVSLTNEFAVRFTRRLIDKGAKLIGLGARDTLRLEAG

SEQ ID NO: 107768 - protein, 213 aa, Unknown
  Bacterial polypetide isolated from the Sargasso Sea
MKTTPLYEFHDKMGAKFVEFNGWHMPVWFEGLKEEHLCVRESLGIFDVSHMGEIEISGTDSEVFVDYIFTNSILNLSDGQARYGFICNQSGGVVDDVIIYKMLNGAYFICVNAGNVSKVFDWLLENSNTYNVEIKNLSDFYGQLAIQGPNSIDFMDELFPLSEIKSIKKYRIASILELEESYADNLKWKCPNGNNFLIARTGYTGEEGFELFV

SEQ ID NO: 107769 - protein, 185 aa, Unknown
  Bacterial polypetide isolated from the Sargasso Sea
KKDKVLLALQGKNSFDLFEEWIGSSISHIPNFGCEYKIFEHISPKEKIFFSKTGYTGENGLEILLSKKAAINLWDFSISKNVAPCGLGARDTLRLEAGMHLYGQDINEETSPYEAGLGWLVHLENNHEFFGRRFLEEQSRLGIQKKLVGLSIEGKAIGRKGCAVLKNEENIGTITSGSWSPTKQQ

SEQ ID NO: 107770 - protein, 67 aa, Unknown
  Bacterial polypetide isolated from the Sargasso Sea
MTLQHTPLNAIHRSLGARMVDFGGWDMPVNYGSQIEEHHAVRQDAGVFDVSHMCVVDLTGARVRDFL

SEQ ID NO: 107771 - protein, 106 aa, Unknown
  Bacterial polypetide isolated from the Sargasso Sea
MKKTPLYEWHVLNSNNVVPFGGYLLPIYYSSIVEEHLNVRSKAGLFDVSHMGEFIISGPASEKFMQLVTINDVSRLSNGQAQYNAMCDNNGGLIDDVIFIKKIANS

SEQ ID NO: 107772 - protein, 278 aa, Unknown
  Bacterial polypetide isolated from the Sargasso Sea
FIYGDENLTEELERIFPLDLKNLKQNCSKYSFLMNEDAGIYDDLIITKIDGGYLIILNAACKDKDFEILSKLLGKKFKMNLDSNRSLIAIQGPKSVEILNSIINGVDQLKFMTGNWFVSDKQKLFVTRSGYTGEDGFEISISNDNAEKFVQNLIEKGAQLIGLGARDTLRLEAGLCLYGHELDTNKTPVEANLRWAISKSRLSNGGFIGSKKIMNQMQEGVNQIRVGIKPEGRLIAREKTKIFNDTDTQIGEITSGTFGPSVNGPIAMGYVDREFSKV

SEQ ID NO: 107773 - protein, 234 aa, Unknown
  Bacterial polypetide isolated from the Sargasso Sea
MERELFSPKEQISQAPRQRGQRRVNMEIKKTSLNKLHQSNNAKFVEFAGYEMPIQYSKGIIEEHKFTRSNSGIFDVSHMGQLFIYGDGSLTEELEKIFPLDLKNLKQNCSKYSFLMNEDAGIYDDLIITKIEEGYLIILNAACKDKDFEILSNLLGSKFKMNLDNNRSLIAIQGPKSVEILNSIINGVDQLNFMTGNWFDSNNQKLFVTRSGYTGEDGFEISIFNEEAEKFVKT

SEQ ID NO: 107774 - protein, 271 aa, Unknown
  Bacterial polypetide isolated from the Sargasso Sea
DGGIIDDLIVTKTEKGFCIILNAACKENDIKQISKFLGNNHKYLLNNDLSLIALQGPKSVKILEKLVPGVSNLKFMTGNKFKFDNENLYITRSGYTGEDGFEISISNKKVEKLINFLISNEVKPIGLGARDTLRLEAGLCLYGHDLNEKINPIEANLKWAIAKKRKDVGGFNGWDKIKNLLTNGSEKIRIGIKPEGKVIARENTKIFSKDDKEIGLVTSGTFGPSVNAPVAMGYVKSNFAKVGTPIKLEVRGKKYEGKVSELPFYKKSYVK

SEQ ID NO: 107775 - protein, 203 aa, Unknown
  Bacterial polypetide isolated from the Sargasso Sea
MKKTALFEKHHELGAKMVPFAGYEMPVQYKGVNIEHQTVRENVGIFDVSHMGEFIISGPNALNLIQKLSSNDASKLFPGRAQYAYLPNANGGVVDDLIIYMIDDQKYMLVVNASNIEKDWNWISEHNHNADIKNISDDMSLLAVQGPKAIDLLQELTDENLSEISFYHFKTMSFAGYDDIIVSSTGYTGSGGFELYVPNEYAA

SEQ ID NO: 107776 - protein, 268 aa, Unknown
  Bacterial polypetide isolated from the Sargasso Sea
ELEKIFPLDLKNLKLNCSKYSFLMNEDAGIYDDLIITKIEEGYLIILNAACKDKDFEILSSLLGSKFKMNLNNNRSLIAIQGPKSVEILNSIINGVDKLNFMTGNWFDSDNQKLFVTRSGYTGEDGFEISISNDKAEKFVQNLIEKGAQLIGLGARDTLRLEAGLCLYGHELDINKTPVEANLRWAISKSRLSNGGFIGSKKIMNQIQDGVSKMRVGIKPQGRLIAREKTKIFDDTDTQIGEITSGTFGPSVNGPIAMGYVDKVFSKS

SEQ ID NO: 107777 - protein, 225 aa, Unknown
  Bacterial polypetide isolated from the Sargasso Sea
FVEFAGYQMPIQYFEGIVEEHKFTRNHSGIFDVSHMGQLFIYGGEDLIKDLEKIFPLNLKNLKLNHSKYSFLMDKDAGIHDDLIITKINEGFLIILNAACKDNDFKILKELLNEKHKMVLDVNRSLIAIQGPKSSQILNEIVDGVKNLNFMSGNWFLFENQKVYITRSGYTGEDGFEISIPNNFADKLTRELINKGSKLVGLGARDTLRLEAGLCLYGHDLDKDK

SEQ ID NO: 107778 - protein, 306 aa, Unknown
  Bacterial polypetide isolated from the Sargasso Sea
AGICPFCFSSLENEHLQVRADSGVFDVSHMGEIIIEGNDALSFLDFTFTNKISSLKNGQAKYGFFCDSNGNVIDDVIAYKLDENKYFLCVNAGNIHIVFDWLVTNSKSYDVDIKNLSDFYGQLAIQGPNSMEYLSKIFPLTFSEEFKKYTIINIMDLDEKYQSKSLFDSLIEDNFLIARTGYTGEDGFELFVPNELIKEIYENILEDCPNIKPCGLGSRDTLRIEKGFPLHGNEFTKGTSPSDFNLDKFIDSSKHNFIGKDAILKKISENEFSFVGFLMEDNSIARNDYEIFNNGSNIGKVTSELS

SEQ ID NO: 107779 - protein, 290 aa, Unknown
  Bacterial polypetide isolated from the Sargasso Sea
HISTRTHAGFFDVSHMGQFFLEGDETLIDALEKIIPSDLKSLKVNHSKYSFLLNDNGGIIDDLIVTKTKKGFCIILNAACKENDIKHLSKFLGKNHKYFLNNDLSLIALQGPKSVEILEKLIPGVSKLKFMTGNNFGHDGENLYITRSGYTGEDGFEISICNKKVKNLIDFLINSGVKPIGLGARDTLRLEAGLCLYGHDLNEKINPVEANLKWAIAKKRKEDGGFNGWNKIKNLLTNGSEKIRVGIKPEGKVIARENTKIFSSNGEEIGFVTSGTFGPMCKQASSHGLC

SEQ ID NO: 107780 - protein, 199 aa, Unknown
  Bacterial polypetide isolated from the Sargasso Sea
MTGNWFDSDNRKLFVTRSGYTGEDGFEISISNDKAEKFVENLIEKGAQLIGLGARDTLRMEAGLCLYGHELDINKTPVEANLRWAISKSRLSNGGFIGSKKIMNQMQDGANQIRVGIKPEGRLIAREKTKIFDGTENQIGEITSGTFGPSVNGPIAMGYIDKEFSKVDTKILLEVRGKKHPANVCALPFYKKNYVKGVN

SEQ ID NO: 107781 - protein, 241 aa, Unknown
  Bacterial polypetide isolated from the Sargasso Sea
MGQLFITGSDQLTDDLEKIFPVNLKNLKINQSKYSFLMNEQGGIYDDLIITKLKHGYLIILNAACKKQDFEIIKKKLDDKYELNLDESLSLIAIQGPKAKDVLGKVVSNITNLKFMNGGEFEYDNSNIYITRSGYTGEDGFEISLENKKVEKFVDQLINYGAKLIGLGARDTLRLEAGLCLYGNDLDEKTSPIEANLKWAIPKSRVDSDYPGSNIIKKQLDDGVKTLRVGIKPETRVIARG

SEQ ID NO: 107782 - protein, 207 aa, Unknown
  Bacterial polypetide isolated from the Sargasso Sea
GVEDLSFMSGKWFLFEEQKIYITRSGYTGEDGFEISLPNDKAEKFTKKLIEKGAKLIGLGARDTLRMEAGLCLYGHELDKNKTPVEANLKWAISKDRVSKGNFIGSNIINKQLNDGVSKIRVGIKPEGRVIAREKTKIFNQSDSHIGEITSGTFGPSVNGPVAMGYVENEFSKKDTKVFLEVRGKKHPANICGLPFYKKSYVKGANK

SEQ ID NO: 107783 - protein, 171 aa, Unknown
  Bacterial polypetide isolated from the Sargasso Sea
AHINAALAKAKANGMDVDFIVHSDRSLLAFQGPKAMEVLQRVTEFDLSKLYFGMFTSMKVNGGDVWVTRTGYTGEDGFEISVPNADAVALAEKLESYDEVRFAALGPRDSLRLEAGLCLYGNDLTEDITPPEAGLTWTIGKARRELCDFTGGDIIKKQLEDPKSIPRRRIG

SEQ ID NO: 107784 - protein, 257 aa, Unknown
  Bacterial polypetide isolated from the Sargasso Sea
MSIKKTSLNNLHIKYGAKLVEFAGYQMPIQYKDGIIQEHKYTRTHSGIFDVSHMGQLFISGGDDLTNDLEKIFPADLKKLKINQSKYSFLMNNKGGIQDDLIITKTSDGFLIILNAACKYNDYEVIKSKLDNQYKLNLDESLSLIALQGPEAKNVLNKVIPGCNSLKFMNGNNYVYNNKKIYITRSGYTGEDGFEISIKHSDAETFVESLIENGSKLIGLGARDTLRMEAGLCLYGNDLDNDTSPIEANLKWAIPKS

SEQ ID NO: 107785 - protein, 231 aa, Unknown
  Bacterial polypetide isolated from the Sargasso Sea
YTIFTNENGKALDDVIFWKFEDKLILICNASNREKISNHLINNNIEFEDQTFDTCLIAVQGPNTENHLKDLLDLPNHFSAVDNGEYICARTGYTGEDGFEIMFNNSKVDEILNYIVRKEIKPCGLGSRDTLRLEASLPLYGFELTEEISPVEANLKWVITNEDDYLGKEIINNELNSSNHKTLKKFVINSKKIARTGTTVKSNNINGVVTSGNYSPILEKSIGFALFDSSP

SEQ ID NO: 107786 - protein, 280 aa, Unknown
  Bacterial polypetide isolated from the Sargasso Sea
SFNVSLEDQTSHISMIAFQGPLSESILTRHLEGGSMPESSRNRLSEIMLAGTKIIAARTGYTGEPLGFELFIPSEKVEDVWNCLYEAGSDEGIISVGLGARDTLRLEAGMPLFGHEFGIDQEGKEIPAFAFPLTTVAVKFSARKGDFIGRQALNDQFQEVRKFKMGQCQSSEILPKRIFPIALTDNGIARQGDPVFLNDSKVGLVTSGTMVPFWKFEGEGGTKSITDEHDRRAIAMAYIDAHIPTQQVLEVEVRGRRINSQLVSLHGSSKIPPYFRAISE

SEQ ID NO: 107787 - protein, 263 aa, Unknown
  Bacterial polypetide isolated from the Sargasso Sea
MNIKKTSLNNLHVKYGAKLVEFAGYQMPIQYKDGIIQEHKYTRSHSGIFDVSHMGQLFISGGDDLTNDLEKIFPADLKKLKTNQSKYSFLMNNKGGIQDDLIITKTSDGFLIILNAACKYNDYEVIKSKLDNQYKLNLDESLSLIALQGPEAKNVLNKVIPGCDSLKFMNGNNHVYKNEKVYITRSGYTGEDGFEISIRNSDAEIFVESLIENGSKLIGLGARDTLRMEAGLCLYGNDLDNDTSPIEANLKWAIPKSRIETEF

SEQ ID NO: 107788 - protein, 222 aa, Unknown
  Bacterial polypetide isolated from the Sargasso Sea
VLLALQGKNSFGLFEEWIESSISHIPNFGCEYKIFEHISPKEKIFFSKTGYTGENGLEILLSKKAAINLWDFLISKNVAPCGLGARDTLRLEAGMHLYGQDINEETSPYEAGLGWLVHLENNHEFIGRRVLEEQSRLGIQKKLVGLSIKGKAIGRKGCAVLKGDENIGTITSGSWSPTKQQAIAFAYINTSHALINNEVEILIRGKKFNGVITKRAFYKKNY

SEQ ID NO: 107789 - protein, 238 aa, Unknown
  Bacterial polypetide isolated from the Sargasso Sea
METQKTALYEYHKSLGAKFVPFAGYQMPVQYTSGIIDEHKLTRSSAGLFDVSHMGQLSIEGNEDLASELEKIIPTDLKKIKLNQSKYSFLTNEAGGIHDDLIVTKVEKGFNIILNAACKNSDFKIISSSLNNNFKIILHENLSLIALQGPKSSQILEKIINGVSSLKFMNGNKFSYYGKNIYITRSGYTGEDGFEISISNELVEDFAKKLISQNVKPIGLGARDTLRLEAGLCLYGHD

SEQ ID NO: 107790 - protein, 166 aa, Unknown
  Bacterial polypetide isolated from the Sargasso Sea
MNRTFLYESHLGLGSKFVNFSGWEMPIHYGSQINEHNSVRNSAGIFDVSHMNIFDFCGVEAKEFMRYVLTNDVNKIDDGSALYSVITNNKGGIIDDLIVYKFNNEKFRVVSNCSTFDDVNNFFESNIIKFDCEFHHKPSLGILAIQGPESEIALKNILKVELSNYK

SEQ ID NO: 107791 - protein, 259 aa, Unknown
  Bacterial polypetide isolated from the Sargasso Sea
MSIKKTSLNNLHIKYGAKLVEFAGYQMPIQYKDGIIQEHKYTRTHSGIFDVSHMGQLFISGGDDLTNDLEKIFPADLKKLKINQSKYSFLMNNKGGIQDDLIITKTSDGFLIILNAACKYNDYEVIKSKLDNQYKLNLDESLSLIALQGPEAKNVLNKVIPGCNSLKFMNGNNYVYNNKKIYITRSGYTGEDGFEISIKHSDAETFVESLIENGSKLIGLGARDTLRMEAGLCLYGNDLDNDTSPIEANLKWAIPKSRM

SEQ ID NO: 107792 - protein, 230 aa, Unknown
  Bacterial polypetide isolated from the Sargasso Sea
MIKKTSLYNLHKKHNAKLVEFAGYEMPIHYKDGIIQEHKFTRSNCGIFDVSHMGQLFIYGKENLTQDLENIFPIDLEKLNLNQSKYSFLMDENACIHDDLIITKILGGYLIILNAACKEDDLRIIKKKLNNKYDLQLKEDLSLIALQGPEAKNILEKKVEGVSKLKFMNGGNFKFSDINIFITRSGYTGEDGFEISIKNNYAEKFVEEMLSNGSKMIGLGARDTLRMEAG

SEQ ID NO: 107793 - protein, 174 aa, Unknown
  Bacterial polypetide isolated from the Sargasso Sea
MTELKKTALYDLHRSLGAKSIPFAGYEMPVNYPLGIMKEHLYCRKSAGLFDVSHMGQLVISSNSKSMEFIATELEKLLPIDVLGLDEDRQRYGFLPNKEGGIIDDLMISNRGNHYFVVINASRKEIDFKYLKENISKEIDVDLIQTRALIAIQGPQSEKILSTQIGDLSSLKIS

SEQ ID NO: 107794 - protein, 165 aa, Unknown
  Bacterial polypetide isolated from the Sargasso Sea
MKRTVLFDRHKKLNAKIVNFAGYMMPISYSSVNEEHIHVRNKVGIFDVSHMGEFEISGLNSLKFVQYLCSNDISKIDVGKAQYNCLTNESGGIIDDLIVYRLDLDKFLLVVNASNISKNWKWITSINEKFNCSISNLSDDISLLAIQGPEAESLCQKHTDKNLST

SEQ ID NO: 107795 - protein, 220 aa, Unknown
  Bacterial polypetide isolated from the Sargasso Sea
MGVQKTALYDLHKSLGAKFVPFAGYEMPIQYKDGIVKEHISTRTHAGFFDVSHMGQFFLEGDETLVEALEKIIPSDLKSLKVNHSKYSFLLNDDGGIIDDLIVTKTKKGFCIILNAACKENDIKHISKFLDKNHKYLLNNDLSLIALQGPKSVEILEKLIPGVSQLKFMTGNNFSYDSESLYITRSGYTGEDGFEISISNKKVKNLIDLLMKNRVKPIGL

SEQ ID NO: 107796 - protein, 340 aa, Unknown
  Bacterial polypetide isolated from the Sargasso Sea
MSDIKKTSLHDFHKSKNAKMIDFAGWSMPFSYDGTLKEHNYVRESAGYFDVSHMGRLRLNYSQIEEINYLICSDLINISNTKALYSIFTSDDGTAIDDVIFWKFEDDLILICNASNTNKIKTHLDIHSIDYEDLTMTTDLIAVQGKNAIELINSFMPIPDKFSTQKDNNIIYARTGYTGEDGVEVMLDNKDTMNFINKLESNGIKPCGLGSRDTLRLEASLPLYGFELTDEITPVEAGLKWTITNKDDYLGKAVIDEQITSRDHKHLKRFKLNAKQIARTGTICKSDGVEGIVTSGNISPILGYPIGYVLFKSNPSDDLVEFDIRGNLVEGNLLYKRFLS

SEQ ID NO: 107797 - protein, 294 aa, Unknown
  Bacterial polypetide isolated from the Sargasso Sea
LEYVCSNDISSMDIGRAQYNVFVNPSGGIVDDLIVYRTDVNKFMLVVNAANIQKDWMWLNTNLNRFDCTITDVSESTGLISIQGPKSLILISELFDCKFENLKKFSFKNIIFQNENIMVSNTGYTGSPGYELYAHNKIIPNVWEQLLNKGEKYNIKPIGLGARDTLRMEMGYCLYGKDIDDKTTPFEAKLMWITNLKKEFIGKEKVLSSIENSSKTMINFKMIERGIPRNGYEIKNKKGVKIGFVTSGTFSPSNKVGLGIGYINDSYKMSDKIFISIRNKLVKAEIIKLPINHG

SEQ ID NO: 107798 - protein, 362 aa, Unknown
  Bacterial polypetide isolated from the Sargasso Sea
MEKTALYNFHKNSGAKFVPFAGYEMPIQYKDGIVKEHINTRQSAGFFDVSHMGQFFVSGGRSTELSLEKIIPLDFKEIQMNQSKYSFLINDEGGVIDDLIITRVENGFNIILNAACKDNDIKEIAKCLNSESKYELRKDLSLIALQGPKSESILESIIKGVKELKFMNGNYFEFQEKKIYITRSGYTGEDGFEISVPNSIVENLIKLLTDKDAKPIGLGARDTLRLEAGLCLYGHELNQEINPIQADLKWAISKKRRETGGFKGWENIKKDLQNGVSKIRIGIKPAGKIIAREGTKIYSQSGEEIGVITSGTYGPSVNSPVAMGYIKSKFSEINNKILIEVRGKKHEAKVSKLPFYKKSYVK

SEQ ID NO: 107799 - protein, 371 aa, Unknown
  Bacterial polypetide isolated from the Sargasso Sea
MHTPLNNLHKKSHARMTPFAGYEMPLQYKNGIMSEHLHTRSHAGLFDVSHMGQVVLRGNDFKQTAKALETLIPMEVETLKADRQRYGFFTNSTGGISDDFMFSNRGDHIYMVVNASRKEDDIKYLRENLEPLGVSVRNLENRALIALQGPTSQKVLEEHFPEIAKMRFMDVSTIPIAGAECWVSRSGYTGDDGFEISIPSQAAEIVTTSLLKHETVELAGLGARDSLRLEAGLCLYGQDIDATTSPVAAGLKWAMHNSRLSGGYKEGKFPGAEKILSEISDGTEYKLVGFVPLGKAPIRANTELFGHGSSSDKIGWITSGSFSPTLKHPIALGYVKKEYSIQGNRVNAQVRGKLLEIEVTQLPFVKKNFKK

SEQ ID NO: 107800 - protein, 331 aa, Unknown
  Bacterial polypetide isolated from the Sargasso Sea
MEIKKTPLNKLHQDNNAKFVEFAGYEMPIQYSKGIIEEHKFTRSHSGIFDVSHMGQLFIYGDESLAEELEKIFPLDLKNLKLNSSKYSFLMNDEAGIYDDLIITKIEQGFLIILNAACKETDFKILSNILGTKFKMNLDNDRSLIAIQGPKSVEILNSIINGVDQLNFMTGNWFDSDNQKLFVTRSGYTGEDGFEISISNDNVEKFVENLIEKGAQLIGLGARDTLRLEAGLCLYGHELDINKTPVEANLRWAISKSRLSNGGFIGSKKIMNQMQNGASQIRVGIKPEGRLIAREKTKIFDNKDTQIGEITSGTFGPSVNGPIAMGYVDTE

SEQ ID NO: 107801 - protein, 367 aa, Unknown
  Bacterial polypetide isolated from the Sargasso Sea
METKKTPLYQLHQDCNAKFVEFAGYQMPIQYSEGIVEEHKFTRNHSGIFDVSHMGQLFIYGGEDLIKDLEKIFPLDLKNLKLNHSKYSFLMDKDAGIHDDLIITKTNEGFLIILNAACKENDFKILKELLKEKYKMVLDESRSLIAIQGPKSSEILNEVINGVKDLNFMSGNWFTFENQKVYITRSGYTGEDGFEISIANDFVDKLTRELINKGSKLIGLGARDTLRLEAGLCLYGHDLDKDKTPVEANLKWAISKERISKGDFIGSDIIIKQLNDGVSKIRVGIKPEGRIIAREKTKIFNQSDVHIGEITSGTFGPSVNGPVAMGYVENEFSKKNTKVFLEVRGKKHPASICSLPFYKKSYVKGVN

SEQ ID NO: 107802 - protein, 266 aa, Unknown
  Bacterial polypetide isolated from the Sargasso Sea
MKATYLNSKHKDLGGFMVDFSGWEMPLHYGSQLNEHNEVRTNVGIFDVSHMAVFDLDGEKQEDFLRFLLPNDIKKINGQNKAMYSPMLNYEGGILDDLIVYYLGNKSFRIVSNCATREKNLSWLSKIAEPFDVGIDFKSDYSILALQGPNSHKFIKSHIEKDISKFSVHNTDDVMIASTGYTGELGYEIICDQEKGIKFWNEFISNDIQPIGLAARDTLRLEAGLNLYGTDMDQTNTPYDSNIGWTIDLNDKDRDFIGKNALKKKK

SEQ ID NO: 107803 - protein, 377 aa, Unknown
  Bacterial polypetide isolated from the Sargasso Sea
MRGAPLRTSLYQSHISEGANMVDFHGYELPIWYSSIQEEHLATRNSAGLFDVSHMGLFRFVGEGVRSWLSSVSTQEYIKFQPGRCGYSHFLDHEGHIIDDMIFAISSEEEVLGVPNSTMVSIVFDWLSTNLPSDGSVKIEDLSQETSIIALQGPKSGAVLEDVLGSENRVKRFRCQEMASNELGLTGWIQGTGYTGEEGVEIFISNEDSTNLWEALISHPDVSPVGLGARDTLRLEKGYLLSGQDFLWPEISENTDFPTGFLGRTTAQTAVPFGLDLNHEFIGREALVISMDSASKFWGIECLERGPSPRPGHKVMDGQGEDSKIIGYVTSGGPSPSKKMTGIALGYLENCQVGDEVWIQSSSRRRIRSEVKRPPFV

SEQ ID NO: 107804 - protein, 367 aa, Unknown
  Bacterial polypetide isolated from the Sargasso Sea
MNVKKTALYELHKKNNAKFVEFAGYSMPIQYSEGIVKEHNTTRNKSGIFDVSHMGQLFIKYSDDITDKLQEILPTDLKNLKINQSKYSFLMKENGGIYDDLIITRMKDQYMIILNAACKQNDLQIIKNKINNQNLDINNDLSLIAIQGPESKTILENVVSNVSKLKFMNGGNFSFANNEIFITRSGYTGEDGFEISLPNKVAISFVEELILKGSSLIGLGARDTLRLEAGLCLYGHDINENTSPVEANLKWAISKNRINDNFTGSQKIKKQIEEGVSKLRVGIKPETRVIARESTKIFDEKDNEIGKVTSGTFGPSVNASIAMGYISNSHSKTDTKVFLEVRGKKVPANVCDLPFYRKSYVKGEANV

SEQ ID NO: 107805 - protein, 312 aa, Unknown
  Bacterial polypetide isolated from the Sargasso Sea
MSESKTTSLYDFHLSKNAKVIDFAGWSMPFSYDGTLKEHHYVRESAGYFDVSHMGRLRLNYSQIEEINYLICSDLKNISNTKALYSIFTSEEGTAIDDVIFWKFEDDLILICNASNTNKIKTHLDIHSINYEDLTTSTDLIAVQGKNAIDIVSNIMSVPDKFSTSKEGKYVYARTGYTGEDGLEVMLDTKDTLSFISELEDKGVKPCGLGSRDTLRLEASLPLYGFELTDDISPVEAGLKWTVTNKEDYLGKDVIDHQIESKEHKHLKRFKLNAKQIARTGTFCTSDGVEGMVTSGNISPILGYPIGFVLFK

SEQ ID NO: 107806 - protein, 232 aa, Unknown
  Bacterial polypetide isolated from the Sargasso Sea
MNLDNNRSLIAIQGPKSVEILNSIINGVDQLNFMTGNWFDSDNQKLFVTRSGYTGEDGFEISISNDKAEKFVENLIEKGAQLIGLGARDTLRLEAGLCLYGHELDINKTPVEANLRWAISKSRLSNGGFIGSKKIMNQMQDGASQIRVGIKPEGRLIAREKTKIFNDTDKQIGEITSGTFGPSVNGPIAMGYVDKEFSKVDTKILLEVRGKKHPANVCALPFYKKNYVKGVN

SEQ ID NO: 107807 - protein, 368 aa, Unknown
  Bacterial polypetide isolated from the Sargasso Sea
MSIKKTSLNNLHIKYGAKLVEFAGYQMPIQYKDGIIQEHKYTRSHSGIFDVSHMGQLFISGGDDLTNELEKIFPADLKKLKTNQSKYSFLMNNKGGIQDDLIITKTSDGFLIILNAACKYNDYEVIKSKLDNQYKLNLDESLSLIALQGPEAKNVLNKVIPGCDSLKFMNGNNYVYKNEKVYITRSGYTGEDGFEISIKNSDAETFVESLIENGSKLIGLGARDTLRMEAGLCLYGNDLDNDTSPIEANLKWAIPKSRIETEFVGSEVLKNQFQSGVKKLRVGIKPDSKVIARGNTKIYNDKNQEIGKVTSGTFGPSVEHPIAMGYVDNSYSTVNTKIFLEVRGKKIPANICNLPFYKKNYVKGEINV

SEQ ID NO: 107808 - protein, 295 aa, Unknown
  Bacterial polypetide isolated from the Sargasso Sea
MNQLPLDIPLKNFHQNNGAKILPFAGFNMPINYKTGIINEHKNVRNHSGIFDVSHMGQILIENNESYLHKLEKYIPLQLKNLIKNRSHYSFLLNNDGGVIDDLIISNIDIKDKPYLYIVYNASRKKEDEEIFISCAPNAEKIYNKNCLFAIQGPDSINVLKNIIDIPNNMNFFDILISKYDNNEIIVSRSGYTGEDGFELSIPNESAENLITDLLKNENTMLCGLGSRDSLRLEAGLSLYGHELNENITPIEAGLSWALDKERLEDKNLNGNKILSDQLKNKLSNKKIGLISTNK

SEQ ID NO: 107809 - protein, 363 aa, Unknown
  Bacterial polypetide isolated from the Sargasso Sea
KTSLYQLHQDCNAKFVEFAGYQMPIQYSEGIVEEHKFTRNHSGIFDVSHMGQLFIYGGDELIRDLEKIFPLDLKNLKLNHSKYSFLMDKDAGIQDDLIITKIDEGFLIILNAACKDNDFIILKELLNQKYKMVLDENRSLIAIQGPKSSQILNDVVDGVKDLNFMSGNWFVFENQKVYITRSGYTGEDGFEISVPNNFADKLTRELIDKGSKLVGLGARDTLRLEAGLCLYGHDLDKNKTPVEANLKWAISKERISKGDFIGSDIINKQLNDGVTKIRVGIKPEGRIIAREKTKIFNQSDVHIGEITSGTFGPSVNGPVAMGYVENEFSKKNTKVFLEVRGKKYAANICSLPFYKKSYVKGAN

SEQ ID NO: 107810 - protein, 370 aa, Unknown
  Bacterial polypetide isolated from the Sargasso Sea
MNVKKTTLFNLHKKHGAKFVNFAGYEMPIQYKDGIITEHNLTRNKSGIFDVSHMGQLFITGKDDLTENLQKILPTDLKKLSINQSKYSFLMKENGGIYDDLIITKIEDGYMIILNAACKKNDLLIIKSKLDNKFELILREDLSLVAIQGPESKDILEKIIPGVKKIKFMNGNKFSFNSEEIYITRSGYTGEDGFEISIKNNSVNKLVEKMIELGSNLIGLGARDTLRLEAGLCLYGHDINEETSPIEANLKWAISKNRINDEFTGAKEIKRQFNEGVKKIRVGIKPDSRVIARESTKIFDEKNNQIGKITSGTFGPSVNGPIAMGYVSNLFSKSNTKVFLEVRGKKIPASICDLPFYKKNYVKGEVDVRS

SEQ ID NO: 107811 - protein, 347 aa, Unknown
  Bacterial polypetide isolated from the Sargasso Sea
MKKTYLNEFHANNGGQMVDFAGWEMPVNYGSQISEHKDVRENVGIFDVSHMAVFDFEGSRQVEFLEHLLPNDVNKILASTRALYSPLLNDEGMILDDLIVYHLGDENFRIISNCGTRDQNNAWFKKVALNFDVAVDFKEEASIIALQGPKAKQYLGEMFDVDLEPFHIQTHDGVMIARTGYTGEVGFEIISNASRGLELWDYFIDKGIKPVGLAARDTLRLEAGFNLYGSDMTADNHPYESNLGWTIDMSNDVRDFIGKSALLDLQSDSKKLVGFHTDARGVLRSGTEIYFDGGTGIVTSGTWSPTFGKNIGLCRVDSNHPDTGNAKLRDKEINLYFCETNFLKYLK

SEQ ID NO: 107812 - protein, 368 aa, Unknown
  Bacterial polypetide isolated from the Sargasso Sea
MTTKKTSLYQLHQESNAKFVEFAGYQMPIQYSEGIVEEHKFTRNHSGIFDVSHMGQLFIYGDENLIKDLEKIFPLDLKNLKLNHSKYSFLMDKDAGIHDDLIITKTNEGFLIILNAACKDNDIKILKELLEEKYKMVLDENRSLIAIQGPKSSQILNDIIAGVKDLNFMSGNWFSFQDHKVYITRSGYTGEDGFEISIPNDFVDKLTRELINKGSKLIGLGARDTLRLEAGLCLYGHDLNKDKTPVEANLKWAISKERISKGDFIGSGIIIKQLNNGVSKIRVGIKPEGRIIAREKTKIFNQSDVHIGEITSGTFGPSVNGPVAMGYIENEFSKKDTKVFLEVRGKKHPANICGLPFYKKSYVKGATK

SEQ ID NO: 107813 - protein, 347 aa, Unknown
  Bacterial polypetide isolated from the Sargasso Sea
MKKTYLNEFHANNGGQMVDFAGWEMPVNYGSQISEHKEVRENVGIFDVSHMAVFDFAGSRQVEFLKHLLPNDANKILDSTRALYSPLLNDEGMILDDLIVYHLGDENFRIISNCGTRDQNNAWFTKVALNFDVAVDFKEEASIIALQGPKAKQCLDEMFDADLDPFHIKTLDDVMIARTGYTGEVGFEIISNASRGLELWNHFIEKGIKPVGLAARDTLRLEAGFNLYGSDMTIENHPYESNLGWTIDMSNDARDFIGKSALLDLQSDSKKLVGFHTDARGVLRAGTEVYFDGGSGIVTSGTWSPTFGKNIGLCRVDSNHPDTGNAKLRDKEINLHFCETNFLKYLK

SEQ ID NO: 107814 - protein, 347 aa, Unknown
  Bacterial polypetide isolated from the Sargasso Sea
MKKTYLNEFHANNGGQMVDFAGWEMPVNYGSQISEHKEVRENVGIFDVSHMAVFDFEGSRQVEFLKHLLPNDVNKILDSTRALYSPLLNDEGMILDDLIVYHLGNENFRIISNCGTRDQNNAWFKKMALNFDVAVDFKEEASIIALQGPKAKQCLGEIFDVDLEPFHIQTLDDVMIARTGYTGEVGFEIISNASRGLELWNHFIEKGIKPVGLAARDTLRLEAGFNLYGSDMTIENHPYESNLGWTIDMSNDARDFIGKSALLDLQSDSKKLVGFHTDARGVLRSGTEVYFDGGSGVVTSGTWSPTFGKNIGLCRVDSNHPDTGNAKLRDKEINLHFCETNFLKYLK

SEQ ID NO: 107815 - protein, 608 aa, Unknown
  Bacterial polypetide isolated from the Sargasso Sea
SKGKNDLSILNLKENSNGDYLKKAINNDEKILNLFKKKNLELNKSKSSIIFNEDCPMGEKIIIKSKDECTVMVSSPGDKMNVHNQNPPTSLTIFLHRAKFEIKKEQYVLPEPLYDPNSEKFIKRMTAETYDVKEGEYIQIIDTSGRQCSDFLAFDKKKLDKGIESIIDPTATRTFMGAAYPMPGLFSKFFDANHDPVIEVVRDTVGRHDTFNYACTAKYYEDMGYFGHINCSTNFNGVLKKYDVKPRKGWIAINLFFNTAIDANNVASFDEPWSRPGDYVLFRALKDLTCASSACPCDVDPANGWNPTDIFVRTYSKDKKISKGVAFRVNTNSEPKITQETGFHAKTSKLTKNFINYNGYWLANNYTKYGAVKEYTSCRESAIVTDLSPLRKFEILGPDAENLMQYTLTRNVKKLSAGQVVYSAMCYENGCMIDDGTLMKFGQDNFRWIGGQEYGGEWLKEQAKKKNFKVWVKSSTDQIHNIAVQGPNSRKILEKFVWTPDTQPSIKDLQWFRLTIGRIDSVTGTPIIVSRTGYTGELGFEIWCHPKDASIVWDKVWESGKEFNISPLGLEALDMVRTEAGLIFYGYEFDDKTDPFEAGIGFTVPLKN

SEQ ID NO: 107816 - protein, 199 aa, Unknown
  Bacterial polypetide isolated from the Sargasso Sea
LYLCSPSLPRRGPACAYEGGDLFISRTGYTGEDGFEVIGDHQKLQIIWNLCIAENIAPIGLGARDTLRIEAGMNLNGTDMTIENNPFESNLGWVVDFSDIERDFIAKENLTEIKESNKHKLVGVLLEEKGILRGGQKIIKNDLEGEVTSGTFSPFMKKSIGLARVPFNMNENANVLIRNKLLNVKILSLPFVRKGKIML

SEQ ID NO: 107817 - protein, 558 aa, Unknown
  Bacterial polypetide isolated from the Sargasso Sea
MIGSPGELMTVHNPNPPTSLTIFIHRAKFDINEEQYVLPEPLYDPISEIFVNRMSSETYEVKAGEYIQIIDPGGTQCSDFLPFNKRKLDKGIESIIDPTATRTFMGAAYPMPGLFSKFFDADHEPVIEVVRDTVGRHDTFNYACTSKYYEDMGYFGHINCSTNFNNSLKKYEVKPRKGWIAINLFFNTAIDANNVATFDEPWSRPGDYVLFRALKDLTCASSACPCDVDAANGWNPTDIFVRTYAKDKKISKGVAFRVSTDSEPKITKETGFHEKTSKLTKNFINYNGYWLANNYTNYGAVKEYTSCRESVIVTDLSPLRKFEILGPDAENLMQYTLTRNVKKLSAGQVVYSAMCYENGCMIDDGTLLKFGQDNFRWIGGQEYGGQWLKEQAKKKNFKVWVKSSTDQIHNIAVQGPNSRKILKKFVWTPDTQPSIDDLQWFRLTIARIDSVTGTPIVVSRTGYTGELGFEIRCHPKDASVVWDKVWEAGKEFNISPLGLEALDMVRIEAGLIFYGYEFDDKTDPFEAGIGFTVPLKTKEDDFIGKEELIKRKNNPQKK

SEQ ID NO: 107818 - protein, 248 aa, Unknown
  Bacterial polypetide isolated from the Sargasso Sea
MGTKKTSLYQLHQDCNAKFVEFAGYHMPIQYSEGIVEEHKFTRNHSGIFDVSHMGQLFIYGGEELIKDLEKIFPLDLKNLKLNHSKYSFLMDKDAGIQDDLIITKIDEGFLIILNAACKDNDFKILKELLNEKYKMVLDENRSLIAIQGPKSSQILNEAVDGVKDLNFMSGNWFLFDNQKVYITRSGYTGEDGFEISILNNYADKLTRELINKGSKLAGLGARDTLRLEAGLCLYGHDLDKDKTPVEA

SEQ ID NO: 107819 - protein, 364 aa, Unknown
  Bacterial polypetide isolated from the Sargasso Sea
MEVQKTALYNIHKSLGAKFVPFAGYEMPIQYKDGIVKEHISTRTFAGFFDVSHMGQFFLEGDETLTDALEKIIPADLRSLKINHSKYSFLLNDDGGIIDDLIVTKTEKGFCIILNAACKENDIKQISQFLGKNHKHLLNNQLSLIALQGPKSVEILEKLIPGVSNLRFMTGNKFNFDGENLYITRSGYTGEDGFEISISNKKVEKLINFLILNNVKPIGLGARDTLRLEAGLCLYGHDLNEKINPIEANLKWAIAKKRKDVGGFNGWDKIKILLTNGCEKIRVGIKPEGKIIARERTKIFSKDGNEIGFVTSGTFGPSVNAPVAMGYVKSKFAEVGTPIQLEIRGKKYGGKISELPFYKKSYVK

SEQ ID NO: 107820 - protein, 367 aa, Unknown
  Bacterial polypetide isolated from the Sargasso Sea
MNIKKTALYELHKKHNAKFVEFAGYSMPIQYSEGIVKEHNITRNKSGIFDVSHMGQLFIKYSNDITDKLQEILPTDLKNLKINQSKYSFLMKENGGIYDDLIITRMKDQYMIILNAACKQNDLQIIKNTLDDQNLDMNNNLSLVAIQGPESKTILENVVSNVSKLKFMNGENFTFKNNEIYITRSGYTGEDGFEISLPNKVAISFVEELISKGSTLIGLGARDTLRLEAGLCLYGHDINENTSPVEANLKWAISKNRINDNFIGSHQIKKQIEEGVSKLRVGIKPETRVIARESTKIFDEKDNEIGKVTSGTFGPSVNASIAMGYISNSHSKKDTKVYLEVRGKKVPANVCDLPFYKKSYVKGEANV

SEQ ID NO: 107821 - protein, 370 aa, Unknown
  Bacterial polypetide isolated from the Sargasso Sea
MNVKKTTLFNLHKKHGAKFVNFAGYDMPIQYKDGIIAEHNMTRNKSGIFDVSHMGQLFIKGKDDLTENLQKIFPTDLKKLSINQSKYSFLMKENGGIYDDLIITKIEDGYMVILNAACKENDLSIIKSKLDSKFELILRDDLSLVAIQGPESKDVLEKIIPGVKKIKFMNGNKFSFNSADIYITRSGYTGEDGFEISINNNLVNKLVEKMIELGSNLIGLGARDTLRLEAGLCLYGHDINEETSPLEANLKWAISKNRINDEFTGAKEIKRQFDEGVKKLRVGIKPESRVIARESTKIFDEKNNQIGKITSGTYGPSVNGPIAMGYVSNLFSKSNTRVFLEVRGKKIPASICDLPFYKKNYVKGEVDVRS

SEQ ID NO: 107822 - protein, 276 aa, Unknown
  Bacterial polypetide isolated from the Sargasso Sea
VVDDLIVSLIEINNKSVLYIVYNASRKNEDEQIFFKCAPKAEIIHTKNCLFAIQGPESIEVLNNIIEVPNDMNFLNIALLDYNKIKLIVSRTGYTGEDGFEISIPIEQSEVFLKDILKNKNTMLCGLGSRDSLRLEAGLSLYGHELNEYITPIEAGLSWALDKDRLNDTALNGYKILSDQLHNKPSNKKIGLISVNRSMLRDGMILFDSNKNNIGKITSGCFSPNLNKSIAIGYVNSHFDEKKEIFCEIRNKMELVKKTSLPFVRKNYKKNGSNNE

SEQ ID NO: 107823 - protein, 364 aa, Unknown
  Bacterial polypetide isolated from the Sargasso Sea
MEVQKTALYNYHKNLGAKFVPFAGYEMPIQYKDGIVKEHISTRTHAGFFDVSHMGQFFLEGDETLIESLEKIIPADLKNLKINHSKYSFLLNNEGGIIDDLIITRTEKGFCIILNAACKENDIKQISQFLKKHHKHLLNNDLSLIALQGPKSVEILEKLIPGVANLKFMTGNNFEYEGENLYVTRSGYTGEDGFEISISNTKVEKLIDYLISNEVKPIGLGARDTLRLEAGLCLYGHDLNEKINPVEANLKWAIAKKRKEVGGFNGWEKIKNLLANGSEKIRVGIKPDGKVIARENTKIFSSDNNEIGFVTSGTFGPSVNAPVAMGYVKSEFSEVGTSIQLEVRGKKYGGKISELPFYKKSYVK

SEQ ID NO: 107824 - protein, 230 aa, Unknown
  Bacterial polypetide isolated from the Sargasso Sea
MEVQKTALYNIHKNLGAKFVPFAGYEMPIQYKDGVVKEHISTRTYAGFFDVSHMGQFFLEGDETLTEALEKIIPADLKSLKINHSKYSFLLNNDGGIIDDLIVTKTEKGFSIILNAACKENDIKQISKFLEKKHKYLLNNDLSLIALQGPKSVKILEKLIPGVSNLKFMTGNNFDYDNENLYITRSGYTGEDGFEISISNKKVEKLISFLISNQVKPIGLGARDTLRLEA

SEQ ID NO: 107825 - protein, 278 aa, Unknown
  Bacterial polypetide isolated from the Sargasso Sea
MLTTDAGTIIDDILVTRGDDGLFVVVNASRFDVDLPHMQTEIGADVEIKVLTDQALIALQGPKAAAALSNLSLEVAAMPFMSARTITIGGIEALINRCGYTGEDGFEISVPADGAEDLVRTMLADNRVEMAGLGARDTLRLEAGLCLYGQDIDETTTPIEAGLKWTIAKRRREEGGFPGAKVILNQIANGTTRRLVGIRPASRAPARAGTAIKSLDGEPLGEITSGAFGPTIGGPVAMGYVAEGSNNTGTTVQLDIRGNTVPATITALPFTPRRYFEN

SEQ ID NO: 107826 - protein, 319 aa, Unknown
  Bacterial polypetide isolated from the Sargasso Sea
METKKTSLNSLHQKYGAKLVEFAGYEMPIQYKDGIVQEHKFTRSSSGIFDVSHMGQLFISGSDNLTKDLERIFPANLENLNLNQSKYSFLMNNEGGIYDDLIITKIEKGYLIILNAACKHNDYEIIKSKLKDKYEIKLDETLSLVAIQGPEAKVILSKIIPGCNDLKFMNGNNFIFEDTNIYITRSGYTGEDGFEISIKNEKAEDFVEKLIEKGSKMIGLGARDTLRLEAGLCLYGNDLDTKTSPIEANLRWAIPKNRINSEYPGSNVLKKQIENGVKRLRVGIKPETRIIARGETKIFNDNNQQIGKIKSGTFGPKRR

SEQ ID NO: 107827 - protein, 335 aa, Unknown
  Bacterial polypetide isolated from the Sargasso Sea
MEKTALYNFHKNLGAKFVPFAGYEMPIQYKDGIVKEHISTRQSAGFFDVSHMGQLFVSGNKSSEQSLEKIIPLDFKEIKMNQSKYSFLINDKGGVIDDLIITRVEGGFNIILNAACKANDIKEIAKCLNSENKYQLRKDLSLIALQGPKSESILEFIVKGAKQLKFMNGGYFEFQGKKIYITRSGYTGEDGFEISVPNTNVENFTKLLSDKGAKPIGLGARDTLRLEAGLCLYGHELNQDINPVQANLKWAISKRRREEGGFKGWENIKNDLQNGVSKIRVGIKPSGRIIAREGTKIFSLSGEEIGVITSGTFGPSVNSPVAMGYIKSKFSEINN

SEQ ID NO: 107828 - protein, 63 aa, Unknown
  Bacterial polypetide isolated from the Sargasso Sea
TAAGDGEITSGTFSPSLSLSIALARLPKDVTIGTDVQVEIRDRKLTATVVKLPFVRNGKALVS

SEQ ID NO: 107829 - protein, 362 aa, Unknown
  Bacterial polypetide isolated from the Sargasso Sea
MEKTALYNFHKNLGAKFVPFAGYEMPIQYKEGIVKEHISTRLYAGFFDVSHMGQLFISGNKFSEDSLEKIIPLDFKEIKMNQSKYSFLINDEGGVIDDLIITRVEGGFNIILNAACKDNDIKEISKCLNSDSKYELRKDLSLIALQGPKSESILESIVNGVKQLKFMNGGYFDFEGNKIYITRSGYTGEDGFEISIPNTNVESFTKLLSDKGAKPIGLGARDTLRLEAGLCLYGHELNQNINPIQANLKWAISKRRREEGGFKGWENIKKDLQHGVSKIRIGVKPSGRIIAREGTKIFSSSNEEIGVITSGTFGPSVNSPVAMGYIKSKFSEINNKIFLEVRGKKHEAVVSKLPFYKKSYVK

SEQ ID NO: 107830 - protein, 318 aa, Unknown
  Bacterial polypetide isolated from the Sargasso Sea
MNQLPIDIPLKNFHQNNGAKILPFAGFNMPINYKTGIINEHKNVRNHSGIFDVSHMGQILIENNESYLHKLEKYIPLQLKKLIKNRSHYSFLLNKDGGVIDDLIISNIDIKDKSYLYIVYNASRKKEDEEIFISCAPNAEKIYNKNCLFAIQGPDSINVLKNIIDIPNNMNFFDILISKYNNNEIIVCRSGYTGEDGFELSIQNESAENLITDLLKNENTMLCGLGSRDSLRLEAGLSLYGHELNENITPIEAGLSWALDKERLEDNNLNGNKILSDQLKNKLSNKKIGLISTNKSMLRDGMTLFDNNNNEIGKITSG

SEQ ID NO: 107831 - protein, 374 aa, Unknown
  Bacterial polypetide isolated from the Sargasso Sea
MNQLPIDIPLKNFHQNNGAKILPFAGFNMPINYKTGIINEHKNVRNHSGIFDVSHMGQILIENNESYLHKLEKYIPLQLKKLIKNRSHYSFLLNKDGGVIDDLIISNIDIKDKSYLYIVYNASRKKEDEEIFISCAPNAEKIYKKNCLFAIQGPDSINVLKNIIDIPNNMNFFDILISKYNNNEIIVSRSGYTGEDGFELSIPNESAENLITHLLKNENTMLCGLGSRDSLRLEAGLSLYGHELNEKITPIEAGLSWALDKERLEDENLNGNKILSDQLKNKLSNKKIGLISTSKSMLRDGMTLFDNNNNEIGKITSGCFSPNLNKSIAIGYIISEFNTDNQIFCEIRKKLELVKINNLPFVKKNYKKNGSVYE

SEQ ID NO: 107832 - protein, 288 aa, Unknown
  Bacterial polypetide isolated from the Sargasso Sea
MNIKKTSLYNLHIKYGAKLVEFAGYQMPIQYKDGIVQEHKFTRSNSGIFDVSHMGQLFIHGSEKLIEDLEKIFPANLKDLKLNQSKYSFLMNDDGGIQDDLIITKMKNGFLIILNAACKYKDYNQIKSKLNDKYDLKLDEYLSLVAIQGPKVKNILNEIIPGCNELKFMNGNSYDYDGTKIYVTRSGYTGEDGFEISIKNEIVEKFVEKLIEKGSKMIGLGARDTLRLEAGLCLYGSDLDHSTSPIEANLRWAIPKSRIDSDFPGSKILKKQIEDGVKRLRVGIKPET

SEQ ID NO: 107833 - protein, 285 aa, Unknown
  Bacterial polypetide isolated from the Sargasso Sea
NHSKYSFLMNKDAGIQDDLIITKINEGFLIILNAACKYNDLRILKELLSEKYEMVLDENRSLIAIQGPKSSQILNEVVIGVKDLNFMSGNWFSFEKQKIYITRSGYTGEDGFEISISNDFADKLTRELINKGSKLVGLGARDTLRLEAGLCLYGHDLDKDKTPVEANLKWAISKERISKGDFIGSDIIIKQLNNGVTKIRVGIKPDGRIIAREKTKIFNQSDVHIGEITSGTFGPSVNGPVAMGYVVNQFSKKDTKVFLEVRGKKHAASICSLPFYKKSYVKGTN

SEQ ID NO: 107834 - protein, 618 aa, Unknown
  Bacterial polypetide isolated from the Sargasso Sea
PKNNKLERILPEPLASPKEEILIKDSSAIAYEIKKGDYIQIIDLFGRQCSDFMAFDSNALQSGNELSIDTTASRAILGGSYAMPGLHSKYFDKNLEPLVEVVQDTIGRHDTFGTACTRKLYEDQGYFGHINCSDNFNFALDKYGVEKRNGWAAINLFFNTGIDANNVIFSDMPWSRPGDYVLFQAQKDLVCVSSSCPDDIDTANDWNPTDIYVRVYSEKNKFAKSIGYRKNAGSDFMLTKETGFHPRTSKLTNDMMDSSGFWIPNKFNNFGTIREYTECRNNVVMMDLSSLRKFEVLGPDAEELLNVALTRNIKKLAVGQVVYSAMCYENGTMIDDGTLYKLGDHNFRWICGSDYSGEWLTQLSEELKLHTNIKSSTDHLHNISVQGPNSRKVLSKIIWTPPSHPDVNNLEWFHFTISRIGDHKGIPIMLSRTGYTGELGFEIYCHPNDAPKVWDAVWDAGKEFNISPMGFEALDILRIEAGLILGGNEFSDETDPFEAGISFTVPLKTKEQNFIGKEALIERKAHPHRKLVGLEIEGNEKVNHGDCVHSGRAQVGIITSGTISPTLNKNIALCRIDVRSSELDTKLEIGKLDGHQKRISAKVVPFPFYDPTKSKVRA

SEQ ID NO: 107835 - protein, 49 aa, Unknown
  Bacterial polypetide isolated from the Sargasso Sea
MAQKTVLFAKHVECGAKMVDFHGWDMPLNYGSQIEEHPHVRQDAGMFDV

SEQ ID NO: 107836 - protein, 362 aa, Unknown
  Bacterial polypetide isolated from the Sargasso Sea
TSLYQLHQDNNAKFVEFAGYQMPIQYSDGIVEEHKFTRSHSGIFDVSHMGQLFIHGSEDLVNDLEKIFPLDLKRLKLNHSKYSFLMNNAAGIYDDLIITKIDNGFLIILNAACKDSDYEILSKLLNNKYKMVLDEKRSLIAIQGPKSVEILNDVIKGVEDLNFMTGNWFLFNDKKVYITRSGYTGEDGFEISVDNELADQFTRNLIKKGAKLIGLGARDTLRLEAGLCLYGHELDKGKTPIEANLKWAISKERISKGDFIGSDIIIKQLNHGVQKVRVGIKPEGRIIAREKTKIFNQSDLHIGEITSGTFGPSVNGPVAMGYVENEFSKKDTKVFLEVRGKKHPANICGLPFYKKNYVKGVN

SEQ ID NO: 107837 - protein, 270 aa, Unknown
  Bacterial polypetide isolated from the Sargasso Sea
DDLIITKISRGYLIILNAACKENDFKIIKEKLNNKFDLKLNDKLSLIAIQGPEAKTILEKNINGVSKLKFMNGGNFKFQKSDVYVTRSGYTGEDGFEISIENNYTESFVEEMLKMGAKLAGLGARDTLRLEAGLCLYGNDIDMNTTPIEANLKWAISKDRIDTEYPGSKIIKNQIKSGVDKIRVGIKPENRVIARGNTKIFNNDKKEIGKITSGTFGPSVDHSIAMGYVENKYANLNTKLFLEVRGKKIPANVCNLPFYKKNYVKGEINV

SEQ ID NO: 107838 - protein, 281 aa, Unknown
  Bacterial polypetide isolated from the Sargasso Sea
NEGGVIDDVIIYRLSIDRFFICVNAGNITQVFEWLNSTSVNFDIEVKNLTDFYGQLAIQGPDAVKCISNLFSSSNIDVIKKYSISSIIELEDRFKQKLKNPCPNGYNFLIARTGYTGEDGFELFVPNEVLPDIYSLLLEQVKNIKPCGLGSRDTLRLEKGFPLHGNELSDKLNPIESNLSKFVDFSKPDFIGKNSLELISQNRTSTLIGFKMDEKCIPRSGYKIFSNDSEIGYVTSGTFSPSLQEGIGLGVISGNFSEVTDIEVKIRSDKKKAKRSAYPFI

SEQ ID NO: 107839 - protein, 342 aa, Unknown
  Bacterial polypetide isolated from the Sargasso Sea
MSEAYWGLEQNLKTTPLYKIHNNNAAKLVSFAGYHLPIQYANGIIAEHNHTRKAVSVFDVSHMGQIKISGPMIYDALEKILPISFSRIAPGQIKYTQFLNKEGKIIDDLMIHRSFKDNQIWLVVNADCTEKDLDHLYSNLNRSYKIELIDDRALIAIQGPKSSNILKEFFNEIDNMPFMTGDWFTYDNEQFFVSRCGYTGEDGYEVSIKDRYAEEFINKLLKFEDVKLAGLGARNSLRMEAGLCLYGNDISILTSPIEAGLTWSIPKERIENGGFIGHANIKKDLIDGVKKKLVGIKPLGKLPAREGTQILNKNGNIIGEITSGGYSPSLQAPIAMGYINAE

SEQ ID NO: 107840 - protein, 63 aa, Unknown
  Bacterial polypetide isolated from the Sargasso Sea
MIQTTVLHPKHLEAGAKMVDFHGWEMPINYGSQLEEHHQVRTDAGMFDVSHMTIVDLTGERVK

SEQ ID NO: 107841 - protein, 249 aa, Unknown
  Bacterial polypetide isolated from the Sargasso Sea
METKKTSLYKLHQDCKAKFVEFAGYQMPIQYSDGIVEEHKFTRNHSGIFDVSHMGQLFIYGGKNLIEDLEKIFPLNLKNLKLNHSKYSFLMNDEAGIYDDLILTKIEQGFLIILNAACKKNDFKILSKLLENKYTMVLDEKRSLIAIQGPKSVEILNDIISSVEDLSFMSGNWFLFDDQKIYITRSGYTGEDGFEISIPNDQVEKFTKKLIEKGAKLIGLGARDTLRLEAGLCLYGHELDKDKTPVEAN

SEQ ID NO: 107842 - protein, 342 aa, Unknown
  Bacterial polypetide isolated from the Sargasso Sea
MVPFAGYNMPIWYSSISEEHNFVRNQVGIFDVSHMGEFIIKGKESKKFLQKVTSNDLDKITQGKIQYSSILNESGGIIDDLLIYNLGNEKYMLVVNASNKSKDLEWLKKHNNLQVTIEDASDYYSLFAIQGPKSIDVVNDIFNKDFSDLKYYNFIKFEDKNFESILISSTGYTGSKGFEIYIKNNLAENLWKQSIKLGKRHGIQPIGLGARDTLRLEMGFCLHGNDIDETINPIEAGLGWICKKNFEYIGKNIVDKNRENNPSKTLIGFELKEKGIARKGYKILNKNEVVIGNVTSGTISPYSMKSIGMGYVNFDENKISNSIYIKVRNKKIKAVICKRPFI

SEQ ID NO: 107843 - protein, 361 aa, Unknown
  Bacterial polypetide isolated from the Sargasso Sea
MHLELGARMVPFAGYDMPVQYPLGVMKEHLHTREAAGLFDVSHMGQILLRGENAARALETLVPVDIIDLPVGLQRYAMFTDAQGGILDDLMVANLGDDTLYLVVNAACKDQDLAHLQKHIGEQCQIECLFEERALLALQGPKAVDVLARLAPEVSKMTFMQVARVRLLGSECIVSRSGYTGEDGFEISVAVDQAEALARSLLAEVEVEAIGLGARDSLRLEAGLCLYGHDMSSATTPIEASLLWAISKVRRADGERAGNFPGAERVFEQQQKGVARKRVGLLPQERVPVREGAEIVDADGTVIGQVCSGGFGPTLGAPVAMGYVNASHTAIDSDVWAVVRGKRVAMKVAKTPFVPQRYYRG

SEQ ID NO: 107844 - protein, 267 aa, Unknown
  Bacterial polypetide isolated from the Sargasso Sea
MNIKKTALYELHKKHNAKFVEFAGYSMPIQYSEGIVKEHNITRNKSGIFDVSHMGQLFIKYSNEITDKLQKILPTDLKNLKINQSKYSFLMKENGGIYDDLIITRKKDQYMIILNAACKQNDLQIIKNKLNDQNLDMKNNLSLVAIQGPESKTILENVVSNVSKLKFMNGENFSFKNNEIFITRSGYTGEDGFEISLPNKVAISFVEELISKGSTLIGLGARDTLRLEAGLCLYGHDINENTSPVEANLKWAISKNRINDNFIGSHQ

SEQ ID NO: 107845 - protein, 357 aa, Unknown
  Bacterial polypetide isolated from the Sargasso Sea
NDAKFVNFAGWSMPIQFPDGIINEHISTRTSCGLFDISHMGQILIDGDESRLLLEKITPTDIGKIQTGKVKYSFLLNNEGGIIDDLMITNEGNCFYLVVNASRINEDLEEINKASKSFSKINIKHLQQNGMIALQGPKAKDVVSSFFKEIDDSFFFMSFKKITLNGDEVRVSRVGYTGEDGFEISSTKKTILELTKYFLDDERVTLCGLGARDTLRLEAGLPLYGNELHEKMTPVEADLAFAISPSRIKDGNFRGANKILNEIENGSQFVRVGLLPEGRRPVRKGTPIFNNDEKIGEISSGGYGPTIKSPIAMGIIKSEFNKPNNKLTAKLGENSIPMTITSLPFVEHRYFKKGNKQ

SEQ ID NO: 107846 - protein, 317 aa, Unknown
  Bacterial polypetide isolated from the Sargasso Sea
MKLSGDDAESFTDFIFTNNILNLKIGQARYGFICDFDAQVLDDVIVYKMSNKRFFLCVNAGNKDSVYEWLFKLDHKFNVEINNLSNFYGQLAVQGPESIEEINKIFPKSNLDSLSKFYMTKIVDLEEKFSSSLEVKCPNGDNFLIARTGYTGEDGYEIFAPNEVIKSVYQYLLENCNEIKPCGLASRDTLRIEAGFPLHGNELIKGTTPIDFNLNRFIDLNKPNFVGKEVIEKRLADKKYFFIGFMMDDNSIARSGYDVLKNDTKIGFVTSGTFSPVLKKGIGFALLDYEYSNIKDFEIRIRKSLKIAQKVDYPFIR

SEQ ID NO: 107847 - protein, 370 aa, Unknown
  Bacterial polypetide isolated from the Sargasso Sea
MTEEALQNIYLNNFHKNNNAKFVPFAGYNMPINYKHGIINEHIHVRTHAGLFDVSHMGQILISLTNENIHALEVYIPLDIKLLQFNKCHYSFILNSHGGVVDDIMLSKIKIEDEEFIYIVYNASRKKVVNTIFEKKILNYKIIQDRCLIALQGPDSFSVINSILNLSSSMKFLDIEILEYENTKVFISRSGYTGEDGFEISILENIAENFVQKIIQNKNTILCGLGCRDSLRMEAGLSLYGNELNEDINPIQAGLSWALDKNRLKDKNLNCFQALSEEINTSQSIKRIGLSPVNKSMLRAQMTLHNKNNKKIGKITSGCYSPILKKSIAIGYINKTLDMSEKLYVNIRDKLEEIQIEKIPFVKKNYKKGD

SEQ ID NO: 107848 - protein, 367 aa, Unknown
  Bacterial polypetide isolated from the Sargasso Sea
METQKTALNNLHQRNQAKFVEFAGYEMPIQYSKGIIEEHKFTRKHSGIFDVSHMGQLFIYGGENLTIELEKIFPLDLKNLKQNSSKYSFLMNEEAGIYDDLIITKIEEGYLIILNAACKENDFQILSKLLGDNFKMILDNERALVALQGPRSVEILNSILNGVEKLNFMTGKWIDFKNQRLFVTRSGYTGEDGFEISILNNFAEEFTQKLIDKGAQLIGLGARDTLRLEAGLCLYGHELDINKTPVEANLKWAISKERLSNGGFVGSEKIMNQIQGGTSQIRVGIKPEGRLIAREKTKIFKETDKQIGEITSGTFGPSINGPIAMGYVDKEFSKIDTKILLEVRGKKYPANICELPFYKKNYVKGVN

SEQ ID NO: 107849 - protein, 361 aa, Unknown
  Bacterial polypetide isolated from the Sargasso Sea
MKKTPLNSEHIKLGAKLVEFAGYEMPVHYKGIVDEHLAVRKSCGIFDVSHMGEFFVSGDGALDFLNHITINDVACLDIWQAQYSAMCLEDGGILDDILVYRYPDYFMLVVNCSNIEKNFDWLIAHKPENVTIADVSNQIGLIAIQGPNAREILNNYTDIDLNKVEYYRFSIANINGYPATVSRTGYTGELGFEIYADNVSTEQIWKIILSGSKHEIYPAGLGCRDTLRMEMKYVLYGNDIDQSTNPIEAGLGWITKMNKQNFIGKERLNQIKSNLSRELVCIEMIDRGIPRKGYSIIKDSLNIGYITSGTQSPSLQKGIGLAFIDTNYSELGSELFIEVRNKHLKCKIIEAPFYKTGTVLD

SEQ ID NO: 107850 - protein, 337 aa, Unknown
  Bacterial polypetide isolated from the Sargasso Sea
YSEGIVEEHKFTRNHAGIFDVSHMGQLFIYGGDDLIKDLEKIFPLDLKNLRLNNSKYSFLMDKDAGIQDDLIITKINDGFLIILNAACKDNDFKILKELLKEKYKMVLDENRSLIAIQGPKSSQILNEFFDGVKDLNFMSGNWFLFENQKIYITRSGYTGEDGFEISIPNDFVDKLTRELINKGSKLIGLGARDTLRLEAGLCLYGHDLDKNKTPVEANLKWAISKERISKGDFIGSDIIIKQLNNGVSKIRVGIKPEGRVIAREKTKIFNQSDTHIGEITSGTFGPSVNGPVAMGYVENEFSKKNTKVFLEVRGKKHPASICSLPFYKKSYVKGVN

SEQ ID NO: 107851 - protein, 214 aa, Unknown
  Bacterial polypetide isolated from the Sargasso Sea
MNKTFLYESHLGLGSKFVNFSGWEMPIHYGSQINEHNCVRNGAGIFDVSHMNIFDFCGVEAKEFMRYVLTNDVNKIDDGSALYSVITNNEGGIIDDLIVYKFNNEKFRVVSNCATFDDVNNFFESNIIRFDCEFLHKPNLGILAIQGPESEIALKNILELKLSNYKSFSFTERNELFISRTGYTGEDGFEVIGEPEELQNIWDLCISKSIPPIG

SEQ ID NO: 107852 - protein, 357 aa, Unknown
  Bacterial polypetide isolated from the Sargasso Sea
DKLYDTHVSLKGHLVPFGGYLLPTHYSSIKNEHELVRSKAGLFDVSHMGEFVISGNDAFSFLQKVTINDLELLKVGQAQYSAMCFEDGGIVDDLIVYRQEDYFMMVVNAANRKKNLNWLKKNCEYNVTIKDISDEMGLLAIQGPRSKDILQTLTDSNLSSIEFYNFINGKITGFDAVISRTGYTGELGYEIYVSSDNTKNVWNRIMDAGSEHGIGPAGLGCRDTLRLEMKYPLYGNDINETTNPIEAGLGWITRLGKNDFIGKSALIEKKKKVNRRLVCIEMNERAIPRNGCQIYNDNELVGTITSGTMSPSLGRGIGLGYVKIPFTEAGAELQIDIRGNKKSCVIIKPPFYKKVRC

SEQ ID NO: 107853 - protein, 279 aa, Unknown
  Bacterial polypetide isolated from the Sargasso Sea
PGKAQYNCLLNRSGGIIDDLIVYKIEEEKFLLVVNASNIDKDLDWIKSLNKDFSCSINNISDKTSLLAVQGPKADLLCKRFTKEDLESLSNYSFILGTFAGIDNVIISKTGYTGSGGFELYVSNDNVEHIWDELFSVENLEVKPIGLAARDTLRLEMGYCLYGNDINESVTPIEANLGWITKVDTNFVGSKSIKEQIENGIKKKLVGFVINDKGIPRKGYEIFDKSENLIGEVTSGTFSPVLKKGIGLAYIENNISSKEIYLKIRNNLIKLEVVKTPFI

SEQ ID NO: 107854 - protein, 212 aa, Unknown
  Bacterial polypetide isolated from the Sargasso Sea
PKARARVSELLSQARAALIHELKPFQGLPEGDWFIARTGYTGEDGLEIVLPVTEVASFLNDLVGAGISPIGLGARDTLRLEAGMNLYGQDMDEQVSPLAANMAWTIAWEPAERDFIGRTALQAQRAVGCPSKLVGLVLEERGVLRAHQVVRVEGIGDGEITSGSFSPTLNKSIALARVPAATGDRAEVEIRGKWYPVRVVRPGFVRNGKTLI

SEQ ID NO: 107855 - protein, 193 aa, Unknown
  Bacterial polypetide isolated from the Sargasso Sea
MAQQTVLFAKHVECGAKMVDFHGWDMPLNYGSQIEEHHNVRQDAGMFDVSHMTIVDLKGPNTRNFLRYLLANDVNKLTVSGKALYSGMLNEAGGVIDDLIVYFLAEDFFRLVVNSATREKDLAWINQQAAAYNVTVTERPEFAMIAVQGPQAKAKVATLLTEEQKAAVAGMKPFFGVQAGSLFIATTGYTGED

SEQ ID NO: 107856 - protein, 281 aa, Unknown
  Bacterial polypetide isolated from the Sargasso Sea
GLFDISHMGAISIKGINPKDYIQKLFPTNLYSFSEGQGLYTVMLNDEGGIIDDLIIYDLGIQKNDISELLLIVNASRYEEDFLWIKNNLNMSEISITNFKKDKVLLALQGKNSFDLFEEWIKSSISYIPNFGCEYKIFEHISPKEKIFFSKTGYTGENGLEILLPKKAAINLWDFSISKNVAPCGLGARDTLRLEAGMHLYGQDINEETSPYEAGLGWLVHLENNHEFFGRRFLEEQSRLGIQKKLVGLSVEGKAIGRKGCAVLKGEENKGLSQAAVGLQL

SEQ ID NO: 107857 - protein, 299 aa, Unknown
  Bacterial polypetide isolated from the Sargasso Sea
LIKEHESVRSSAGLFDISHMGVISIKGINPKDYIQKLFPTNLYSFSEGQGLYTVMLNDKGGIIDDLIIYDLGIQENDISELLLIVNASRYQEDLQWIKNNLNKYEISITNFKKNKVLLALQGKNSFDLFEEWIESSISHIPNFGCDYKIFEHISPKEKIFFSKTGYTGENGLEILLSKKAAINLWDFSISKNVEPCGLGARDTLRLEAGMHLYGQDINEETSPYEAGLGWLVHLENNHEFFGRRFLEEQSRLGIQKKLVGLSIEGKAIGRKGCAVLKGEENIGSITSGSWSPTKQQAIA

SEQ ID NO: 107858 - protein, 276 aa, Unknown
  Bacterial polypetide isolated from the Sargasso Sea
MTEKNKSTKNLLRTSLHSWHTENGGKMVDFEGWEMPVQYENGIIKEHLGTRRYGGLFDVSHMGRFRINGKDTIAFLQYVLSNDAESLKPWQAQYTLIPNNNGGLVDDAYLFRSGDGYFLVVNASNRKKDWNHLHEHAGNYDVSLEDQTLKISMIAFQGPLTGRILTSLLEGGNLPENSRNRLSEIMLAGTRIIAARTGYTGEPLGFELFIPTERVEEVWRLLYQAGSREGIVPVGLGARDTLRLEAGMPLYGHEFGIDQEGKEIPAFAFPLTSVAV

SEQ ID NO: 107859 - protein, 216 aa, Unknown
  Bacterial polypetide isolated from the Sargasso Sea
MKRTVLFDRHKELNAKIVDFAGYMMPISYSSVNEEHIHVRNSVGIFDVSHMGEFEISGLNSTEFIQRLCSNDISNIEIGKAQYNCMINESGGIIDDLIVYRLETNKYLLVVNASNISKNWKWIVDKNNKFNCSTSNLSDDISLLAIQGPMAESLCQNFTSENLSSLKNFSFINGEFAGCEDIIISKTGYTGSGGYELYCPNNKALKIWDTLFSNKE

SEQ ID NO: 107860 - protein, 292 aa, Unknown
  Bacterial polypetide isolated from the Sargasso Sea
PLYSKYVEANAKLVDFAGGEMPISFSGLIKEHESVRSSAGLFDISHMGVISIKGINPKDYIQKLFPTNLYSFSEGQGLYTVMLNDKGGIIDDLIIYDLGIQENDISELLLIVNASRYEEDFQWIKNNLNKYEISITNFKKEKVLLALQGKNSFDLFEEWIKSSISHIPNFGCEYKIFEHISPKEKIFFSKTGYTGENGLEILLSKKAAINLWDFSISKNVAPCGLGARDTLRLEAGMHLYGQDINEETSPYEAGLGWLVHLENNHEFFGRRFLEEQSRLGIQKKLVWSLYRG

SEQ ID NO: 107861 - protein, 290 aa, Unknown
  Bacterial polypetide isolated from the Sargasso Sea
GEGFLRHVLANDVKSLTENQALYSLMLNDTGGIIDDLIVYKLKDRYRCVFNGATESAVRSWITGFNSEDVILNFSRMVMIALQGPSAIASLLSFESISGLEQLKSFFSMQFGSWLIARTGYTGEDGLEIMLPEQEGMSLWRRLLESGVKPAGLGARDTLRLEAGLNLYGQDMDEKTMPAESNLNWTIAWDPPDRDFIGRAAIEKLGKDSNMKLTGLVMREKSIPRQGLRVLTEEGEGVITSGTFSPTFNVGIGLARIPKMAKGDCQVEIRGKVKSALIYKPPFFKRGRLG

SEQ ID NO: 107862 - protein, 303 aa, Unknown
  Bacterial polypetide isolated from the Sargasso Sea
YSGLLDEHYAVRNDVGMFDVSHMGEFILRGEGAFDLLQKVSSNDASKLTPGKVQYSCMPNGKGGIVDDLLIYCLEDNAYMLVVNASNIQKDWEWIKSHNTFGAEMIDISDKTSLLAVQGPKAIAALKKLTDINLEEMKYYTFEKGNFAGKENVLVSATGYTGSGGFELYFDNEHAEEIWNDILEAGKASGIKPAGLGARDTLRLEKGFCLYGNDIDDATSPIEAGLGWITKFTKDFVDSEYLKKQKEDGTRRKLVAFKTLERGIPRQGYVILDAEDNTIGTVTSGTNSPMLNQGIGMGYVKKE

SEQ ID NO: 107863 - protein, 286 aa, Unknown
  Bacterial polypetide isolated from the Sargasso Sea
MKRTVLFERHKELNAKIVDFAGYMMPISYSSVNEEHIHVRNSVGIFDVSHMGEFEISGLNSTEFIQRLCSNDISNIEIGKAQYNCMINESGGIIDDLIVYRLETKRYLLVVNASNISKNWKWIVEKNNKFNCSILNLSDDISLLAIQGPKAELFCQNFSSENLSELKNYSFIIGDFAGCEDIIISKTGYTGSGGYEIYTPNNKALKIWDTLFSNKEYDIKPIGLAARDTLRIEMGYCLYGNDITEETSPLEANLRWITKTQTNFIGSNIIEVEIQTGSKRKLVGFK

SEQ ID NO: 107864 - protein, 154 aa, Unknown
  Bacterial polypetide isolated from the Sargasso Sea
KISDFAGFQMPISYSSVNKEHLHVRESLGIFDVSHMGEIFISGKNSENLLQRICSNDISKLIPGMAQYNCMTNFKGGIIDDLIVYKIEIDKYMLVVNASNIQKDYEWVLSQNKEFNATIIDDSNNYSLLAIQGPKAIDYCQNFTNVDLNSMKNF

SEQ ID NO: 107865 - protein, 253 aa, Unknown
  Bacterial polypetide isolated from the Sargasso Sea
VNSATREKDLAWIRHHAQDFGVTVTERPELAMIAVQGPNAKAKAAKVFSAEQNAAVEGMKPFFGVQAGELFIATTGYTGEDGYEIVVPQEQACDLWQALLDNGVAPCGLGARDTLRLEAGMNLYGQDMDETVSPLAANMAWTIAWEPSDRQFIGRAALEAQKAAGSQPKLVGLVMEEKGVLRSGMPVTFTTAAGEEREGVITSGSFSPTLGYSIALARVPRDIGEQASVEIRKKLVTVKVTKPAFVRNGQKLV

SEQ ID NO: 107866 - protein, 204 aa, Unknown
  Bacterial polypetide isolated from the Sargasso Sea
MNRTFLYESHLSLGSKFVNFSGWEMPIHYGSQINEHNCVRNGVGVFDVSHMNIFDFYGVEAKEFMRYVLTNDVNKIDNGSALYSVITNNEGGIIDDLIVYKFNNEKFRVVSNCSTFDDVNNFFESNIIKFDCEFLHKPSLGILAIQGPESEIALKNILELELSNYKSFSFTEKNKIFVSRTGYTGEDGFEIIGEPEELQNIWDL

SEQ ID NO: 107867 - protein, 157 aa, Unknown
  Bacterial polypetide isolated from the Sargasso Sea
MAHRTALYDAHLAAGGKMVDFGGWDMPINYGSQIEEHHAVRQNAGVFDVSHMTVVDIAGAGARDYLRQLLANDVDRIDPGRALYTGMLNDNGGVIDDLIVYKRDNDYRLVVNCATRETDLGWMEKHAGGFAVDIHERPELAMLAIQGPKARDILAGL

SEQ ID NO: 107868 - protein, 305 aa, Unknown
  Bacterial polypetide isolated from the Sargasso Sea
VISQDGKCPYIYGSQINEHNCVRNGAGIFDVSHMNIFDFYGVEAKEFMRYVLTNDVNKIDNGSALYSVITNNEGGIIDDLIVYKFNNEKFRVVSNCSTFDNVNNFFESNIIKFDCEFLHKPSLSILAIQGPESEIALKNILELELSNYKSFSFTEKNKILISRTGYTGEDGFEVIGEPEELQNIWDLCISVGIPPIGLGARDTLRVEAGMNLNGTDMTIKNNPFESNLGWVVDFDDAQRDFIAKENLIKIKKTNKLNLVGVLLNEKGILRSGQKIIKDDFVGEITSGTFSPYMKKSIGLARIPMN

SEQ ID NO: 107869 - protein, 239 aa, Unknown
  Bacterial polypetide isolated from the Sargasso Sea
MTSPELLKTPLHAWHSENRGKMVPFGGWDMPVQYADGILSEHLATRRCGGLFDVSHMGRFRVEGLDTMAFLQRVLTNDASILEPWQAQYTLIANENGGVIDDAYLYHPEGEFLIVVNASNRKKDWEHFQEQARQFEDLRLEDLSEEMAMIAVQGPQSEELFSEFLESGSLPERRHNRLSKISIMGEEMLISRTGYTGEPLCFEMFISADAATGIWEKLHQSGISRGMTAAGLGARDTLR

SEQ ID NO: 107870 - protein, 269 aa, Unknown
  Bacterial polypetide isolated from the Sargasso Sea
ESGGKLVEFAGWSMPLHYGSQIEEHHYVRQAAGIFDVSHMTIVDVIGAGSETYFRRLIANDVAKLKTNGAALYGVLLNEEGGIIDDVIVYRQPAGFRMISNASTRNKVVAWLRRQNSEGIEIAEAELAMVAIQGPQAIQAFKAVNGGAVPPKAFSAINSGELFVARTGYSGEDGLEVILPERLAIEFWKEMVDQGVRPIGLGARDSLRLEAGLNLYGLDMTENTSPLVSSLSWTLCWKARDRRFIGKEALESQLAQGISHKLTGLVLEA

SEQ ID NO: 107871 - protein, 203 aa, Unknown
  Bacterial polypetide isolated from the Sargasso Sea
MIAVQGPNAKAKAAQVFTADQNAAVDGMKPFFGVQSGSLFIATTGYTGEAGYEIIVPEAEAEALWQALLDTGVKPCGLGARDTLRLEAGMNLYGQDMDESINPLAANMGWTVAWEPSDRDFIGRAALTAIKAAGTDKLVGLVMEEKGVLRHDMPVFFTDAEGVEHQGVITSGSFSPTLGYSIAMARVPNGIGATAEVECVKNA

SEQ ID NO: 107872 - protein, 274 aa, Unknown
  Bacterial polypetide isolated from the Sargasso Sea
MKKTSLYKRHVELGAKLVDFAGYQMPIQYSGVVNEHNMVRKSAGLFDVSHMGEFIISGDGAEDFLNYITVNDLNVIKPWQAQYSAMCFEDGGIIDDLIIYRYPDHFMLVVNCANIEKDLDWLMANKPQDVDIMDISQQTSLIALQGPNSRKILQSISEVQIDDIDFYCFKLEKICDITVTIARTGYTGELGYEIYGNNEIIIEIWDKIINLGEKRILPVGLACRDTLRTEMKYALYGNDIDESTNTLEAGLGWITKLEKSNFIGKEVLTKINNS

SEQ ID NO: 107873 - protein, 232 aa, Unknown
  Bacterial polypetide isolated from the Sargasso Sea
MDNLLKTQLYEIHASSGARMVPFAGWEMPIQYSSIINECNAVRNKAGIFDVSHMGRFMITGKDASLALDKILSVDPSLIEIGQGKYNLICDTNGGVIDDCIVYKMSDTKFLLIPNASNAESVNEWLNINTVGLEYQTEVITSKSTMIALQGPESGNILSSSIPEIGKIKRFRFIEHTLKSTNMIICRTGYTGEDGYEIILDNSIAVEFWDLLKTNGASECGLDARDVLRLEA

SEQ ID NO: 107874 - protein, 214 aa, Unknown
  Bacterial polypetide isolated from the Sargasso Sea
MKKTVLLEKHIKLGAKIIDFAGFKMPISYSSVTEEHNHVRENVGVFDVSHMGEFEISGKNSDRFVQFICSNDIMKLKPGKAQYNCLLNHSGGIIDDLIVYKIEKEKFLLVVNASNIDKDFNWIKSLNKEYNCSINNISDKTSLIAVQGPNANLLCERFTKEDLESLSNYSFVLGTFAGIDNVIISKTGYTGSGGFELYVSNDNVGHIWDELFSV

SEQ ID NO: 107875 - protein, 118 aa, Unknown
  Bacterial polypetide isolated from the Sargasso Sea
MANKTVLFNKHLESNAKMVDFHGWDMPLNYGSQIEEHHAVRQDAGMFDVSHMTVVDVTGTDACAFLRKLLANDVAKLKVPGKALYGGMLDDNAGIIDDLITYYLTDTFYRVGVNSATR

SEQ ID NO: 107876 - protein, 263 aa, Unknown
  Bacterial polypetide isolated from the Sargasso Sea
ENVGVFDVSHMGEFEISGKNSTKFIQFICSNDIMKLKPGKAQYNCLVKDNGGIIDDLIVYKIDEEKYLLVVNASNIEKDLNWIKSLNKNYSCSINNISDRISLLAVQGPKANLLCQRFTKEDLKSLSKYSFILGTFAGIDNVIISKTGYTGSGGFELYISNENVEKIWDELFNVKDFEVKPIGLAARDTLRLEMGYCLYGNDINELVTPIEANLGWITKLDTNFIGSESIKKQIENGVKKKLVGFIINDKGIPRKGYEIFDKS

SEQ ID NO: 107877 - protein, 256 aa, Unknown
  Bacterial polypetide isolated from the Sargasso Sea
EHLKVRENVGMFDVSHMTVFEVFGKDAEEFLKKILSNDIAKIKTNGEAIYSLLLNEAGKILDDLIVYNLNEKYFIVSNCATKERDEEWLKENAMAFEVKVEHKEDFGIIAIQGPDVSDFFEKNIGASIVNLKNFECASHKGLIFARTGYTGEDGFEIIGNKEALLELWNEFNDAGVDPIGLGARDTLRIEAGLCLYGTDMNDKTHPYECNLGWTVDMNDKERHFIGKKSLMKIDPKKSKKLVGVVLEDKGILRARL

SEQ ID NO: 107878 - protein, 312 aa, Unknown
  Bacterial polypetide isolated from the Sargasso Sea
KFVPFAGYSMPVQYRSGVISEHLHTRSNAGFFDVSHMGQIKIWPKNNEKEKLIQELERLMPCDLYNLKENRQTYSLLTNSNGGVIDDLMIANKVSYFQLVVNASQKMVDYQHLKDNISQDFNIELEENKSLLAIQGPQSEDILSAINLTIKTMKFMDSVDISLADIDCSISRSGYTGEDGFEISVHNNNVLQLVEILFKKSDLLPIGLGARDSLRLEAGLCLYGNDLTSDISPIEANLNWVIHKRRRNQGSSNIKFLGNTKILNQLEKGPSFLRIGLLPVEKAPMRNGNIIYLDNERETEIGIVTSGGYSPP

SEQ ID NO: 107879 - protein, 246 aa, Unknown
  Bacterial polypetide isolated from the Sargasso Sea
DATNYRMVVNSATREKDMNWLLKQTEGFDVTVTERPEFAMIAVQGPEAKAKAAEVFTNAQNEAVAGMKPFFGVQAEDLFIATTGYTGEAGYEIMVPVEKAPELWQNLLDAGVKPSGLGARDTLRLEAGMNLYGQDMDETISPLEANMGWTVTWEPADRDFVGRAALEAQREQGTQKLVGLVMKEKGVLRAGLNVKTAEGEAGIITSGTFSPTLGHAIAMARIPATNSSTVEVEMRKKWVKVEVVKP

SEQ ID NO: 107880 - protein, 155 aa, Unknown
  Bacterial polypetide isolated from the Sargasso Sea
MKKTVLLDKHIKLGAKIVDFAGFNMPISYSSVTDEHNHVRENVGVFDVSHMGEFEISGNNSTQFIQFICSNDIMKLKPGKAQYNCLVNDNGGIIDDLIVYKIDEEKYLLVVNASNIEKDLNWINSLNENYNCSINNISDKISLLAVQGPKAEILC

SEQ ID NO: 107881 - protein, 283 aa, Unknown
  Bacterial polypetide isolated from the Sargasso Sea
RRSRRLGVFDISHMGVLRLEGPSPKDALQQLVPSDLHRIGPGEACYTVMLNASGGIRDDLIVYDLGAIDSQRGALIVVINAACAESDTAWIREQMEPAGLTVTDIKDGGVLLALQGPGAISLLERLSDSDLSGVPRFGHRELKLDGLSHPVFTARTGYTGEDGVEMLLNAQDGRLLWKRLLAEGVTPCGLGARDTLRLEAAMHLYGQDMDETTTPFEAGLGWLVHLEMPADFIGRKALEIAAEQGPNKRLVGLKLPGRAIARHDYPVLHNNETVGAITSGSWS

SEQ ID NO: 107882 - protein, 297 aa, Unknown
  Bacterial polypetide isolated from the Sargasso Sea
ITRTHAGFFDVSHMGQFFLEGDTSLTVALEKIIPADLNKLKLNHSKYSFLLNKDGGIIDDLIITRTKKGFSIILNAACKENDIKQISKVLNETHKSWLKSDLSLIALQGPKAADVLEKLIPGVSNLKFMTGNNFNFDEANLYITRSGYTGEDGFEISIPNNKVEKLIDFLITNKVKPVGLGARDTLRLEAGLCLYGNDLTEKITPIEANLKWAIAKKRKEEGGFNGWERIKNLISNGSEKIRVGILPEGRIIAREGTKIFSTDNIEIGYVTSGTFGPSVNASVAMGYINLEFAEVGT

SEQ ID NO: 107883 - protein, 289 aa, Unknown
  Bacterial polypetide isolated from the Sargasso Sea
MPFSYEGTLKEHDVVRNSSGFFDVSHMGRLEIDYSELDKISSLICSDLINIPMNKALYSIFTNENGNALDDVIFWKFEDKIILIPNASNASKIKSHLVDHKVDFIDKSLETVLIAVQGPRTIELINDRFEIPDKFSTAKSDNFMYARTGYTGEDGIEIMANNAEADSLISFLIEKGIKPCGLGSRDTLRLEASLPLYGFELTEDITPVEASLSWTITNEHDFLGSDRIKAQLQDGNHKILKKFTIDSRKIARTETIGMSSDIKGVVTSGNFSPILNKSIGFILFENKPP

SEQ ID NO: 107884 - protein, 280 aa, Unknown
  Bacterial polypetide isolated from the Sargasso Sea
AGFFDVSHMGQFFVSGGQSTELSLEKIIPLDFKEIKMNQSKYSFLINDEGGVIDDLIITRVENGFNIILNAACKDNDIKEIAKCLNSESKYELRKDLSLIALQGPKAETILESIIKGVKELKFMNGNYFKFLEKKIYITRSGYTGEDGFEISVPNVIVENLIKLLTDKDAKPIGLGARDTLRLEAGLCLYGHELNQEINPIQANLKWAISKKRRETGGFKGWENIKKDLQNGVSKIRVGVKPAGKIIAREGTKIYSNTGEEIGIITSGTYGPSVNSPVAM

SEQ ID NO: 107885 - protein, 253 aa, Unknown
  Bacterial polypetide isolated from the Sargasso Sea
IVDLHGSRTREFLRYLLANDVAKLTTPGKALYSGMLNEAGGVIDDLIVYFLQEDFFRLVVNSATREKDLAHITAQAKAFEVTVTERPEFAMIAVQGPNAKAKVATLLTAEQQAAVAGMKPFFGAQAGDLFIATTGYTGEDGYEIALPNEQAADFWQKLLDAGVAPAGLGARDTLRLEAGMNLYGQDMDETVSPLAANMGWTIAWAPEERNFIGRKALEQHKAEGTQKLVGLVMEAKGVLRHGQRVVVAGGEGE

SEQ ID NO: 107886 - protein, 319 aa, Unknown
  Bacterial polypetide isolated from the Sargasso Sea
MNKTALYNLHKKFNAKFVSFAGYEMPIQYKDGIITEHNLTREKSGIFDVSHMGQLFIVGDDKLTDKLQDIFPTDLKNLSVNQSKYSFLMNENAGIHDDLIITKISNGYMIILNAACKEKDFEIIKSKLGEDFKISLSKDLSLVAVQGPDSKDLIEKIIPGVNKLKFMFGGDFKFNSNNIYVTRSGYTGEDGFEISINNNDVVKFVETLISLGSNLIGLGARDTLRLEAGLCLYGNDIDENTSPLEANLKWAISKNRINSNFPGAKQIQRQINEGVTKLRVGIKPEGKIIARESTKIFDENNNQIGKITSGSFGPSVKSP

SEQ ID NO: 107887 - protein, 258 aa, Unknown
  Bacterial polypetide isolated from the Sargasso Sea
MFLIWGEILISGKNSTNLLQRICTNDISKLNPGMAQYNCITNFEGGIIDDLIVYKTEIDKYLLVVNASNIEKDFNWILTQNKEFNATIIDESNNYSLLAIQGPKAIDYCQKFTDVELNKMKNFTHSISKFANCDDIILSKTGYTGSGGLEIYIPNKDAINIWDALFKSNYNELLMPIGLAARDTLRIEMGYCLYGNDINENTSPIEAGLGWITKPETECIGFEIFQDQIINGVKKKLVGFKLKGRGIPRAGYRIFDSN

SEQ ID NO: 107888 - protein, 228 aa, Unknown
  Bacterial polypetide isolated from the Sargasso Sea
TEEDIYIVLNGACSEKDQAHINKHLAEWKAKGKDVDFVVHGDRSLLAFQGPKAVDVLQPLTDLDLSKLYFGMFTETTIAGKPVWLTRTGYTGEDGFEISLLKSDTVHLTKTLLENPAARMCGLGARDSLRLEAGLCLYGNDLDETISPLEAGLTWTIGKSRRDACDFVGGDAIKKQLAEGVARRRVGLKFTGKGAPARGGSKIFTPEGEEVGHVTSGGFSPVLGENIA

SEQ ID NO: 107889 - protein, 298 aa, Unknown
  Bacterial polypetide isolated from the Sargasso Sea
MDLLKSPLYSKYVESSAKLVDFAGWEMPISFSGLIKEHESVRSSAGLFDISHMGVISIKGINPKDYIQKLFPTNLYSFSEGQGLYTVMLNDKGGIIDDLIIYDLGIHENDISELLLIVNASRYEEDFQWIKNNLDKYEISITNFKQDKVLLALQGKNSFDLFEEWIESSISHIPNFGCEYKIFEHISPKEKIFFSKTGYTGENGLEILLSKKAAFNIWDFLISKNVAPCGLGARDTLRLEAGMHLYGQDINEETSPYEAGLGWLVHLENNHEFFGRRFLEEQSRLGIQKKVSWTLYRR

SEQ ID NO: 107890 - protein, 296 aa, Unknown
  Bacterial polypetide isolated from the Sargasso Sea
MSDLKTKLYDTHISLGGHMVSFGGYLLPTHFSGINHEHEIVRSKVGLFDVSHMGEFIISGNDALSFLQRVTVNDIELLNVGQAQYSAMCYDDGGIIDDLIVYRQEDHYMMVVNASNREKNIKWLEKNCEGNVHLEDISDDMGLIAVQGPRSREVLQMLTDNNLRSVEFYNFINGKINGYEAIISRTGYTGELGYEIYANTNFLVDLWNSILDAGSEYGIEPVGLGCRDTLRMEMKYPLYGNDIDETTNPIESGLGWITRLGKQDFIGKNAIIKKKKKVERRLVCIEMTEKAIPRSG

SEQ ID NO: 107891 - protein, 234 aa, Unknown
  Bacterial polypetide isolated from the Sargasso Sea
QIDEHHAVRTDAGMFDVSHMTIVDLRGSRTREFLRYLLANDVAKLKTPGKALYTGMLNASGGVIDDLIVYYFTEDFFRLVVNSATREKDLSWITQHAEPYAIDITVRDDLSLIAVQGPNAQAKAASLFNDEQRKATEGMKPFFGVQAGDLFIATTGYTGEAGYEIAMPNEKAADFWRALVEAGVKPAGLGARDTLRLEAGMNLYGQEMDEGVSPLAANMGWTIAWEPADRDFIG

SEQ ID NO: 107892 - protein, 241 aa, Unknown
  Bacterial polypetide isolated from the Sargasso Sea
MELKKTALYDLHKKFNAKFVQFAGYEMPIQYKNGIISEHNITRQKSGIFDVSHMGQLFIKGDKTLTNKLQNIFPTDLENLPTNHSKYSFLMNENGGIYDDLIITKIKDGYMIILNAACKEKDFKIIKSKLDNTFSMILREDLSLIAIQGPESKDVLEPIVPGVSNLKFMSGNEFKYQSDFIYITRSGYTGEDGFEISINNKDALKFTELLIKNGSNLIGLGARDTLRLEAGLCLYGNDIDE

SEQ ID NO: 107893 - protein, 367 aa, Unknown
  Bacterial polypetide isolated from the Sargasso Sea
MIKKTPLYNLHIQYGAKMVEFAGYQMPIQYKSGIIQEHKFTRENAGIFDVSHMGQLFITGSDQLTDDLEKIFPVNFKNLKINQSKYSFLMNEQGGIYDDLIITKLKDGYLIILNAACKKQDFEIIKKKLDNKCELNLDESLSLIAIQGPKAKDVLGKVVSNITNLKFMNGGEFEYDNSNIYITRSGYTGEDGFEISLENKKVEKFVDQLINYGAKLIGLGARDTLRLEAGLCLYGNDLDEKTSPIEANLKWAIPKSRVDSDYPGSNIIKKQIYDGVKTLRVGIKPETRVIARGNTKIFDQNNKEIGKVTSGTFGPSVECSIAMGYVENNYSPTNTKIFLEVRGKKVPANVCDLPFYKKNYVKGEKNV

SEQ ID NO: 107894 - protein, 363 aa, Unknown
  Bacterial polypetide isolated from the Sargasso Sea
MKRTALFDNHISLNAKMVPFAGYSMPMSYSGIIEEHKAVRNTAGVFDVSHMGEFKIHGKGAENFLQLVTVNDVKNISNGQAQYSAMCTSNGGIIDDVILYRFNEYFMMVVNAANIKDDFNWLLENSNDEVFIEDISDDLNLIAIQGPKSAALLNEILEYDLSKLKYYNFIQEKYNNDTITVSRTGYTGELGFEIYGNNNSIISLWEIIFNYEAFEILPIGLGARDTLRLEMNYALYGMDISKSTNPIEAGLGWITKFNKGDFIGRDALLIEKNKIHRSRISFEMLDRAVPRHNYNIIVDGNVVGKVTSGTQSPSLNKGIGIGYIQIEHSSPGTEIYIEIRSTLKPGVIINPPFYKKGTVNIIY

SEQ ID NO: 107895 - protein, 378 aa, Unknown
  Bacterial polypetide isolated from the Sargasso Sea
MSEAYWGLEQNLKTTPLYKVHNDNRAKLVPFAGYYLPIQYENGIIAEHNHTRNSVSIFDVSHMGQIKISGPMIYDAMEKILPISFSKIAPGQIKYTQFLNNEGKIIDDLMICRTFEEDHVWLVVNADCTPKDLDHLYNNLNKTYKIELIEDRALIALQGPNSSNILKTFFQEIDDMPFMTADWFNYNNEKFFISRCGYTGEDGFEISIKDRYAEKFINELLQCEGVKLAGLGARNSLRMEAGLCLYGNDISSSVSPIEAGLKWSIPKERIENGGFIGHEPIKKDLENGVERKLVGIKPLGKLPAREGTQIFDKNEKTIGEITSGGYSPSLQTPIAMGYINSDILKSECEVLLNVRGNLIPAEITSLPFVEHKYFRGNK

SEQ ID NO: 107896 - protein, 275 aa, Unknown
  Bacterial polypetide isolated from the Sargasso Sea
MSEELKKVFLHNFHKKNHAKFVPFAGFSMPINYQKGILNEHLQVRESAGLFDVSHMGQILIPVNEKNTISLSKFIPLDFDKINFNRCYYSFLLNNDGGIIDDLIISKIKYQQKDFFYIVYNASRKKNDEEIFINHLNNYILLTNNSLLAIQGPNSEKIINFINESKNLFFMQTNTSNFLNKEIIISRTGYTGEDGFEISIPNDVSNQFIEILLENSLIKLCGLGARDSLRIEAGLSLYGNELNEKITPIEASLTWSLHKSRLNDESLNGNKILFN

SEQ ID NO: 107897 - protein, 364 aa, Unknown
  Bacterial polypetide isolated from the Sargasso Sea
MNKKTSLYQNHLEAKAKMVDFHGWDMPINYGSQIEEHHAVRQGCGIFDVSHMTILDFEGSESELFIRKLIANDVRKLQENYSGLYSAMLNDKGFVIDDLIAYRMDKGFRLVVNCATRGEDLKWISARAKEYDVNMLERDDLSMVAIQGPQSPNVLKNFPAPIDFLKEKKRQQGIFQDDVFAAKTGYTGELGFEVILPNEKAIDLWNIAISEGAKPIGLAARDTLRLEAGMNLYGFEMDETISPFECNMGWTVCWQDEQRDFFGKESLIKQKESNDLKELVGIITDEKVILRQGQKIHLEKENHARGVVTSGTYSPSLKMPIALARLPKSDSTSCFAEIRGKRVKAIIGSPKFIKEGKVIFKEKV

SEQ ID NO: 107898 - protein, 350 aa, Unknown
  Bacterial polypetide isolated from the Sargasso Sea
MSDLKTKLYDTHISLGGHMVSFGGYLLPTHFSGINHEHEIVRSKVGLFDVSHMGEFIISGNDALSFLQRVTVNDIELLNVGQAQYSAMCYDDGGIIDDLIVYRQEDHYMMVVNASNREKNIKWLEKNCEGNVHLEDISDDMGLIAVQGPRSREVLQMLTDNNLRSVEFYNFINGKINGYEAIISRTGYTGELGYEIYANTNFLVDLWNSILDAGSEYGIEPVGLGCRDTLRMEMKYPLYGNDIDETTNPIESGLGWITRLGKQDFIGKNAIIEKKKKVERRLVCIEMTEKAIPRSGCQIYIDNELVGRVTSGTMSPSLGKGIGIGYVNTPYTEAGIDIHVDIRGKMKKGV

SEQ ID NO: 107899 - protein, 367 aa, Unknown
  Bacterial polypetide isolated from the Sargasso Sea
MTLQRTPLHQLCQDGGGRMVPFAGWEMPVQFSGLIQEHKAVREQVGMFDISHMGVLRLEGPNPKDALQQLVPSDLHRIGPGEACYSVLLNESGGIRDDLIVYDCGAVDAERGALVLVINAACAEADTAWIRDQMEPAGLTVSDLKAGGVLLALQGPQAIPLLEELSGESLSDLPRFGHRTLSLKDLAHPVFTGRTGYTGEDGAELLLTADDGQKLWQILLDRGVSPCGLGARDTLRLEAAMHLYGMDMNAETTPFEAGLGWLVHLEMPVDFVGRQALEQAAESGPSKRLVGLKLQGRAIARHDYPVLHNGETVGVVTSGTWSPTLEEPIALAYVPTALAKLGTELSVEIRGKAQPACVVKRPFYRRS

SEQ ID NO: 107900 - protein, 361 aa, Unknown
  Bacterial polypetide isolated from the Sargasso Sea
MKQTLLYNKHYQLGAKISDFAGFQMPISYSSVNKEHLHVRESLGIFDVSHMGEIFIYGKNSEDLLQRICSNDISKLIPGMAQYNCMTNFKGGIIDDLIVYKIEIDKYMLVVNASNIQKDYEWVLSQNKEFNATIIDESNNYSLLAIQGPKAIDYCQNFTNVDLNSMKNFSHSISTFANCNNILLSKTGYTGSGGLEIYIPNECVVDIWDHLFKFNKNETLMPIGLAARDTLRIEMGYCLYGNEINENISPIEAGLNWITKPETECIGSEIFKKQINNGVKKKLVGFKLKNRGIPRSGYKIYDSRDKEIGITTSGTFSPVLKIGIGLGYINFESLGTVKDIHIKIRDEFIELEIIKPPFIEI

SEQ ID NO: 107901 - protein, 313 aa, Unknown
  Bacterial polypetide isolated from the Sargasso Sea
FDVSHMGEFYVEGNEAKDFLNYICSNDILKIEVNRAQYNCFINNNGGIVDDLIVYRIEEKKYMLVVNAANIEKDWKWVQKNLKKYDCTIKNLSDEIGLISVQGPNSLNLINEVFNSDFSQLKKFSFNNIKINNKSIMVSNTGYTGSKGYELYIDVNILSDIWNQLFLKGEEYQIQAIGLGARDTLRMEMGYCLYGNDIDDTTTPFEANLMWVTNIEKDFIGKEKLLISINSSTKKMINFKMIDRGIPRNGYDICNKEGDKIGNVTSGTFSPTNKVGIGIGYINIKHSLGDEIYLLIRDKLVKAEITKLPLKNG

SEQ ID NO: 107902 - protein, 364 aa, Unknown
  Bacterial polypetide isolated from the Sargasso Sea
MANKTVLFNKHLESNAKMVDFHGWDMPLNYGSQIEEHHAVRQDAGMFDVSHMTVVDVTGTDACAFLRKLLANDVAKLKVPGKALYGGMLDDNAGIIDDLITYYLTDTFYRVVVNSATREKDLAWIAKQSQGFDVTVTERPELAMIAVQGPNAKAKAAAVFSSEQNAAIEGMKPFFGKQAGSLFIATTGYTGEAGYEIIVPEAEAEALWQALLDQGVKPCGLGARDTLRLEAGMNLYGLDMDETINPLAANMGWTIAWEPTDRDFIGRKALEALRDAGTDKLVGLVMEEKGVLRHDMPVFFTDAAGVEQQGVITSGTFSPTLGYSIAMARVPSSIGDTAEVEMRKKRVAVRVVAPNFVRNGKQAF

SEQ ID NO: 107903 - protein, 278 aa, Unknown
  Bacterial polypetide isolated from the Sargasso Sea
KALYSGMLNEAGGVIDDLIVYFMTEDFFRLVVNSATREKDLAWINQQAAAFNVTVTERPEFAMIAVQGPQAKAKVATLLTEEQKAAVAGMKPFFGVQAGSLFIATTGYTGEDGYEISLPNEEAADFWQKLLDAGVKPAGLGARDTLRLEAGMNLYGQDMDETVSPLAANMGWTIAWEPSDRNFIGRAALEQQKAAGTMKLVGLVMEQKGVLRHGQKVVTEGGEGEITSGTFSPTLGFSIAMARVPASTGDTAEVDIRGKLVQVKVVKPNFVRMGKKVI

SEQ ID NO: 107904 - protein, 291 aa, Unknown
  Bacterial polypetide isolated from the Sargasso Sea
EFMRYVLTNDVNKIDDGSALYSVITNNEGGIIDDLIVYKFNNEKFRVVSNCSTFDDVNNFFESNIIKFDCEFLHKPTQGILAIQGPESSIALENILELKLSNYKSFSFTEKDDLFISRTGYTGEDGFEVIGEPEELQNIWDLCISKSIPPIGLGARDTLRVEAGMNLNGTDMTIKNNPFESNLGWVVDFSDVERDFIAKENLIEIQKINKLKLVGVLLNEKGILRSGQKIIKDDFEGEITSGTFSPFMKKSIGIARVPFEMNEDANVLIRNKLLKVKILSLPFVRKGKIIL

SEQ ID NO: 107905 - protein, 357 aa, Unknown
  Bacterial polypetide isolated from the Sargasso Sea
MELKRTFLNQAHVDQGGKLVDFSGWSLPIHYGSQIKEHLAVRHGVGIFDVSHMTIIDCKGPMVRDFLRRVLANDVGSLAINQALYSVLLNERGGVVDDLIVYRLSDCYRLVTNAATKDKVLAWLDLQNLEQIQLEELDLSMIAIQGPRSLEAIGSWSKTYDFESLKPFSCVLIDEVLVARTGYTGEDGFELIVPNEQVVGAWNFFVNEGAVPAGLGARDTLRLEAGLNLYGQDMDEEVDPLVSNLGWTVKWEPEDRDFVGRDALQIRRHELDEKLVGLILIGKGVLRHGQRVLTDHGEGVITSGSFSPSMDCSIALARVPKLARERCRVEIRDKLVDAVVVKPPFVKHGKVLVEWKE

SEQ ID NO: 107906 - protein, 241 aa, Unknown
  Bacterial polypetide isolated from the Sargasso Sea
MSSTTALHAKHLEAGAKMVDFFGWDMPINYGSQIEEHHAVRQDAGMFDVSHMTIVDVKGAQAKAYLQYLLANDVAKLKDKGKALYSGMLNEEGGVVDDLIVYHFDETNYRLVVNSATREKDMNWLMSKAEGFDVTITERPEFAMIAVQGPNAKEKAATLFSAAQKEAVAGMKPFFGVQAEDLFIATTGYTGEAGYEIMVPAEQAESFWQALLDAGVKPCGLGARDTLRLEAGMNLYGQDMD

SEQ ID NO: 107907 - protein, 339 aa, Unknown
  Bacterial polypetide isolated from the Sargasso Sea
MDKKTTQLHKYHLSQEAKFIDFGDWSMPFSYEGTLKEHDIVRTSSGFFDVSHMGRLEIQYTEIEKISKLICSEIVDIPSNKALYSIFTNADGNALDDVIFWKFDDKIILIPNASNLEKIKSHLVAHNVEFIDKSPDTVLIAVQGPDTIELIQDRFEIPDKFSTNYTENFLYARTGYTGEDGVEIMANNEDAESLLTFLTEKGVKPCGLGSRDTLRLEASLPLYGFELTEDITPVEASLNWTITNKNEYLGSNRINDQLSGESHKVLKKFTIDSRKIARTETVGIAGETKGIVTSGNFSPVLNKSIGFILFENKPSHDLIEFDIRGNLIEGNIVNKRFLS

SEQ ID NO: 107908 - protein, 137 aa, Unknown
  Bacterial polypetide isolated from the Sargasso Sea
ARDTLRLEAGMNLYGQDMDETVSPLAANMGWTIAWEPSDRNFIGRAALEQQKAAGTMKLVGLVMEQKGVLRHGQKVVTEGGEGEITSGTFSPTLGFSIAMARVPASTGDTAEVDIRGKLVQVKVVKPNFVRMGKKVI

SEQ ID NO: 107909 - protein, 362 aa, Unknown
  Bacterial polypetide isolated from the Sargasso Sea
MKKTPLYEKHIELNAKLVDFAGYMMPIQYDSITKEHFAVRESAGIFDVSHMGEIIISGKGSQEFLEYITVNDITNLEPWQVQYSAMCFEDGGIVDDLLVYRYPDYFMLVVNCSNATKDFDWLMAHKPKDVDIIDISQKVGLIALQGPKSREILNNLIDVEINKLKYYQFEIAKFDNFPCTISRTGYTGELGYEIYADNKNIVKIWDAIITGGSDLIHPAGLGCRDTLRLEMKYALYGNDIDENTNPIEAGLGWITKLSKKNNFVGKDALEQINNSLSRDLVCIKMVDRGIPRKGYELFYNDTMIGKITSGTQSPTLNVGIGLGYVQKDFSKIGIELYMLVRGKKIKCKIVDSPFFRKGSLKN

SEQ ID NO: 107910 - protein, 370 aa, Unknown
  Bacterial polypetide isolated from the Sargasso Sea
MDLLKSPLYSKYVESNAKLVDFAGWEMPISFSGLIKEHESVRYSAGLFDISHMGVISIKGINPKDYIQKLFPTNLYSFSEGQGLYTVMLNDKGGIIDDLIIYDLGIQENDISELLLIVNASRYEEDFLWITNNLNMSEILITNFKKDKVLLALQGKNSFDLFEEWIESSISHIPNFGCEYKIFEHISPKEKIFFSKTGYTGENGLEILLSKKAAINLWDFSISKNVAPCGLGARDTLRLEAGMHLYGQDINEETSPYEAGLGWLVHLENNHEFIGRRVLEEQSRLGIQKKLVGLSIKGKAIGRKGCAVLKGDENIGTITSGSWSPTKQQAIAFAYINTSHALINNEVEILIRGKKFNGVITKRAFYKKNY

SEQ ID NO: 107911 - protein, 270 aa, Unknown
  Bacterial polypetide isolated from the Sargasso Sea
MNKQTSLYQNHIEANAKMVDFHGWSMPINYGSQINEHNCVRENCGIFDVSHMTILDFEGEDVEQFIRTLIANDVKKLSETYEGLYSAMLNEDGGVIDDLIAYKLENGYRLVVNCATRGEDLRWISKKAKNYSVQMKERDDLSMVAIQGPKSAEVLSNCPAPIVRELESKKKQQGVYGNDMFATKTGYTGEKGFEVILPHALAVGLWRNAIKAGAQPIGLGARDTLRLEAGMNLYGFEMDDSISPFECNMTWTVDFSDKERNFYGKEALGR

SEQ ID NO: 107912 - protein, 356 aa, Unknown
  Bacterial polypetide isolated from the Sargasso Sea
MSNKTALHSLHLASSAKMINFHGWEMPIHYGSQIKEHEIVRNTCGIFDVSHMTILDFSGNQSKSFLRRLLSNDIEKLKESSDGLYSAMLNDKGYVLDDLIVYKMKFGYRLIVNCATRNKDISWINENLINWDVSMEERPDLSILSVQGPKTNEVLSSIKNDLFINSLNRRPFSGAYMDQTLVTRTGYTGEKGVEVVLPDEEARVLWEELLSAGAYPIGLGARDTLRLEAGFNLYGNEMDETISPLECNMAWTVDLEDMNRNFIGKSSYIDKKKQASHSIQKGLIFEEKIIVRPGQNIHFEENGSYQGTVTSGSYSPTLKKPIALARMSMNNNDYCYAQVRGKKIRAKITKPKFLNL

SEQ ID NO: 107913 - protein, 353 aa, Unknown
  Bacterial polypetide isolated from the Sargasso Sea
MNRTFLYESHLTLGSKFINFSEWEMPIHYGSQINEHNSVRNSAGIFDVSHMSIFDFYGVEAKEFMRYVLTNDVNKIDDGSALYSVITNNEGGIIDDLIVYKFNNEKFRVVSNCSTFDDVNNFFESNIVKFDCEFLHKPSLGIIAIQGPKSEITLGNILGLDLSNYKSFSFTERNELFISRTGYTGEYGFEVIGEPEELQNIWDLCISKSIPPIGLGARDTLRVEAGMNLNGMDMTIKNNPFESNLGWVVDFNDIERDFIAKENLIEIKKLNKLKLIGVLLDEKGILRSGQKIIKDDFEGEITSGTFSPYMKKSIGLARVPFDMKENASVLIRNNLLNVRIVSLPFVRKGKIMI

SEQ ID NO: 107914 - protein, 207 aa, Unknown
  Bacterial polypetide isolated from the Sargasso Sea
MDKKTTQLHSFHESNNAKFIDFGDWSMPFSYEGTLKEHDIVRNSSGFFDVSHMGRLEINYTELDKISTLICSDLINIPDNKALYSIFTNENGNALDDVIFWKFEDKIILIPNASNESKIKSHLLDHKINFIDKSTETVLIAVQGPKTIELINERFEIPDKFSTGQSENYIYARTGYTGEDGIEIMVNNSDADSLISFLTQKGIKPCD

SEQ ID NO: 107915 - protein, 362 aa, Unknown
  Bacterial polypetide isolated from the Sargasso Sea
MEKTALYNFHKNSGAKFVPFAGYEMPIQYKDGIVKEHINTRQFAGFFDVSHMGQFFVNGGRSTELSLEKIIPLDFKEIKMNQSKYSFLINDEGGVIDDLIITRVENGFNIILNAACKDNDIKEIAKCLNSESKYELRKDLSLIALQGPKAETILESIIKGVKELKFMNGNYFKFLEKKIYITRSGYTGEDGFEISVPNVIVENLIKLLTDKDAKPIGLGARDTLRLEAGLCLYGHELNQEINPIQANLKWAISKKRRETGGFKGWENIKKDLQNGVSKIRVGIKPAGKIIAREGTKIYSNTGEEIGIITSGTYGPSVNSPVAMGYVKSKFSEIDNKILIEVRGKKHEAKVSKLPFYKKSYVK

SEQ ID NO: 107916 - protein, 364 aa, Unknown
  Bacterial polypetide isolated from the Sargasso Sea
MANKTVLFNKHLESNAKMVDFHGWDMPLNYGSQIEEHHAVRQDAGMFDVSHMTVVDVTGTDACAFLRKLLANDVAKLKVPGKALYGGMLDDNAGIIDDLITYYLTDTFYRVVVNSATREKDLAWIAKQSQGFDVTVTERPELAMIAVQGPNAKAKAAAVFSADQNAAIEGMKPFFGKQAGSLFIATTGYTGEVGYEIIVPETEAEALWQALLDQGVKPCGLGARDTLRLEAGMNLYGLDMDETINPLAANMGWTIAWEPTDRDFIGRQALEALRDAGTDKLVGLVMEEKGVLRHDMPVFFTDAAGVEQQGVITSGTFSPTLGYSIAMARVPNSIGDTAEVEMRKKRVAVRVVAPNFVRNGKQAF

SEQ ID NO: 107917 - protein, 359 aa, Unknown
  Bacterial polypetide isolated from the Sargasso Sea
MLHTPLFELCREAGGRMVPFAGWEMAVQFEGLMAEHRAVRLRSGVFDISHMGVLTLRGSGVKDKLQGLVPSDLQRIGPGEAQYTVLLNEAGGIRDDLIVYDRSNDEVVVVINAACADSDTTWIKQQLEPQGVSITDRKAEGVLLALQGPEAVGRLEQLCGESLAGVPRFGHRDLSIHGQTVFAARTGYTGEDGFELLLTASAGQALWRQLLTEGVAPCGLGARDSLRLEAAMHLYGNDMDANTSPLECSLGWLVHLEMPIDFVGREALERQTAQGVSRKLVGLQLQGRAIARHDYPVLHSGERVGVVTSGTFSPTLEQPIALASVRADLAKRGTELMVEIRGRQEPAVVVKRPFYRRQG

SEQ ID NO: 107918 - protein, 353 aa, Unknown
  Bacterial polypetide isolated from the Sargasso Sea
MNRTFLYESHLGLGSKFVNFSGWEMPIHYGSQINEHNSVRNSAGIFDVSHMNIFDFYGVEAKEFMRHVLTNDVNKIDDGSALYSVITNNEGGIIDDLIVYKFNNEKFRVVSNCSTFDDVNNFFESNIIKFDCEFHHKPSLGILAIQGPESEIALKNILKLELSNYKSFSFTERNKLFVSRTGYTGEDGFEVIGEPEELQNIWDLCISRSIPPIGLGARDTLRVEAGMNLNGTDMTIKNNPFESNLGWVVDFSDIERDFIAKEKLLEIKNTNKIKLVGVLLNEKGILRSGQKIIKDDFEGEVTSGTFSPYMKKSIGLARIPMDISENANVLIRNKLLNVKILSLPFIRKGKIMI

SEQ ID NO: 107919 - protein, 216 aa, Unknown
  Bacterial polypetide isolated from the Sargasso Sea
MTVGDLKAAKGKRKFTQVTANSVEEAEAAEKAGFDMIISNAKNVISVREGSKNLFLTAALVLNEFVTAEDIMRGAFKALENGADAVMTPRSMDIVEMLAKEDVPVMGHLGLVPRKSTWIGGLRAVGKTADEAYELFQKFKRLEDAGAFSAECEVIPENVMGEISKRTDIVTVSLGSGKNADVMYLFMEDICGDTENPPRHSKAYGNLLRLRNEIKL

SEQ ID NO: 107920 - protein, 162 aa, Unknown
  Bacterial polypetide isolated from the Sargasso Sea
MNIKIKKILKKKNKSKIVSLTAYSKNIAKILDNYCDIILVGDSMANVLYGLDDTHKINLNTIINHTLSVKKGVKKSLLVVDMPKGSYNNKKNAKKNARLIIKLTKCDAVKLESNNKNFDIIEDLVKAKIPVMGHIGYTPQYKKKFRIEGQSISGANKLLKEA

SEQ ID NO: 107921 - protein, 220 aa, Unknown
  Bacterial polypetide isolated from the Sargasso Sea
MSKKIKKILLKKNKSKIVSLTAYSKSIAKILDKYLDIVLVGDSMANVLYGHKSTHKISLENIIQHTQSVKMGIKKSLLVVDMPKGSYKNKKIAEKNAKLVIRRTACDAIKLESNKKNFEIIKFLVQKKIHVMGHIGYTPQFKKKFRVEGQTKNESLKLLEEAKTIEKAGAFSIVLECLTPHAAKLITSNLKIPTIGIGSSSYCDGQILVTDDMLGLSGFY

SEQ ID NO: 107922 - protein, 83 aa, Unknown
  Bacterial polypetide isolated from the Sargasso Sea
MECVETSLAKLVTQNLKVPTIGIGASKYCDGQILVVDDLIGLNPMNYKFVKKYANIKSEISKAVSNYSKEVRKKRFPNKKNSY

SEQ ID NO: 107923 - protein, 237 aa, Unknown
  Bacterial polypetide isolated from the Sargasso Sea
MKKIYTWAAQPANRTLTVDDLKKAKGKKKFTQVTANTTDEAEAAEKAGFDMIICNAFNVKQVREGSKNLFLTAALALNKFVTSEDIMRGAFEALENGADAVMTPRSMKIIEMLANEDVPVMGHLGLVPRKSTWIGGLRAVGKNSEEAHELFLKFKRLEDAGAFSAECEVIPENVMGEISKRTNIVTVSLGSGKKADVMYLFMKDICGDTLNPPRHSKAYGNLLKLKNEIKIERVRAL

SEQ ID NO: 107924 - protein, 199 aa, Unknown
  Bacterial polypetide isolated from the Sargasso Sea
AALVLNEFVTEEDIMRGAFKALENGADAVMTPRSMDIVEMLANEDVPVMGHLGLVPRKSTWIGGLRAVGKTADEAYDLFQKFKRLEDAGAFSAECEVIPENVMSEISKRTNIVTVSLGSGKNADVMYLFMEDICGDTENPPRHSKAYGNLLRLRNEIKLERVKALKAFKKDSMNGKFPGKKQSSNLEKKQFEEFLNQLD

SEQ ID NO: 107925 - protein, 256 aa, Unknown
  Bacterial polypetide isolated from the Sargasso Sea
TVNDLKSSKGKKKFTQVRANTFDEAFAAEEAGIDMIVANARNIVEVRKGSSNLFLTASLFWEEFVTKEEILKGAFKALENGADAIFTPRNTEVIEMLSNEDIPVMGHLGLVPRKSSWFGGLRAIGKTPKEAYELFKKFKDLENAGAFAVEGEVIPENVMKEISNRTSMITVSMGSGKKTDVIYLFMEDICGDTPIPPRHAKAYGNLLKLKQQVNIERLKALKAFKKDVLSGKFPQKKQSVNISNQEFKKFLNLLNS

SEQ ID NO: 107926 - protein, 64 aa, Unknown
  Bacterial polypetide isolated from the Sargasso Sea
MPSKISRLILKKKNKSKIVCLTAYSKNIAEEVDKYTDLVLVGDSLGSVLYNFDTTRKVNLSMMI

SEQ ID NO: 107927 - protein, 85 aa, Unknown
  Bacterial polypetide isolated from the Sargasso Sea
IVLECVESSLAKFVTQNLKVPTIGIGASKYCDGQILVFDDLIGLNPINYRFVKKYANIRNEISKAVSNYSKEVRKIKFPNKNNSY

SEQ ID NO: 107928 - protein, 214 aa, Unknown
  Bacterial polypetide isolated from the Sargasso Sea
MKNIYTWAANPAKRTVTVDDIIKAKGKKILTQVTANNSLEAKAAEEAGFDMIIGSASNVKKVRGGSKSLFYTAALELHNYPTAEDVLRGAFKALENGADAVMTARSMDVVTMLAKEDVPVMGHLGLVPRKSTWIGGLRAVGKTADEAYELYKKFKRLEDAGAFSAECEVIPENIMGEISKRTSIVTVSLGSGKKADVMYLFMNDICGEQEKSPR

SEQ ID NO: 107929 - protein, 156 aa, Unknown
  Bacterial polypetide isolated from the Sargasso Sea
MKNIYTWAAKPAKRTLTVGDLKTAKGKRKFTQVTANSIEEAEAAEKAGFDMIISNAKNVIPVREGSKNLFLTAALVLNEFVTAEDVMRGAFKALENGADAVMTPRSMDIVEMLAKEDVPVMGHLGLVPRKSTWIGGLRAVGKTADEAYDLFQKFKR

SEQ ID NO: 107930 - protein, 130 aa, Unknown
  Bacterial polypetide isolated from the Sargasso Sea
MNEKIKYIIAKKNKSKIVSLTAYSKNIAQIIDKYVDMILVGDSVASVLYNYDTTRKISLDTMIEHAKSVRKGIDKSLMVFDMPYNTYRDKKIALINAKKIIKKTKSDAVKLEGGSKIKDIVKHLIKNKIP

SEQ ID NO: 107931 - protein, 158 aa, Unknown
  Bacterial polypetide isolated from the Sargasso Sea
KKTKCDGVNFEGGKKIIPIVKNLTKNKIPVMGHVGILPQTDKKFSFKGKKQKEINRILNDTKLLENAGAFSIVLECVETKLSKQITKNIKIPTIGIGSSLNCDGQVLVIDDLIGMSDSKFKFVKKYVDLSKVINSAVKKYKNEVKNKQFPKAKHSFAN

SEQ ID NO: 107932 - protein, 49 aa, Unknown
  Bacterial polypetide isolated from the Sargasso Sea
MNKKIKKILNKKNKSKIICLTAYSKNVATILDKHCDLVLVGDSLGSVLY

SEQ ID NO: 107933 - protein, 140 aa, Unknown
  Bacterial polypetide isolated from the Sargasso Sea
LVDKKINVISHIGVTPQSYRNFNKIKVLGKTNKEKQNLLKLAKESEKIGAKAVLLECITADTAKLITENISIPTIGIGASRYCDGQVLVFDDLINLSTNDKKPKFVKNYFNFNKIASNIVKKYNREVKLKKFPNAKFTYI

SEQ ID NO: 107934 - protein, 71 aa, Unknown
  Bacterial polypetide isolated from the Sargasso Sea
MKITVPKILDLKSERQITMMTAYDFPTSKAVSEAQIDIILVGDSLAQVVLGHDDTLSVTMDEMLHHVQAVL

SEQ ID NO: 107935 - protein, 244 aa, Unknown
  Bacterial polypetide isolated from the Sargasso Sea
KKFTQVTANSIEEAEAAEKAGFDMIISNAKNVIPVREGSKNLFLTSALVLNEFVTADDIMRGAFKALENGADAIMTPRSLDVVEMLAKEDVPVMGHLGLVPRKSTWIGGLRAVGKTADEAYDLFQKFKRLEEAGAFSAECEVIPENVMGEISKRTNIVTVSLGSGKNADVMYLFMEDICGDTENPPRHSKAYGNLLRLRHEIKIERVKALKAFKKDSMTGKFPGKKQSSNLEKKQFEKFLDQLD

SEQ ID NO: 107936 - protein, 148 aa, Unknown
  Bacterial polypetide isolated from the Sargasso Sea
MNKNIRDLLKKKNREKIVSLTAYSKNIAKILDKHIDIILVGDSMANVLYGHKNTHKINLENIIQHTQSVKQGVNKSLLVVDMPKGSYLNPKIAEKNAKRVIYLTKCDAIKLESNKRNYKIIKYLVKKKIPVMGHIGYTPQFKKKFKVE

SEQ ID NO: 107937 - protein, 198 aa, Unknown
  Bacterial polypetide isolated from the Sargasso Sea
NLETLYGSVLYNYDTTRKVSLDMMIEHTKSARMGVKKSLLVIDLPYNTYRNKSEALKNSKRSIKETKCDAVKVEGGTRVKEIVKHLVKNRIPVLGHIGITPQTTKGKFRSKGKNESEKKKLLKDAQDLEQSGAFGIVLECIYSDISKQITNLINIPTIGIGASVNCDGQVLVTDDLIGLNEAKFRFVKKFGNIKKNIK

SEQ ID NO: 107938 - protein, 188 aa, Unknown
  Bacterial polypetide isolated from the Sargasso Sea
MSKKIKKLLLKKNKQKIVSLTAYSKNIAKILDKYCDIILVGDSMANVLYNMKDTNQITIDNVIQHTMSVRQGVKKSLLVVDMPRKTCKNLTKAKKNAKMILKRTKCDAVKVESNNKNFNIIKGLVNSNIPVMGHIGYTPQFKKKFNVEGKNKFEEYKLIKEAILIEKAGAFSIVLECITPSVAKKITS

SEQ ID NO: 107939 - protein, 253 aa, Unknown
  Bacterial polypetide isolated from the Sargasso Sea
MGILKAAKGKRKFTQVTANSVEEAEAAEKAGFDMIISNAKNVIPVRKGSKNLFLTAALVLNEFVTAEDIMRGAFKALENGADAVMTPRSMDIIEMLAKEDVPVMGHLGLVPRKSTWIGGLRAVGKTADEAYELFQKFKRLEDAGAFSAECEVIPENVMGEISKRTDIVTVSLGSGKNADVMYLFMEDICGDAENLPRHSKAYGNLLRLRNEIKLERVKALKAFKKDSMNGKFPGKKQSSNLEKKQFEEFLGQL

SEQ ID NO: 107940 - protein, 175 aa, Unknown
  Bacterial polypetide isolated from the Sargasso Sea
NKTDAYKNAKILLNHCEPDLIKIEINKNKLIILKHLVSKKLNIISHIGVTPQSYKNFNNIKIFGKTLKEKNNLLKLAQESEKLGAKAVLLECVTADTAKLITENISIPTIGIGASKYCDGQVLVFDDLINLSLSDKKPKFVKNYFNFNKIASNVVKKFNQEVKFKKFPGAKFTYN

SEQ ID NO: 107941 - protein, 172 aa, Unknown
  Bacterial polypetide isolated from the Sargasso Sea
ISKKNAKLIMKKTGCDAVKIESNKKNFKIINTLVNAKIPVMGHIGYTPQFKKKFKIEGDTPKKANLLLKEALKIEEAGAFSIVLECVAPLASKLITSKLKIPTIGIGSSTFCDGQVLVTDDMLGLSGFYPKFVKKYVSLDRIIEKAVKKYTREVKLKKFPKWNNFLNGSKSR

SEQ ID NO: 107942 - protein, 146 aa, Unknown
  Bacterial polypetide isolated from the Sargasso Sea
DIIKSIKILRKNKIPVMSHIGLQPQKISNEKKFKVLGKKNIEERKIINDLISVQKGGSFAVVLESVTENLAKKINKFAKIPVIGIGASKNCDGQILVTEDLLGLFDKSPKFVKRYENLRVRITKAVKKYYHDVVNANFPGKNNIYK

SEQ ID NO: 107943 - protein, 201 aa, Unknown
  Bacterial polypetide isolated from the Sargasso Sea
MKLINKIKKLKKLKRKLVCLTAYSKPTGKILDRYCDILLVGDSLATAFYGMKNTKAIDLETMINHAISVKKNSKRSVLVFDMPFKTYRNFKEAKKNIKTVIKRTNCDAVKLESNGKNFNIIKKLVKSGIHVMGHIGYTPQYKKSFTPQGLKKNEEKKLLYEAKQIERSGAFAIVLECVNLKTAKKITESINIPTIGIGSSN

SEQ ID NO: 107944 - protein, 186 aa, Unknown
  Bacterial polypetide isolated from the Sargasso Sea
MKKKIIRIKKLKSKRKLVCLTAYSKPLAKILDKHCDIILVGDSIATAFYGMKNTWSLSLETIINHAKAVRAGIKKSTFVVDMPFNTYKNIFVAKKNVKKVFKLTKCDAIKIESNGRNFKIISKLVKLGYPVMGHIGFTPQYKNKFKPEGINKIQENKLINEAKKIENSGAFSIVLECINARTAKKL

SEQ ID NO: 107945 - protein, 104 aa, Unknown
  Bacterial polypetide isolated from the Sargasso Sea
QRNEIIRDCKLIENAGAFSIVLECVQRKLAMEISNSIKIPTIGIGSSNNCDGQILVIDDVLGFTDSKMKFVKKFIDLKKIITNAAKKFNIDVKSKRFPTKKHSY

SEQ ID NO: 107946 - protein, 158 aa, Unknown
  Bacterial polypetide isolated from the Sargasso Sea
NFKKTGCDAIKIENTVKNINIVNAIVKSNIPVMGHIGFTPQFKKKFKVEGENSKELKKLLNLAKKIEEAGAFSIVLECINKKSSKKITQEIKIPTIGIGSSQYCDGQVLVTDDILGLSGFYPRFVKKYANLDQIIKSAVKNFKKEVQKGIFPKNINSF

SEQ ID NO: 107947 - protein, 73 aa, Unknown
  Bacterial polypetide isolated from the Sargasso Sea
MNKKIKKILNKKNKSKIVCLTAYSKNIAEILDKHCDLVLVGDSLGSVLYNFKSTKEVTLSTMINHSKSVRLGV

SEQ ID NO: 107948 - protein, 102 aa, Unknown
  Bacterial polypetide isolated from the Sargasso Sea
RKLLNDAQDLEQSGAFGIVLECIYSDISKQITNSINIPTIGIGASVNCDGQVLVTDDLIGLNETKFRFVKKFGNIKTNIKSAVIKYKNSVKKRKFPSKKNSY

SEQ ID NO: 107949 - protein, 179 aa, Unknown
  Bacterial polypetide isolated from the Sargasso Sea
FDLPYNTYRNKSEALKNSKRAIKETKCDAVKVEGGTRVKEIVKHLVKNRIPVLGHIGVTPQTTKGKFRSKGKNESEKRKLLKDAQDLEQSGAFGIVLECIYSDISKQITNSINIPTIGIGASVNCDGQVLVTDDLIGLNETKFRFVKKFGNIKKNIKGAVIRYKNSVKQKKFPTKKNSY

SEQ ID NO: 107950 - protein, 195 aa, Unknown
  Bacterial polypetide isolated from the Sargasso Sea
MKKKIFRIKKLKSKRKLVCLTAYSKPTAKILDKYCDIILMGDSIATAFYGMKNTRSISLDTMINHSLAVKKGIQKSVFVFDMPVNTYKNFTQAKKNARIILKTVGCDAVKIESNGKNFNIIKHLVKSGIPVMGHIGFTPQYKKNFTASGLKKKEEERLIEESKKIEKAGAFSIVLECIAEKAAKKITKLINIPTI

SEQ ID NO: 107951 - protein, 145 aa, Unknown
  Bacterial polypetide isolated from the Sargasso Sea
KKIIPIVKKLVQNKIPVMGHVGILPQTDKKFRFKGKKQRESNRILNETKLLENAGVFSIVLECVETKLSKKITDQVNIPTIGIGSSVNCDGQVLVVDDLIGLSQSKFKFVKKYIGINKIIEGAVKKYKFEVLKKRFPTRKHSFNN

SEQ ID NO: 107952 - protein, 119 aa, Unknown
  Bacterial polypetide isolated from the Sargasso Sea
INFGTYTVRAKEEAEAEMLMEDALLLQEKGCFAIILEKVPAKLAEKVAKKLTIPVIGIGAGGGVDGQVLVLHDMLGITQEFSPRFLRRYHDLHTEMLGAFENYIKDVKSKDFPNSEEQY

SEQ ID NO: 107953 - protein, 142 aa, Unknown
  Bacterial polypetide isolated from the Sargasso Sea
MNKKINKFLIKKNKSKIVCLTAYSKSIAKILDKYVDIVLVGDSVANVLYGHKNTHAISLKNIIQHSISVKMGVKKSLLVVDMPIGSYNNLNNAKKNAKLILKKTKCDAVKIESNKNNHKIIKFLVNHKIPVMGHIGFTPQFK

SEQ ID NO: 107954 - protein, 163 aa, Unknown
  Bacterial polypetide isolated from the Sargasso Sea
IVEMLANEDVPVMGHLGLVPRKSTWIGGLRAVGKNSEEAYDLFLKFKRLENAGAFSAECEVIPENVMGEISKRTNIVTVSLGSGKKADVMYLFMEDICGDTLNPPRHSKAYGNLLKLKNEIKIERVRALKAFKKDSMTGKFPGKKQSSNLNKNEFESFLDKLD

SEQ ID NO: 107955 - protein, 128 aa, Unknown
  Bacterial polypetide isolated from the Sargasso Sea
VMGHIGITPQSVRGKFRYKGKTDIEKKNLLKDSKSLENAGVFAIVLECIEKKVSKKITESINIPTIGIGSSNFCDGQILVTDDLLGLTDNKIKFVKKYADLKSNVRKAVKKFKLDVKKGSYPSIKYSY

SEQ ID NO: 107956 - protein, 75 aa, Unknown
  Bacterial polypetide isolated from the Sargasso Sea
AKKISKKLKIPTIGIGSSKFCDGQILVIDDLIGLNETKVRFVKKFGQIKKNISRAAKNFSKEVKNKKYPSKRYSY

SEQ ID NO: 107957 - protein, 100 aa, Unknown
  Bacterial polypetide isolated from the Sargasso Sea
LIRDAQVLEEAGAFGIVLECIYSDVSKKISNLIKIPTIGIGASVNCDGQVLVTDDILGLTNSKAKFVKKYANIRKTINSAVHKFKREVKFKKYPSKKFSY

SEQ ID NO: 107958 - protein, 83 aa, Unknown
  Bacterial polypetide isolated from the Sargasso Sea
LECINSDTAKKITNTINIPTIGIGSSNSCDGQILVFDDLIGLSGFYPRFVKKYTNLQKIIDNVLKKFRRDVISSRFPSKLHTY

SEQ ID NO: 107959 - protein, 100 aa, Unknown
  Bacterial polypetide isolated from the Sargasso Sea
MIEESKQIEKAGAFSIVLECIAEKTAKKITKIINIPTIGIGSSKFCDGQILVTDDLIGLSGFYPKFVKKYLNLQKILEKGIRRFKDDVIKGKFPKKINTY

SEQ ID NO: 107960 - protein, 198 aa, Unknown
  Bacterial polypetide isolated from the Sargasso Sea
WSCSKKYINKSLTIVDMPYKSYNTKKNALKNAKNIINFTNCDFVKIETNENDVKIVEYLSKNKINVVAHIGITPQQFTNFNKIKSVGKNTKQMMSLVLLAKKLEDAGAKFIVLECIIDKTAKEITNNLKIPTIGIGASKHCDGQVLVIDDLINFNSGKKKIKFVKKYTNIEQFINKAVKKFVQEVKCRKFPSKKYSYR

SEQ ID NO: 107961 - protein, 194 aa, Unknown
  Bacterial polypetide isolated from the Sargasso Sea
MQKKIKKILDKKNKSKIVCLTAYSKNIASILDKHCDIVLVGDSLGSVLYNYKSTKEVTLQTMINHSKSVRLGVKDSLMIVDMPYNTYRNSKEALKNAKLMIKKTKCDALKLEGGKKVISIVKHLVKNKIPIMGHIGILPQTDKKFTYKGKKLFERNRILEEAKLLESAGVFALVLECIETKLSKELTRKLNIPT

SEQ ID NO: 107962 - protein, 187 aa, Unknown
  Bacterial polypetide isolated from the Sargasso Sea
MKNIYTWSAKPTQRNLTVADLKSFKGKKKFTQVRANTFDEAFAAEKAGIDMIVANARNIIEVRKGSNNLFLTASLFWEEFVTKEEILKGAFKALENGADAIFTPRNTEVIEMLSNEDIPVMGHLGLVPRKSSWFGGLRAIGKTPKEAHELFQKFKDLENAGAFAVEGEVIPENVMKEFQIDKHDNCV

SEQ ID NO: 107963 - protein, 219 aa, Unknown
  Bacterial polypetide isolated from the Sargasso Sea
KYLETQGVNIVLVGDSLGQVIKGDKSTHNVSFEEITYHAKCVTSGTKKATVMVDLPKNTYNTKSTACKNSKKLINNNLADLIKIEVNSDNLDIVKYLVQKNIPICGHLGLLPQSVKNKSGFRKYGKTKKEANSIYNNAIFCDEIGAKIILLECVEVALARKIANTCSCPVIGIGSGLGLDGQVAVIYDLLGISFNKITSLTKKNEKVINKVIQAFIKKT

SEQ ID NO: 107964 - protein, 114 aa, Unknown
  Bacterial polypetide isolated from the Sargasso Sea
PQGLKNNEEIKLIKEAKNIEEAGAFAIVLECVNVDLAKKITKNLHIPTIGIGSSKYCDGQILVLDDLIGLSGFYPKFVKKYISLDKILNKVIKKFRNDVIRNNFPKNSNAYQIK

SEQ ID NO: 107965 - protein, 170 aa, Unknown
  Bacterial polypetide isolated from the Sargasso Sea
MSKLILKKKNKSKIVCLTAYSKNIAEEIDNYTDLILVGDSMGSVLYNFETTRKVNLSMMIEHSKSVRKGVKKSLMIVDMPFNTYKNKSQALKNCKKVMKETKCDGIKLEGGKKIIDIVKHLIKFKIPVMGHIGIMPQSVRGKFRYKGKTKIEKKNLLKDSKSLEDAGVFA

SEQ ID NO: 107966 - protein, 150 aa, Unknown
  Bacterial polypetide isolated from the Sargasso Sea
LETIIEHAKSVSKGIKSSLLVVDMPKGTYSNIKNAIRNAKYIIKKTKCDAVKLESNNNNYNVIKKLVSLNIPVMGHVGFTPQFKKKFKVYGSSSSESKKIQNEAKKIEKAGAFSIVLECVKKSTSNKITKLLKIPTIGIGSSIECDGQIL

SEQ ID NO: 107967 - protein, 190 aa, Unknown
  Bacterial polypetide isolated from the Sargasso Sea
MNNKIKKLIKKKNISKIVCLTAYSKNIAEIIDNHVDIVLVGDSLGSVLYNYNTTRKVNLKMMIEHTKSVRMGIKKSLLIIDLPYNTYRNKTEALKNSKKAIKETKCDAVKIEGGIKVKEIVRHLVRNKIPVLGHIGVTPQTAKGKIKSKGKTELEKKQLVKDAVALEQNGAFAIVLECVYSDIAKKITNQ

SEQ ID NO: 107968 - protein, 94 aa, Unknown
  Bacterial polypetide isolated from the Sargasso Sea
KIESSGAFSIVLECFFSHAAKKITESVNIPTIGIGSSNTCDGQILVIDDLIGLSGFYPKFVKKYVDLEKILNNAIKKFRTDVIRRKFPTKANTY

SEQ ID NO: 107969 - protein, 131 aa, Unknown
  Bacterial polypetide isolated from the Sargasso Sea
MNKKIKKILSKKNKSKIVCLTAYSKNIAEILDKHCDLVLVGDSLGSVLYNYKSTKEVTLETMINHSKSVRLGVKKSLMVFDMPYNTYRNPKEALKNATLAIKRTKCDAVKVEGGKKVISIVKKLVQNKIPV

SEQ ID NO: 107970 - protein, 78 aa, Unknown
  Bacterial polypetide isolated from the Sargasso Sea
GNISKKITNLIEIPTIGIGASVHCDGQVLVTDDILGLTNAKIKFVKKYTNVKKIINSAVLKFKKEVKSKKYPSKKYSY

SEQ ID NO: 107971 - protein, 186 aa, Unknown
  Bacterial polypetide isolated from the Sargasso Sea
LKAAFSALSSGADAVMTARSLSVISLLANEDIPVMGHLGLVPRKCSWVGGVRAVGKTSDEAFELFQQFRRLEDAGAFSVEAEVIPARVMEEISKRTGLVTVSIGSGQGGDVIYLFMEDICGAHEKAPKHARSFGNIFKLNELIKEERLSALKKFQHSSTIGEYPSEKEIAKIEDNEYESFLKKLNS

SEQ ID NO: 107972 - protein, 103 aa, Unknown
  Bacterial polypetide isolated from the Sargasso Sea
LLKLAKESEKLGAKAVLLECVTANTAKLITENISIPTIGIGASKYCDGQVLVFDDLINLSINGKKPKFVKNYFNFNKVATNVVKKYNREVKLKKYPSTKFTYN

SEQ ID NO: 107973 - protein, 104 aa, Unknown
  Bacterial polypetide isolated from the Sargasso Sea
MNYKIKKIINKKKKSKIVCLTAYSKNIAEIVDKHADIVLVGDSLGSVLYNYNTTRKVTLEMMLEHTKSVRMGVKKSLLVIDLPYNTYRNKFEALKNSKIAIKET

SEQ ID NO: 107974 - protein, 160 aa, Unknown
  Bacterial polypetide isolated from the Sargasso Sea
MLAKEDVPVMGHLGLVPRKSTWIGGLRAVGKNSNEAYDLFQKFKRLEEAGAFSAECEVIPENVMGEISKRTDIVTVSLGSGKKADVMYLFMEDICGDTINPPRHSKAYGNLLKLRNEIKNARVKALKAFKKDSITGKFPGKKQSSNLGKKEFENFLDLLD

SEQ ID NO: 107975 - protein, 210 aa, Unknown
  Bacterial polypetide isolated from the Sargasso Sea
YNYNTTRKVNLKMMIEHTKSVRMGVKKSLLVIDLPYNTYRNKYEALKNSKKAIKESKCDAVKLEGGSKVKDIVKHLVGNKIPVLGHIGITPQTTKGKFKSKGKTNLEKKKLLRDAKALEDSGVFGIVLECIYADVSKKITSLIKVPTIGIGASVYCDGQVLVTDDILGLTDVKMKFVKKYTNIKKVINSAVSKFKEDVKSKKYPSKKYSY

SEQ ID NO: 107976 - protein, 118 aa, Unknown
  Bacterial polypetide isolated from the Sargasso Sea
SMVGKFKSKGKTEKEKNTLIKDSKMLESLGVFAIVLECVNSNTAKKITNSIKIPTIGIGSSFHCDGQILVTDDLLGLNETKIKFVKKFINIRKNIEQGIKKFKFEVINKKYPSKKYSY

SEQ ID NO: 107977 - protein, 186 aa, Unknown
  Bacterial polypetide isolated from the Sargasso Sea
DVLRGAFKALENGADAVMTARSMDVVSMLAKEDVPVMGHLGLVPRKSTWIGGLRAVGKTANEAFELFKKFKRLEDAGAFSAECEVIPENVMTEISKRTSITTVSLGSGKGADVMYLFMEDICGENEKLPRHSKAFTNLRKLRENIEIERVKALKLFIKDSIEGKFPTKENSVNVDENVLKEFLSKI

SEQ ID NO: 107978 - protein, 68 aa, Unknown
  Bacterial polypetide isolated from the Sargasso Sea
RGIKKSLRIVDMPHNTYRNPKEALKNAKQKMKKTRCDGVKLEGGKKIYETVKTLVKNKIPVMGHLGLL

SEQ ID NO: 107979 - protein, 66 aa, Unknown
  Bacterial polypetide isolated from the Sargasso Sea
MKKIKKIINKKNKSKIVCLTAYSKNIAQEVDKYVDIVLVGDSLGSVLYNYSTTRKVTLTEMINHSK

SEQ ID NO: 107980 - protein, 121 aa, Unknown
  Bacterial polypetide isolated from the Sargasso Sea
KGKLKSEWKKYIDDAKAVENAGAFAIVLEGMTEPLAAEITSILNIPTIGIGASPKCNGQILVTEDMLGLTNVAPKFVKKYATLDENINDAVQAYVYEVKKRIFPSKEHVYHMQPEIVKNNK

SEQ ID NO: 107981 - protein, 104 aa, Unknown
  Bacterial polypetide isolated from the Sargasso Sea
GGTRVKDIVRHLVKNKIPVLGHIGVTPQTVKGKFKSKGKTETEKKKLIKDAKALEESGAFGIVLECIYGNISKKITKLIKIPTIGIGASVHCDGQVLVTDDILG

SEQ ID NO: 107982 - protein, 175 aa, Unknown
  Bacterial polypetide isolated from the Sargasso Sea
SLLANEDIPVMGHLGLVPRKSTWVGGLRAVGKNSDEAFDLFQKFKRLETAGAFSVEAEVIPGLVLREISKRTSLITVSLGSGKGGDVTYLFMEDICGENAEAPKHAKSFGNLYKLREMIKEERIKSLKEFRKSSLDEKFPSDQETAKINDREFELFMEKLDTQVSNQMHNNPYTN

SEQ ID NO: 107983 - protein, 75 aa, Unknown
  Bacterial polypetide isolated from the Sargasso Sea
MNKKVKKFLNKKNKAKVICLTAYSKNVASILDKHCDLVLVGDSLGSVLYDYKSTKQVTLDTMINHSKRCKDWCKE

SEQ ID NO: 107984 - protein, 127 aa, Unknown
  Bacterial polypetide isolated from the Sargasso Sea
MGHLGLLPQTTKGKFKSKGGTDRERKKLINDSELLQNSGVFSIVLECIKTSTAKKITEKLKIPTIGIGSSVNCDGQVLVTDDLIGLNNTEIKFVKKFVNIKKYLHLGLKRFASEVKLKKYPSKKYSY

SEQ ID NO: 107985 - protein, 180 aa, Unknown
  Bacterial polypetide isolated from the Sargasso Sea
MKNIYTWSAKPTQRNLTVADLKSFKGKKKFTQVRANTFDEAFAAEEAGIDMIVANAKNIIEVRKGSNNLFLTASLFWEEFVTKEEILKGAFKALENGADAIFTPRNTEVIEMLSNEDIPVMGHLGLVPRKSSWFGGLRAIGKTPKEAHELFQKFKDLENAGAFAVEGEVIPENVMKEISD

SEQ ID NO: 107986 - protein, 95 aa, Unknown
  Bacterial polypetide isolated from the Sargasso Sea
RTVWCKHALLECVLSGIAKNITESLEIPVIGIGAGVEVDGQIMVNYDLLGITQMEKPPKFVKNYLLEASSIEEAIKNYVSEVKEKKFPGIEHSFK

SEQ ID NO: 107987 - protein, 196 aa, Unknown
  Bacterial polypetide isolated from the Sargasso Sea
MNYHRQRITIKDIATRKGGTPLVCLTAYTAPFTRVLDKYADILLVGDTLGMLIYGMDSTQDVTVDMMVAHGKAVVKASSRSCVVIDLPYGSYEQCPEQALATANRMMKETGADAVKLEGGASMQETISFLVKHSIPVMGHIGLLPQHISKKDDFRYKGRQADEAQQILADAKAVEAAGAFSMVVEAVPASLAQETT

SEQ ID NO: 107988 - protein, 97 aa, Unknown
  Bacterial polypetide isolated from the Sargasso Sea
MNKKIKKILNKKNKSKIVCLTAYSKNVAEILDNHCDLVLVGDSLGSVLYNYKSTREVTLETMINHSISVRSGVKQSLMVVDMPYNTYRNPKEALKNA

SEQ ID NO: 107989 - protein, 67 aa, Unknown
  Bacterial polypetide isolated from the Sargasso Sea
FPLIGIGAGNYVDGQVLVLHDLIGLTNEFNPRFLRRYLDLNTSIKDAVSRYIDDVKSESFPSKDEMY

SEQ ID NO: 107990 - protein, 147 aa, Unknown
  Bacterial polypetide isolated from the Sargasso Sea
MKNIYTWAANPAKRTFTVGDIIEAKGKKILTQVTANNSLEAKAAEEAGFDMIIGSASNVKKVREGSKSLFYTAALELHNYPTAEDVLRGAFKALENGADAVMTARSMDVVTMLAKEDVPVMGHLGLVPRKSTWIGGLRAVGKTADEA

SEQ ID NO: 107991 - protein, 217 aa, Unknown
  Bacterial polypetide isolated from the Sargasso Sea
MSAAWAERAGVDIIGIGDSLGMTLHGHANTLSISVDQMIDHARAVRRGAPNTFSLASMPYGSYATRELAVKNGFKLMKKGGVDAIKLQGGREIYKIIEAVANAGIPVMSHVGLVPHRVHLAGGFKMQGRTCEEAIAIIDNARAIEEAGAIGLEIEAVPEEVGRAVNDAVSIFTFSIGGGSSGTCQLLNGYDLIGAFDNFRPKFAKRYGNVSEVATKS

SEQ ID NO: 107992 - protein, 183 aa, Unknown
  Bacterial polypetide isolated from the Sargasso Sea
MSQKIKKILAKKNKKKIVSLTAYSKSIAQILDKHCDIILVGDSMANVLYGMKNTHKITLNTIIQHSISVRKGTKKSLLVVDMPKGTYKNPSQAKKNAKLIFKKTKCDAVKIESNNKNFKIIREITKAKIPVMGHIGYTPQFKNKFKVEGKKNQEVKKLIKESILIQTGWCFFDCFRVYYTKHS

SEQ ID NO: 107993 - protein, 109 aa, Unknown
  Bacterial polypetide isolated from the Sargasso Sea
MNKKNKRKLICLTSYTKSMSRILDKHCDLILVGDSLANVLYGMKTTHDLKLETMINHAKSVKLGTKNSLLVVDMPKNSYKNPNQAVKNAKLIIKKTGCDAIKIENNLYN

SEQ ID NO: 107994 - protein, 222 aa, Unknown
  Bacterial polypetide isolated from the Sargasso Sea
MKEPIEYSILGQGKRLRPLLCMETSKVFNIPSEISIFCAIAIECIHTYSLVHDDLPSMDDDDMRRGQPTVHKKWNEAIAILVGDSLQSLSFEVLSDDEFKVRDKVKNKLIYSLAEKSGASGMVLGQALDIEAESSQKQLEMDQISSLQEYKTGKLISWSCEVGPIIAGENTDPFTLYASKIGLAFQIIDDILDVTSSSKILGKKAGKDKEKNKATFVSKLGL

SEQ ID NO: 107995 - protein, 217 aa, Unknown
  Bacterial polypetide isolated from the Sargasso Sea
MRKNILNILKKKNKTKIVCLTAYSKSVAKILDKICDIVLVGDSMAHVLYGQTNTHSVSLKNIIQHTMSVKKGIKKSLLVVDMPKNSYNSLKKAKFNAKKILNLTKCDAVKIENNNGNFKILEGLVKAKIPVMGHIGYTPQFKKKFKLEGDSTSKKEKLLQEAQRIEKAGAFSIVLECVSPAPAKLITQKLSIPTIGIVSSKFCDGQILVTDDMLGLS

SEQ ID NO: 107996 - protein, 68 aa, Unknown
  Bacterial polypetide isolated from the Sargasso Sea
IKVPTIGIGASKYCDGQILVFDDLIGLNPTNYKFVKKYAKIRDDISKAVSNYSKEVRKIKFPNKKNSF

SEQ ID NO: 107997 - protein, 92 aa, Unknown
  Bacterial polypetide isolated from the Sargasso Sea
EKAGVFSIVLECVETSLAKLVTKKIKVPTIGIGASKYCDGQILVFDDLIGLNPMKYKFVKKYANIRNQISKAVSNYSKEVRKIRFPNRKNSY

SEQ ID NO: 107998 - protein, 258 aa, Unknown
  Bacterial polypetide isolated from the Sargasso Sea
MNKKIKQIINKKNRAKIISLTAYSKNIAQIIDKYVDMTLVGDSMASVLYNYNTTRKISLDTMIEHAKSVRMGVNKSLMVFDMPYNTYKNKKLALFNVKKVLKKTKSDAIKLEGGFKIKEIVKHLVKNNIPVLGHLGIMPQSVRGKFKSKGKTEIEKKKILKEAKLLEQLGVFAIVLECIEKSLAKKITNEIKIPTIGIGSSANCDGQILVTDDVIGLTNTKIKFVKKYMSISKNIGNAVKRFKQEVQLKKYPNKKYSY

SEQ ID NO: 107999 - protein, 271 aa, Unknown
  Bacterial polypetide isolated from the Sargasso Sea
MKNIYTWAAKPAKRTVTVGDLKALKGKKKFTQVTANSTEEASAAEIAGFDMIISNAKNVEQVRQGSKNLFLTAALVLNEFVTKEDIMRGAFKALENGADAVMTPRSMDIVEMLAKEDVPVMGHLGLVPRKSTWIGGLRAVGKNSNEAYDLFQKFKRLEEAGAFSAECEVIPENVMGEISKRTDIVTVSLGSGKKADVMYLFMEDICGDTINPPRHSKAYGNLLKLRNEIKNARVKALKAFKKDSITGKFPGKKQSSNLGKKEFENFLDLLD

SEQ ID NO: 108000 - protein, 258 aa, Unknown
  Bacterial polypetide isolated from the Sargasso Sea
MNKKIKDIIAKKNKSKIVSLTAYSKNIAQIIDQYVDMTLVGDSVASVLYNYNTTRKISLDTMIEHAKSVRMGVHNSLMVFDMPYNTYKDKKNALLNAKKIIKKTKSDAVKLEGGSKIKDIVKYLIKNKIPVLGHLGIMPQSVRGKFKSKGKTDSERTKILKDAKVLEKLGVFAIVLECIEKSLAKKITNEVKVPTIGIGSSVYCDGQILVTDDLIGLTNSKIKFVKKYINISSNIATAVKKFKQEVKLKKYPTKKYSY

SEQ ID NO: 108001 - protein, 202 aa, Unknown
  Bacterial polypetide isolated from the Sargasso Sea
DETHGVAVNKEIKRSLKVLDMPYKTYNNKIDAYRNAKILLNHCKPDLLKIEISAKKLVVLKHLVDKKINVISHIGVTPQSYKNFNKIKVLGRTNKEKQNLLKLAKESETLGAKAVLLECVTANTAKLITENVSIPTIGIGASKYCDGQVLVFDDLINLNINDKKPKFVKNYFNFNKVATDVVKKYNREVKLKKFPSTKFTYN

SEQ ID NO: 108002 - protein, 271 aa, Unknown
  Bacterial polypetide isolated from the Sargasso Sea
MKKIYTWAAQPANRTLTVDDLKKAKGKKKFTQVTANTIDEAEAAEKAGFDMIICNAFNVKQVREGSKNLFLTAALVLNKFVTSEDIMRGAFEALENGADAVMTPRSMKIVEMLANEDVPVMGHLGLVPRKSTWIGGLRAVGKDSDEAHKLFLKFKRLEDAGAFSAECEVIPENVMGEISKRTNIVTVSLGSGKKADVMYLFMEDICGDTLNPPRHSKAYGNLLKLKNEIKIERVRALKAFKKDSIAGKFPGKKQSSNLNKKEFESFLDKLD

SEQ ID NO: 108003 - protein, 123 aa, Unknown
  Bacterial polypetide isolated from the Sargasso Sea
YKNFTKIRSVGNTNDEKEKICKLALKLEKAGSSLIILECMKESLAKKITEILKIPTIGIGASINCDGQVLVINDILNTDTSFKKPKFVKTYAKINKIIENAVKKYCLEVKMKKFPKKKNTYLI

SEQ ID NO: 108004 - protein, 214 aa, Unknown
  Bacterial polypetide isolated from the Sargasso Sea
MKNIYTWAANPAKRTVTVGDIIEAKGKKILTQVTANNSLEAKAAEEAGFDMIIGSASNVKKVREGSKSLFYTAALELHNYPTAEDVLRGAFKALENGADAVMTARSMDVVSMLAKEDVPVMGHLGLVPRKSTWIGGLRAVGKTADEAYELFKKFKRLEDAGAFSAECEVIPENIMGEISKRTGIVTVSLGSGKKADVMYLFMNDICGEQEKSPR

SEQ ID NO: 108005 - protein, 51 aa, Unknown
  Bacterial polypetide isolated from the Sargasso Sea
MTKKTIKAIQQQKGVKKITCLTAYTSAVAKIIDNYVDIVLVGDSLGSTIYG

SEQ ID NO: 108006 - protein, 256 aa, Unknown
  Bacterial polypetide isolated from the Sargasso Sea
MTVRDLKAAKGKRKFTQVTANSVEEAEAAEKAGFDMIISNAKNVLPVREGSKNLFLTAALVLNEFVTAEDIMRGAFKALENGADAVMTPRSMDIVEMLAKEDVPVMGHLGLVPRKSTWIGGLRAVGKTADEAYELFQKFKRLEDAGAFSAECEVIPENVMGEISKRTDIVTVSLGSGKNADVMYLFMEDICGDTENPPRHSKAYGNLLKLRNEIKLERINALKAFKKDSMNGKFPGKKQSSNLEQKQFEEFLEQLD

SEQ ID NO: 108007 - protein, 177 aa, Unknown
  Bacterial polypetide isolated from the Sargasso Sea
MKNIYTWAANPAKRTVTVGDIIKAKGKKTLTQVTANNSLEAKAAEEAGFDMIIGSASNVKKVREGSKSLFYTAALELHNYPTAEDVLRGAFKALENGADAVMTARSMDVVTMLAKEDVPVMGHLGLVPRKSTWIGGLRAVGKTADEAYELYKKFKRLEDAGAFSAECEVIPENIMGE

SEQ ID NO: 108008 - protein, 259 aa, Unknown
  Bacterial polypetide isolated from the Sargasso Sea
CKRTVTVGDIIEAKGKKILTQVTANNSLEAKAAEEAGFDMIIGSASNVKKVREGSKSLFYTAALELHNYPTAEDVLRGAFKALENGADAVMTARSMDVVSMLAKEDVPVMGHLGLVPRKSTWIGGLRAVGKTADEAYELFKKFKRLEDAGAFSAECEVIPENIMGEISKRTSIVTVSLGSGKKADVMYLFMNDICGEQEKSPRHAKAYTNLKKMKDEIEIERVKALKAFIKDSLEGKFPGPENSVNVSEEILENFKKKL

SEQ ID NO: 108009 - protein, 261 aa, Unknown
  Bacterial polypetide isolated from the Sargasso Sea
ARRNLTVADIKAKKGKEEITQVTANTADEAHAAGEASIDMLICDSKNVEIVRKGNSELFLTAALVIPEYPTDSDLLRGAFKALALGADAVMTARSMSIVSLLANEDIPVMGHLGLVPRKSTWVGGLRAVGKNADEALDLFQKFKRLENAGAFSVEAEVIPGPVLSEISKRTSLITVSLGSGKGGDVTYLFMEDICGENAEAPKHAKSFGNIYKLREMIKEERIKSLKEFRKSSLDEKFPSDQETAKINDREFELFMEKLDT

SEQ ID NO: 108010 - protein, 205 aa, Unknown
  Bacterial polypetide isolated from the Sargasso Sea
MKNIYTWAANPAKRTVTVGDIIEAKGKKILTQVTANNSLEAKAAEEADFDMIIGSASNVKKVREGSKSLFYTAALELHNYPTAEDVLRGAFKALENGADAVMTARSMDVVTMLAKEDVPVMGHLGLVPRKSTWIGGLRAVGKTADEAYELFKKFKRLEDAGAFSAECEVIPENIMGEISKRTSIVTVSLGSGKKADVMYLFMNDI

SEQ ID NO: 108011 - protein, 167 aa, Unknown
  Bacterial polypetide isolated from the Sargasso Sea
MKNIYTWAANPAKRTVTVGDIIEAKGKKILTQVTANNSLEAKAAEEAGFDMIIGSASNVKKVREGSKSLFYTAALELHSYPTAEDVLRGAFKALENGADAVMTARSMDVVSMLAKEDVPVMGHLGLVPRKSTWIGGLRAVGKTADEAYELFKKFKQLEDAGAFSARM

SEQ ID NO: 108012 - protein, 45 aa, Unknown
  Bacterial polypetide isolated from the Sargasso Sea
MLPSELVNYKKKSRKIIALTAWDSISGSLAEQANVDLVLVGDSLG

SEQ ID NO: 108013 - protein, 155 aa, Unknown
  Bacterial polypetide isolated from the Sargasso Sea
MKNIYTWDAKPARRNLTVADIKAKKGKEKLTQVTANTADEAHAAGEASIDMLICDSKKVEIVRKGNSELFLTAALVIPEYPTDSDLLRGAFKALAQGADAVMTARSMSIVSLLANEDIPVMGHLGLVPRKSTWVGGLRAVGKNADEAFDLFQKFK

SEQ ID NO: 108014 - protein, 271 aa, Unknown; identical to SEQ ID NO: 107999
  Bacterial polypetide isolated from the Sargasso Sea

SEQ ID NO: 108015 - protein, 226 aa, Unknown
  Bacterial polypetide isolated from the Sargasso Sea
EEAGFDMIIGSASNVKKVRGGSKSLFYTAALELHNYPTAEDVLRGAFKALENGADAVMTARSMDVVTMLAKEDVPVMGHLGLVPRKSTWIGGLRAVGKTADEAYELYKKFKRLEDAGAFSAECEVIPENIMGEISKRTSIVTVSLGSGKKADVMYLFMNDICGEQEKSPRHAKAYTNLKKMKDEIEIERVKALKAFIKDSLEGKFPGPENSVNVSEEILENFKKKL

SEQ ID NO: 108016 - protein, 192 aa, Unknown
  Bacterial polypetide isolated from the Sargasso Sea
MTVGDLKAAKGKRKFTQVTANTVEEADAAEKAGFDMIISNAKNVIPVREGSKNLFLTAALVLNEFVTAEDIMRGAFKALENGADAVMTPRSMDIVEMLAKEDVPVMGHLGLVPRKSTWIGGLRAVGKTANEAYELFQKFKRLEDAGAFSAECEVIPENVMGEISKRTDIVTVSLGSGRNADVMYLFMEEYLW

SEQ ID NO: 108017 - protein, 271 aa, Unknown
  Bacterial polypetide isolated from the Sargasso Sea
MKKIYTWAAQPANRTLTVDDLKKAKGKKKFTQVTANTIDEAEAAEKAGFDMIICNAFNVKQVREGSKNLFLTAALVLNKFVTSEDIMRGAFEALENGADAVMTPRSMKIIEMLANEDVPVMGHLGLVPRKSTWIGGLRAVGKNSEEAHELFLKFKRLEDAGAFSAECEVIPENVMGEISKRTNIVTVSLGSGKKADVMYLFMEDICGDTLNPPRHSKAYGNLLKLKNEIKVERVRALKAFKKDSMAGKFPGKKQSSNLNKKEFESFLDKLD

SEQ ID NO: 108018 - protein, 86 aa, Unknown
  Bacterial polypetide isolated from the Sargasso Sea
MNAERKKLTIPDLKTKKTAGERLVMVAVGEVLSAAWAERAGVDILGIGDSLGMTLYGHENTLAITVDQMIEHTRAVRRGAPNTFTI

SEQ ID NO: 108019 - protein, 166 aa, Unknown
  Bacterial polypetide isolated from the Sargasso Sea
MSIVSLLANEDIPVMGHLGLVPRKSTWVGGLRAVGKNADEAFDLFQKFKRLENAGAFSVEAEVIPGPVLSEISKRTSLITVSLGSGKGGDVTYLFMEDICGENAEAPKHAKSFGNIYKLREMIKEERIKSLKEFRKSSLDEKFPSDQETAKINDREFELFMEKLDT

SEQ ID NO: 108020 - protein, 86 aa, Unknown
  Bacterial polypetide isolated from the Sargasso Sea
VLLEKIPNLLSKKVFSKLNVPIIGIGAGNHVDGQVLFLQDMLGMNKDFSPRFLRRYLDLDTLISKAVKKYSTDIKSGDFPNKEEQY

SEQ ID NO: 108021 - protein, 285 aa, Unknown
  Bacterial polypetide isolated from the Sargasso Sea
MTETNTKLTVPDLIKKKQNRERVVMVAAADFLMAQWAERSGIDFIGIGDSLGMTLYGHSTTLPMTVDTMIEHTKAVRRGAPNTLTITAMPFGSYATPDIAVQNALRMMKEGGAEVVKMQGGREKFEIIKAIADAGVPVMSHVGMCPHFVNSYGGFKLQGRTAEEALKIVDNAKAIEEAGAIGMEVEAVPPEVGEAVEQAVNIFTFSIGAGGASCGQLLNGADLIGSFDSFKPKFAKRYGNVGEVAMRAMSDYAEEVRSGTFPDADHVYKMKPEEAELLKKALQNV

SEQ ID NO: 108022 - protein, 142 aa, Unknown
  Bacterial polypetide isolated from the Sargasso Sea
MKKIYTWAAQPANRTLTVDDLKKAKGKKKFTQVTANTIDEAEAAEKAGFDMIICNAFNVKQAREGSKNLFLTAALVLNKFVTSEDIMRGAFEALENGADAVMTPRSMKIIEMLANEDVPVMGHLGLVPRKSTWIGGLRAVGK

SEQ ID NO: 108023 - protein, 348 aa, Unknown
  Bacterial polypetide isolated from the Sargasso Sea
MIIFWIGEINLYSAAGGSLDPWASNQLIRFLFFLPLFFLVIMLEPKFIYNFAEIFLILVLIGLITTLIFGYTGMGATRWIRIAGFNLQVSEFTKIALVIFMAKYFHKLNAEKTIGLFKSILPLVVSIIFFILVAIQPDLGTAVIILALGLVVIFYAGIKLIYPLLSLGVILSMSPILWTFLKPYQQNRIQIFLNPDLDPLGKGYHIIQSKIAIGSGGLKGNGFLEGSQSSLDFLPEKETDFVFAIFSEQFGFTGSILLISLFFIMFLIPILKTYKLTQVFNKIILFVLSFKIFFEFLINISMTIGILPVVGVALPFMSYGGSSLLSNLIICALILNFMSINENKRMFT

SEQ ID NO: 108024 - protein, 256 aa, Unknown
  Bacterial polypetide isolated from the Sargasso Sea
MTVGDLKAAKGKKKFTQVTANSVEEADAAEKAGFDMIISNAKNVIPVREGSKNLFLTAALVLNEFVTAEDIMRGAFKALENGADAVMTPRSMDIVEMLAKEDVPVMGHLGLVPRKSTWIGGLRAVGKTSDEAYELFQKFKRLEDAGAFSAECEVIPENVMGEISKRTDIVTVSLGSGKNADVMYLFMEDICGDTENPPRHSKAYGNLLRLRNEIKLERVKALKAFKKDSINGKFPGKKQSSNLEKKQFEEFLDQLD

SEQ ID NO: 108025 - protein, 391 aa, Unknown
  Bacterial polypetide isolated from the Sargasso Sea
MKNFRITDDGGQFINITFDVPILPGDYGVFTKNGDASANGGVDSDYSYSTSSFSLSNADDEIAIYDGNDSLVNRVAYDDGVTFPDSSGFSMELRAPYFDNSLGSNWANSYAIYGEGDRGTPGYQNDSYSGKISASQYAYDFGGIVEGNNATSSMQIYNTGLRTLMVDSLTNQLADFIITPSSGHILVGDSLEIQLQFAPTGPGRKYDTLRVYNQDNSNGLFEVSLYGLGISSVADIVIYLDGDDSVSSYEYLSTRVGFPRTEIFQIANIGNTPLDVEDISIEGGGGAFSTDVNNWSGIDLYDTIDVPVQFNPPATGSYSATLSFTSSDADEGIYTVDLSGAGSLYLNHYVPLEYSSIQSAIKSSFSNDTIIVGEGSYTESIIFPDHNLVIR

SEQ ID NO: 108026 - protein, 270 aa, Unknown
  Bacterial polypetide isolated from the Sargasso Sea
MKNIYTWAANPAKRTFTVGDIIEAKGKKILTQVTANNSLEAKAAEEAGFDMIIGSASNVKKVREGSKSLFYTAALELHNYPTAEDVLRGAFKALENGADAVMTARSMDVVTMLAKEDVPVMGHLGLVPRKSTWIGGLRAVGKTADEAYELFKKFKRLEDAGAFSAECEVIPENIMGEISKRTSIVTVSLGSGKKADVMYLFMNDICGEQEKSPRHAKAYTNLKKMKDEIEIERVKALKAFIKDSLEGKFPGPENSVNVSEEILENFKKKL

SEQ ID NO: 108027 - protein, 152 aa, Unknown
  Bacterial polypetide isolated from the Sargasso Sea
ISGLTPQSKNMMGGYKVQGKTLELATELLEEAVLLETLGCFSMVLEGVPSVVAEVLTEKVSIPIIGIGAGANVDGQVLVFHDLIGMKSKEYIDAKFVKRYANQHKEVVKALENFKKEVENKAFPTEHHSYEAGKITENDVKEWKKEIKKILS

SEQ ID NO: 108028 - protein, 88 aa, Unknown
  Bacterial polypetide isolated from the Sargasso Sea
CFCIVLECISKKAAQKITKSIKIPTIGIGSSSECDGQILVTEDILGISGFYPKFVKKYLNLEKLIKKAVKKFSNDVKSGKFPSKKNSF

SEQ ID NO: 108029 - protein, 163 aa, Unknown
  Bacterial polypetide isolated from the Sargasso Sea
NVKKIMKETKCHGVKLEGGKKIKNIVQHLIKNNIPVLGHLGIMPQSVKGNFKSKGKSLKERKQLMNDSILLEKIGVFGIVLECVEKSLAKKITNKISIPTIGIGSSNSCDGQILVTDDILGLTQSKIKFVKRYIDLRGHIRKAIKQFKTEVKNKKYPSKKYSY

SEQ ID NO: 108030 - protein, 79 aa, Unknown
  Bacterial polypetide isolated from the Sargasso Sea
YSDISKKISKLLKIPTIGIGASVYCDGQVLVTDDILGLTDAKIKFVKKYVNIKKIINVAVSKFKSEVKSKKYPTKKYSY

SEQ ID NO: 108031 - protein, 256 aa, Unknown
  Bacterial polypetide isolated from the Sargasso Sea
MTVADLKAVKGKRKFTQVTANSFEEADAAEKAGFDMIISNAKNVIPVREGSRNLFLTAALVLNEFVTADDIMRGAFKALENGADAVMTPRSMDIVEMLAKEDVPVMGHLGLVPRKSTWIGGLRAVGKTADEAYDLFQKFKRLEDAGAFSAECEVIPENVMGEISKRTDIVTVSLGSGKNADVMYLFMEDICGDTKNPPRHSKAYGNLLKLRGEIKIERVKALRAFKKDSMTGKFPGKKQSSNLEKKQFEKFLNQLD

SEQ ID NO: 108032 - protein, 367 aa, Unknown
  Bacterial polypetide isolated from the Sargasso Sea
MFKEFRSIFNLNWIYIFILLIIFWIGEINLYSAAGGSLDPWASNQLIRFLFFLPLFLLVIMLEPKFIFNFAEIFLILVLIGLITTLIFGYTGMGATRWIRIAGFNLQVSEFTKIALVIFMAKYFHKLNAEKTIGLFKSILPLIVSVIFFVLVAIQPDLGTAVIILALGLVVIFYAGIKLIYPLISIGIILSISPILWTFLKPYQQNRIQIFLNPDLDPLGRGYHIIQSKIAIGSGGLKGNGFLEGSQSSLDFLPEKETDFVFAIFSEQFGFTGSILLISLYFIMFLIPVLKTFKLTQVFNKIILFVLSFKIFFEFLINLSMTIGILPVVGVALPFMSYGGSSLLSNLIICALLLNFMSINEKKRMFS

SEQ ID NO: 108033 - protein, 342 aa, Unknown
  Bacterial polypetide isolated from the Sargasso Sea
MNWCLAECDSTFTYYNELPNNVTILVGDSCLSNDDVAVLDSIVSLNELDYDSPLELGTQTWFNGRLRFLVAGNYGNSSGVNDTIYTLPENFGDLNELASLYLEWNRISELPASFSNLSGLFSVYLNNNILSTIVDSIGSLSNLYFLDLGYNYLESLPESICNLENLEYLWLFNNQLTQLPECFCNMELDWNNNDNGGFPYFAIGANYLCDSVATCVAESDNFELSLDQFYYSFPVFSPQDCDSTTTNTESSLYPYQYHVSAPYPNPFNPTVKININIPYDRKMDIHVYNSLGQETSVISLNKYFTTGTHSVYWNGSQYASGVYYIKFSDGFETQIRKIILLK

SEQ ID NO: 108034 - protein, 70 aa, Unknown
  Bacterial polypetide isolated from the Sargasso Sea
KKLKIPTIGIGSSKFCDGQILVIDDLIGLNDTKVRFVKKFGQIKKNISKAAKNFSRAVKNKKYPSKIYSY

SEQ ID NO: 108035 - protein, 165 aa, Unknown
  Bacterial polypetide isolated from the Sargasso Sea
MDIVEMLAKEDVPVMGHLGLVPRKSTWIGGLRAIGKTADEAYELFQKFKRLEDAGAFSAECEVIPENVMGEISKRTDIVTVSLGAGRNADVMYLFMEDICGDTANPPRHSKAYGNLLKLRNEIKVERVKALKAFKKDSMEGKFPGKKQSSNLDKKQFEEFLDQLN

SEQ ID NO: 108036 - protein, 268 aa, Unknown
  Bacterial polypetide isolated from the Sargasso Sea
ERIKRTSVPDIFNNKGGVPLVCLTAYTYPMAKILDKHVDILLVGDSVGVVLYGMENTHNVTLEMIIGHGKAVVKGSEHACVICDMPFASYQESPELAFRNAAKVIAETGCAGIKIEGGVEMAETVEFLVKRGIPVMGHVGLKPQSINTVGGYKSQGHSEDEVLAIQRDAKAISEAGAFSVVLECMVEEVAAEVTKNITAVTIGIGASARCDGQVLVTEDMLGIFTDFQPKFVKQYIDLQKQIDEAAQLYAREVKDRIFPSSKHVYQKK

SEQ ID NO: 108037 - protein, 258 aa, Unknown
  Bacterial polypetide isolated from the Sargasso Sea
MINKIKKIILKKNKSKIICLTSYSKNFASIIDKHSDIILVGDSLGSVLYNHNTTRKVTLNNMIEHSKSVRMGVNKSLMVVDMPFKSYRNKIEALKNARKIIKATKCDAIKLEGGYKIKEIIKHLVKNKIFVMGHLGVLPQSISEKFKSKGKFKNERNKLIKDAKLLESLGVFSIVLECIHSNTAKIITNSIKIPTIGIGSSSNCDGQVLVTDDLIGLNETKIKFVKKFVNIRKVIEIGIKKYKSEVIRRKYPSKKYSY

SEQ ID NO: 108038 - protein, 119 aa, Unknown
  Bacterial polypetide isolated from the Sargasso Sea
MKNTVPKIVNLKNERVISMMTAYDYPSAKAVSEAEIDIILVGDSLAQVVLGHDDTLSVTIDEMLHHVKAVTNAKPTSLVVADMPYMSFHSTPKETLHNASRFIQEGKADAVKLEGGSKR

SEQ ID NO: 108039 - protein, 157 aa, Unknown
  Bacterial polypetide isolated from the Sargasso Sea
MKKTKSDGVKLEGGKKITRIINTLVKNNIPVMGHLGVLPQSDKKFKFKGENKVEKENILRDAKLLEQSGAFSMVLECIETSLAKLVTDSIGIPTIGIGASKNCDGQILVFDDLIGLNPIKVRFVKKYTNIKRELSKAVSKYANDVKKRKFPSKKYSY

SEQ ID NO: 108040 - protein, 111 aa, Unknown
  Bacterial polypetide isolated from the Sargasso Sea
MQGEQVVSSRAKKVTTHILQEMKRSNEKIAMLTAYDYSLARLVDGAGVDVILVGDSASNVMAGNDTTVPITLEHMIYHAQCVVNAVDRALVVVDMPFGSYQGDSKLALESA

SEQ ID NO: 108041 - protein, 210 aa, Unknown
  Bacterial polypetide isolated from the Sargasso Sea
IRFTTAVKNAKTDSLIVADLPINSYENEDSAITNSKRLVQAGAHAVKLEGGRKVADIIKAVVDSGIPVMGHLGLLPQTAEKYSVQAKKSSDALNLLKDAKILEKAGVFSIVFEMVTSNVAKIITESVKVPTIGIGSGINCDGQVLVVHDMLGMFEKIKPKFAKRYLNLSEDIRNAINSYVKDVKEEKFPEEEHTFSMEKEELEKLEKEIG

SEQ ID NO: 108042 - protein, 161 aa, Unknown
  Bacterial polypetide isolated from the Sargasso Sea
ARKVINTVGCDAVKIESNGRNFRVIKGLVESGIPVMGHIGYTPQNKNKFKPQGTNLKETKKLIFEAKKIEKAGAFSIVLECIARNAAKQITSLIKIPTIGIGSSNFCDGQILVTDDLIGLSGFYPKFVKKYLDLEKILGKSIKKFRDDVRVGNFPKLNNTY

SEQ ID NO: 108043 - protein, 75 aa, Unknown
  Bacterial polypetide isolated from the Sargasso Sea
NIKIKKILKKKNKSKIICLTSYSKNISEILDKHTDIILVGDSLGSVLYSFDTTKKVSLNMIIEHSKSVRQGVKKS

SEQ ID NO: 108044 - protein, 87 aa, Unknown
  Bacterial polypetide isolated from the Sargasso Sea
MKSKIKKILSKKGKSPIVTLTAYSKNISKILDKYCDIILVGDSLGNVLYGMKNTHEVTLDMMIRHASSVNLGVKKSRGIVDMPKNSY

SEQ ID NO: 108045 - protein, 192 aa, Unknown
  Bacterial polypetide isolated from the Sargasso Sea
MLSRISKFTLKKNKSKIICLTAYSKNIAEEIDKYTDMILVGDSLGSVLYNYKTTRKVTLQMMIEHAKSVRLGIKKSLMIVDMPYKTYRNKYEALRNCKKIMKESKCDGVKLEGGIKLKKIIQYLVKNKIPVMGHIGIMPQTVRGKFRVKGKSKKEKNEIFRDAKTLENVGAFAIVLECVENKLSREITNNIK

SEQ ID NO: 108046 - protein, 140 aa, Unknown
  Bacterial polypetide isolated from the Sargasso Sea
MLTKTSRLVLKKKNKSKIVCLTAYSKNIAEEIDNFTDLILVGDSLGSVLYNFDTTRKVNLSMMIEHSKSVRKGIKKSLMIVDMPYNTYKNKTQALKNCKKVMKETKCDGIKLEGGRKILEIVKYLIKFKIPVMGHIGITP

SEQ ID NO: 108047 - protein, 83 aa, Unknown
  Bacterial polypetide isolated from the Sargasso Sea
MKLKNKIRKFFKNSHPLVGLTAYSYDMAKILDKYVDFILVGDSLGMTLYGMNNTRKVTLDMMINHGKAVVKAAKNTLVIIDLP

SEQ ID NO: 108048 - protein, 176 aa, Unknown
  Bacterial polypetide isolated from the Sargasso Sea
MPFNTYRNIKEAKKNARKIFKETHCDAIKLESNGKNFNILKSLVKSGMPVMGHIGYTPQYKGKFKPQGLNKGQERKLINEAIKIESSGAFSIVLECISYDTAKKITESINIPTIGIGSSNACDGQILVIDDLIGLSGFYPKFVKKYADLEKILNNALKRFRSDVIRAKFPTKANTY

SEQ ID NO: 108049 - protein, 111 aa, Unknown
  Bacterial polypetide isolated from the Sargasso Sea
LRGENKVEKENILRDAKLLEQSGAFSMVLECIETSLAKLVTDSIGIPTIGIGASKNCDGQILVFDDLIGLNPIKVRFVKKYTNIKRELSKAVSKYANDVKKRKFPSKKYSY

SEQ ID NO: 108050 - protein, 108 aa, Unknown
  Bacterial polypetide isolated from the Sargasso Sea
MSKIKKIISKKNKTKIVSLTAYSKNIASILDNYCDIILVGDSLGSVLYNYKSTREVTLNTMIEHSKSVRMGIKKSLMIVDMPYKTYRTPKEALKNAKQIMKKTKCDGV

SEQ ID NO: 108051 - protein, 133 aa, Unknown
  Bacterial polypetide isolated from the Sargasso Sea
MNSKIKKIIKKKNKSKIICLTAYSKNFAEEVDKYADITLVGDSLGSVLYNYNTTRKVTLKNMIEHSKSVRMGTKKSLMVVDMPYRTYRNKKEALKNSIKVMRETKCDAVKLEGGFNIKEIIKYLVKNKIPVMG

SEQ ID NO: 108052 - protein, 147 aa, Unknown
  Bacterial polypetide isolated from the Sargasso Sea
NNKNFKIIKAIRKAKIPVMGHIGFTPQFKKKFRVEGKNKKEIRKLIKEAVSIQNAGAFSVVLECITPNTAKIITKLLKIPTIGIGSSSYCDGQILVTDDMLGLSGFYPKFVKKYTNLNTIIEKAVKKYSKEVKNKVFPNNKNFLYGR

SEQ ID NO: 108053 - protein, 251 aa, Unknown
  Bacterial polypetide isolated from the Sargasso Sea
LKKGKKKIVSLTAYSKNYAKILDRYCDIILVGDSMANVLYGMKNTHKITLETIIQHGISVRKGVKKSLLVVDMPKGTYKNPSEARKNANKIVKRTNCDAVKIESNNKNFKIIKEIIKAKIPVMGHIGYTPQFNNKFKVKGKNKNQVKKLIKEATSIEKAGAFSIVLECITPNTSKIITKLLKIPTVGIGSSSYCDGQILVTDDILGLSGFYPKFVKKYINLNTVIEKAVKKYSKEVKNRRFPKNKNFLYGK

SEQ ID NO: 108054 - protein, 215 aa, Unknown
  Bacterial polypetide isolated from the Sargasso Sea
LGSVLYNYETTRKVTLNNMIEHSKSVRMGVKKSLLVVDMPYKTYQNKKVALKNSIKVINETKCDAIKLEGGNKIKDIIKHLVKNKIPVMGHLGLLPQSVRGKFKSKGKIKSEKKQLLKDSKLLEKLGVFAIVLECVETSTAKLITKSIKIPTIGIGSSVFCDGQVLVTDDLLGLNETNIRFVKKFSNLKKNINQGLKRFKKEIILKKYPSKKFSY

SEQ ID NO: 108055 - protein, 233 aa, Unknown
  Bacterial polypetide isolated from the Sargasso Sea
KSFAEVTDKYADITLVGDSLGSVLYNYDTTKKVTLNQMIEHSKSVRKGIKTSLMVVDMPYNTYRNKKEALINAKKIIKSTKCDAVKMEGGTKIKDITQHLIKNKIPLMGHLGLLPQTAGKFRFQGKNKSEKNKLLKEAKLLESLGVFSMILECVETSTAKEITKSIKIPTIGIGSSVHCDGQVLVTDDLLGLNETNIRFVKKFANIKSVIKSGLKKFKKEVTNKNYPSKKYSY

SEQ ID NO: 108056 - protein, 200 aa, Unknown
  Bacterial polypetide isolated from the Sargasso Sea
MKKKILDIKKFKFKKKLVCLTAYSKPISKVLDKYCDIILVGDSVATAFYGMKNTRYISLETMINHSIAVSKGIKQSTFVVDMPFGSYKNLKQAKKNVKKVFKKTHCDAVKLESDGKNFSIINNLVKLGFPVMGHIGFTPQYKKKFKPQGLKKNEEIRLIEESKKIEKAGAFSLVLECVAEKTAKKITKLISIPTIGIVPQ

SEQ ID NO: 108057 - protein, 88 aa, Unknown
  Bacterial polypetide isolated from the Sargasso Sea
AFSMVLECIETSLAKHVTNSIGIPTIGIGASKNCDGQILVFDDLIGLNPIKVRFVKKYTNIKRELSKAVSKYANDVKKRKFPSKKYSY

SEQ ID NO: 108058 - protein, 213 aa, Unknown
  Bacterial polypetide isolated from the Sargasso Sea
LYGMKNTHKITLDTIIQHSISVRKGIKKSLMVVDMPKDSYKNPSQAKKNAKLIFKKTNCDAVKIESNNKNFKIIRAITKSKIPVMGHIGYTPQFKNRFKVEGKKKQEAKKLIKESISIEKAGAFSIVLECITPNTAKTITNLLKIPTIGIGSSSHCDGQILVTDDIIGLSGFYPRFVKKYVNLNTIIEKAVKKYSKEVKTKVFPKNKNFLYGK

SEQ ID NO: 108059 - protein, 51 aa, Unknown
  Bacterial polypetide isolated from the Sargasso Sea
MKLKKKITKFFNNKRPIVGLTAYSYKMSKVLDNYVDFILVGDSLGMTLYGM

SEQ ID NO: 108060 - protein, 213 aa, Unknown
  Bacterial polypetide isolated from the Sargasso Sea
MNKKVKKIINKKNKSKIVCLTAYSKNIASIEDKHCDIVLVGDSLGSVLYNYKSTKEVTLDTMINHSKSVRLGVKKSLMVVDMPYNTYRNPKEALKNVKLVMKKTKCDAVKLEGGKKIISIVKKLVKNKIPIMGHLGILPQTDKKFTFKGKKLAEKNRIIKESKLLEKAGIFSIVLECIETKLAKKITEQLNIPTIGIGSSVNCDGQVLVIDDL

SEQ ID NO: 108061 - protein, 99 aa, Unknown
  Bacterial polypetide isolated from the Sargasso Sea
RDAKLLEEAGSFCMVLECVQTSLAKQVTKSVSIPTIGIGASNNCDGQILVFDDIIGLNPIKFRFVKKYTNIKTEISKAVSKYANEVKKIKFPSKKYSFN

SEQ ID NO: 108062 - protein, 56 aa, Unknown
  Bacterial polypetide isolated from the Sargasso Sea
MNSKIKKILKKKNKSKIICLTSYSKNIAEEADKYADIILVGDSLGSVLYNYDTTRK

SEQ ID NO: 108063 - protein, 236 aa, Unknown
  Bacterial polypetide isolated from the Sargasso Sea
QKSIAKILDKHCDIILVGDSMANVLYGQKTTHKISMNNIIQHTRSVKLGIKKSLLVVDMPKNSYTSITEAYKNAKLIMRETKCNAVKLENYKNNFKVIKYLVKKKIPVMGHIGYTPQFKKKFKFEGQSKKEISKLIKLAKLIENAGAFSLVLECLTARAAKLITKKVKIPTIGIGSSLYCDGQILVTDDMLGLSGFYPKFVKKYANLNRIIEKAVKKYTRDIKLNKFPSKKYFLNG

SEQ ID NO: 108064 - protein, 83 aa, Unknown
  Bacterial polypetide isolated from the Sargasso Sea
MNVHGFAKCKASARKISMVTCYDYWSAQIINKTDVDCILVGDSLAMVMHGFDSTVHATIEMMAMHVSAVRRGAPSKFIIGDMP

SEQ ID NO: 108065 - protein, 95 aa, Unknown
  Bacterial polypetide isolated from the Sargasso Sea
MKKKKIIKIIKKKNKVKIVCLTAYSKSMAKIIDEYCDIILVGDSLGNVLYGFNNTHTVSLQMMINHAKSVSKGIKKSVFVVDMPKNSYNNIKNAK

SEQ ID NO: 108066 - protein, 92 aa, Unknown
  Bacterial polypetide isolated from the Sargasso Sea
AEAAGACAVVLECIPHDIAGSITEALTIPTIGIGAGPQCDGQVLVYHDLIGLSLGHVPTFVRQYADMKDVVSRAVAQWRSDVASGQFPDASP

SEQ ID NO: 108067 - protein, 239 aa, Unknown
  Bacterial polypetide isolated from the Sargasso Sea
SYNYTKIIDDLVDVVLVGDSMSNVLYGMDSTRTIDDQIMINHATAVKKGADKSLVFFDLPYNKDFSESNTVKRVLSIMKKTSCDGVKIEGNTELEDVIKYLKKKKVPVMAHLGLQPQKFSSTKKFRIYGKKKEDLNKIISDSLCLEKAGAVSILLEGMLTKIAKQVTTVLAIPTIGIGASEFCDGQILVSEDMLGMYGNNHPKFVKRYEDLSKNIKIAVKKYSKEVNNNKFPNKKFRYD

SEQ ID NO: 108068 - protein, 83 aa, Unknown
  Bacterial polypetide isolated from the Sargasso Sea
CVPTEVAACISHKIDIPTIGIGAGPQADGQVLVLQDLLGANPDFKPKFLRTYADSHGVVVDALNRFHAEVVAEEFPSSKESYR

SEQ ID NO: 108069 - protein, 156 aa, Unknown
  Bacterial polypetide isolated from the Sargasso Sea
MAISSRAKKVTTHTLQEMKQAGEKITMLTSYDYSLARLVDAAGIDVILVGDSASNVMAGNETTVPITLDHMIYHAQCVVNGVDRALVVVDMPFGSYQGDSKTALDSAIRIMKESGGHAVKLEGGEEVAESIQRIVSAGIPVQGHLGLTPQSIYKFG

SEQ ID NO: 108070 - protein, 122 aa, Unknown
  Bacterial polypetide isolated from the Sargasso Sea
MDFFKINKINKKKNKEKIVCLTAYSKNIASILDNHCDIILVGDSLGSVLYNYDTTRKVNLSMMIEHSKSVKKGIKKSLMVVDMPYNTYTNQSLALKNAKKIIKSTKCDAVKLEGGFKISKII

SEQ ID NO: 108071 - protein, 215 aa, Unknown
  Bacterial polypetide isolated from the Sargasso Sea
MINKKIKKLLLKKNKTKIVSLTAYSKNIAKILDKYADVILVGDSMANVLYGHKNTHKISLENIIQHTLSVKMGIKKSLLVVDMPKGSYNNKKNALKNAEFVIKKTGCDAIKLENNKKNYEIIEALVKKKIPVMGHIGYTPQFNKKFKIAGQTQLEIKKLLKQAKLIEKVGAFSIVLECLSPDSAKLITNELSIPTIGIGSSSNCDGQILVTDDML

SEQ ID NO: 108072 - protein, 146 aa, Unknown
  Bacterial polypetide isolated from the Sargasso Sea
MKKKISNLIKKKNKHKIVSLTAYSKNIASILDNHCDITLVGDSLGSVLYNYKSTREVTLSTMIEHSKSVRMGIKKSLMIVDMPHNTYRTPKEALKNAKKIMKKTKCDGVKLEGGKKIYETVKSLVKNKIPVMGHLGLLPQSDKTFK

SEQ ID NO: 108073 - protein, 124 aa, Unknown
  Bacterial polypetide isolated from the Sargasso Sea
RGKVKSEWQKYIDDAIAVEEAGAFSVVLEGMAEPLAAEITSILNIPTIGIGASPNCDGQILVTEDMLGLTNVAPKFVKKYVDLDNTIKKAVSKYAEEVKDRTFPSSDHIYHMRPQIVSNNGKDQ

SEQ ID NO: 108074 - protein, 85 aa, Unknown
  Bacterial polypetide isolated from the Sargasso Sea
MVLECIETSLAKLVTDTIGIPTIGIGASKNCDGQILVFDDLIGLNPIKVRFVKKYTNIKRELSKAVSKYANDVKKRKFPSKKYSY

SEQ ID NO: 108075 - protein, 194 aa, Unknown
  Bacterial polypetide isolated from the Sargasso Sea
SKSVRLGVNKSLMVFDMPYNTYRNPQEAFRNAKLVIKETKCDAVKLEGGKKIIPIVKKLVQNKIPVMGHVGILPQTDKKFTFKGKKQEESDRILNDTKLLEKAGAFSIVLECIETKLSKKITNNLMIPTIGIGSSANCDGQVLVIDDLIGLSKSKFKFVKKYIDISRIIENAVKRYKSEVTKKRFPTRKHSFNT

SEQ ID NO: 108076 - protein, 177 aa, Unknown
  Bacterial polypetide isolated from the Sargasso Sea
MPYKTYRNKKEALKNCKKVIKETKCDGVKLEGGLKIKNIVNHLTNNRIPVMGHIGILPQLVRGKFKSKGKSENEKKQLMKDAIILEKLGCFGIVLECIEKNLSKKITKTIKIPTIGIGSSHHCDGQILVTDDLLGLTNSKIKFVKKYVDLKKYVREGVKKFRSEVINNKYPTKSYSY

SEQ ID NO: 108077 - protein, 227 aa, Unknown
  Bacterial polypetide isolated from the Sargasso Sea
MSSIQKINKLKNLKFKRKLVCLTAYSKPISRILDKFCDIILVGDSVATAFYGMKDTRSITLETMINHGESVKKSTKKSILVFDMPINTYRNLKEAKKNIQKVFKKVKCDAVKIESNGKNFTIVKELVKYGMPVMGHIGYTPQIKKKFKPQGLKKIETAKLIYEAKQIEKAGAFSIVLECIAEKAAKEITNSVKIPTIGIGSSYYCDGQILVTDDLLGLSGFYPKFVK

SEQ ID NO: 108078 - protein, 175 aa, Unknown
  Bacterial polypetide isolated from the Sargasso Sea
MAKKTIQTIQNQKNQKKITCLTAYTSSIARIVDNYVDIILVGDSLGSTIYGMKNTQHVTLEMMKEHGRAVAKNCKKSFTIVDMPYNTYNGNKKALLNIRNLLNYTKCQAVKIETDESKINLIKYLTKKKIKVVSHIGVTPQKYKNFDKIRSVGNSNEEKEKILNLALNMKRLDRV

SEQ ID NO: 108079 - protein, 57 aa, Unknown
  Bacterial polypetide isolated from the Sargasso Sea
MSIKSDKDLITISTLKRLKEKGEKFACLTAYEATIAEKISKSGIEVILVGDSLGMVI

SEQ ID NO: 108080 - protein, 215 aa, Unknown
  Bacterial polypetide isolated from the Sargasso Sea
LGSTLYNYKSTRSVTLDIMINHSISVRQGISDSLMVVDMPYNTYNNPFQALKNCKKVMKLTKCDAVKLEGGLKIFKILKHLIKNKIPVMGHLGILPQSNKGKFKSKGKSIKEKNQLIRECKILEEVGVFSLVLECVDRKLSKHITNMLKIPTIGIGSSINCDGQILVTDDVLGLTNSQMKFVKKFVDVKKLINEGVKKFKKEVKSKKFPSKKYSY

SEQ ID NO: 108081 - protein, 108 aa, Unknown
  Bacterial polypetide isolated from the Sargasso Sea
NEKKKIIKLALNLQEAGSCLIVLECMKETLAKEISKKLKIPTIGIGASQDCDGQILVIDDILGMSNFEKKPKFVKSYANFESIINKSVKKYCLDVIQKKFPNKKNVYK

SEQ ID NO: 108082 - protein, 70 aa, Unknown
  Bacterial polypetide isolated from the Sargasso Sea
MKKFKVLHKSFSKPISCLTAYSPSIAKILDGKVDLILVGDSLGSTLYGMKNTQGVTMDMMKNHGAVVNKE

SEQ ID NO: 108083 - protein, 125 aa, Unknown
  Bacterial polypetide isolated from the Sargasso Sea
MNDLKEKKLRGEKITSITAYDYSFARVADEAGFDIILVGDSLGNVVLGYDTTIPVSIDDMEYHTRAVSRGTRNGLLISDMPFMTYSSTASALKNAAILMQAGAQMVKLEGGEWLSETVNQLSNAV

SEQ ID NO: 108084 - protein, 161 aa, Unknown
  Bacterial polypetide isolated from the Sargasso Sea
KKIIKLTKCDAVKLEGGKKISKIIQYLVKKKIPVMGHVGLLPQTSNNFKLKGKNYVQRKRILEDAISVSKSGAFAIVIECVVESLAKKITKNVSVPTIGIGASKYCDGQILVTDDMLGLSDFSPKFVKKYSNLRNIIDKSIKNYTRDVRTRKFPAIKNVYK

SEQ ID NO: 108085 - protein, 129 aa, Unknown
  Bacterial polypetide isolated from the Sargasso Sea
LAKELLEDAILLDSLGCFSFVLEGVPKVVAQTITEQVSIPTIGIGAGVHVDGQVLVYHDLLGMKSKEYIDAKFVKRYDNQYDRVVKAMENFKKDIENKEFPTDDHSYDSGDSLSENLEEWKKEVKKILS

SEQ ID NO: 108086 - protein, 94 aa, Unknown
  Bacterial polypetide isolated from the Sargasso Sea
KAGSCLIVLECMQETLAREISKKLKIPTIGIGASKDCDGQILVIDDILGISSSEKKPKFVKSYANFESEINKSVKKYCLDVIQKKFPNKKNVYK

SEQ ID NO: 108087 - protein, 176 aa, Unknown
  Bacterial polypetide isolated from the Sargasso Sea
MLDKVKKIKQKKNKSKIVCLTAYSKNIAEEVDKFTDLILVGDSLGSVLYNYKSTRQVTLEKMIEHSKSVRLGISKSLMIVDMPYNTYRNKVEALKNCKKVMKETKCDGVKLEGGLRIKDIVKHLIKNKIPVLGHLGITPQTVRGRFKSKGKSVRERNRLLSDATLLEKSGAFAIVL

SEQ ID NO: 108088 - protein, 176 aa, Unknown
  Bacterial polypetide isolated from the Sargasso Sea
PYNTYTSKFIAYKNAKKVMRLTKCDAIKLEGGKKVVNIIKYLTKKKIPVMGHVGLLPQTSTNFKVRGKNFVQENKILDDAKAISNSGVFAIVVECVVENLANKITKNVSVPTIGIGASKYCDGQILVSDDMLGLSDLFPKFVKQYSNLKKIIEKSIKSYANDVMLKKFPSRKNVYK

SEQ ID NO: 108089 - protein, 86 aa, Unknown
  Bacterial polypetide isolated from the Sargasso Sea
ITSILNIPTIGIGASPNCDGQILVTEDMLGLTNVAPKFVKKYVDLDNTIKKAVSKYAEEVKDRTFPSSDHIYRMHPQIVSNNGKGQ

SEQ ID NO: 108090 - protein, 83 aa, Unknown
  Bacterial polypetide isolated from the Sargasso Sea
MNRNIKNILNKKNKSKLVCLTAYSKNIASILDNHCDIILVGDSLGSVLYNYKSTKEVTLDTMINQSKSVRLGVKKSLMVVDMP

SEQ ID NO: 108091 - protein, 140 aa, Unknown
  Bacterial polypetide isolated from the Sargasso Sea
MLRKTANDIRTLKGKTPIVCLTAYTAPIARAIDDKIDLMLVGDSLGMVLYDFENTLQVTLEQMIQHAKSVVGASRKSCVIVDMPFGTYEESVDKAFMNAARVMKETNCNGVKLEGGKKIAKTIKHLAKSSIPVMGHIGLQ

SEQ ID NO: 108092 - protein, 82 aa, Unknown
  Bacterial polypetide isolated from the Sargasso Sea
MKNTVPKIVNLKNERVISMMTAYDYPSAKAVSEAEIDIILVGDSLAQVVLGHDDTLSVTIDEMLHHVKAVTNAKPTSLVVAD

SEQ ID NO: 108093 - protein, 97 aa, Unknown
  Bacterial polypetide isolated from the Sargasso Sea
KREASILEELGCFSIVLEHIPDLLAKEIQNSLTIPTIGIGAGNYCDGQVRVTADLLGLNDNQPPFCQPIIQGKKLFKDKLKEWVDSERLSGLSHPTT

SEQ ID NO: 108094 - protein, 248 aa, Unknown
  Bacterial polypetide isolated from the Sargasso Sea
MSKLSKLLNLYRRGKKISCITAYDASMSKYLESSGVDIILVGDSLGQVIKGEKNTHGVTLDEITYHTRCVKSGLKTSILMIDLPKNSYNTKFKAYKNANKFILTRLADLIKIEIDVGNLDIAKYLIEKNIPLCAHIGLLPQTIKSRSGYRKYGKSKHEAKQLYDLAISLDKLGVQVILIECLENSLARRISENCNAPVIGIGSGRGIDGQVAVIYDLLGISFNKIDGFFKNDKTSLDKQIAEFRKKLK

SEQ ID NO: 108095 - protein, 90 aa, Unknown
  Bacterial polypetide isolated from the Sargasso Sea
MNKKISDFIKKKNKTKLVTLTAYSKNIALVLDNYCDLILVGDSLGSVLYNYKSTREVTLNTMIEHSKSVRKGIKKSLMIVDMPHNTYRNP

SEQ ID NO: 108096 - protein, 143 aa, Unknown
  Bacterial polypetide isolated from the Sargasso Sea
MSNLKNKLQNFKKRKEQITCLTCYDSSFSKILNDSKIDIVLVGDSLGMVIKGKENTHSVTMDEILYHSKCVSTYKENFILMADMPINSYDNIDIATLNAKKLLEQEVDIVKVEYQDKHFEVIKGFVNAKIPICAHHWIPSSEK

SEQ ID NO: 108097 - protein, 54 aa, Unknown
  Bacterial polypetide isolated from the Sargasso Sea
MHKKILSIIRKKNKTKIVSLSAYSKNVASILDNHCDIILVGDSLGSVLYNYKST

SEQ ID NO: 108098 - protein, 170 aa, Unknown
  Bacterial polypetide isolated from the Sargasso Sea
VLRMLKRLMQAGANSVKIEGGQWISKMAQVLSDRGIPVCAHMGLTPQTINRIGGHRVQGRDPSQKEKIINEAIALEKAGASMLLLECVPGELAKTITKELKIPVIGIGAGVHTDGQIMVVHDLLGISCLDKPPKFVKNFMKTSTSIPGAIKRYVKEVKNIKFPSKEHTFE

SEQ ID NO: 108099 - protein, 141 aa, Unknown
  Bacterial polypetide isolated from the Sargasso Sea
IEIIKHLIKYKIPVMGHIGITPQSVRGKFRYKGKTDIEKKNLLKDSKSLEDAGVFAIVLECIEKKVSKKITESINIPTIGIGSSNFCDGQILVTDDLLGLTDNKIKFVKKYANLKSNVRTAVKKFKLDVKKGSYPSIRYSY

SEQ ID NO: 108100 - protein, 123 aa, Unknown
  Bacterial polypetide isolated from the Sargasso Sea
MNKKILSIIRKKNKIKIVSLSAYSKNVAEILDNYCDIVLVGDSLGSVLYNYKSTREVSLNTMIEHSKSVRLGIRKSLMVVDMPYNTYRNSKEALRNARQVMLKTNCDAVKLEGGKKFVKLLKY

SEQ ID NO: 108101 - protein, 135 aa, Unknown
  Bacterial polypetide isolated from the Sargasso Sea
TLVKNNIPVMGHLGVLPQSDKKFKFKGENKVEKENILRDAKLLEQSGAFSMVLECIETSLAKLVTDSIGIPTIGIGASKNCDGQILVFDDLIGLNPIKVRFVKKYTNIKRELSKAVSKYANDVKKRKFPSKKYSY

SEQ ID NO: 108102 - protein, 92 aa, Unknown
  Bacterial polypetide isolated from the Sargasso Sea
GAFSIVLECVTPSVAKKITNTLKIPTIGIGSSSYCDGQILVTDDILGLSGFYPKFVKRYANLNTIIEKAVKKYSKDIKTKVFPNKKNFLYGK

SEQ ID NO: 108103 - protein, 215 aa, Unknown
  Bacterial polypetide isolated from the Sargasso Sea
MKRSIKSVFNKKNKKKIICLTSYSYNYTKIIDDLVDVVLVGDSMSNVLYGMDSTRTIDDQIMINHANAVKKAAEKSLVFFDLPYNRDFSEANTVKRVLSIMKKTSCDGVKIEGNTELEDVIKYLKKKKVPVMAHLGLQPQKFSSTKKFKIYGKKKEDLNKIISDSLCLEKAGAVSILLEGMLTKIAKQVTTVLAIPTIGIGASGICDGQILVSED

SEQ ID NO: 108104 - protein, 175 aa, Unknown
  Bacterial polypetide isolated from the Sargasso Sea
SYKNPSDAKKNAKLILKKTNCDAVKIESNNRNFKIIREITKAKIPVMGHIGYTPQFKNSFKVEGKKKQEVKKLINESILIEKAGAFSIVLECITPNTAKIITNLLKIPTIGIGSSTNCDGQILVTDDIIGLSGFYPKFVKKYINLNTIIEKAVKKYSKEVKTKVFPKNKNFLYGK

SEQ ID NO: 108105 - protein, 159 aa, Unknown
  Bacterial polypetide isolated from the Sargasso Sea
VISNTKCDAVKLEGGNKIKKIVKYLVKKKIPVMGHLGILPQSVRGTFKSKGKTERETFKLISDAKMLEEAGCFAIVLECVKSKTSKLITKNLKIPTIGIGSSVFCDGQVLVTDDLLGLNETNIRFVKKFINLKTFINKGLRKFKYEVLSKKYPSKKYSY

SEQ ID NO: 108106 - protein, 207 aa, Unknown
  Bacterial polypetide isolated from the Sargasso Sea
MAEERKKLTIPDLALKKAAGERLVMVAVGEVLSAAWAERAGIDIVGIGDSLGMTLYGHENTLAVTVDQMIHHTRAVRRGAPNTFSLMAMPYGSYATKDLAVQNAVKIMKESGVDAVKLQGGREIFDTIKAVADAGVPVMSHVGLVPHHVHKHGGFKMQGRTAEDALKIIDNAKAIEEAGAIGLEIEAVPYEVGKAVDDAIFIFTFSI

SEQ ID NO: 108107 - protein, 206 aa, Unknown
  Bacterial polypetide isolated from the Sargasso Sea
TTRKVNLKMMIEHSKSVRKGVKKSLMIVDMPFDTYKNKSQALKNCKKVLKETKCDGIKLEGGRELNNIIKYLINNKIPVMGHIGITPQTIRGKYRYKGRTAFEKKKLLKDSKSLEEAGVFAIVLECIERKLSQEITKTIKIPTIGIGSSKYCDGQILVTDDILGLTNSKMKFVKKYTNLKKNIRNAVKKFQTDVKNGSYPSIKYSY

SEQ ID NO: 108108 - protein, 110 aa, Unknown
  Bacterial polypetide isolated from the Sargasso Sea
MQSLVEEAGAFSIVLEGMTEPLAAEITSILSIPTIGIGASPKCDGQILVTEDILGLSNVAPKFVKKYDDLEKSIKSAVNKFANEVKDRRFPSQDHIYHMRPQIVKENTKI

SEQ ID NO: 108109 - protein, 188 aa, Unknown
  Bacterial polypetide isolated from the Sargasso Sea
MNTKIKNILKKKNKSKILCLTAYSKNFAELIDKYVDITLIGDSLGSVLYNYDTTKKVTLTNMIDHSKSVRLGVKKSLMVVDMPFNTYRSNLSAYKNAKRVIKETKCDAVKLEGGKKIITQIKYLIKKKIPVMGHLGLLPQSAKGKFKSKGKSTRETKQLIKDALLLQSSGVFAIVIECVKGATAKKIT

SEQ ID NO: 108110 - protein, 195 aa, Unknown
  Bacterial polypetide isolated from the Sargasso Sea
SISVKKGIKKSLMVVDMPKGSYQNPLQAKRNAKLIVKKTKCDAVKIESNNKNFKIIKEIIKANIPVMGHIGYTPQFKNNFKVEGKNKKEIKRLIGEAKSIERAGAFSIVLECLTPDTAKIITNLLRIPTIGIGSSSYCDGQILVTDDMLGLSGFYPKFVKKYINLNSLIEKAVKKYSKDVKAKRFPNNKNFLYGK

SEQ ID NO: 108111 - protein, 200 aa, Unknown
  Bacterial polypetide isolated from the Sargasso Sea
SCVIVDMPFGTYEESVDKAFMNAARVMKETNCNGVKLEGGQKMSKTIEHLTKSSIPVMGHIGLQPQSVLIDGGYKVRGKVKSEWQKYIDDAIAVEEAGAFSVVLEGMAEPLAAEITSILNIPTIGIGASPNCDGQILVTEDMLGLTNVAPKFVKKYVDLDNTIKKAVSKYAEEVKDRTFPSSDHIYHMRPQIVSNNGKDQ

SEQ ID NO: 108112 - protein, 123 aa, Unknown
  Bacterial polypetide isolated from the Sargasso Sea
MSSINYTRITTKSLQEMKSKGEKIAMLTAYDYSFARLVDKSKIDVILVGDSASNVMAGHETTLPVTLDQMIYHATSVVKAAKRALVIVDLPFGSYQSDPNAALRSAIRIMKESGAHGVKLEGG

SEQ ID NO: 108113 - protein, 95 aa, Unknown
  Bacterial polypetide isolated from the Sargasso Sea
ENLTIPTIGIGAGKYTDGQVLVIHDLIGMKSKEYIDAKFVKRYGEQYDSTVKALSEYKKDIENSDFPSEEHSYDMGSDIQDSLKEWKKEIKKILS

SEQ ID NO: 108114 - protein, 122 aa, Unknown
  Bacterial polypetide isolated from the Sargasso Sea
MLSKINEFKLKKNKSKIVCLTAYSKNIAKIIDKHADLILVGDSLGSVLYNFNSTRSVTLDMMIKHSKSARLGISNSLMIVDMPFNTYNNPVQALKNCKKIMKFTKCDGVKLEGGLKIVKIIK

SEQ ID NO: 108115 - protein, 145 aa, Unknown
  Bacterial polypetide isolated from the Sargasso Sea
MVVKIFKIKSKKNISKIVCLTAYSKNIAQAIDKYTDIILVGDSLGSTLYNFKSTRSVTLEMMIKHSISVRQGISNSLLVVDMPYNTYNNPSQALKNCKKVMKLTKCDAVKIEGGLKMIKIIKHLVKIKFLSWGTLEYYLNLQKVN

SEQ ID NO: 108116 - protein, 137 aa, Unknown
  Bacterial polypetide isolated from the Sargasso Sea
KALTKNNIPVMGHLGLLPQSAKGKFRSKGKTTKEINQLINDALLLQKNGVFAIVLECIKTPIAKQITKSLKIPTIGIGSSVYCDGQVLVTDDLIGLNQTNIKFVKKFLNVKKYINSGLRKFAYEVRTSKYPTKKHSY

SEQ ID NO: 108117 - protein, 175 aa, Unknown
  Bacterial polypetide isolated from the Sargasso Sea
PHNTYRTPKEALKNAKQIMKKTKCDGVKLEGGKKIYETIKTLVKNKIPVMGHLGLLPQSDKTFKFKGKKKLERDNILRDSQLLEKAGVFSIVLECVETSLAKLVSQNITVPTIGIGASKYCDGQILVFDDLIGLNPMNYKFVKKYANIRKDISKAVSNYSKEVRKIKFPNKKNSF

SEQ ID NO: 108118 - protein, 95 aa, Unknown
  Bacterial polypetide isolated from the Sargasso Sea
MKKKISDLIKKKNKEKIVSLTAYSKNVASILDKHCDIILVGDSLGSVLYNYKSTREVSLHMMIEHSKSVRMGIKKALMVVDMPHNTYRNSKEALK

SEQ ID NO: 108119 - protein, 100 aa, Unknown
  Bacterial polypetide isolated from the Sargasso Sea
FFIVLEGMAEPLAAEITSQVSIPTIGIGASLKCDGQILVTEDMIGLTNITPKFVKEYINIRKLIEEAANSYSNEVRNKEFPTRSHTYSMNPTIVKLNKGD

SEQ ID NO: 108120 - protein, 259 aa, Unknown
  Bacterial polypetide isolated from the Sargasso Sea
MNKKIKKILNKKGKSKIICLTAYSKNISSILDKHCDLVLVGDSLGSVLYNYKTTKEVTLETMINHSKSVRLGVKKSLMIVDMPYNTYRNPREALKNVKLVMKETKCDGIKLEGGKKIISIIKTLIKNKIPVMGHLGILPQTDKKFSFKGKKQRESARILNDTKLLEKAGVFSIVLECVETKLSKKITEQIKIPTIGIGSSANCDGQVLVIDDLIGMSESKFKFVKKYVDVSKIINSAVKKYKSEVLKKKFPSAKYSFKN

SEQ ID NO: 108121 - protein, 83 aa, Unknown
  Bacterial polypetide isolated from the Sargasso Sea
KNTITISEKVTMKISIPTIGIGAGPNVDGQVLVLHDLLGITHEFNPRFLRRYLNLHDEIMGAISKYVADVKSLDFPNENESYN

SEQ ID NO: 108122 - protein, 261 aa, Unknown
  Bacterial polypetide isolated from the Sargasso Sea
MKKIKILHKRFSKPISCLTAYSPSIANILDGKIDLILVGDSIGSTLYGMNNTQGVTMDMMKNHGAAVNKTIKKSLKVLDMPYKTYDNKIDAYKNAKILLNHCKPDLLKIEISEKKLVVLKHLVDKKLNVISHIGVTPQSYKNFNKIKVLGKTNKEKQNLLELAKKSETLGAKAVLLECVTSDTAKLITENISIPTIGIGASKYCDGQVLVFDDLINLTTNDKKPKFVKNYFNFNKVASNVVKKYNREVKLKKFSSTKFTLH

SEQ ID NO: 108123 - protein, 64 aa, Unknown
  Bacterial polypetide isolated from the Sargasso Sea
MILKLKKIINKKNKSKIICITSYSKNVAEAIDPYTDIILVGDSLGSVLYNYSTTRKVTLNQMIE

SEQ ID NO: 108124 - protein, 219 aa, Unknown
  Bacterial polypetide isolated from the Sargasso Sea
MGNVLYGMDTTRSVDDQIMVNHATAVKKGADKSLVFFDLPYNRDFSESTTVKRVLSIMKKTSCDGVKIEGNTELKDVIKYLSKKKVPVMAHLGLQPQKFSSSKKFKIYGKDKRDLDNIISDSLCLEKSGAVSILLEGMLTNIAKEVTKTLSIPTIGIGASEYCDGQILVSEDMLGIFRDNHPKFVKKYADLSKNIRVAVNKYSNEVNNNKFPNKKFRYD

SEQ ID NO: 108125 - protein, 257 aa, Unknown
  Bacterial polypetide isolated from the Sargasso Sea
MNAFVKIKKFKTIKRKIVCLTAYSRPIGKILDKYCDIILVGDSVATAFYGMKNTKEIDLNTMINHGKSVGKSVKKSILVFDMPYNTYKNIKDAKKNVKKVLKKTKCHAVKLESNGKNFNILNNLVKSGVKVMGHIGYTPQYKKKFSPQGLKTNEMKKLINEAKKIEQAGAFAIVLECVHFKLAKKITDSIKIPTIGIGSSHFCDGQILVLDDLLGLSGFYPKFVKKYLNLEKLINIAVKRFKKDILRKKFPNNSNTY

SEQ ID NO: 108126 - protein, 258 aa, Unknown
  Bacterial polypetide isolated from the Sargasso Sea
MNNKIKKIINKKNRSKIVCLTAYSKNIAEIIDNHVDITLVGDSLGSVLYNYNTTRKVNLKMMLEHTKSVRMGVKKSLLVIDLPYNTYRNKSEALKNSKKAIKETKCDAVKIEGGIKVKDIVRHLVKNKIPVLGHIGITPQTVKGKFKSKGKTETEKRKLINDAKELEKSGAFGIVLECIYSDISKKITNLIKIPTIGIGASVHCDGQVLVTDDILGLTNAKIKFVKKYTNVKKIVNSAVLKFKKEVKSEKYPSKKYSY

SEQ ID NO: 108127 - protein, 217 aa, Unknown
  Bacterial polypetide isolated from the Sargasso Sea
DSLGSVLYNFKTTRKVNLSMMIEHSKSVRQGVKKSLMIVDMPFNTYKNKSQALKNCRKVMKETKCDGIKLEGGRNINEIVKHLIKHKIPVMGHIGITPQSVRGKFRYKGKSDIEKKNLLKDSKSLEDAGVFAIVLECVERIASKEITESIKIPTIGIGSSNFCDGQILVTDDLLGLTDTKIKFVKKYADLKSNVRKAVKKFKSDVKKGSYPSIKYSY

SEQ ID NO: 108128 - protein, 143 aa, Unknown
  Bacterial polypetide isolated from the Sargasso Sea
MQGEQVVSSRAKKVTTHILQEMKRSNEKIAMLTAYDYSLARLVDGAGVDVILVGDSASNVMAGNDTTVPITLEHMIYHAQCVVNAVDRALVVVDMPFGSYQGDSKLALKSAIRIMKESGGHAVKIEGGKEIVDSVKRILTAGI

SEQ ID NO: 108129 - protein, 76 aa, Unknown
  Bacterial polypetide isolated from the Sargasso Sea
MSRKSVIDIKEMKSKTPIVCLTAYTATIGRVLDEEADLLLVGDSLGMVLYDHENTLSVTLQQMINHSQAVGDRHQK

SEQ ID NO: 108130 - protein, 169 aa, Unknown
  Bacterial polypetide isolated from the Sargasso Sea
MLRKSANDIKSLKRKTPIVCLTAYTAPIARAIDEQVDLMLVGDSLGMVLYDYENTLQVTLEQMIKHAKSVVGASNKSCVIVDMPFGTYEESVDKAFMNAAHVMKETNCNGVKLEGGQKMFKTIEHLTKSSIPVMGHIGLQPQSVLIDGGYKVRGKVKSEWQKYMDDAVA

SEQ ID NO: 108131 - protein, 159 aa, Unknown
  Bacterial polypetide isolated from the Sargasso Sea
MLPSDLVTYKKKSRKIIALTAWDSISGSIAEQANVDLVLVGDSLAMVCLGYKSTLPLTLENIIYHTNAVSRGFMKKIEEQPLVVSDMPFLTYQCGENKAVEYAGKIIQSTYAKAVKVEGAEPEIQKVISRLIRMGIPVMGHIGLTPQSYLNIGLKKQGE

SEQ ID NO: 108132 - protein, 95 aa, Unknown
  Bacterial polypetide isolated from the Sargasso Sea
MKKLKILHKSFSKPISCLTAYSSSIAKILDGKIDLILVGDSLGSTLYGMKNTQGVTMDMMKNHGAAVNKEIKRSLKVLDMPYKTYDNKIDAYRNA

SEQ ID NO: 108133 - protein, 147 aa, Unknown
  Bacterial polypetide isolated from the Sargasso Sea
MSKKIEKIIKKKNKKKIVCLTAYSKNIAKILDKYCDITLVGDSLANVLYGMENTHKVSLDLMIQHSVSVKRGIKHSLFVVDMPKGSYTTPFKAKKNAILIKKKTGCDAVKIESNKKNFKVIKEIKKVGIPVMGHIGFTPQFKKKFKV

SEQ ID NO: 108134 - protein, 162 aa, Unknown
  Bacterial polypetide isolated from the Sargasso Sea
MIKKNLQYLLSLKKENILITSVTSYDASFAKLADDCGVDIILVGDSLGEVIKGAKNTHSVTVDDICYHTKSVSKGIKYAYLISDMPKHSFRTKRQALSNAIKITEKGLADMIKIESTPKQLDIVKHLINNNIKVCGHIGIQPQNINKKSYRKIGITTRECKS

SEQ ID NO: 108135 - protein, 256 aa, Unknown
  Bacterial polypetide isolated from the Sargasso Sea
MARASFQKIKLLKKKNIGIVAITAYDASFARYFDELGFDIILIGDSLGEVIKGQKNTHNVSLENMIYHSQSVRRAVKNSYLISDLPRESSLNKLTAYKHAKKIISECKVNMIKIECNKNNIDVVEHLVKNKIPICCHLGLTPQLISQKNSFRKYGKSPKEFSSIIKIAQIIQEIGVKMILIECVTDLLAKELRKIINVPIIGIGSGKSCDGQILVSYDILGISYNSIPKIVEKKYFKIKDFESRVKKYIYNTKNFL

SEQ ID NO: 108136 - protein, 127 aa, Unknown
  Bacterial polypetide isolated from the Sargasso Sea
MLNKIKKIISKKNKSKIICLTAYSKNFAEEIDKYTDIVLVGDSLGSVLYNYNSTRNVNLENMIKHSKSVRMGVKKSLMVVDMPYKTYRNRKEALNNAKKIIKETKCEAVKLEGGTKIINIIKHLINN

SEQ ID NO: 108137 - protein, 263 aa, Unknown
  Bacterial polypetide isolated from the Sargasso Sea
MNIKIKKILKKKNKSKIVSLTAYSKNIAEILDNHCDIILVGDSMANVLYGLSDTHKINLNTIINHTISVKKGVKKSLLVVDMPKGSYGSKKTAKKNAKLIMKLTKCDAVKLESNNKNFYIIKELVKSKIPVMGHIGYTPQFKKKFRVEGKSTLGAQKLLKEAKLIEKAGAFSIVLECLTPNASALVTKGLRIPTIGIGSSSHCDGQILVTDDMLGISGFYPKFVKKYASLNTTIEKAVKKYTRDVKKGKFPLKKNFLNGSKLR

SEQ ID NO: 108138 - protein, 151 aa, Unknown
  Bacterial polypetide isolated from the Sargasso Sea
MLLTRGRKKIISQVKFLIKNKIPVMGHLGLLPQSAKGKFKSKGKTPKEINQLMNDAVLLQKTGVFAIVLECIKSSIAKQITKKLKIPTIGIGSSVYCDGQVLVTDDLIGLNQTKIKFVKRFVNIKKYIKAGIRKFASEVRSKKYPTKKYSY

SEQ ID NO: 108139 - protein, 144 aa, Unknown
  Bacterial polypetide isolated from the Sargasso Sea
MNKKIKKILNKKNKSKIVCLTAYSKNIAEILDKHCDLVLVGDSLGSVLYNFKSTKEVTLQTMINHSKSVRLGVNKSLMVFDMPYNTYRNPLEALRNAKLVIKETKCDAVKLEGGKKIIPIVKKLVQNKIPVMGHVGILPQTDKK

SEQ ID NO: 108140 - protein, 213 aa, Unknown
  Bacterial polypetide isolated from the Sargasso Sea
MKKKIFFIKKLKSKRKIVCLTAYSKPITKILDKHCDIILVGDSVATAFYGMKNTRLISFETIINHSISVSKAIKKSTLVIDMPFKTYRNYSLAKKNVKKIFKKTNCDAIKIESNGKNSSIISKLVKSGYPVMGHIGFTPQFKKKFQPQGMSLKDEKKLIVESLKIEKAGAFSLVLECVSESVAKKITKILRIPTIGIGSSKFCDGQILVTDDL

SEQ ID NO: 108141 - protein, 151 aa, Unknown
  Bacterial polypetide isolated from the Sargasso Sea
AVVDSGIPVMGHLGLLPQTAEKYSVQAKKSEDAVNLIQDAKILEESGVFSVVLEMVTSDVTEIITKSIKVPTIGIGSGISCDGQVLVVHDMLGMFEKIKPKFAKRYLNLSEEIRNAVNSYVKDVKEKRFPEKEHTFSMEKDELEKLEKEIG

SEQ ID NO: 108142 - protein, 63 aa, Unknown
  Bacterial polypetide isolated from the Sargasso Sea
MITIDTLNNLKANGEKFTCLTAYESTLANVISSAGVEVILVGDSLGMVIQGHNSTLPVTMNDL

SEQ ID NO: 108143 - protein, 257 aa, Unknown
  Bacterial polypetide isolated from the Sargasso Sea
MKSKLQRILKKKNKSKLVCLTAYSKNFSKILDKYCDIVLVGDSLANVLYGMKNTHEVTLEMMIKHTISVKSGLKKSLCVIDMPLNSYSNIRLAKKNAKKAIKKTKCDAVKIESNNKNFSIIKALVKSNIPVMGHIGYTPQFKKKFKVAGRSEIEEKKLITEAKRIEEAGAFSIVLECVKKETAKRITKNLKIPTIGIGSSSSCDGQILVTDDILGLSGFKPKFIKQYINLNKIIEKGIQKYRREVINKKFPKDINSY

SEQ ID NO: 108144 - protein, 117 aa, Unknown
  Bacterial polypetide isolated from the Sargasso Sea
AGCFAIVLECVPKEVADSITSALHIPTIGIGAGSGTSGQVLVFHDLLGFLQHPHHAKVSPKFCKQYARVGENIQSALAKFINEVGTHQFPDERFTPYTLEADELELFKDRLAKAGFS

SEQ ID NO: 108145 - protein, 261 aa, Unknown
  Bacterial polypetide isolated from the Sargasso Sea
MKKIKILHKSFSKPISCLTAYSPSIANILDGKIDLILVGDSIGSTLYGMDNTQGVTMDMMKNHGAAVNKTIKKSLKVLDMPYKTYDNKIDAYKNAKILLNHCKPDLLKIEINKKKLVVLKHLVDKKVNVISHIGVTPQSFKNFNKIKVLGKTNKEKQNLLELAKESEKLGAKAVLLECVTTDTAKLITENISIPTIGIGASKYCDGQVLVFDDLINLTTNDKKPKFVKNYFNFNKVASNVVKKYNREVKLKKFPSTKFTYN

SEQ ID NO: 108146 - protein, 167 aa, Unknown
  Bacterial polypetide isolated from the Sargasso Sea
MLPADLIKYKEKSQKIIALTAWDSISGSIAEQAHVDLVLVGDSLAMVCLGYKSTLPLTLENIIYHTNAVSRGFKKDIEEQPLVVSDMPFLTYQCGEDKAVEYAGKIIQSTYAKAVKIEGAEPEIQKVISRLIRMGIPVMGHIGLTPQSYLNLGFKKQGESQESQRKN

SEQ ID NO: 108147 - protein, 74 aa, Unknown
  Bacterial polypetide isolated from the Sargasso Sea
MTNQNQSRVTIKVLNQMKNKSEKISMLTAYDFSFAKIIDEAGIDIILVGDSASNVMAGHETTLPITLDQMIYHA

SEQ ID NO: 108148 - protein, 122 aa, Unknown
  Bacterial polypetide isolated from the Sargasso Sea
MKSKIKRILLKKNKSKIICLTSYSKNFASIVDKYSDIILVGDSLGSVLYNYNSTRHVTLKNMIDHSKSVRMGVSKSLMVVDMPYKSYSNKSEALKNAKKIIKYTKCDAVKLEGGRKIKNIVK

SEQ ID NO: 108149 - protein, 71 aa, Unknown
  Bacterial polypetide isolated from the Sargasso Sea
MTVPKIIKLKDERVISMMTAYDYPSSRAISDAEIDIILVGDSLAQVVLGYDDTLSVTVDEMLHHVKAVTRA

SEQ ID NO: 108150 - protein, 258 aa, Unknown
  Bacterial polypetide isolated from the Sargasso Sea
MNNKIKKILKKKNKSKIVCLTAYSKNIAEIVDDHADIVLVGDSLGSVLYNYDTTRKVSLNMMIEHTKSARMGVKKSLLVIDLPYNTYRNKSEALKNSKRSIKETKCDAVKVEGGTRVKEIVKHLVKNRIPVLGHIGVTPQTTKGKFRSKGRNEVEKRKLLRDAKDLEQSGAFGIVLECIYSDISKQITNSINIPTIGIGASVNCDGQVLVTDDLIGLNETNFRFVKKFGNVKKYIKNAVIKYKNSVKQKRFPSKKNSY

SEQ ID NO: 108151 - protein, 116 aa, Unknown
  Bacterial polypetide isolated from the Sargasso Sea
MKKKISDLIKKKNKQKIVSLTAYSKNVASILDNHCDIILVGDSLGSVLYNYKSTREVTLNTMIEHSRSVRMGIKKSLMIVDMPHNTYRTPKEALKNAKKIMKKTKCDGVKLEGGKK

SEQ ID NO: 108152 - protein, 98 aa, Unknown
  Bacterial polypetide isolated from the Sargasso Sea
FSVVLEGMAEPLAAEITELVSIPTIGIGASSKCDGQILVTEDMVGLTDISPKFVKQYINIGELIKDAAVQYRKEVISREFPTKNHVYGMTPTIVKKEK

SEQ ID NO: 108153 - protein, 100 aa, Unknown
  Bacterial polypetide isolated from the Sargasso Sea
MNNKIKKIINKKNKSKIICLTAYSKNFAKEIDKYADITLVGDSLGSVLYNYNTTRKVTLKNMIEHSKSVRMGTKKSLMVVDMPYKTYRNKKEALKNSIKV

SEQ ID NO: 108154 - protein, 101 aa, Unknown
  Bacterial polypetide isolated from the Sargasso Sea
MKKKISNFINKKNKSKIVSLTAYSKNIASILDNFCDLILVGDSLGSVLYNYKSTREVTLNMMIEHSKSVRMGVKKSLMVVDMPYNTYRNSKEALINAKKIM

SEQ ID NO: 108155 - protein, 285 aa, Unknown
  Bacterial polypetide isolated from the Sargasso Sea
MSAHTRTTRKTVTAIRSTKGIGSLVSLTAYSAPMATLVDEVADVIIVGDSVGMVLYGMPDTLRVTLDMMIAHGAAVVRGAAQACVVVDLPFSTYQESPAQAYRSAARLLAETGAQGVKLEGGSEMGDTIRFLTARGIPVMAHIGLMPQQANATGGFRAQGMDPRSAAQVFDAACSAEQAGAFSVVVEGTAEALARHITETLPIPTIGIGASPACDGQVLVTEDMIGAFDAYTPRFVKRYADANTVMRDAIRQYAHDVRQRVFPEPAHCFGYGKPLQLVGAADAAA

SEQ ID NO: 108156 - protein, 85 aa, Unknown
  Bacterial polypetide isolated from the Sargasso Sea
MKITVPKIIGLKNSRVISMMTAYDYPSSKAISDAEIDIILVGDSLAQVVLGYDDTLSVTVDEMLHHVKAVTRANPNSLVVADMPY

SEQ ID NO: 108157 - protein, 227 aa, Unknown
  Bacterial polypetide isolated from the Sargasso Sea
MLDKIRKIILKKNKSKIICLTAYSKNFAEEIDKYTDIILVGDSLGSVLYNYNSTRKVKLENMINHSKSVRMGVKKSLMVVDMPYNTYRNKKEALNNAKKIIKESKCEAVKLEGGTKIIKIIKHLINNKIPVMGHLGVLPQSIKGKFKFKGRTEKEKTKLIKEAKLLENAGVFAIVLECIKTTTSKLITNSIKIPTIGIGSSVYCDGQVLVTDDMLGLNKTNIRFVKN

SEQ ID NO: 108158 - protein, 182 aa, Unknown
  Bacterial polypetide isolated from the Sargasso Sea
MTNQNQSRVTIKVLNQMKNKSEKISMLTAYDFSFAKIIDEAGIDIILVGDSASNVMAGHETTLPITLDQMIYHASSVVRAVKRALVIVDLPFGTYQADSKEALKSAIKIMKESGAHAVKLEGGYQAKESIERIIQAGIPVMGHLGLTPQSIYKFGTYEVRAKDKDEASTLLNDAIMLEEIGC

SEQ ID NO: 108159 - protein, 187 aa, Unknown
  Bacterial polypetide isolated from the Sargasso Sea
MISVYDYPTAKYAEEAGINALLVGDSLAMTVLGHKDTVSVTMEEMLHHVKAVSRAARQSMVVADMPFMSYQISLQQAVRNAGRFLKEGRADVVKIEGGYQMADTVKSIFSAGISVIGHIGLTPQSSGQLGGLKVQGKTVETAKKLLNDAICLEEAGAFAILMECVPSKVASIINERLSVPTISYGSG

SEQ ID NO: 108160 - protein, 208 aa, Unknown
  Bacterial polypetide isolated from the Sargasso Sea
MPDVTLTTLQSLKQNGEKIAMLTCYDATYAHAACQAGVDVLLVGDSLGMVLQGHDSTLPVSVEEMAYHTACVKRGNQGALIVTDLPFMAYATTEQALHNSAKLMQAGAHMVKLEGAGWLAEPIRLLAERGVPVCAHLGLTPQAVNILGGYKVQGRQEAQARQMRADAMALEQAGAAMLLLECVPSELAAEITQAVKIPVIGIGAGSAT

SEQ ID NO: 108161 - protein, 252 aa, Unknown
  Bacterial polypetide isolated from the Sargasso Sea
KKEGVPISMVTCYDAWSAKILDQTNVDCLLVGDSLAEIIHGFDSTIHATDEMMALHTAAVARSAKKKFIVADMPFLSCSRGIIHAMKTVEKLMRAGANAIKIEGASHQLEIIEHIVSSGIPVMGHLGLQPQAIHNLGGNKVQGKEKAGADKILAEAKDLEKVGCFSIVLECIPRELGQCVTQNLKIPTIGIGAGSKTDGQVLVLQDLLGLDENFSPKFLRKYAHLHEIVSSAVDKYHADVRSSEFPSLSECY

SEQ ID NO: 108162 - protein, 234 aa, Unknown
  Bacterial polypetide isolated from the Sargasso Sea
SKNVASILDNHCDIILVGDSLGSVLYNYKSTKEVTLNTMIEHSKSVRMGIKKSLMIVDMPYNTYRTPKEALKNAKQIMKKTKCDGVKLEGGKKIYETIKTLVKNKIPVMGHLGLLPQSDKTFKFKGKKKVERDHILRDSQLVEKAGIFSIVLECVETSLAKLVTQNLKVPTIGIGASKYCDGQILVIDDLIGLNPMNYRFVKKYANIRNEISKAVLNYSKEVRKIKFPKKKNSY

SEQ ID NO: 108163 - protein, 163 aa, Unknown
  Bacterial polypetide isolated from the Sargasso Sea
ATVMRAGANMIKMEGGAWLADTVKMLAERAVPVCGHLGLTPQSVNVFGGYKIQGRGDAGDVLLADALALEAAGAQLLVLECVPVELAKRVTEALSIPVIGIGAGNVTDGQILVMHDAFGITGGHIPKFAKNFLAEAGDMRAAVRQYITEVESGVYPGEEHSFH

SEQ ID NO: 108164 - protein, 217 aa, Unknown
  Bacterial polypetide isolated from the Sargasso Sea
MKIKKFINKKNKTKIVALTAYSKNIASVLDNYCDLILVGDSLGSVLYNYKSTKEVTLNTIIEHSKSVRMGIKRSLMIVDMPYNTYRNPKEALKNAKLIMKKTKSDGVKLEGGKKITKIINTLVKNNIPVMGHLGVLPQSDKKFKFKGENKVEKENILRDAKLLEQSGAFSMVLECIETSLAKLVTDSIGIPTIGIGASKNCDGQILVFDDLIGLNPI

SEQ ID NO: 108165 - protein, 86 aa, Unknown
  Bacterial polypetide isolated from the Sargasso Sea
MSTKSNKKIVTLSTLNKFKKNSEKFTCLTAYEATMASVISSAGVDVILVGDSLGMVIQGHDSTLPVTMDQLIYHLECVVKGNKGSH

SEQ ID NO: 108166 - protein, 199 aa, Unknown
  Bacterial polypetide isolated from the Sargasso Sea
MISKIKKILNKKNKSKIICLTSYSKNISEAIDPHADIILVGDSLGSVLYNYSTTRKVTLNQMIEHSKSARLGIKNSLMVVDMPYKTYRNKKIALKNAKRILRETKCDAVKLEGGSLIINVIEHLIKNKIPVMGHLGILPQSVKGKFKFKGKKNSERKKIFNDSRLLEKTGVFSIVLECVESTLAKKISKKLKIPTIGIG

SEQ ID NO: 108167 - protein, 180 aa, Unknown
  Bacterial polypetide isolated from the Sargasso Sea
EEQPLVVSDMPFLTYQCGEDKAVEYAGKIIQSTYAKAVKVEGAEPEIQKVISRLIRMGIPVMGHIGLTPQSYLNIGLRKQGESLASQEKIKKEASILEKLGCFSIVLEHIPDLLAKEIQNSLSIPTIGIGAGNYCDGQVRVTADLLGLNDDQPPFCKPIIQGKKLFKDKLKEWVASERLN

SEQ ID NO: 108168 - protein, 272 aa, Unknown
  Bacterial polypetide isolated from the Sargasso Sea
MSTQADSQEKVTNRTLGLMKTQNEKIACMTAYDAAFAAVLERSGIEVILVGDSVGMVVQGQTTTIPVTIDEIIYHTQLVCRGASRAMIMADMPFMSYSSPYDCLTNAARLMKEGGAEVVKLEWGELEIDMVRRLTECGVPVCAHLGLTPQAIHKYGGYRVQGREVEAAKKMQEDALALEEAGADIILLECVPMSLASEITRQANVPVIGIGAGPECDGQILVLYDVLDIAPGKRTRFSKNYMDIEGSIHGALKHYVKEVKSGSFPTEEYAFK

SEQ ID NO: 108169 - protein, 190 aa, Unknown
  Bacterial polypetide isolated from the Sargasso Sea
SRRPHCLLLADLPFMAYATPEQTFANAAIVMRAGANMVKLEGGAWLAETVKMLAERAVPVCGHLGLTPQSVNIFGGYKVQGRGDAAQALFNDALALEAAGAQLLVLECVPVELAQRITEALTIPVIGIGAGNVTDGQILVMHDAFGITGGHIPKFAKNFLAEAGDMRAAVRQYIADVESGVYPGEEHSFH

SEQ ID NO: 108170 - protein, 264 aa, Unknown
  Bacterial polypetide isolated from the Sargasso Sea
MTNNSNQSRVTIKILNQMKSKSEKISMLTAYDFSFAKIIDEAGIDIILVGDSASNVMAGHETTLPITLDQMIYHASSVVRAVNRALVIVDLPFGTYQADSKEALKSAIKIMKESGAHAVKLEGGYQAKESIERIIQAGIPVMGHLGLTPQSIYKFGTYEVRAKNKQEADTLLNDALMLQEIGCFSVLLEKIPNILSKKVSSKLTVPIIGIGAGSSVDGQVLVLQDMLGMNKDFSPRFLRRYLDMDRLICEAVKKYSTDIKSGDF

SEQ ID NO: 108171 - protein, 159 aa, Unknown
  Bacterial polypetide isolated from the Sargasso Sea
MPNTVNDIIQMKSREKITVLTGYDSTMATLCDKVDVILVGDSAGMVMLGYDDTRDVTMDDMIRFTTAVKNAKTDSLIVADLPINSYENEDSAITNSKRLVQAGAHAVKLEGGKEIADIIKAVVDSGIPVMGHLGLLPQTAEKYSVQAKKSSDAVNLLED

SEQ ID NO: 108172 - protein, 204 aa, Unknown
  Bacterial polypetide isolated from the Sargasso Sea
TLPLTLENIIYHTNAVSRGFKKTIEEQPLVVSDMPFLTYQCGEDKAVEYAGKIIQSTYAKAVKVEGAEPEIQQVISRLVRMGIPVMGHIGLTPQSYLNLGLKKQGESLASQEKIKKEAYILEKLGCFSIVLEHIPELLAKEIQNNLSIPTIGIGAGNFCDGQVRVTADLLGLNDDQPPFCPPIIQGKKLFKDKLKEWVASERKN

SEQ ID NO: 108173 - protein, 212 aa, Unknown
  Bacterial polypetide isolated from the Sargasso Sea
MAKITTAVLQKMKQQGNKISMLTAYDASFAKLFAEQGIEVLLIGDSLGMVLQGHGDTLPVTVSDIAYHTRAVRAGAPDAFVIADMPFMSYGTLEQALQNVVPLMQAGANMVKLEGGDFLLPTVKALTERGVPVCGHLGLTPQSVHVFGGYKVQGKTDAAADAMVAQAKALQEAGAQLLVLECIPTALAKRITEALNIPVIGIGAGHVTDGQV

SEQ ID NO: 108174 - protein, 141 aa, Unknown
  Bacterial polypetide isolated from the Sargasso Sea
IDRIIKAGIPVMGHLGLTPQSIYKFGTYTVRAREEKEANLLVNNAKFLENIGCFAAVLEKIPSELSKKVTKETNFPIIGIGAGNHVDGQVLVLHDLLGLTHEFNPRFLRRYMDLNKTVKSAIKKYVGDIKSHDFPNKNEIY

SEQ ID NO: 108175 - protein, 236 aa, Unknown
  Bacterial polypetide isolated from the Sargasso Sea
IKIKKIIKKKNKSKIVCLTAYSKNFAEEIDKYADIILVGDSLGSVLYNYHTTRKVTLNNMIQHSKSVKMGVKRSLMVVDMPYKTYRNKKEALKNSKKVISNTKCDAVKLEGGNKIKKIVEYLVKKKIPVMGHLGILPQSVRGTFKSKGKTENETFKLIRDAKILEEAGCFAIVLECVKSKTSKLITKNLKIPTIGIGSSVFCDGQVLVTDDLLGLNETNIRFVKKFINLKIFINKG

SEQ ID NO: 108176 - protein, 239 aa, Unknown
  Bacterial polypetide isolated from the Sargasso Sea
FSFAKIIDEAGIDIILVGDSASNVMAGHETTLPITLDQMIYHASSVIRAVKRALVVVDLPFGTYQSDSQEALKSAIRIMKESGAHAVKLEGGYQAKDSIERIIQAGIPVMGHLGLTPQSIYKFGTYEVRAKNKQEADTLLNDALLLEEIGCFSVLLEKIPNTLSKKVYSKLTVPIIGIGAGSDVDGQVLVLQDMLGMNKDFSPRFLRRYLDMNTLICEAVKKYSTDIKSGDFPNKEEQY

SEQ ID NO: 108177 - protein, 161 aa, Unknown
  Bacterial polypetide isolated from the Sargasso Sea
GGQKMAKTIKYLTKSSIPVMGHIGLQPQSVLLDGGYKVRGKVKSEWQKYIDDAIAVQEAGAFAVVLEGMAEPLAAEITSILNIPTIGIGASPKCDGQILVTEDILGLSNVAPKFVKKYIDLDDVIKSAVHKFSDEVKNRSFPSSDHIYNMRPQIVSNEGNN

SEQ ID NO: 108178 - protein, 191 aa, Unknown
  Bacterial polypetide isolated from the Sargasso Sea
GVNAAFVIADMPFMSYATPAQAYENAAALMAAGASMVKLEGGAWLCETITGLKQRGVPVCGHLGLTPQSVNVFGGFKVQGREEDKAQQLIDDALALEAAGAQMLVLECVPTPLGKEVSEQLSIPVIGIGAGVHTDGQILVMHDMFGVSANYMPKFSKNYLSETGDLRKAVALYIEQVTNGQFPGPEHSFDK

SEQ ID NO: 108179 - protein, 229 aa, Unknown
  Bacterial polypetide isolated from the Sargasso Sea
SKINYKKILLKKNKEPITCLTAYSKPLANILDGKVDLILVGDSLGTTLYGMKNTRSVNLEMMKNHGKAVVSNTKKSMTIIDMPYKTYRNKKEALKNALNILSFTKADFIKLETDNKNIDIVRYLTKNKIKIISHIGVTPQKFSNFSKIKSVGKNFKESNNLINLAKKLEKAGSKLIVLECIEMNTSKEITNKLTIPTIGIGASKYCDGQVLVIDDIINLDSSMKKPKFI

SEQ ID NO: 108180 - protein, 214 aa, Unknown
  Bacterial polypetide isolated from the Sargasso Sea
MNLKINQIISKKNKSKIVCLTAYSKNIAQAIDKQTDIILVGDSLGSTLYNFKSTRNVTLDMMIKHSKSVRQGVSNSLMVVDMPYNTYNKPSQALKNCKKVMKLTKCDAVKIEGGLKKYKIIKYLIKNKVPVMGHLGILPQTTKGKFKSKGKSIKEKKEIIRDCKILEDAGVFSIVLECVETKLARYITNLIKIPTIGIGSSNNCDGQILVIDDI

SEQ ID NO: 108181 - protein, 220 aa, Unknown
  Bacterial polypetide isolated from the Sargasso Sea
MLTKISRLSIQKKNKSKIVCLTAYSKNIAEEIDKYADLILVGDSLGSVLYNYDTTRKVSLKMMIEHSKSVRKGVKKSLMIVDMPFNTYKNKFQALKNCKKVLKETKCDGIKLEGGRKLNGVIRYLTLNKIPVMGHIGITPQTIRGKYRYKGKTNLEKKKLIKDSKSLEEAGVFAIVLECVERKLSKQITETVKIPTIGIGSSKFCDGQILVTDDMLGLTE

SEQ ID NO: 108182 - protein, 171 aa, Unknown
  Bacterial polypetide isolated from the Sargasso Sea
MSKIKKIISKKNKTKIVSLSAYSKNVASILDNYCDIILVGDSLGSVLYNYKSTKEVTLNTMIEHSKSVRMGIKKSLMIVDMPHNTYRNPKEALKNAKQIMKKTRCDGVKLEGGKKIYETVKTLVKNKIPVMGHLGLLPQSDKTFKFKGKNELERNNIIRDAQLLEKAGVFS

SEQ ID NO: 108183 - protein, 275 aa, Unknown
  Bacterial polypetide isolated from the Sargasso Sea
MSSEQNLKREPKPIEERIATSIVTLRNKKKKGISAVIVTAYTYPEALLADQAGVDIILVGDSLGMTTQGYKSTIAVTMDDMISHCRGVWRANQKSFQIGDMPFMSYQESSKLAIRNAGRFLKEGGCDAVKIEGAMIDRVKAIVDSGIIVMSHLGLTPQSRAALGGYRVQGKSMDATEKILNDALKLQDAGCSFLLLEAMPKESAAIIANELSIPVYGVGAGDQVDGQLVILHDLIGMFFDFKSKFVKRYCDAGEMILEALKDYAYEVRTGKFPTK

SEQ ID NO: 108184 - protein, 256 aa, Unknown
  Bacterial polypetide isolated from the Sargasso Sea
MSKIKKFIAKKNKSKIVSLTAYSKNIASILDNYCDLILVGDSLGSVLYNYKSTREVTLNTMIEHSKSVRMGIKKSLMIVDMPHNTYRTPKEAVKNAKQIMKKTKCDGVKLEGGKKIYETIKSLVKNKIPVMGHLGLLPQSDKTFKFKGKKKLERNNIIRDSQLLEKAGVFSIVLECVETSLAKLVTQNLKIPTIGIGASKYCDGQILVFDDLIGLNPMNYKFVKKYANIRNDISKAVSNYSKEVRKIKFPNKKNSF

SEQ ID NO: 108185 - protein, 143 aa, Unknown
  Bacterial polypetide isolated from the Sargasso Sea
MSSNQNLKREPKPIEERIATSIVTLRNKKKKGISAVIVTAYTYPEALLADQAGVDIILVGDSLGMTTQGYKSTIAVTMDDMISHCRGVWRANQKSFQIGDMPFMSYQESSKLAIRNAGRFLKEGGCDAVKIEGAMIDRVKAIV

SEQ ID NO: 108186 - protein, 251 aa, Unknown
  Bacterial polypetide isolated from the Sargasso Sea
RGDKISMVTCYDFWSAQILDSTSIDSLLVGDSLAMVMHGFDSTVHADVELMALHIKAVRKGAPNKFLVGDMPFLALRKGLAPAMEAVQILMQAGCNAIKLEGEVGQAELIRHIVESGVPVMGHLGLTPQSVNAFGGHKVQGRGEIEEEKIIESATLLADAGCFSVVLECIPATLAAKVTRAIEIPTIGIGAGSETDGQVLVLQDMLGMNPDFKPKFLRHYAQGHSLVSQAVNKFHEETSLGCFPSNSESYS

SEQ ID NO: 108187 - protein, 205 aa, Unknown
  Bacterial polypetide isolated from the Sargasso Sea
ILIGDSLGMVLQGHSDTLPVTTAEIAYHTRCVRAGAPLAFVIADMPFMSYATVEQAMQNATPLMQAGANMVKLEGGDFLLPTIKALTERGIPVCGHLGLTPQSVHVFGGFKVQGRDEQAAEAMVQQAIALQDAGAQLLVVECIPSTLAERISKALVIPVIGIGAGKDTDGQILVMHDLLGISSGYIPKSRKTSCRKPVRLNKPSA

SEQ ID NO: 108188 - protein, 261 aa, Unknown
  Bacterial polypetide isolated from the Sargasso Sea
MKKIKILNKAFTKPISCLTAYSPSIAKILDGKIDLILVGDSLGSTLYGMINTQGVTMDMMKHHGKAVNREIKRSLKVLDMPYKTYDNKIDAYSNAKILLNHCAPDLLKIEISEKKLVVLKHLVDKKINVISHIGVTPQSYKNFNKIKVLGRTNKEKKYLLNLAKESETLGAKAVLLECITADTAKLITENISIPTIGIGASRYCDGQVLVFDDLINLTTNNKKPKFVKNYLNFNKIASNAVKKYNQEVKLKKYPSAKFTYN

SEQ ID NO: 108189 - protein, 265 aa, Unknown
  Bacterial polypetide isolated from the Sargasso Sea
KQKGKEAIVCLTAYTAPIARAIDKYVDVLLVGDSLGMVLYDYENTLPVTLNQMIEHSKSVVGASENACVVVDMPFGTYEESKNLAFNNAVRIMKETHCDGVKLEGGQNMFETVRYLTDRSIPVMGHIGLQPQSVVIDGGYKIKGKNKFDWSKYIDDAKALEDAGAFSMVLEGMAEPLAAEITSQVSIPTIGIGASPNCDGQILVTEDMIGLTNITPKFVKEYINIGKLIEEAANSYSNEVRNKEFPAKNHTYSMNPTIIKSKKGK

SEQ ID NO: 108190 - protein, 183 aa, Unknown
  Bacterial polypetide isolated from the Sargasso Sea
KIEEQPLVVSDMPFLTYQCGEDKAVEYAGKIIQSTYAKAVKVEGAEPEIQKVISRLIRMGIPVMGHIGLTPQSYLNIGLRKQGESLASQEKIKREASILEELGCFSIVLEHIPDLLAKEIQNSLTIPTIGIGAGNFCDGQVRVTADLLGLNDDQPPFCQPIIQGKKLFKDKLKEWVDSERLSS

SEQ ID NO: 108191 - protein, 241 aa, Unknown
  Bacterial polypetide isolated from the Sargasso Sea
MRQRKQQGQPIAVLTAWDALSASWAEAAGVDLVLVGDSLAMVALGHATTLPVTLEAMVQHTAAVERGLRHTPIVSDLPFLSYQCGPEKAVAAAGRFLKETGCAGVKLEGAEPETIGVIDRLVRSGIPVMGHLGLTPQSVHQLGYRRQATDPVAQERLWQRALELEQTGCFALVLEHVPAELATRLSSELSVPVIGIGAGEGCDGQVRVSADLLGLTPQQPPFSPALLDGHALFSKAYASGC

SEQ ID NO: 108192 - protein, 199 aa, Unknown
  Bacterial polypetide isolated from the Sargasso Sea
LENMIHHTNAVSRGFSKGIKEQSLLVCDMPFLSYQCGEDKAVEYAGKIIKNTYAKAVKIEGAEPEVQKVISRLIRMGIPVMGHLGLTPQNYLNLGLKQQGNNSESQEKIKRDAASLERLGCFSIVLEHIPELLAKEIQTDLEIPTIGIGAGNFCDGQVRVMADLLGLNDKQPPFCSPIIDGKKYFVEKLKEWVASERLS

SEQ ID NO: 108193 - protein, 221 aa, Unknown
  Bacterial polypetide isolated from the Sargasso Sea
MNSKIKKIINKKNKSKIVCLTAYSKNIAEIVDAHMDIILVGDSLGSVLYNYSTTRKVNLKMMIEHTKSVRMGVKKSLLVIDLPYNTYRNKSEALKNSKKAIKETKCDAVKIEGGVKVKDIVCHLVKNKIPVLGHIGITPQTVKGKFKSKGKTQAEKKKLFNDAKVLEQSGAFGIVLECIYSDISKKITKLIKIPTIGIGASVHCDGQVLVTDDILGLQMQK

SEQ ID NO: 108194 - protein, 265 aa, Unknown
  Bacterial polypetide isolated from the Sargasso Sea
MKIQDFSTRKQVKRPISMVTCYDSNSAQIISETSIDVILVGDSVAMTMHGHQNTIPANIELMALHTEAVSKMVQKQFIVGDLPFLSTRKSISETMNAVEKLMRAGAHAVKLEGLTGQEDHIAQIVAAGVPVMGHVGLTPQFLHQLGGFRMQGRKQEEAQKIATASQRLEDLGCFSVVVECVPERLAQEITETIKIPTIGIGAGPHVDGQVLVWHDLLGLNPSFKPKFVKTYMNAHDEFKRALQTYDSEVKNKAFPTKDHLFRVLP

SEQ ID NO: 108195 - protein, 212 aa, Unknown
  Bacterial polypetide isolated from the Sargasso Sea
MPDVTLTTLQSLKQSGEKIAMLTCYDATFAQTACQAGVDVLLVGDSLGMVLQGHDSTLPVTVAEMAYHTASVKRGNQGALILADLPFMAYATLEQALNNSAALMQAGAHMVKLEGAAWLAEPIRQLAERGVPVCAHLGLTPQAVNILGGYKVQGRQEAQARQMRADAMALEQAGAAMLLLECVPSELAAEISQAVKIPVIGIGAGVATDGQV

SEQ ID NO: 108196 - protein, 257 aa, Unknown
  Bacterial polypetide isolated from the Sargasso Sea
NKKISDFIKKKNKTKLVTLTAYSKNIASVLDNYCDLILVGDSLGSVLYNYKSTREVTLNTMIEHSKSVRMGIKKSLMIVDMPHNTYRNSKEALKNAKLIMKKTKCDGVKLEGGKKIMNTIKTLVKNNIPVMGHLGVLPQSDKTFKFKGKIQKEKENIMRDAKLLEEAGSFSMVLECVQTSLAKQVTKSVNIPTIGIGASNNCDGQILVFDDLIGLNPIKFRFVKKYSNIKAEISKAVSKYATEVKTRKFPSKKYSFN

SEQ ID NO: 108197 - protein, 177 aa, Unknown
  Bacterial polypetide isolated from the Sargasso Sea
PLVVSDMPFLTYQCGEDKAVEYAGKIIQSTFAKAVKVEGAEPEILQVISRLIRMGIPVMGHLGLTPQSYLNLGLKKQGESLESQEKIKKEASILEELGCFSIVLEHIPELLAKEIQSNLIIPTIGIGAGNFCDGQIRVTADLLGLNDSQPPFCQPIIQGKNLFKDKLKQWVASERLN

SEQ ID NO: 108198 - protein, 173 aa, Unknown
  Bacterial polypetide isolated from the Sargasso Sea
MKKKILNFIKKKNKSKIVSLTAYSKNIASILDNFCDLILVGDSLGSVLYNYKSTREVTLNMMIEHSKSVRMGVKNSLMVVDMPYNTYRNSKEALINAKKIMKKTKCDAVKLEGGKKIFKIVKLLVKNNIPVMGHLGVLPQSAKNFKFKGNKISERKKILNEAKLLESAGAFSM

SEQ ID NO: 108199 - protein, 247 aa, Unknown
  Bacterial polypetide isolated from the Sargasso Sea
MKKKILDLIKKKNKQKIVSLTAYSKNIASILDNYCDIILVGDSLGSVLYNYKSTRKVTLSTMIEHSKSVRLGIKKSLMIVDMPHNTYRNPKEALKNAKQIMKKTKCDGVKLEGGKKICETVKTLVKNRIPVMGHLGLLPQSDKTFKFKGKKKLERDNIIRDSKLLEKAGVFSIVLECVETSLAKFVTQNLNILTIGIGASKYCDGQILVFDDLIGLNPMNYRFVKKYANIRNHISKAVSNYSKEVRK

SEQ ID NO: 108200 - protein, 266 aa, Unknown
  Bacterial polypetide isolated from the Sargasso Sea
MSTHKNKPITISTLRKLKKTSEKFSCLTAYEATIAQKISEAGVEVILVGDSLGMVIQGHDSTLPVTMDQLIYHLECVARGNVNSHIMADMPFMSYSTDELALENATKLMQNGAHSVKIEGGSWICKMTSTLAERGIPVCAHMGLTPQSINRIGGYFVQGRDTKKRQKLIEEAQSLENAGAEMLLLECVPNDLSNEITSLLKIPVIGIGAGPETDGQIMVIHDLLGISCLEKPPKFVKDFLKGSSSVESALKKYVKSVKTKKFPQEL

SEQ ID NO: 108201 - protein, 211 aa, Unknown
  Bacterial polypetide isolated from the Sargasso Sea
MNNKIKKILSKKNKTKIICLTSYSKNISEILDKYSDIILVGDSLGSVLYSYNTTKNVTLNMMIEHSKSVRQGVKKSLMVVDMPYNSYNSKSEALKNAKKIIKYSKADAVKLEGGKKILSIIKHLRKNKINVMGHLGILPQSQIGKFRFKGKTTFERKRLLNDALLLQGSGVFSIVLECIETKLAKEITKNLKIPTIGIGSSVNCDGQSFSY

SEQ ID NO: 108202 - protein, 268 aa, Unknown
  Bacterial polypetide isolated from the Sargasso Sea
TVNDIIQMKSREKITVLTGYDSTIATLCDKVDVILVGDSAGMVMLGYDDTRDVTMDDMIRFTTAVKNAKTNSLIVADLPINSYENEDSAITNSKRLVQAGAHAVKLEGGKEIADIIKAVVDSGIPVMGHLGLLPQTAEKYSVQAKKSSDAVNLLEDARILEKAGVFSIVFEMVTRDVAKIITESVKVPTIGIGSGINCDGQVLVVHDMLGMFEKIKPKFAKRYLNLSEDIRNAINSYVKDVKEEKFPEEEHTFSMEKEELEKLEKEIG

SEQ ID NO: 108203 - protein, 251 aa, Unknown
  Bacterial polypetide isolated from the Sargasso Sea
LKYKEKSQKIIALTAWDSISGSIAEQANVDLVLVGDSLAMVCLGYKSTLPLTLENVIYHTNAVSRGFKKKIEEQPLVVSDMPFLTYQCGEDKAVEYAGKIIQSTYAKAVKVEGAEPEIQKVISRLIRMGIPVMGHIGLTPQSYLNIGLKKQGESLESQEKIKKEALILEKLGCFSIVLEHIPELLAKEVKNNLKIPTIGIGAGNYCDGQVRVTADLLGLNDDQPPFCKPIIEGKKLLMEKLKGWVESERIN

SEQ ID NO: 108204 - protein, 238 aa, Unknown
  Bacterial polypetide isolated from the Sargasso Sea
TAYSKNVAEAIDPYSDFVLVGDSLGSVLYNYSTTRKVTLDQMIEHSKSARLGIKNSLMVVDMPYRTYRNKKIALKNAKRILKETKCDAVKLEGGSLIINVIKHLIKNKIPVMGHLGILPQSVKGKFKFKGKKNSERNKIFNDSKQLEKIGVFSIVLECVESILAKQISKKLKIPTIGIGSSKFCDGQILVIDDLIGLNNTKVRFVKKFGQIKKNISKAAKNFSKDVKNKKYPSKRYSY

SEQ ID NO: 108205 - protein, 174 aa, Unknown
  Bacterial polypetide isolated from the Sargasso Sea
MKITVPKILDLKSERQITMMTAYDFPTSKAVSEAQIDIILVGDSLAQVVLGHDDTLSVTMNEMLHHVRAVTRAKPNCLVVADMPYMSYHNTKEEAVKNAARFIQEGKADAVKLEGGFKRKDIIEAIISAEIPVMGHLGLTPQSKNMMGGYKVQGKTLELATELLEEAVLLETLG

SEQ ID NO: 108206 - protein, 208 aa, Unknown
  Bacterial polypetide isolated from the Sargasso Sea
TKPVVRGSNNAMIVTDMPFMSYHGDHGVTMANAARLIQEGGAGAVKVEGGKTVCPTITALANSGIPVMSHIGLTPQSVHALGGFKLQGNTLKGARALLEDAKAVEAAGAFAVVLELVPAELSKIISERLTIPTIGIGAGPNCDGQVQVAHDILGLSIDYTPRHALKYADSGALALQAFKDYKTDVSSGRFPSKKHFRTLDPSVIEQLS

SEQ ID NO: 108207 - protein, 243 aa, Unknown
  Bacterial polypetide isolated from the Sargasso Sea
KIICLTSYSKNIAEAIDPYTDIILVGDSLGSVLYNYSTTRDVNLVQMIEHSKSARLGIKNSLMVVDMPYRTYRNKKIALKNAKRIIKETKCDAVKLEGGSSILKIIDYLIKNKIAVMGHLGILPQSVKGKFKFKGKKIKERNKIFNDAKLLQDKGVFSIVLECVETKLAKQITKSLIIPTIGIGSSHHCDGQVLVLDDLIGLNETKIKFVKKFGNIKKNIRKAVNKFKKEVLSKKYPTKKYSY

SEQ ID NO: 108208 - protein, 214 aa, Unknown
  Bacterial polypetide isolated from the Sargasso Sea
NPNSLVVADMPYMSYHVSEEETIKNAARFIQEGKADAVKIEGGKKRENMIKALINAEIPVMGHLGLTPQSKNVMGGYKIQGKTLELAKELLEDAILLDSLGCFSFVLEGVPKVVAQTITEQVSIPTIGIGAGVHVDGQVLVYHDLLGMKSKEYIDAKFVKRYDNQYDRVVDTMKNFKKDIENKEFPTDDHSYDSGDSLLENLEEWKKEVKKILS

SEQ ID NO: 108209 - protein, 265 aa, Unknown
  Bacterial polypetide isolated from the Sargasso Sea
KKIVTLSTLNKFKKNSEKFTCLTAYESTMASVISSAGVDVILVGDSLGMVIQGHDSTLPVTMDQLIYHLECVVKGNNGSHIMADMPFMSYSTDDLGLENAKRLMQAGANSVKIEGGQWISKMAQVLSDRGIPVCAHMGLTPQTINRIGGHRVQGRDPSQKEKIINEAIALEKAGASMLLLECVPGELAKTITKELKIPVIGIGAGIHTDGQIMVIHDLLGISCLDKPPKFVKNFMKTSTSISGAIKRYIKDVKNNKFPSKEHTFD

SEQ ID NO: 108210 - protein, 262 aa, Unknown
  Bacterial polypetide isolated from the Sargasso Sea
SNIYAYKISRLILKKKNKSKIVCLTAYSKNIAEEIDSYVDLILVGDSLGSVLYNFETTRKVNLSMMIEHSKSVRKGVKKSLMIVDMPFNTYNNKSQALKNCKKVMKETKCDGIKLEGGRKITEIIKYLIKFKIPVMGHIGITPQTVRGKFRYKGKTDLEIKNLLNDSKSLEEAGVFAIVLECIEKKVSKEITGSIKIPTIGIGSSKFCDGQILVTDDLLGLTDTKVKFVKRYTNLKSNVRNAVKKFKLDVKSGSYPSSKYSY

SEQ ID NO: 108211 - protein, 233 aa, Unknown
  Bacterial polypetide isolated from the Sargasso Sea
MLPSDLVKYKEKSQKIIALTAWDSISGSIAEQANADLILVGDSLAMVCLGYKSTLPITLENIIYHTNAVSRGFKKKIEEQPLIVSDMPFLTYQCGEDKAVEYAGKIIQSTYAKAVKVEGAEPEIQKVISRLIRMGIPVMGHIGLTPQSYLNLGLKKQGESLESQEKIKREASILEKLGCFSIVLEHIPELLSKEIQNNSKIPIIGIGAGNFCDGQVRVTADLLGLNDDQPPFC

SEQ ID NO: 108212 - protein, 147 aa, Unknown
  Bacterial polypetide isolated from the Sargasso Sea
MRPADLIRFKQDSRPITMLTAWDSLSAALVELAGADAVLVGDSLGMVALGHATTLPVTLEQMVHHTQAVERGFQAMPAQQPLLISDLPFLSYQCGEDAAVAAAGRLLKESSAAAVKLEGAEPEVVRVIDRLVRMGIPVMGHWGLTPQ

SEQ ID NO: 108213 - protein, 250 aa, Unknown
  Bacterial polypetide isolated from the Sargasso Sea
MTAYDAPMAELLDPHCDILLVGDSVGMVVHGLPSTVGVTLEMMILHGQAVMRGSKEALVVVDMPFGSYETNADQAFLNAAKVMKETGCQAIKIESGTYAAAQIEHLVARGIPVMGHIGLRPQAVNVDGGFRAKGRTSVEREQALAEAVAADSAGAFAIVVEGVATDLAADITAAVSCPTIGIGASAACDGQILVTDDMLGKFDWTPKFVRRYADLRNQIDSAISRYADDVRQRKFPATEEVYHLPKAVSD

SEQ ID NO: 108214 - protein, 134 aa, Unknown
  Bacterial polypetide isolated from the Sargasso Sea
GVPVCAHLGLTPQSVNVFGGYRVQGRTPKEAKSILADAVEIQDAGASLLVLECIPAELAADISSKLDIPVIGIGAGSGTDAQVLVLHDMLGMTETAPKFVQNFMEGAPSIQDALKAFVDAVKAGEYPREEHTYS

SEQ ID NO: 108215 - protein, 130 aa, Unknown
  Bacterial polypetide isolated from the Sargasso Sea
MQTFRDLKQKGEKFAALTSYEATLSSMMCDAGVELILVGDSLGMVIQGHDSTVPVSMEDILYHLRCVKSGNKGAHLMADMPFMSYATEQLAYENATRLMQAGANSVKVEGGEVINKITELLSERGIPVCA

SEQ ID NO: 108216 - protein, 267 aa, Unknown
  Bacterial polypetide isolated from the Sargasso Sea
MVSRDKRVTILDLQKMQQQGIKIPMLTAYDYPSARLAERAGCPILLVGDTLGMVVLGYDSTLPVTLEDMIHHGRAARRGASNAHIVVDLPFGSYQSDVTTAMNAAMRVMKETECDSVKIEGGNSQAIETVAKLVTAGVPVMAHIGLTPQSVNALGGFKLQGRTPRDAIRLLSEAQKLQEAGAFAIVLESIPAVLAAKITEVLNIPTIGIGAGPYCGGQVQVWHDLLGLYDSFKPRHARRFDDIGASIRGALVDYIEAVEAGDFPNSS

SEQ ID NO: 108217 - protein, 273 aa, Unknown
  Bacterial polypetide isolated from the Sargasso Sea
MSRKTIHDIQAKTGKEKITCLTAYTAPIARLLDQHVDILLVGDSLGMVLYEYENTLPVTLDQMIEHTKSVIKATSDSCVIMDLPFGTYEESKQLALKNALTAIKDTNCAGVKLEGGTLIEETVKYITERGVPVMGHIGLQPQSVIIDGGYKIKGRDKFEWKKYIDDAVALERAGAFSVVLEGMAEPLAEEITKTINIPTIGIGASAKCDGQVLVTEDMLGLTNISPKFVKEYANLRAPIEKAVKQYVSDVKLGKFPEQQHTYQMKPSIVKDNK

SEQ ID NO: 108218 - protein, 197 aa, Unknown
  Bacterial polypetide isolated from the Sargasso Sea
MLPSDLVKHKEKSQKIIALTAWDSISGSIAEQANVDVVLVGDSLAMVCLGYKSTLPLTLENIIYHTNAVSRGFKKKIEEQPLVVSDMPFLTYQCGEDKAVEYAGKIIQSTYAKAVKVEGAEPEIQKVISRLIRMGIPVMGHLGLTPQSYLNLGLRKQGESLESQEKIKKEASILENLGCFSIVLEHIPELLAKEIQN

SEQ ID NO: 108219 - protein, 217 aa, Unknown
  Bacterial polypetide isolated from the Sargasso Sea
MPNTVNDIIQMKSREKITVLTGYDSTMATLCDKVDVILVGDSAGMVMLGYDDTRDVTMDDMIRFTTAVKNAKTNSLIVADLPINSYENEDSAITNSKRLVQAGAHAVKLEGGKEIANIIKAVVDSGIPVMGHLGLLPQTAEKYSVQAKKSSDAVNLLEDARILEKAGVFSIVFEMVTSNVAKIITESVKVPTIGIGSGKNCDGQVLVVHDMLGMLKK

SEQ ID NO: 108220 - protein, 273 aa, Unknown
  Bacterial polypetide isolated from the Sargasso Sea
MSTNTNNREKRVTTHVLQAMKARGEKISMLTAYDYSMAKIVDDGGVDVILVGDSASNVMAGHETTLPITLDQMIYHASSVVRAIQRSLVVVDLPFGAYQGNSKEALTSSIRIMKESGAHAVKMEGGEEILESVKRILSAGIPVMGHLGLTPQSIYKFGTYVVRAKEEEEAEKLLRDAKALEAAGCFGIVLEKIPASLAKKVANEVDIPTIGIGAGKDVDGQVLVIHDMLGINKEFSPRFLRRYNDLYNGIKDSVENYIADVKSKDFPNEKEQY

SEQ ID NO: 108221 - protein, 157 aa, Unknown
  Bacterial polypetide isolated from the Sargasso Sea
MKITVPKILALKSERQITMMTAYDFPTSKAVSEAQIDIILVGDSLAQVVLGHDDTLSVTMDEMLHHVRAVTHAKPNCLVVADMPYMSYHNTKEEAVKNAARFIQEGKADAVKLEGGFKRKDIIEAIISAEIPVMGHLGLTPQSKNMMGGYKVQGKTL

SEQ ID NO: 108222 - protein, 224 aa, Unknown
  Bacterial polypetide isolated from the Sargasso Sea
NVDLVLVGDSLAMVCLGYKSTLPITLENIIYHTNAVSRGFKKKIEEQPLVVSDMPFLTYQCGEDKAVEYAGKIIQSTYAKAVKVEGAEPEIQKVISRLIRMGIPVMGHIGLTPQSYLNIGLRKQGESLASQEKIKKEASILEEIGCFSIVLEHIPDLLAKEIQNSLTIPTIGIGAGNYCDGQVRVTADLLGLNDNQPPFCQPIIQGKKLFKDKLKEWVDSERLN

SEQ ID NO: 108223 - protein, 203 aa, Unknown
  Bacterial polypetide isolated from the Sargasso Sea
MQRLTIQKIIRKKNKIPITCLTAYTKDIAEIADKYCDIILVGDSLGMVLYGMKNTRNVKIDTMIAHAKVVRNFTKKSLIVVDMPFKTYTNKFLALKNAKKIIKSTKCHAVKLEGGKEIVNTINYLVKRSIPVMGHIGLLPQSSKNFTLKGKKTSEKKRILKDAIAISNAGVFAMVIECVVEDLAKKISRTVPVPTIGIGASKH

SEQ ID NO: 108224 - protein, 234 aa, Unknown
  Bacterial polypetide isolated from the Sargasso Sea
MLPSDLVNYKKKSRKIIALTAWDSISGSIAEQANVDLVLVGDSLAMVCLGYKSTLPLTLENIIYHTNAVSRGFKKKIEEQPLVVSDMPFLTYQCGEDKAVEYAGKIIQSTYAKAVKVEGAEPEIQKVISRLIRMGIPVMGHIGLTPQSYLNIGLKKQGGTLASQEKIKKEASILEELGCFSIVLEHIPDLLAKEIQNSLTIPIIGIGAGNFCDGQVRVTADLLGLNDDPPPFLQ

SEQ ID NO: 108225 - protein, 261 aa, Unknown
  Bacterial polypetide isolated from the Sargasso Sea
MTNNSNQSRVTIKILNQMKNNSEKISMLTAYDFSFAKIIDEAGIDIILVGDSASNVMAGHETTLPITLDQMIYHASSVVRAVNRALVIVDLPFGTYQADSKEALKSAIKIMKESGAHAVKLEGGYQAKESIERIIQAGIPVMGHLGLTPQSIYKFGTYEVRAKDKKEADALLNDALMLEEIGCFSVLLEKIPNTLSKEVSSKLTVPIIGIGAGSHVDGQVLVLQDMLGMNKDFSPRFLRRYLDLNSLVSDAVKKYSTDIKA

SEQ ID NO: 108226 - protein, 254 aa, Unknown
  Bacterial polypetide isolated from the Sargasso Sea
MKKNGEKISMLTSYDFTFAKILDEANIDIILVGDSASNVFAGNETTVPITLNEMIYHAKSVVKGVKRALVVVDLPFGTYQSDPQEALRSAIRIMKESGAHAVKLEGGIEVSESITRIINAGIPVMGHLGLTPQSIYKFGTYNVRGANKTEADQLISDAQDLERIGCFASVLEKIPAQLAKNISKKTKFPLIGIGAGNHVDGQVLVLHDLIGLTNEFNPRFLRRYLDLNTSIKDAVFRYIDDVKSESFPNKDEMY

SEQ ID NO: 108227 - protein, 249 aa, Unknown
  Bacterial polypetide isolated from the Sargasso Sea
MPNTVNDIIQMKSREKITVLTGYDSTMATLCDKVDVILVGDSAGMVMLGYDDTRDVTMDDMIRFTTAVKNAKTDSLIVADLPINSYENEDSAITNSKRLVQAGAHAVKLEGGKKIADIIKAVVDSGIPVMGHLGLLPQTAEKYSVQAKKSSDAVNLLEDAKILEKAGVFSIVFEMVTRDVAKIITESVKVPTIGIGSGINCDGQVLVVHDMLGMFEKIKPKFAKRYLNLSEDIRNAINSYVKDVKEEKF

SEQ ID NO: 108228 - protein, 186 aa, Unknown
  Bacterial polypetide isolated from the Sargasso Sea
MSAHQSQPLVTINTLQSLKAKREKFTCLTAYESTLANIISQAGVEVILVGDSLGMVIQGHESTLPVTMDDLIYHLKNVSRGNVNSHLMADMPFMSYATKDAALSNAGLLMQNGAHSIKLEGGYWICDLTNTLAERGMPVCAHMGLTPQSINRIGGYFVQGRDTDKRDEMISEEKALESAGASLLLL

SEQ ID NO: 108229 - protein, 190 aa, Unknown
  Bacterial polypetide isolated from the Sargasso Sea
MTIANWKKKYIDQIPICLLTAYDATFAQLIEEASIDGILVGDSLRHTFFGDSTTVTMTLDDMVYHTKAVKNGAKKSLIISDMPFMTYNISVEDTLRNATQLIQAGAQAVKCEVRDIHLPTIDRLVQEGIPVMGHIGLQPQYIHESGGYSLKGTSKDEQKELLHVAKSLSELGAFSIVLEKVPIDVTQSIT

SEQ ID NO: 108230 - protein, 176 aa, Unknown
  Bacterial polypetide isolated from the Sargasso Sea
MSKIKKIISKKNKTKIVSLTAYSKNIASILDNHCDIILVGDSLGSVLYNYKSTREVSLEIMIEHSKSVRMGIKKALMVVDMPHNTYRNSKEALKNAKKILSKTRCDAVKLEGGKKIYEIIKILVKNKIPVMGHLGLLPQSDKTFRFKGKKKLERDGIINDSKLIEKAGVFSIVLEC

SEQ ID NO: 108231 - protein, 213 aa, Unknown
  Bacterial polypetide isolated from the Sargasso Sea
MNILEFPAMKARKEKISMVTCYDFWSAELLEKTDIDMLLVGDSLAMVMHGFPSTVHATIELMEMHSAAVRRGAPKKFVVGDLPFLKARYSRDLVLDNVCRLMQAGCNAIKIEGAEGHLEVIEHVVESGVPVMGHLGLTPQSVEAFGGHKVQGKTECSAEKIRKSAVALEKAGCFALVLECVPQKLADQITKELSIPTIGIGAGPHTDGQVLVL

SEQ ID NO: 108232 - protein, 177 aa, Unknown
  Bacterial polypetide isolated from the Sargasso Sea
MKKAPYRRITTKTLSEMKHEGEKISMLTAYDFTFARIIDESNIDIVLVGDSASNVIAGNETTVPITLDEMIYHAKSVVKAVKRALVVVDLPFGTYQSDPQEALRSAIRIMKESGAHAVKLEGGSEISDSISKIINAGIPVMGHLGLTPQSIYKFGTYSVRGADKSEANQLLKDVKKL

SEQ ID NO: 108233 - protein, 264 aa, Unknown
  Bacterial polypetide isolated from the Sargasso Sea
LNWNNIMISKINRIKSKKNKSKIVCLTAYSKNIANAIDRHTDIILVGDSLGSTLYNFKSTRSVTLEMMVKHSQSVRRGISNSLMVVDMPYNTYNNPSEAFKNCKKIMKLTKCDAVKIEGGLKIIKIIKHLIKNKIPVMGHVGILPQTTKGKFKSKGKSIKERNQLIRDCMLIEKAGAFSIVLECVQRQLAKKISNSIKIPTIGIGSSNNCDGQILVIDDILGLTDSKMKFIKKYINVKKIITNAAKKFKIEVKSKKFPTKKHSY

SEQ ID NO: 108234 - protein, 252 aa, Unknown
  Bacterial polypetide isolated from the Sargasso Sea
LTGYDSTMTTLCDSVDVILVGDSAGMVMLGYDDTRDVTMDDMIRFTTAVKNAKTDSLIVTDLPINSYENEDSAVANSKRLVEAGAHAVKLEGGKKVSKIIRAVVDSGIPVMGHLGLLPQTAEKYSVQAKNNEDAVNLIQDAKVLEESGAFSIVLEMVTSDVTEIITKSVKVPTIGIGSGIDCDGQVLVVHDMLGMFEKIKPKFAKRYLNLSEEIRNAVNSYVNDVKEKRFPEKEHTFSMEKDELEKLEKKIG

SEQ ID NO: 108235 - protein, 150 aa, Unknown
  Bacterial polypetide isolated from the Sargasso Sea
MQKITIKNLKEMKESGEKIACLTSYDASFAKIQDEAGIDLLLVGDSLGMVLQGGDNTLKVSISDMIYHSKLVSNVAKRAVIVTDMPFMSYSTPPQALGNAARLISEGGAHVVKIEGGSELSEVVNLLSQHGIPVCGHLGLTPQSIHKIGG

SEQ ID NO: 108236 - protein, 246 aa, Unknown
  Bacterial polypetide isolated from the Sargasso Sea
MRPADLIRFKQTGRSITMLTAWDSLSAAWVEAAGADAVLVGDSLAMVALGHATTLPVTLEQMLLHTQAVERGFQSLPSAQPLLISDLPFLSYQCGEDLAVQAAGKLLKESSAAAVKLEGSEPEVVSVINRLVRMGIPVMGHLGLTPQAVHRMGYRRQAEDPVSQERLLSRALELEQAGCFSLVLEHVPADLAGKVRRQLTIPVIGIGAGDDCDGQVRVTADLLGLTAQQPPFSPALLPGRELFEQA

SEQ ID NO: 108237 - protein, 194 aa, Unknown
  Bacterial polypetide isolated from the Sargasso Sea
MRAQPTALCITDLPFATYTTPEDALIHAKQAMQAGAQMVKIEGGQHVCTTVSTLKQWGIPVCGHLGLTPQSVHALGGFRTQGRQEDQAHTIAQHAQELQEAGADLLVLECIPSSLAQRITQDLRIPTIGIGAGPHCDGQILVTHDILGLGPAAPMRFVKTFLDAEHPGVLPALKAYVHAVKTRTFPQPEHEVAP

SEQ ID NO: 108238 - protein, 133 aa, Unknown
  Bacterial polypetide isolated from the Sargasso Sea
QKVISRIIRMGIPVMGHLGLTPQSYLNLGLKKQGESLESQEKIKREASILEKLGCFSIVLEHIPELLAKEIQSNLRIPTIGIGAGNYCDGQVRVTADLLGLNDDQPPFCQPIIQGKKLFKDKLKEWVASERLN

SEQ ID NO: 108239 - protein, 235 aa, Unknown
  Bacterial polypetide isolated from the Sargasso Sea
AKILDQHVDILLVGDSLGMTVYGHNNTLAVTKRMMIDHGKCVVDNSKKALVVVDLPFGSYETDKIKAFDTAAEIISLTNAAAVKLEGGKEIEETVDFIVSRGIPVMGHIGLMPQKINLKGKFLSVGKNKIEEDKILEDAKSLTAAGAFSYVLEAMKSELAKKITKDLDTISLGIGAGRHCDGQILVIDDLLGLYSNFTPKFVKKYSNLESIVDKSVKQFSNDVKNLKFPTKKYSY

SEQ ID NO: 108240 - protein, 153 aa, Unknown
  Bacterial polypetide isolated from the Sargasso Sea
GAEPEVVAVIDRLVRMGIPVMGHLGLTPQAVHRLGYRRQATDAISQERLVDQARTLEQKGCFSLVLEHVPAELACRVQQALTIPVIGIGAGDGCDGQVRVTADLLGLTAKQPPFSQALVDGRRLFIDVLKGWVQQTRNNTLPTTESPQSAPDC

SEQ ID NO: 108241 - protein, 248 aa, Unknown
  Bacterial polypetide isolated from the Sargasso Sea
MLPSDLVKYKKKSQKIIALTAWDSISGSIAEQANVDLILVGDSLAMVCLGYKSTLPLTLDNIIYHTNAVSRGFKKKIEEQPLLVSDMPFLTYQCGEDKAVEYAGKIIQNTYAKAVKLEGAEPEIQKVISRLIRMGIPVMGHIGLTPQSYLNLGFKKQGESLESQEKIKQEASILEKLGCFAIVLEHIPDLLSKEIQNTLSIPTIGIGAGNYCDGQVRVTADLLGLNDDHPPFCQPIIKGKELLKDKLK

SEQ ID NO: 108242 - protein, 139 aa, Unknown
  Bacterial polypetide isolated from the Sargasso Sea
FFVNRGVPVCGHLGLTPQSVNQLGGFRVQGRQESVADQLRQDAQSLQDAGASVLVLEAVPSGLAKEITQNLAIPTIGIGAGPDTDGQVLVLYDLLGIYPQKSPKFSKNFLDGAGSVSGAVQAFIEDVRSRQFPGPEHSF

SEQ ID NO: 108243 - protein, 117 aa, Unknown
  Bacterial polypetide isolated from the Sargasso Sea
MPQRRPVSLPRLAQMRAAGEKISMLTAYDATFAAVADAAGVECILVGDSLGMVCQGLPSTVGVTLDTMAYHTASVARGLHRVQGTAWLVADLPYGTYAESREQALRSACVLMQAGAH

SEQ ID NO: 108244 - protein, 216 aa, Unknown
  Bacterial polypetide isolated from the Sargasso Sea
MKITTNTLQEMKRSGEKITMLTAYDYSMARILDGAGIDVILVGDSASNVMAGNDTTVPITLDQMIYHAQCVVNGVDRALIVCDMPFGSYQGDSKQALNSAIRIMKESGAHAVKLEGGAEVVESIERILTAGIPVMGHLGLTPQSIYKFGTYSVRAREEEEAAKLIEDAKLLEEAGCFSIVLEKIPAELAAKVTAAVNIPTIGIGAGADVDGQVLVI

SEQ ID NO: 108245 - protein, 172 aa, Unknown
  Bacterial polypetide isolated from the Sargasso Sea
MSIPSASNPITISHLNDMKTRGEKIVCLTAYDATFSAIESLNGIEVILVGDSLGMILQGHDSTLPVTMEDIIYHLENVKRTNKGSLIMADMPFMSYASEEQTLENAASLMRAGANCVKLEGTAWIGKSTELLAERGIPVCAHMGLTPQSVNRIGGYIIQGRDPNKAEELFKR

SEQ ID NO: 108246 - protein, 176 aa, Unknown
  Bacterial polypetide isolated from the Sargasso Sea
LVVSDMPFLTYQCGEDKAVEYAGKIIQNTFAKAVKVEGAEPEIQKVISRLIRMGIPVMGHIGLTPQSYLNLGLKKQGESLASQEKIKKEASILEKLGCFSIVLEHIPELLAKEIQKNLKIPTIGIGAGNYCDGQVRVTADLLGLNDHQPPFCQPIIQGKNLFEDKLKEWVASERLN

SEQ ID NO: 108247 - protein, 230 aa, Unknown
  Bacterial polypetide isolated from the Sargasso Sea
EEIDKYADIILVGDSLGSVLYNYHTTRKVTLNNMIQHSKSVKMGIKKSLMVVDMPYKTYRNKKEALKNSKKVISNTKCDAVKLEGGNKIKKIVKYLVKKKIPVMGHLGILPQSVRGTFKSKGKTERETFKLISDAKMLEEAGCFAIVLECVKSKTSKLITKNLKIPTIGIGSSVFCDGQVLVTDDLLGLNETNIRFVKKFINLKTFINKGLRKFKYEVLSKKYPSKKYSY

SEQ ID NO: 108248 - protein, 267 aa, Unknown
  Bacterial polypetide isolated from the Sargasso Sea
ITVPELRARKGKTPIVCLTAYTMPMAKWLDAHVDLLLVGDSLGMVLYGMESTLGVTVEMMLAHTQAVMRGAEHACVITDLPFGSYQESPEAAYRTSARVLAETGAAGVKLEGGEEMAETVSFLTERGIPVLGHVGMMPQSVNAYGGFGARGKTQAEAKKILADGNAIAKAGAFAVVVEGTLEPVARELTARLSVPTIGIGASAACDGQILVSEDLLGLFSGFAPKFVKRYADLGAEVEKATAKYAADVRKRRFPGPEHCFGAKKQKR

SEQ ID NO: 108249 - protein, 223 aa, Unknown
  Bacterial polypetide isolated from the Sargasso Sea
VGDSLGMVIQGHDSTLPVTMDQLIYHLECVVKGNNGSHIMADMPFMSYSTDDLGLENAKRLMQAGANSVKIEGGQWISKMAQVLSDRGIPVCAHMGLTPQTINRIGGHRVQGRDPSQKEKIINEAIALEKAGASMLLLECVPGELAKTITKELKIPVIGIGAGIHTDGQIMVIHDLLGISCLDKPPKFVKNFMKTSTSISGAIKRYIKDVKNNKFPSKEHTFD

SEQ ID NO: 108250 - protein, 93 aa, Unknown
  Bacterial polypetide isolated from the Sargasso Sea
MLRKSANDIKLLKGKAPIVCLTAYTAPIARAIDENVDLMLVGDSLGMVLYDYENTLQVTIEQMIEHAKSVVGASNKSCVIVDMPFGSYEESAD

SEQ ID NO: 108251 - protein, 246 aa, Unknown
  Bacterial polypetide isolated from the Sargasso Sea
PALGSSMKKKISDLIKKKNKQKIVSLTAYSKNVATILDNHCDIILVGDSLGSVLYNYKSTREVTLNIMIQHSKSVRMGIKKSLMIVDMPHNTYRTPKEALKNAKQIMKKTKCDGVKLEGGKKIYETIKKLVRNKIPVMGHLGLLPQSDKTFKFKGKKKFERDNIIRDSQLLEKAGVFSIVLECVETSLAKLITQNLKVPTIGIGSSKYCDGQILVIDDLIGLNPMNYRFVKKYVNIRNEISKAVSN

SEQ ID NO: 108252 - protein, 226 aa, Unknown
  Bacterial polypetide isolated from the Sargasso Sea
KHVDIVLVGDSLGSVLYNYSTTRKVTLTEMINHSKSVRLGVKKSLMVVDMPFNTYSTPNAALKNAKKIIKETKCDAVKLEGGKKIIHQIKLLTKNKVPVMGHLGLLPQSTKGKFKSKGKTTKEINQLINDALLLQNNGVFAIVLECIKTPIAKQITKNLDIPTIGIGSSVHCDGQVLVTDDLIGLNQTKIKFVKQFLNVKKYINAGLRKYASEVRSKKYPTKKHSY

SEQ ID NO: 108253 - protein, 192 aa, Unknown
  Bacterial polypetide isolated from the Sargasso Sea
MSFQNIKPLVTINTLNKLKSDGEKFACLTAYEATLANVISKAGVEVILIGDSLGMVIQGHDSTLPVTMEDLIYHLKNVARGNINSHLMADMPFMSYATQDTALSNATLLMQNGAHSVKLEGGSWICDLTNLLSQRGIPVCAHMGLTPQSINRIGGYFVQGRDTDKRDEMIAEAKDLESAGASILLLECVPDD

SEQ ID NO: 108254 - protein, 277 aa, Unknown
  Bacterial polypetide isolated from the Sargasso Sea
GRNVMSATKKMGRVSVPELRARKGGEPIVCLTAYTMPMAQRLDEHCDLLLVGDSLGMVLYGMDSTLAVSVDMMINHGKAVMRGSKNACVVVDLPFGSYQESKEQAFRTASRILAETGCAAVKLEGGAELAETIEFLNQRGVPVMAHIGLMPQQVNTMGGFKSQGRGEEGAEKVVNDAIAVAKAGAFSVVVEGTVEPVARRITETIDIPTIGIGASVACDGQVLVTEDILGLFSDFTPKFVKRYANLGDEISKAVGEYASEVRTRQFPTDEHCFGVAK

SEQ ID NO: 108255 - protein, 239 aa, Unknown
  Bacterial polypetide isolated from the Sargasso Sea
MNKKIKKILNKKNKSKIICLTAYSKNIAEILDKHCDIVLVGDSLGSVLYSYKSTKEVTLQTMINHAKSVRLGVKKSLMVFDMPYNTYRNPQEALRNAKLVFKETKCDAVKLEGGKKIISIVKKLVQNRIPVMGHVGILPQTDKKFTFKGKKQQESNRIQNDTKFLENAGAFSIVLECIETKLSKKITDNLVIPTIGIGSSVNCDGQVLVIDDLIGLSKSKFKFVKKYIDISRIIENVVK

SEQ ID NO: 108256 - protein, 225 aa, Unknown
  Bacterial polypetide isolated from the Sargasso Sea
MPRTVSDIVQMKSKEKITVVTGYDSTMATLCDSVDVILVGDSAGMVMLGYDDTRDVTMDDMIRFTTAVKNAKTDSLIVTDLPVNSYENEDSAVTNSKRLVEAGAHAVKLEGGKEVSKIIKAVVDSGIPVMGHLGLLPQTAEKYSVQAKKSEDAVNLIQDARILEESGTFSIVLEMVTSDVTEIITKSIKVPTIGIGSGISCDGQVLVVHDMLGMFEKIKPKFAKR

SEQ ID NO: 108257 - protein, 131 aa, Unknown
  Bacterial polypetide isolated from the Sargasso Sea
MSADRKTKKTILTLNKNKKEGTTSVLVTAYDYPQARIADKAGVDCILVGDSLGMTTLGHKTTIPVTMDDMIRSSEAVSRGADDALLIGDMPYMSYQPSNQLAIENAGRFIRSGMDMVKVEGCMTDRIRGIL

SEQ ID NO: 108258 - protein, 242 aa, Unknown
  Bacterial polypetide isolated from the Sargasso Sea
AQMASLINDHVDIILVGDSIGMTIYGYENTLSVTLDMMINHGAAVVRSTNQPHIVVDMPFGSYEESPEVAFRSASRIMRETGAQSVKLEGGEEFAETIHFLSQRGIPVMGHIGLMPQRMQTLGGFFTQGKTDKESSRLMNDAKSISQAGAFSMVIEAIPEEVASDITQSIEVPTIGIGAGRNCDGQILVSHDILNLYGAFTPKFVKKYGKIDESIVNAVKDYSQEVKKKKFPTKDNIFTIKK

SEQ ID NO: 108259 - protein, 96 aa, Unknown
  Bacterial polypetide isolated from the Sargasso Sea
MTEKITINSLKKMKEIGEKIACLTSYDSSFAKLQDDAGVDMLLVGDSLGMVLQGADNTLRVKMSDMIYHSRIVSDVVKRAIIISDMPFMSYSTPRQ

SEQ ID NO: 108260 - protein, 239 aa, Unknown
  Bacterial polypetide isolated from the Sargasso Sea
MTAWDSISGSIAEQANVDLVLVGDSLAMVCLGYKSTLPLTLENIIYHTNAVSRGFKKKIEEQPLVVSDMPFLTYQCGEDKAVEYAGKIIQSTFAKAVKVEGAEPEIQKVISRLIRMGIPVMGHIGLTPQSYLNIGFKKQGESLESQEKIKKEASILEELGCFSIVLEHIPDFLAREIQNSLTIPIIGIGAGNYCDGQVRVTADLLGLNDDQPPFCQPIIQGKKLFEDKLKEWVDSERLN

SEQ ID NO: 108261 - protein, 258 aa, Unknown
  Bacterial polypetide isolated from the Sargasso Sea
MKNKISNIIKSKNKRKLICLTAYSKNFAEEVDRYADITLVGDSLGSVLYNFKSTREVTIENMIQHSKSVKLGIKKSLMVVDMPYLTYKNKKEALKNAKKIFKQTKCDAIKVEGASNISSIIKHLIKNKIPVMGHLGLLPQTVRGKFRYQGKNIHERKKLIKEAILLDKLGVFSIVLECIETQTAKKITKIVKIPTIGIGSSKYCDGQVLVTDDLLGINKTKIRFVKEFINLRRYIKKGIKKFKYDVKTKKYPSKKHSY

SEQ ID NO: 108262 - protein, 258 aa, Unknown
  Bacterial polypetide isolated from the Sargasso Sea
MISKIKKILNKKNKSKIICLTAYSKNFAEAIDPYSDIILVGDSLGSVLYNYNSTREVTLNKMIDHAKSARLGIKNSLMIVDMPYRTYTNKRIALKNAKIIMKKTKCDGVKLEGGSSISRIIEHLVKNKIPVMGHLGILPQSEKGKFKSKGKNPRQKKKMLSDAKMLQNIGVFSIVLECVEKTLSKEITNILKIPTIGIGSSYHCDGQVLVLDDLIGLNETKIKFVKKFGNIKKNIQLAVKSFRKDVLNKKYPRKKHSY

SEQ ID NO: 108263 - protein, 225 aa, Unknown
  Bacterial polypetide isolated from the Sargasso Sea
MLPSDLVNYKKKSRKIIALTAWDSISGSIAEQANVDLVLVGDSLAMVCLGYKSTLPITLENIIYHTNAVSRGFKKKIEEQPLVVSDMPFLTYQCGEDKAVEYAGKIIQSTYAKAVKVEGAEPEIQKVISRLIRMGIPVMGHIGLTPQSYLNIGLRKQGESLASQEKIKKEASILEELGCFSIVLEHIPDSLAKEIQNSLTIPTIGIGAGNYCDGQVRVTADLLGL

SEQ ID NO: 108264 - protein, 216 aa, Unknown
  Bacterial polypetide isolated from the Sargasso Sea
MKKEKFTPHSAFDCRREKRKFSMISVYDYPTAKCAEEAGINSLLVGDSLAMTVLGHQDTISITMEEMLHHVKAVSRASQYSMVVADMPFMSYQISSQQAVENAGRFLKEGRADAVKVEGGNQMAETVNSIFSAGISVIGHIGLTPQSSGQLGGLKVQGKTVDSAKKLLNDAISLQEAGAFAILMECVPAKIASVINEKLDVPTISYGSGPSLDAQG

SEQ ID NO: 108265 - protein, 258 aa, Unknown
  Bacterial polypetide isolated from the Sargasso Sea
MNSKIKKILKKKNKSKIICLTAYSKNIAEEVDKYTDITLVGDSLGSVLYNYKTTRKVTLINMIDHSKSVRLGVKKSLMVVDMPYKTYSSNNSALKNAKKIIKETKCDAVKLEGGKNIINQIKILVKNKIPVMGHLGLLPQTAKGKFKSKGRTAKEKKQLINDALLLQSSGVFAIVLECVKTFTAKQITQTLKIPTIGIGSSVYCDGQVLVTDDLIGLNNTNIKFVKKFVNIKQNINLGLKKFTIEVKSKKYPSKKHSY

SEQ ID NO: 108266 - protein, 259 aa, Unknown
  Bacterial polypetide isolated from the Sargasso Sea
MLTKIRRLTLKKKNKSKIVCLTAYSKNIAEEIDRQADLILVGDSLGSVLYNYDTTRKVNLKMMIEHSKSVRKGVKKSLMIVDMPFDTYKNKSQALKNCKKVLKETKCDGIKLEGGRELNNIIKYLINNKIPVMGHIGITPQTIRGKYRYKGRTAFEKKKLLKDSKSLEEAGVFAIVLECIERKLSQEITKTIKIPTIGIGSSKYCDGQILVTDDFLGLTNSKMKFVKKYINLKKNIRKAVKKFQTDVKNGSYPSIKYSY

SEQ ID NO: 108267 - protein, 265 aa, Unknown
  Bacterial polypetide isolated from the Sargasso Sea
RDIRRKKLSDKDQEPISSLVCYTAQMARLINDHVDIILVGDSMGMTIYGYENTLSVTLDMMINHGAAVVRSTNQPHIVVDMPFGSYEESPEVAFRSASRIMRETGAQSVKLEGGEEFAETIHFLSQRGIPVMGHIGLMPQRMQILGGFFTQGKTDKESSRLMNDAKSISQAGAFSMVIEAIPEEVASDITQSIEVPTIGIGAGRNCDGQILVSHDILNLYGAFTPKFVKKYGKIDENIVNAVKDYSQEVKKKKFPTKDNIFTIKK

SEQ ID NO: 108268 - protein, 259 aa, Unknown
  Bacterial polypetide isolated from the Sargasso Sea
MLTKISRLVLKKKNKSKIVCLTAYSKNIAEEIDNFTDLILVGDSLGSVLYNFETTRKVNLSMMIEHSKSVRKGVKKSLLIVDMPFNTYKNKSQALKNCKKVMKETKCDGIKLEGGGKIIEIVKHLIKYKIPVMGHIGITPQSVRGKFRYKGKTDIEKKNLLKDSKSLEDAGVFAIVLECIEKKVSKKITESINIPTIGIGSSNFCDGQILVTDDLLGLTDNKIKFVKKYANLKSNVRTAVKKFKLDVKKGSYPSIRYSY

SEQ ID NO: 108269 - protein, 262 aa, Unknown
  Bacterial polypetide isolated from the Sargasso Sea
MSITIRTLQKRKQDGGKFSVLTAYDACFSRLISEAGVEAILVGDSLGNVIQGQTSTVPVTLEQMVYHTQCVARGNQGSLIIADIPFMGAATLERTLNAATALMQAGANMVKLEGSAWLAEAIEVLNRNGVPVCAHMGLTPQAVNSLGGYRVQGKDDDGAAELLNAAKILDQAGTALFVLECVPRALSAEITREVAAPVIGIGAAPECDGQVLVMHDMLGISPGKPARFVRNFMAETGDMRAAFKAYDDAVKDGSFPADEHCF

SEQ ID NO: 108270 - protein, 257 aa, Unknown
  Bacterial polypetide isolated from the Sargasso Sea
MLPADLIKYKEKSRKIVVLTAWDSISGSIVEQANVDLVLVGDSLAMVCLGYKSTLPLTLENIIYHTNAVSRGFKKNIEEQPLIVSDMPFLTYQCGEDKAVEYAGKIIQSTYAKAVKIEGAEPEIQKVISRLIRMGIPVMGHIGLTPQSYLNLGLKKQGESQESQEKIKNAAFVLEKLGCFSLVLEHIPDSLAREIRNNLKIPTIGIGAGKYCDGQVRVTADLLGLNDYQPPFCQPIIQGKDLFRDKLREWVDSEKFK

SEQ ID NO: 108271 - protein, 258 aa, Unknown
  Bacterial polypetide isolated from the Sargasso Sea
MSVKSDKNLVTIATLKALKEKGDKFSCLTAYEATLAEKISQSGVEVILVGDSLGMVIQGNDSTLPVTMDHLVYHLQCVVKGNVNSHIMADMPFMSYSTDHLALENATKLMQNGAHSVKIEGGTWICKLTSILAERGIPVCAHMGLTPQSINRIGGYFVQGRDVNKKKNMIQEAKALEDAGAAMLLLECVPDNLTSDIMKSISIPVIGIGAGQKTDGQIMVIHDLLGVSCLEKTPKFVKDFLKESNSIEEAISNYVKSV

SEQ ID NO: 108272 - protein, 268 aa, Unknown
  Bacterial polypetide isolated from the Sargasso Sea
FQWKIPALGKSMKKKISDLIKKKNKQKIVSLTAYSKNVASILDNHCDIILVGDSLGSVLYNYQSTREVTLNTMIEHSKSVRMGIKKSLMIVDMPYNTYRTPKEAVKNAKQIIKKTKCDGVKLEGGKKIYETIKSLVKNKIPVMGHLGLLPQSDKTFKFKGKKKLERNNIIRDSQLLEKAGVFSIVLECVETSLAKLVTQNLKIPTIGIGASKYCDGQILVSDDLIGLNPMNYKFVKKYANIRKDISKAVSNYSKEVKKIKFPNKKSSF

SEQ ID NO: 108273 - protein, 255 aa, Unknown
  Bacterial polypetide isolated from the Sargasso Sea
MKIKKFVNKKNKTKIVALTAYSKNIASVLDNYCDLILVGDSLGSVLYNYKSTKEVTLNTIIEHSKSVRMGIKRSLMIVDMPYNTYRNPKEALKNAKLIMKKTKSDGVKLEGGKKITKIIKTLVKNNIPVMGHLGVLPQSDKKFKFKGENKVEKENILRDAKLLELSGAFSMVLECIETSLAKLVTDSIGIPTIGIGASKNCDGQILVFDDLIGLNPIKVRFVKKYTNIKRELSKAVSKYANDVKKRKFPSKKYSY

SEQ ID NO: 108274 - protein, 261 aa, Unknown
  Bacterial polypetide isolated from the Sargasso Sea
MKSREKITVLTGYDSTMATLCDKVDVILVGDSAGMVMLGYDDTRDVTMDDMIRFTKAVKNAKTNSLIVTDLPINSYENEDSAITNSKRLVDAGAHAVKLEGGKEIGKIIKAVVDSGIPVMGHLGLLPQTAEKYSVQAKKSEDAVDLLQDAKKLEESGVFSIVFEMVTSDVAKIITKSVKVPTIGIGSGINCDGQVLVVHDMLGMFEKIKPKFAKRYLNLSEEIRNAINSYVKDVKEERFPGQEHTFSMEKEELEKLEKEIG

SEQ ID NO: 108275 - protein, 276 aa, Unknown
  Bacterial polypetide isolated from the Sargasso Sea
MLRKSANDIKSLKRKNPIVCLTAYTAPIARAIDEQVDLMLVGDSLGMVLYDYENTLQVTLEQMIKHAKSVVGASNKSCVIVDMPFGTYEESVEKAFMNAARVMKETNCNGVKLEGGQKMSKTIEHLTKSSIPVMGHIGLQPQSVLIDGGYKVRGKVKSEWQKYIDDAVAVEEAGAFSVVLEGMAEPLAAEITSILNIPTIGIGASPNCDGQILVTEDMLGLTNVAPKFVKKYVDLDSTIKKAVSKYAEEVKDRTFPSSEHIYHMRPQIVSNNGKDQ

SEQ ID NO: 108276 - protein, 271 aa, Unknown
  Bacterial polypetide isolated from the Sargasso Sea
MSIKSDRDLITISTLKRLKEKGEKFACLTAYEATIAEKISKSGIEVILVGDSLGMVVQGHDSTLPVTMENLIYHLKCVVRGNINSHIMADMPFMSYSTDHLALENATKLMQNGAHSIKIEGGTWICKLTSILAERGIPVCAHMGLTPQSINRIGGYFVQGRDVNKKKNMIEEAKALEDAGAEMILLECVPDDLTADILEKITIPVIGIGAGQRTDGQIMVIHDLLGISCLEKSPKFVKDFLKDSSSIEEAISNYSKSVKNKSFPSDNHTFF

SEQ ID NO: 108277 - protein, 271 aa, Unknown
  Bacterial polypetide isolated from the Sargasso Sea
MTYLQETSRNAITVPKLQAMRDAGEKIAMLTCYDASFAALLDRSGVDVLLIGDSLGNVLQGQTTTLPVSLTDIAYHTASVARARPSALVVADLPFGTYGTPEDAFKSSVELMRAGAQMVKLEGGEWLADTVRFLVERSIPVCAHVGLTPQSVHAFGGFKVQGKTEAGASQLLRDSLAVQNAGAQLIVMEAIPTLLASEVTKQLRIPTIGIGAGLDCSGQVLVLHDMLGIFPGKRPRFVKDFMQGQPSIQAAVEAYVHAVKDGTFPGPEHTF

SEQ ID NO: 108278 - protein, 257 aa, Unknown
  Bacterial polypetide isolated from the Sargasso Sea
MKKKITDLIKKKNKKKIVSLTAYSKNVASILDNYCDIVLVGDSLGSVLYNYKSTREVSLSMMIEHSKSVRMGIKKALMVVDMPHNTYRNSKEALKNAKKIMFKTKCDAVKLEGGKKIYETVKTLVKNKIPVMGHLGLLPQSDKTFKFKGKKKLERDNIIKDSQLLEKAGVFSVVLECVETSLAKLLTQNLKVPTIGIGASKYCDGQILVFDDLIGLNPMNYRFVKKYANIRNKISKAVSNYSKEVRKIKFPNKNNSY

SEQ ID NO: 108279 - protein, 271 aa, Unknown
  Bacterial polypetide isolated from the Sargasso Sea
MTYLQESSRPAVTVPKLQAMRDAGEKIAMLTCYDASFSALLDRSGVDVLLIGDSLGNVLQGHSTTLPVSLDDIAYHTACVARAQPRALIMADLPFGTYGTPAEAFASSVKLMRAGAQMVKLEGGEWLAETIRFLVERAVPVCAHVGLTPQSVHAFGGFKVQGKTEAGAAQLLRDARAVEAAGAQVVLLEAVPTLIGSEVTHMLRVPTIGIGAGADCSGQVLVLHDMLGVFPGKRPRFVKDFMQGESNIQAAVEAYVRAVKDGSFPGPEHSF

SEQ ID NO: 108280 - protein, 254 aa, Unknown
  Bacterial polypetide isolated from the Sargasso Sea
MKNNSEKISMLTAYDFSFAKIIDEAGIDIILVGDSASNVMAGHETTLPITLDQMIYHASSVVRAVNRALVIVDLPFGTYQADSKEALKSAIKIMKESGAHAVKLEGGYQAKESIERIIQAGIPVMGHLGLTPQSIYKFGTYEVRAKDKQEADTLLNDALMLEEIGCFSVLLEKIPNTLSKEVSSKLTVPIIGIGAGSHVDGQVLVLQDMLGMNKGFSPRFLRRYLDLDSLVSNAVKKYSTDIKSGDFPNKKEQY

SEQ ID NO: 108281 - protein, 227 aa, Unknown
  Bacterial polypetide isolated from the Sargasso Sea
MSAVKSSEITIENFRKHKKNKTKFSALTCYDATLSKTLSDNGVEMILVGDSLGMVIQGHDSTLPVSVEDIIYHLRCVKKGNLSAHIMADMPFMSCATEDLAFENASRIMQAGANSIKIEGGQWMLNITKTLSSQGIPICAHIGLTPQSINRIGGYSVQGRDPEDKKKILKEAIELQDAGAEMILFECIPDSLTNSLVDNLSIPTIGIGAGPKTDGQIMVLHDMLGIS

SEQ ID NO: 108282 - protein, 267 aa, Unknown
  Bacterial polypetide isolated from the Sargasso Sea
MAEPPINVATLKKMKSNKEAIACITAYDASFSLLVDKAGIDVVLVGDSLGMVIQGHDTTVPVTVDDVVYHSNNVAKGLSRAFLIADMPFMSYSDPNQALENSVRLMQEGGAMMIKLEGGEDQISIVEHLARHDIAVCAHLGLKPQSVHKIGGFKVQGRDKDESDKMLKNAISLQNAGADLILLECVPNELGKLIRDKLDIPVIGIGAGPNVDGQILVLYDVLGITQGTMPKFVKNFMLGHDSPLNAIESYVKAVKEGDYPSPEHCFS

SEQ ID NO: 108283 - protein, 236 aa, Unknown
  Bacterial polypetide isolated from the Sargasso Sea
CLFKNIASILDNYCDLILVGDSLGSVLYNYKSTREVTLNTMIEHSKSVRMGVKKSLMIVDMPHNTYRNPKEAVRNAKLIMKKTKCDGVKLEGGKKIYETVKTLVKNKIPVMGHLGLLPQSDKTFKFKGKKKFERDNIIRDSQLLEKAGVFSIVLECVETSLAKLVTQNLKIPTIGIGASKYCDGQILVFDDLIGLNPMNYKFVKKYANIRKDISKAVSNYSKEVRKVKFPNKKNSF

SEQ ID NO: 108284 - protein, 263 aa, Unknown
  Bacterial polypetide isolated from the Sargasso Sea
MITIDTLNNFKAIGEKFACLTAYESTLANVISSAGVEVILVGDSLGMVIQGHDSTLPVTMNDLIYHLKNVSRGNINSHLMADMPFMSYSTKDKALSNAALLMQNGAHSIKLEGGYWICDLTNALAERGIPVCAHMGLTPQSINRIGGYFVQGRDTDKKEEMISEAKELESAGASILLLECVPNNLAAEITQSLNIPVIGIGAGASTDAQVMVIHDLLGISCLEKPPKFIKNFLAENDSVQSAIAAYVKEVKSQKFPAKEHTFF

SEQ ID NO: 108285 - protein, 271 aa, Unknown
  Bacterial polypetide isolated from the Sargasso Sea
MSIKSDKDLITISTLKLLKEKGEKFACLTAYDATIAEKISKSGIEVILVGDSLGMVVQGHDSTLPVTMEHLIYHLKCVVRGNINSHIMADMPFMSYSTDHLALENATKLMQNGAHSIKIEGGTWICKLTSILAERGIPVCAHMGLTPQSINRIGGYFVQGRDVNKKKNMIEEAKALEDAGAAMILLECVPDDLTADILETVTVPVIGIGAGRRTDGQIMVIHDLLGISCLEKTPKFVKDFLNDSSSIEEAISNYSKSVKNKSFPSDDHTFF

SEQ ID NO: 108286 - protein, 264 aa, Unknown
  Bacterial polypetide isolated from the Sargasso Sea
MSKITTTNLLKMKQEGQRITAITAYDATFAKLFDDEGAHVLLIGDSLGMVLQGSQDTLGVSMDEMVYHTRCVVRGTTNALVVTDMPFMSYATPEQTYQNAARLMAAGARMVKMEGGDWLCDSIRHLTRNGVPVCGHLGLTPQSVHVFGGFKVQGRDEFQAQEIYRQALELQAAGIQLLVLECVPTSLAERISKALRIPVIGIGAGPATDGQILVMHDAFGITSGYVPKFTKNFLAETGDMRAAIRLYVKQVSEGTFPGPEHCFN

SEQ ID NO: 108287 - protein, 257 aa, Unknown
  Bacterial polypetide isolated from the Sargasso Sea
MLPSDLVNYKKKSRKIIALTAWDSISGSIAEQANVDLVLVGDSLAMVCLGYKSTLPLTLENIIYHTNAVSRGFMKKIEEQPLVVSDMPFLTYQCGENKAVEYAGKIIQSTYAKAVKVEGAEPEIQKVISRLIRMGIPVMGHIGLTPQSYLNIGLKKQGESLASQEKIKKEASILEELGCFSIVLEHIPDLLAKEIQNSLSIPTIGIGAGNYCDGQVRVTADLLGLNDDQPPFCQPIIQGKKLFKDKLKEWVDSERLN

SEQ ID NO: 108288 - protein, 259 aa, Unknown
  Bacterial polypetide isolated from the Sargasso Sea
MNKKIKKILNKKNKSKIICLTAYSKNVAKILDKHCDLVLVGDSLGSVLYNFKSTKQVTLETMINHSKSVRLGIKKSLMVVDMPYNTYRNPSEALKNSRLVMKETKCDAVKLEGGKKIIPIVKRLIKNKIPVMGHVGILPQTDKKFTFKGKKLKESERLLKDTKLLENAGVFSIVLECVETKLSKKISNHIKIPTIGIGSSVNCDGQVLVIDDLTGLSQSKLKFVKKFVDITKLIENGVKKFKSEVLKKQFPKAKHSFSK

SEQ ID NO: 108289 - protein, 271 aa, Unknown
  Bacterial polypetide isolated from the Sargasso Sea
MYTNNELKTVTLNTLRDLKSKGEKIACLTAYDATFANLVDKAGTEIILVGDSLGMVVQGHKTTVPVKIEDMIYHTKIVASSVNYSFLISDMPFMSFYNANVALDNAKRLMQDGGAQMVKLEGNRSQINIIKKLALSDIPICAHIGLRPQSVNKMGGYKVQGKSSNEANALIQEAKKIEDSGADLLLLECVSSQTAKELASEISIPIIGIGAGSEVDGQILVLYDILGISQGQLPKFSKNYMDGNNTIEDAIKQYIQEVKTLKYPTDKHSFK

SEQ ID NO: 108290 - protein, 208 aa, Unknown
  Bacterial polypetide isolated from the Sargasso Sea
VADMPYMSYHVSEEETIKNAARFIQEGKADAVKIEGGKKRERMIKALINAEIPVMGHLGLTPQSKNVMGGYKVQGKTLELAKELLEDAILLDSLGCFSFVLEGVPKVVAQTMTEKVSIPTIGIGAGVHVDGQVLVYHDLLGMKSKEYIDAKFVKRYDNQYEKVVEVMKKFKQDIENKDFPTDDHSYDSGDSLPESLKEWKKEVKKILS

SEQ ID NO: 108291 - protein, 257 aa, Unknown
  Bacterial polypetide isolated from the Sargasso Sea
MLPSDLVNYKKKSRKIIALTAWDSISGSIAEQVNVDLVLVGDSLAMVCLGYKSTLPLTIENIIYHTNAVSRGFKKKIDEQPLVVSDMPFLTYQCGEDKAVEYAGRIIQSTYAKAVKVEGAEPEIQKVISRLVRMGIPVMGHIGLTPQSYLNIGLKKQGESLESQEKIKKEASILEKLGCFSIVLEHIPDLLAKEIQNSLSIPTIGIGAGNYCDGQVRVTADLLGLNDDQPPFCQPIIQGKKLFKDKLKEWVSSERLN

SEQ ID NO: 108292 - protein, 271 aa, Unknown
  Bacterial polypetide isolated from the Sargasso Sea
MSTHAYKKPITLTTLGNLKKNSEKFTCLTAYESTMASVISENGVDVILVGDSLGMVVQGHDSTLPVTMDQLIYHLECVVNGNSGSHIMADMPFMSYSTDDLGLENAKRLMQAGANSVKIEGGEWISNMAQALSDRGIPVCAHMGLTPQTINRIGGHHVQGRDPSQKEKIINEAIALEKAGAAMLLLECVPGDLAQEITSTLKIPVIGIGAGIHTDGQIMVVHDLLGISCLDTPPKFVKNFMEESSSIQDAIHRYVDEVKNLKFPSEEHTFK

SEQ ID NO: 108293 - protein, 107 aa, Unknown
  Bacterial polypetide isolated from the Sargasso Sea
MSHKKPVTITTLNKFKESSEKFTCLTAYESTMASVISQSGVDVILVGDSLGMVIQGHDSTLPVTMDQLIYHLECVVNGNESSHIMADMPFMSLCTDDLGLENAKKLM

SEQ ID NO: 108294 - protein, 258 aa, Unknown
  Bacterial polypetide isolated from the Sargasso Sea
MNKKIKKIIDKKNKSKIVCLTAYSKNIAEIVDNHADIVLVGDSLGSVLYNYKTTRKVNLKMMIEHTKSVRMGVKKSLLVIDLPYNTYRNKSEALKNSKVAIKETKCDAVKVEGGERVQHIVSHLVKNKIPVLGHIGLTPQTVKGKFKSVGKSQKEKNKLIRDAKALEKNGAFGIVLECTYSDISKKISNLIKIPTIGIGASVYCDGQVLVTDDIIGLTDAKIKFVKKYVDIKKIINSAVLKFKQEVKSRKYPTKKYSY

SEQ ID NO: 108295 - protein, 247 aa, Unknown
  Bacterial polypetide isolated from the Sargasso Sea
MKANKEYIVALTAYDYQTAIIIDNYCDFVLVGDSLGNVFQGEETTLGVTVDQMKYHGSIVSKAIKNAHLCIDMPFMSYQSSVSEALKNAGDIIKSTKAQSIKLEINIDTIPTIQRLANAGIPVVAHVGLCPQSFNLYGGYKKQGKNKSDQDYILMLSKEAEKNGASIVVIEGVPDNLGLKITRALKIPTIGIGAGNKCDGQILVTEDMLGLTPPPYPSFVKNYSNMRGLLKKSASKYKNEVKKNKFP

SEQ ID NO: 108296 - protein, 264 aa, Unknown
  Bacterial polypetide isolated from the Sargasso Sea
MSKVTSSTLLKYKQEGRKFTALTAYDASFASAFDGEGIDVLLVGDSLGMVLQGHDDTLPVTTAEIAYHTRCVRRGIERSLLIADMPFMSYATPEQAMENATALMQAGANMVKLEGGHWLLETVTKLTERGIPVCAHLGLTPQSVHVFGGFKVQGRDAENAQRILDEAKALEAAGAQLLVVECIPASLATAITQALTIPVIGIGAGATTDGQILVMHDVLGISSGYIPRFSKNYLKQTGEIRSAVRAYIEEVANGSFPSADHTFN

SEQ ID NO: 108297 - protein, 260 aa, Unknown
  Bacterial polypetide isolated from the Sargasso Sea
MKDKIKKIIKKKNKQKILCLTSYSKNIAEILDRFVDIILVGDSLGSVLYNYNSTRKVLLRNMIEHSKSVRMGIRKSLMVVDMPFQTYRTKNEALSNAKKLMKITKCDAVKLEGGKKIINIVDYLIKNKIPVMGHIGILPQSVKGKFRFKGKNKSDKKKLISDAKLLEERGVFSIVLECIESSTSMAITNSLKIPTIGIGSSSNCDGQVLVTDDMIGLNPNSFRFVKKYGNVKKYIESSVKKFRSDVLNKKFPTKKYSFVY

SEQ ID NO: 108298 - protein, 227 aa, Unknown
  Bacterial polypetide isolated from the Sargasso Sea
DKYADLILVGDSLGSFLYNYKSTRNVTLDSMIEHSKSVRLGVKKSLMIVDMPYNTYRNKKEALRNCKRVIKETKCDGVKVEGGIKIKSIVKHLTKNKISVMGHIGILPQSIRGKFKSKGKSEKEKKQLIKDASFLEKAGSFAIVLECIEKNLSKKITNTLKIPTIGIGSSHYCDGQILVTDDLLGLTNSKIKFVKKYIDLKIYIRKGVKKFKSDVLKNKYPNKRYSY

SEQ ID NO: 108299 - protein, 273 aa, Unknown
  Bacterial polypetide isolated from the Sargasso Sea
MRPYAPVRPADLIRQKQNGRPITILTAWDSLSAALVEAAGADAVLVGDSLAMVALGHATTLPVTLDQMRHHTLAVSRGFNAEPSRQPLLICDLPFLSYQCGPDLAVQAAGTLLKETPAAAVKLEGAEAEVLAVIDRLVRMGIPVMGHLGLTPQAVHRLGYRRQAQDPVSQERLLNQAIALEQAGCFALVLEHVPSDLAGVVRRRLQIPVIGIGAGDDCDGQIRVTADLLGLTQQQPPFSPALIPGQQLFVEALRTWVAEQTPTTTPPPAAPDC

SEQ ID NO: 108300 - protein, 152 aa, Unknown
  Bacterial polypetide isolated from the Sargasso Sea
MSTKANKKSVTLTDLKNFKETSEKFTCLTAYESTMASVISECGVDVILVGDSLGMVIQGHDSTLPVTMDQLIYHLECVVNGNKGSHIMADMPFMSYSTDDLGLENAKRLMQAGANSVKIEGGEWISKMAQVLSDRGIPVCAHMGLTPQTINR

SEQ ID NO: 108301 - protein, 271 aa, Unknown
  Bacterial polypetide isolated from the Sargasso Sea
MPNTVNDIIQMKSREKITVLTGYDSTMATLCDKVDVILVGDSAGMVMLGYDDTRDVTMDDMIRFTTAVKNAKTDSLIVADLPINSYENEDSAITNSKRLVQAGAHAVKLEGGKKIADIIKAVVDSGIPVMGHLGLLPQTAEKYSVQAKKSSDAVNLLEDAKILEKAGVFSIVFEMVTSNVAKIITESVKVPTIGIGSGINCDGQVLVVHDMLGMFEKIKPKFAKRYLNLSEDIRNAINSYVKDVKEEKFPEEEHTFSMEKEELEKLEKEIG

SEQ ID NO: 108302 - protein, 258 aa, Unknown
  Bacterial polypetide isolated from the Sargasso Sea
MNAKIKKILKKKNKSKIVCLTAYSKNFAEEVDKYVDITLVGDSLGSVLYDYNSTKKVTLTNMIDHSKSVRLGIKKSLMVVDMPYNTYSSNNTAFKNAKKILKETKCDAVKLEGGRKIINQVKYLIKKKIPVMGHLGLLPQTAKGKFKSKGKSVKETKELIKDALLLQNSGVFAIVLECIKTTSAKKITQSLNIPTIGIGSSVHCDGQVLVTDDLIGLNNTTIRFVKKFVNIKKYINLGLKKFSIEVRSKKYPTKKYSY

SEQ ID NO: 108303 - protein, 202 aa, Unknown
  Bacterial polypetide isolated from the Sargasso Sea
MSSKSEKKLVTLDTLNRYKEKNEKFTCLTAYESTMASVISKAGVDIILVGDSLGMVVQGHDSTLPVTMDQLVYHLECVVNGNNGSHIMADMPFMSYATDDLGLENAKRLMQAGANSVKIEGGEWISKMAQALSDRGIPVCAHMGLTPQTINRLGGHRVQGRDPSQKEKIINEAMSLEKAGAAMLLLECVPDELAKEVTKELK

SEQ ID NO: 108304 - protein, 263 aa, Unknown
  Bacterial polypetide isolated from the Sargasso Sea
MITIDTLNNYKVNGEKFACLTAYESTLANVISGAGVEVILVGDSLGMVIQGHDSTLPVTMNDLIYHLKNVSRGNINSHLMADMPFMSYSTKDKALSNAALLMQNGAHSIKLEGGRWICDLTSTLAERGIPVCAHMGLTPQSINRIGGYFVQGRDTDKKDEMISEAKELESAGAAILLLECVPDNLAAEITQSLSIPVIGIGAGASTDAQVMVIHDLLGISCLEKPPKFIKNFLAENDSVQSAIAAYVKEVKSQKFPAKEHTFF

SEQ ID NO: 108305 - protein, 256 aa, Unknown
  Bacterial polypetide isolated from the Sargasso Sea
MSKIKKFIAKKNKSKIVSLTAYSKNIASILDSYCDLILVGDSLGSVLYNYKSTREVNLSSMIEHSKSVRMGIKKSLMIVDMPHNTYRTPKEAVKNAKQIMKKTKCDGVKLEGGKKIYEIIKSLVKNKIPVMGHLGLLPQSDKTFKFKGKKKLERNNIIRDSQLLEKAGVFSIVLECVETSLAKLVTQNLKIPTIGIGASKYCDGQILVFDDLIGLNSTNYKFVKKYANIRNNISKAVSNYSKEVRKIKFPNKKNSF

SEQ ID NO: 108306 - protein, 228 aa, Unknown
  Bacterial polypetide isolated from the Sargasso Sea
MLTKISRLALKKKNKSKIVCLTAYSKNIAEEIDNHADLILVGDSLGSVLYNFETTRKVNLSMMIEHSKSVRKGVKKSLMIVDMPYNTYKNKSQALKNCKEVMKETKCDGIKLEGGRKIIEIIKYLIKYKIPVMGHIGITPQSVRGKFRYKGKSEIEKKNLLKDSKSLEDAGVFAIVLECIEKKVSKKITDSINIPTIGIGSSNFCDGQILVTDDLLGLTDNKIKFVKK

SEQ ID NO: 108307 - protein, 258 aa, Unknown
  Bacterial polypetide isolated from the Sargasso Sea
MISKIKKILNKKNKSKIICLTSYSKNISEAIDPYSDIILVGDSLGSVLYNYSTTRKVTLDQMIEHSKSARLGIKNSLMVVDMPYRTYRNKKIALKNAKRILKETKCDAVKLEGGSLIISVIDHLIKNKIPVMGHLGILPQSVKGKFKFKGKKNSERNKIFNEAKLLEKIGVFSIVLECVESTLAKQISKKLKIPTIGIGSSKFCDGQILVIDDLIGLNDTKVRFVKKFGQIKKNISNAAKNFSKEVKNKKYPSKIYSY

SEQ ID NO: 108308 - protein, 287 aa, Unknown
  Bacterial polypetide isolated from the Sargasso Sea
MKITVPKIIGLKNSRVISMMTAYDYPSSKAISDAEIDIILVGDSLAQVVLGYDDTLSVTVDEMLHHVKAVTRANPNSLVVADMPYMSYHISEEETIKNAARFIQEGKADAVKIEGGKKRENMIKALINAEIPVMGHLGLTPQSKNVMGGYKIQGKTLELAKELLEDAILLDSLGCFSFVLEGVPKIVAQTITEQVSIPTIGIGAGVHVDGQVLVYHDLLGMKSKEYIDAKFVKRYDNQYDRVVETMKNFKKDIENKEFPTDDHSYDSGDSLLENLEEWKKEVKKILS

SEQ ID NO: 108309 - protein, 261 aa, Unknown
  Bacterial polypetide isolated from the Sargasso Sea
MKKIKILHKSFSKPISCLTAYSPSIANILDGKIDLILVGDSLGSTLYGMKNTQGVTMDIMKHHGVAVNKEIKRSLKVLDMPYKTYDNKIDAYRNAKILLNHCKPDLLKIEISEKKLVVLKHLVDKKVNVISHIGVTPQSYKNFNKIKVLGRTNKEKQNLLKLAKESEALGAKAVLLECVTADTAKVITENISIPTIGIGASRYCDGQILVFDDLINLNTNNKKPRFVKNYFDFNEIASNVVKKYNQEVKLKKFPSRKFTYN

SEQ ID NO: 108310 - protein, 269 aa, Unknown
  Bacterial polypetide isolated from the Sargasso Sea
MQDQDNESRSLTIRDLARAKQSGRPISMVTAYDWWSGSLADSAGVDCVLVGDSLAMVVAGRETTLSATIEQMIYHGEIVSRAVQRAIVFVDLPFPLQHLGVGKAIESAARILQETGCQAIKLEGTSGQQDVIAGIVEAGIPVMAHVGLRPQAVHQLGGYRIQRDREQLLADATAAAAAGACGVVLECVPSKLAAEITAAIEIPTIGIGAGLDCDGQVLVLHDLIGLSIDRIPRFVRSYADTKGTILDAVTSWRQDVESKKFPTESETLA

SEQ ID NO: 108311 - protein, 257 aa, Unknown
  Bacterial polypetide isolated from the Sargasso Sea
MKKIKRIINKKNKSKIVCLTAYSKNIAEEVDKYVDIVLVGDSLGSVLYNYSTTRKVTLTEMINHSKSARLGVKKSLMVVDMPFNTYATKNSALKNAKKIIKETKCDAVKLEGGKKIINQIKLLIKNKIPVMGHLGLLPQSAKGKFKSKGNTIKEINQLLDDAKLLQKNGVFAIVLECIKTPIAKKITRNLNIPTIGIGSSVHCDGQVLVTDDLIGLNQTNIKFVKKFLNVKKYINTGLRKFASEVRSKKYPNKKHSY

SEQ ID NO: 108312 - protein, 270 aa, Unknown
  Bacterial polypetide isolated from the Sargasso Sea
MSQSKQDRITIKVLEEMKSNNEKISMLTSYDYSFAKIIDSAGIDIILVGDSASNVMAGHETTLPITLDQMIYHASSVVRAVKRALVVVDLPFGTYQADSKVALKSAIRIMKESGAHAVKLEGGKLVKDSIERILKAGIPVMGHLGLTPQSIYKFGTYNVRAKEEKEAKVLIDDALLLEEIGCFSLVLEKIPNILSKEVLNKTKIPIIGIGAGSSLDGQVLVSHDMLGMNKDFSPRFLRRYLDLDSLISNAVKKYSKDIKSGNFPDKKEQY

SEQ ID NO: 108313 - protein, 206 aa, Unknown
  Bacterial polypetide isolated from the Sargasso Sea
MKKVTVSGLLKKKQAGEKITSLTAYDASFAKMFDEQGVDALLIGDSLGMVLQGEDDTLPVTIDDIAYHTKSVRRGTERAFVLADMPFMSYATPEQTYANAAKLMAAGASMVKMEGGSWLCDTIKGLNLRGVPVCGHLGLTPQSVHVFGGFKVQGREASQAEKLLSEAKALEEAGIQLLVLECVPSSLGKAVSEALTIPVIGIGAGK

SEQ ID NO: 108314 - protein, 257 aa, Unknown
  Bacterial polypetide isolated from the Sargasso Sea
MKKTLQELHAMKQRGEKIVALTSYDFQTAQIIDDHCDFILVGDSLGNVFQGNETTLSVELEHMIYHGQIVGKALKNAHLCVDMPFMSYQASEADALLNMGNIIKKTGAQSVKIEMNFSLLNLIGLASQSGIPIVAHVGLCPQSYNTYGGYKKQGKNKDERDFIYELAIESYKNGAALIVIEGVPEDLAKKITEDVNIPTIGIGAGIYTDGQILVAEDMLGITPSPRPSFVKAYSNLRESIKKAVVEFKKDVKKRKFP

SEQ ID NO: 108315 - protein, 190 aa, Unknown
  Bacterial polypetide isolated from the Sargasso Sea
MPNTVNDIIQMKSREKITVLTGYDSTMATLCDKVDVILVGDSAGMVMLGYDDTRDVTMDDMIRFTTAVKNAKTDSLIVADLPINSYENEDSAITNSKRLVQAGAHAVKLEGGKEIEKIIKAVVDSGIPVMGHLGLLPQTAEKYSVQAKKSDDAVNLLEDARILEKAGVFSIVFEMVTRDVAKIITESVKV

SEQ ID NO: 108316 - protein, 259 aa, Unknown
  Bacterial polypetide isolated from the Sargasso Sea
MPSKISRLILKKKNKSKIVCLTAYSKNIAEEVDKYTDLVLVGDSLGSVLYNFDTTRKVNLSMMIEHSKSVRKGVKKSLMIVDMPFNTYKNKLQALKNCKKIIKETKCDGIKLEGGSKIKDIIKHLVNNKIPVMGHIGITPQSQRGRFRYKGKTEKEKKNLLKDSKILEEAGVFAIVLECIEKKLSKKITETIEIPTIGIGSSKFCDGQILVLDDLLGLTNSKIKFVKKYANFKINIRNAVKKFGSDVKRGSYPSLKHSY

SEQ ID NO: 108317 - protein, 209 aa, Unknown
  Bacterial polypetide isolated from the Sargasso Sea
MAKTVSDIVQMKSKEKITVLTGYDSTMATLCDSVDVILVGDSAGMVMLGYDDTRHVTMDDMIRFTTAVKNAKSNSLIVTDLPINSYENEDSAVTNSKRLVQAGANAVKLEGGKEVSKIIRAVVDSGIPVMGHLGLLPQTAEKYSVQAKKSEDAVNLIQDAKILEESGAFSIVLEMVTSDVTEIITKNVKVPTIGIGSGIDCDGQVLVVH

SEQ ID NO: 108318 - protein, 176 aa, Unknown
  Bacterial polypetide isolated from the Sargasso Sea
MGYKRVTTRTLLEMKSNNEKISMLTAYDYTFAKIIDQSNVDVILVGDSASNVIAGNETTVPITLDEMIYHAKSVVKAAQRALVVVDLPFGTYQSDSKLALRSAIRIMKESGAHAVKLEGGSEIKDSVSKIIKAGIPVMGHLGLTPQSIYKFGSYTVRAKEKHEAEQLITDALLLEK

SEQ ID NO: 108319 - protein, 286 aa, Unknown
  Bacterial polypetide isolated from the Sargasso Sea
MKITVPKILDLKSERQITMMTAYDFPTSKAVSEAQIDIILVGDSLAQVVLGHDDTLSVTMDEMLHHVQAVTRAKPNCLVVADMPYMSYHNTKEEAVKNAARFIQEGKADAVKLEGGFKRKDIIEAIISAEIPVMGHLGLTPQSKNMMGGYKVQGKTLELATELLEEAVLLETLGCFSMVLEGVPSVVAEVLTEKVSIPIIGIGAGANVDGQVLVFHDLIGMKSKEYIDAKFVKRYANQHEEVVKALENFKKEVENKVFPTEHHSYEAGKITENDVKEWKKEIKKIL

SEQ ID NO: 108320 - protein, 259 aa, Unknown
  Bacterial polypetide isolated from the Sargasso Sea
MLAKTSRLILKKKHKSKIVCLTAYSKNIAEEIDSYTDLILVGDSLGSVLYNFDTTRKVNLTMMIEHSKSVRKGVKKSLMIVDMPFNTYKNKSQALKNCKKVMKETKCDGIKLEGGKKILDIVKHLVKFKIPVMGHIGIMPQSVRGKFKYKGKTNTEKNKLLKDSKLLEEAGVFAIVLECIERKLSKEITDSINIPTIGIGSSNFCDGQIMVTDDLLGLTDTKIKFVKKYADLKGSVKNAVKKFKLEVKKGSYPSIKYSY

SEQ ID NO: 108321 - protein, 257 aa, Unknown
  Bacterial polypetide isolated from the Sargasso Sea
MNKKILSIIKKKNKTKIVSLSAYSKNLGEILDNYCDIVLVGDSLGSVLYNYKSTKEVSLNTMIEHSKSVRLGIKKSLMVVDMPYNTYRNSKEALKNAKKIKLKTKCDAVKLEGGKKISAIIKTLVKNNIPVMGHLGLLPQSAKNFKFKGKKNYEREKILKEAKLLETAGVFSIVLECIESSLAKTITKNIKIPTIGIGASNNCDGQILVLDDLIGLNPINVRFVKKYTNIRKEISKAVLNYAREVKSKKFPLKKHSY

SEQ ID NO: 108322 - protein, 204 aa, Unknown
  Bacterial polypetide isolated from the Sargasso Sea
TLPITLENIIYHTNAVSRGFKKKIEEQPLVVADMPFMTYQCGEDKAVEYAGKIIQSTYAKAVKVEGAEPEIQKVISRLIRMGIPVMGHIGLTPQSYLNIGLRKQGESLASQEKIKKEASILEELGCFSIVLEHIPDLLAKEIQNSLTIPTIGIGAGNYCDGQVRVTADLLGLNDDQPPFCQPIIQGKKLFKDKLKEWVDSERLS

SEQ ID NO: 108323 - protein, 271 aa, Unknown
  Bacterial polypetide isolated from the Sargasso Sea
MSIKSDKDLITISTLKHLKEEGKKFACLTAYEATIAEKISKSGIEVILVGDSLGMVVQGHDSTLPVTMEHLIYHLKCVVRGNINSHIMADMPFMSYSTDHLALENATKLMQNGAHSIKIEGGNWICKLTSILAERGIPVCAHMGLTPQSINRIGGYFVQGRDVNKKKNMIEEAKALESAGAAMILLECVPDDLTADILESISIPVIGIGAGQRTDGQIMVIHDLLGISCLEKTPKFVKDFLKDSSSIEEAISNYSKSVKSKSFPSDDHTFF

SEQ ID NO: 108324 - protein, 259 aa, Unknown
  Bacterial polypetide isolated from the Sargasso Sea
MNKKIKKILNKKNKSKIICLTAYSKNVASILDKHCDLVLVGDSLGSVLYNFNSTKQVTLETMINHSKSVRLGIKKSLMVVDMPYNTYRNPSEALKNSKLVMKETKCDAVKLEGGKKIIPMVKRLVKNKIPVMGHVGILPQTDKKFTFKGKKLRESKRLLNDTKLLENAGVFSIVLECVETKLSKKISNHINIPTIGIGSSVNCDGQVLVIDDLIGLSQSKLKFVKKFVDITKLIEIGVKKYKSEVLNKQFPKAKHSFSK

SEQ ID NO: 108325 - protein, 257 aa, Unknown
  Bacterial polypetide isolated from the Sargasso Sea
MLKKILKIKKSKSKRKLVCLTAYSKPISKILDKYCDIILVGDSVATAMYGMKNTKEINLETMLNHAQSVKKSVKKSLLVFDMPNGTYRNAKEAKQNVKKVLKNVRFDAVKIESNGKNYKIVETLVKSGIPVMGHIGYTPQFKKNFKVHGLNSKEDKRLILESKKIESAGAFSIVLECIAKKTSKKITNSIKIPTIGIGSSSFCDGQILVTDDLLGLSGFYPRFVKKYANLQKIIKTAIKKFKKDVRNEKFPSNSNTF

SEQ ID NO: 108326 - protein, 106 aa, Unknown
  Bacterial polypetide isolated from the Sargasso Sea
MSVKSDKNLVTIATLKALKEKGDKFSCLTAYEATLAEKISQSGVEVILVGDSLGMVIQGNDSTLPVTMDHLVYHLQCVVKGNVNSHIMADMPFMSYSTDHLALENA

SEQ ID NO: 108327 - protein, 257 aa, Unknown
  Bacterial polypetide isolated from the Sargasso Sea
MNKKILSIIKKKNKTKIVSLSAYSKNVAEILDNYCDIVLVGDSLGSVLYNYKSTREVLLNTMIEHSKSVRLGIKKSLMVVDMPYNTYRNSKEALKNAKQIILKTKCDAVKLEGGKKLCEIIKTLVKNNIPVMGHLGLLPQSAKNFKFKGKKNYEREKILKEAKLLETAGVFSMVLECIESSLARAITKQIKIPTIGIGASNNCDGQILVFDDLIGLNQINVRFIKKYTNIRKEIAKAVSTYAREVRSKKFPLKKHSY

SEQ ID NO: 108328 - protein, 240 aa, Unknown
  Bacterial polypetide isolated from the Sargasso Sea
VVLGYDDTLSVTVDEMLHHVKAVTRANPNSLVVADMPYMSYHISEEETIKNAARFIQEGKADAVKIEGGKKRENMIKALINAEIPVMGHLGLTPQSKNVMGGYKIQGKTLELAKELLEDAILLDSLGCFSFVLEGVPKVVAQTITEQVSIPTIGIGAGVHVDGQVLVYHDLLGMKSKEYIDAKFVKRYDNQYDKVVETMKNFKKDIENKEFPTDDHSYDSGDSLSENLEEWKKEVKKILS

SEQ ID NO: 108329 - protein, 275 aa, Unknown
  Bacterial polypetide isolated from the Sargasso Sea
MQGEQVVSSRAKKVTTHILQEMKRSNEKIAMLTAYDYSLARLVDGAGVDVILVGDSASNVMAGNDTTVPITLEHMIYHAQCVVNAVDRALVVVDMPFGSYQGDSKLALKSAIRIMKESGGHAVKIEGGKEIVDSVKRILTAGIPVMGHLGLTPQSIYKFGTYSVRAKEESEANKLMEDAMALQEAGCFSVVFEKIPADLAKKVSESLDIPTIGIGAGPHCDGQVLVLHDMLGITKDFSPRFLRRYSDVGGAVDKAVRDYIDDVRGGSFPAQEESY

SEQ ID NO: 108330 - protein, 287 aa, Unknown
  Bacterial polypetide isolated from the Sargasso Sea
MKNTVPKIVNLKNERVISMMTAYDYPSAKAVSEAEIDIILVGDSLAQVVLGHDDTLSVTIDEMLHHVKAVTNAKPTSLVVADMPYMSFHSTPKETLYNASRFIQEGKADAVKLEGGSKRKNMIEALIDAEIPVMGHLGLTPQSKNVMGGYKIQGKTLELATKLLEDAVLLDELGCFAIVLEGVPSVLAETISENISIPTIGIGAGVNVDGQVLVYHDLIGMKSKEYIDAKFVKRYSNQYEDVLESMKSFKKDIENRDFPTENHSYEAGELTEENIKEWKKEVKKILS

SEQ ID NO: 108331 - protein, 271 aa, Unknown
  Bacterial polypetide isolated from the Sargasso Sea
MSTKSNKKIVTLSTLNKFKKNSEKFTCLTAYESTMASVISSAGVDVILVGDSLGMVIQGHDSTLPVTMDQLIYHLECVVKGNNGSHIMADMPFMSYSTDDLGLENAKRLMQAGANSVKIEGGQWISKMAQVLSDRGIPVCAHMGLTPQTINRIGGHRVQGRDPSQKEKIINEAIALEKAGASMLLLECVPGELAKTITKELKIPVIGIGAGVHTDGQIMVVHDLLGISCLDKPPKFVKNFMKTSTSISGAIKRYVKDVKNNKFPSKVHTFD

SEQ ID NO: 108332 - protein, 264 aa, Unknown
  Bacterial polypetide isolated from the Sargasso Sea
MSKVTSSTLLKYKQEGRKFTALTAYDASFASAFDGEGIDVLLVGDSLGMVLQGHDDTLPVTTAEIAYHTRCVRRGIERSLLIADMPFMSYATPEQAMENATALMQAGANMVKLEGGHWLLETVTKLTERGIPVCAHLGLTPQSVHVFGGFKVQGRDAENAQRILDEAKALEAAGAQLLVVECIPASLATAITQALTIPVIGIGAGASTDGQILVMHDVLGISSGYIPRFSKNYLKQTGEIRSAVRAYIEEVANGTFPSADHTFN

SEQ ID NO: 108333 - protein, 213 aa, Unknown
  Bacterial polypetide isolated from the Sargasso Sea
GSVLYNYKSTREVSLNTMIEHSKSVRLGVKKSLMVVDMPHNTYRNSKEALKNAKQIISKTKCDAVKLEGGKKIYEIIKILVKNNIPVMGHLGLLPQSAKNFKFKGKQNYEREKILKEAKLLETAGVFSMVLECIESSLAKNITKTIKIPTIGIGASNNCDGQILVFDDLIGLNPINVRFVKKYTNIRKDISKAVLNYAREVRNMKFPLKKHSY

SEQ ID NO: 108334 - protein, 239 aa, Unknown
  Bacterial polypetide isolated from the Sargasso Sea
VLGHDDTLSVTIDEMLHHVKAVTNAKPTSLVVADMPYMSFHSTPKETLYNASRFIQEGKADAVKLEGGSKRKNMIEALIDAEIPVMGHLGLTPQSKNVMGGYKIQGKTLELATKLLEDAVLLDELGCFAIVLEGVPSVLAETISENISIPTIGIGAGVNVDGQVLVYHDLIGMKSKEYIDAKFVKRYSNQYEDVLESMKSFKKDIENRDFPTENHSYEAGELTEENIKEWKKEVKKILS

SEQ ID NO: 108335 - protein, 287 aa, Unknown
  Bacterial polypetide isolated from the Sargasso Sea
MKKTVPYITNLKNSRVVSMMTAYDYPSAKAVSEAEIDIILVGDSLAQVVLGHDDTLSVTVDEMLHHVKAVTNAKPSSLVVADMPYMSYHVSKEDTIKNAGRFIQEGKADAVKIEGGKKREETIQALLEAEIPVMGHLGLTPQSKNLMGGYKVQGKTLDLARQLFEDALLLQELGCFSMVLEGVPTVVAQSISENINIPTIGIGAGNLTDGQVLVLHDLLGMKSKEYIDAKFVKRYDQQYEATLKALKTYKDEIEKRDFPTDDYSYDMGNDINDSLKEWKKEIKKILS

SEQ ID NO: 108336 - protein, 277 aa, Unknown
  Bacterial polypetide isolated from the Sargasso Sea
MSFNENLNKSIFYAGSDTFSIRPLERLLNLKYKRITVLTGPPKRQGRGMKIKNNPLAEYAAQHNLETLTPISPNDNSFLEKLAQRKPDALITSAYGKILSEAFLDSFCLGNINIHPSLLPRWRGPSPIESALLEGDKATGVTLMQMTDELDAGPIYQQESIQLLGENSKTLSKKLSLLAADMVQKFLPVFLDGNSDAKHQDENLVTYSKIIKKEHARIDWNETSQTIDKKIKAYYPWPVAHTYLDNKYLRIWDSEALVGDEEKCKPGEIMTPTRKGL

SEQ ID NO: 108337 - protein, 282 aa, Unknown
  Bacterial polypetide isolated from the Sargasso Sea
MRARRASAVRSAGTEEGARGVEKSRLVFLGTPECAADVLGRVLDAAERADARFEVAAVVSQPGRPRGRGRKSAESAPSPVAELAMKRGIAEDRILCPVKANEEWFLDALRALDVDLMVTAAYGNFLPQKFLDIPRYGTLNIHPSLLPQWRGAAPVQRALESGQAETGVSVAYTILKMDAGPVLRQIKKPLNGDEKAPEMLTELFEKGVEALLEELPSVFAGEAAARAVPQDEKTLSHAAKVSPDEGELDFKKQSALECHNKVRGFAGWPGTKAVLKIAQTGR

SEQ ID NO: 108338 - protein, 285 aa, Unknown
  Bacterial polypetide isolated from the Sargasso Sea
MILKNRIIFFGTPSFAVVCLKELLEQNFNILAVVTTADKKAGRGKKLRSSEVKNFALQNGLNLFQPKNMKDDLFIEKIKSLKPDFIIVVAFRMIPKIIWEIPDIGTINLHASLLPNYRGAAPINWTIINNEKFTGVSTFFINEKIDSGDILLQKRIEISEKETAGSLHDKLSLQGSKLLCETINKLSKNKIEAKPQNFSHGVKLAPKINSDNSHINLKKRLDEINSMIRGLSPSPGAWVELYNKKTSIIMKIFDSDTVIFDNEHKHSKLIIKDKKILISHKEGIS

SEQ ID NO: 108339 - protein, 306 aa, Unknown
  Bacterial polypetide isolated from the Sargasso Sea
MKVLFAGSPESSARILNSLVKEGFKVVGAISQPDKRSKRGKIKEASPVSREAFKLGIPTFKPISLDRYFKNEIDVLDFDFLLVSAYGKILPDWLLESPNISPVNIHFSLLPKYRGASPIQTAILNGDNKTGISIMKMIQSMDKGPVYCIHETEILRDENKRELEDKLTSLCIKNIATDLNNIFHKRLSPAEQNDAEASYCKKINKLSGRVEFSKENTANIIQKHKAYIGWPGLYFEKNNTVIKIHGLEEYKGNKGSHKVNEFRFLSSGLVVKTIDSHIVITHLQFPGKRIIPAIDAANSYAKFFEG

SEQ ID NO: 108340 - protein, 224 aa, Unknown
  Bacterial polypetide isolated from the Sargasso Sea
NSSSIWTILPKGILHVCKKGFINIHASLLPKLRGAAPIQRSIMNLDNETGISIMQINEKLDQGKVYSQYKININRDDNAEDLSFRLSNLAAEKIVDDIESIFANKKNFFEQDHSKATYANKINKEEGRIDWNDKAENIIGKINGLYPVPGAWFYFDGARYKILKASVSKNSATPGKVINDNIEVSCGTNSIKILEIQREGKKIQNIKDFILGTKIKKGVNLINA

SEQ ID NO: 108341 - protein, 326 aa, Unknown
  Bacterial polypetide isolated from the Sargasso Sea
MPSNENLNKSIFYAGSDTFSVQTLQRLQSLKYKRITVLTSPPKRQGRGMKIKNNPLAEYATQHDLETLMPINPNNNNFLVKLAEKKPDALITSAYGKILSEAFLDSFCLGNINIHPSLLPRWRGPSPIESALLEGDKTTGVTLIQMTDKLDAGPIYQQESIQLSGENSRALSKKLSMLAADMIEEFLPVFLDGNSTAKDQDESLVTYSKIIKKEHARIDWNETSQVIDKKIKAYYPWPVAHTYLDDKYLRIWDSEALVGDEDKSSPGEIMDINKEGVIVKCNDSKIILKGVQPEGKKEMLAADFARGNKFKRQTIFMIRRLQNATP

SEQ ID NO: 108342 - protein, 261 aa, Unknown
  Bacterial polypetide isolated from the Sargasso Sea
MDAGYEIAAIFTHTDNPGEKAFFGSVSRLAASAGIPVYAPDEVNHPLWIERISQLAPDVIFSFYYRHLLSDEILSLAPKGAFNLHGSLLPKYRGRAPLNWVLVNGETETGVTLHRMVKRADAGAIVAQQRVAISPDDVALTLHHKLCQAARQLLEEALPAIKTGDYAEHPQQEAEATCFGRRTPEDSFLDWNKPAAELHNQVRAVSDPWPGAFSYVGTQKFTVWSSRVCKNDRAAQPGTVISVSPLLIACADGALEIITGQ

SEQ ID NO: 108343 - protein, 309 aa, Unknown
  Bacterial polypetide isolated from the Sargasso Sea
RCGSNARQLNPEYIFSFYYRNLLSEPLLATARKGAFNLHGSLLPKYRGRAPANWVLVNGETETGVTLHRMVKRADAGAILAQQKVTIERSDTGLSLHAKLRDAATALLRDALPQLAQGKLSETAQDESKATYFGRRTAADGKLDWKKPAEQLFNLVRAVTQPYPGAFCAVGEHKLIVWQADVVKGNEGLAPGRVISVNPLRIACGEDSLVVKFGQRNENGLYLAGPSLADELGLVDGSVLRGAESGRKPRRTRVLILGVNGFIGNHLSERLLRDDRYEVYGLDIGSDAIERLRSHPKLHYVEGDISIHT

SEQ ID NO: 108344 - protein, 271 aa, Unknown
  Bacterial polypetide isolated from the Sargasso Sea
MKVLFAGSPESSAQILNSLVKEGFKVIGAISQPDKRSNRGKGKEASPVSKEAFKLGIPTFKPASLDKSFKKEIELLDFDFLLVSAYGKILPDWLLMSPNVSPVNIHFSLLPKYRGASPIQTALLNGDKKTGVSLMKIIQGMDEGPVYCFHETEILRDENKRELEDRLTSLCIKNIAADLVNIFHKKLLPAVQNDSEASYCKKINKLSGKVEFKKENTADIIQKHKAYIGWPGLYFEKNNKVIKIHGLEKYKGGNTDLKVKGFRFISSGLLV

SEQ ID NO: 108345 - protein, 106 aa, Unknown
  Bacterial polypetide isolated from the Sargasso Sea
MIDKKIIFMGTPDIAAQHLNILIKNKLNLVGVFTQPPRKKNRGMRVEESAVHQIAKKNNIQIYYPSTIDYKVIELTKSLQPDLIIVVAYGIILPTSFINIPEIWMH

SEQ ID NO: 108346 - protein, 138 aa, Unknown
  Bacterial polypetide isolated from the Sargasso Sea
ENLGTERIRTTPQPGTGVTYARQLTREEAWLNWRRPAQVLARQIRAFNPWPLARTTLDGIDYRIHQARSQPGDTTATPGTITVTDGGALQVQTGEGTLEVLTLQRPGGKALETSTFLNGHSIRSGSVFTLPIDRHAQR

SEQ ID NO: 108347 - protein, 215 aa, Unknown
  Bacterial polypetide isolated from the Sargasso Sea
MSSGKVIFMGTPEISSIYLQSLIDSNQNIIAVFTQPPRKKGRGMKIQQSPVHKLSVDNSISVFTPTDLNLNTALNEIKNLNPDLIIIMGYGLKIPSNILDLPKYGCINIHVSLLPRWRGASPIEYTLLNGDKEAGITIFKLIEKMDAGPIIFQDSIEIDNKINKDELTNKLNNIGKKSLIRILPNIFNNKIKFKIQDNSKVTYTKKISSDMRKID

SEQ ID NO: 108348 - protein, 274 aa, Unknown
  Bacterial polypetide isolated from the Sargasso Sea
MKILYAGSSQSSSLILESLVASSNEVIGVISQPDKRSKRGAAIEPSYVSSVAEKNNIPVYKPQTLDENFKDTILKLNFDILLVVAYGKILPAWLLKSPLKESINIHYSLLPKYRGASPIQSALLNDEKVTGISVMKMTDGLDEGPVYVLHKQKILHKDNRNTLEDKLTSLAIKNIDKDLSDIYLGKLAPIEQGSKNISYCKKINKLSGKIALDQEESDSVFRKYKAYYDWPGLYFEFKNLKIKIHGIDLKVKKDTNFVKNKILFRMIIYCMPKQ

SEQ ID NO: 108349 - protein, 172 aa, Unknown
  Bacterial polypetide isolated from the Sargasso Sea
IKNNLLTLQPENLKDPEFINQLQELNADLFVVIAFRMLPEVVWGMPKKGTINLHASLLPQYRGAAPINWAIINGEKESGVTTFFIEKEIDTGKIIEQLKLEIGPNTNVGDLYSQLIVLGKKIIGSTVDKISSNNFISIDQKSIINGEIKNAPKIFKKDCIINWNETITKYSQ

SEQ ID NO: 108350 - protein, 78 aa, Unknown
  Bacterial polypetide isolated from the Sargasso Sea
MQRKIGFMGTPDFAVPILKNIYQNGYEVVSVYTQPPKKSNRGQKKLEKSPIHLFAETLNFNVRTPDQLKNNILEYDHI

SEQ ID NO: 108351 - protein, 257 aa, Unknown
  Bacterial polypetide isolated from the Sargasso Sea
MKSLKIIFFGSPYYSVPLLDKTIELGHDVSLVVSQGTTKTRRGKIIKTSVHQCCEEKNIKYILPDRFTDPVIKKIMVSNYDLGIIYAYGKLVPISLIEHCKYGIMNLHCSLLPSYRGAAPIQHALINGEDYTGYTYFRINEKLDEGNVILQERYRILRSDNCSSIQDSLTMLAVNNLSVAINRLVQREFLVSSQSDKISYANKIKKEDSIFAWDLDVVTIFNRIRALSTWPVARNSYLEKYQNIDANMLTRSWYDFW

SEQ ID NO: 108352 - protein, 244 aa, Unknown
  Bacterial polypetide isolated from the Sargasso Sea
MKIIFFGSPYYSVSLLEKIIELGYDVSLVITQGSTKARRGRIIKTAVHEYCEDNKITYLIPSSLDDSVCNKIMNTKFDLGVVYAYGRLIPKRLISHIKYGIMNLHCSLLPSYRGAAPIQHALINGDRQTGYTYFKINEKLDEGKIILQEKYKILKKDNCSTIQDNLTKLAIDKLPLAISMITDGKNMDNNESYRASYANKIKIEDAYFDWNTDVETIFNKIRALNVWPIARANIIWRGSKNIGG

SEQ ID NO: 108353 - protein, 276 aa, Unknown
  Bacterial polypetide isolated from the Sargasso Sea
GQKLTPSPVKECALENNIPVFQPARLGDNEATLMRRENIDVMIVAAFGQIVPRAILEAPRLGCVNIHASILPRWRGASPIVQSILSGDKDSGVSLMQMDEGLDTGSVFMTKKVPVGQMTQGMLENALSHAGSVCLKEALTNLEAWLSKAQPQPEDGITYAPKVKKAQAQVNWSQSGDVVCCHVRAYNPAPMAFTFLDDLRCRIIAAQPFSDDVLTSPIQAGSVLDVTAAGILVACGQGGVLIEQIQLPGKAVLHVGEHPRLCRDLFYGKRFAFKVG

SEQ ID NO: 108354 - protein, 97 aa, Unknown
  Bacterial polypetide isolated from the Sargasso Sea
MALKIIFMGTPNFSVPILDSIYNSKHKIISVYTKSPKKKYRGQKKNYTPIHEYAIKNKIDIRYPEKLDTTEELNFIKELKPDVVVVVAYGKIIPSNF

SEQ ID NO: 108355 - protein, 127 aa, Unknown
  Bacterial polypetide isolated from the Sargasso Sea
MPKKIIFMGTPMFAVPILKSLYQNGFPINLVYTQPPQKSHRGQKINKSPVQGISETLNIEFRSPQNLKNNTEEYEFLKKMDADLAIVVAYGQIIPKEFLSLTKKGFINIHASILPKMERCRTHSESY

SEQ ID NO: 108356 - protein, 114 aa, Unknown
  Bacterial polypetide isolated from the Sargasso Sea
MRDKKIIFMGTPNIAAQHLNILIEKNLNIVGVFTQPPRKKNRGMRIVESEVYQIAKKNNLKLYLPTSIDRNTIELTKSLEPDLIIVVAYGIILPAPFHDIPKYGSINVHVSLLP

SEQ ID NO: 108357 - protein, 263 aa, Unknown
  Bacterial polypetide isolated from the Sargasso Sea
FIDLAKGKKRMGGSILAQVNKQMGGDSPDVECLEEMPNFVEAIYKLLTDKKILAYHDRSDGGLITTLIEMSFASRLGLEINLDSVLEDNKKLIDFLFNEELGAVIQVHNKDLDCVHYLLDESGLKDHSHNLGCISAEKEINFSYRDKKILSFPLKTLLENWHKVGFEIQSLRDNPVTAEAEFRNDTDINNSGLRPKINFSIPKKIQLNSTRPRVAILREQGVNGQNEMAAAFNEVGFDCIDVHMTDLISARHTLAEFEGLVAC

SEQ ID NO: 108358 - protein, 105 aa, Unknown
  Bacterial polypetide isolated from the Sargasso Sea
MKIGVLASGNLGLDVLGKINSDYDISFVFTDNSSNDILKLCKENKIPFFVGNPRNGIGYNFIKNICVDIIVSVNYLFLIEKDIIQHSRLITFNIHGSLLPKYRGR

SEQ ID NO: 108359 - protein, 234 aa, Unknown
  Bacterial polypetide isolated from the Sargasso Sea
FLEKLDADIAIVVAYGQILPKSILHVCKKGFLNIHASLLPKLRGAAPIQRSIMNLDKETGISIMQINEKLDQGKVYSQYKIKINKDDNAEDLSLKLSNLAAEKIIDDIEGIFENKKNFFEQDHSKATYANKISKDEGRIDWNDKAENIIGKINGLYPVPGAWFYFDGVRYKILKASISKNIATPGTVINNNIEVACGTNSIKILKIQKEGKKIQNVKDFILGTKIKQGVNLINA

SEQ ID NO: 108360 - protein, 115 aa, Unknown
  Bacterial polypetide isolated from the Sargasso Sea
MIFMGSSSFCIPILKTLLKTNIDVMRVYTQPPKLAGRGKKLFEVPVSSFARDMGLEVCQPESFLLPSEVENLRLMQPDIILVVAYGLLLPKKVLDIPKLAAINLHASILPKWRGA

SEQ ID NO: 108361 - protein, 87 aa, Unknown
  Bacterial polypetide isolated from the Sargasso Sea
MPKKIIFMGTPMFAVPILKSLYQNGFPINLVYTQPPQKSHRGQKINKSPVQGISETLNIEFRSPQNLKNNTEEYEFLKKMEADLAIV

SEQ ID NO: 108362 - protein, 268 aa, Unknown
  Bacterial polypetide isolated from the Sargasso Sea
GLKIRTSAVKQYALDNGLKILQPTNLKSEEFLSELKGLNADLQIVVAFRMLPEIVWNMPPLGSINLHASLLPEYRGAAPINWAIINQEKETGITTFFIRQEIDTGDILMQKSCQIDSRETAGSLHDKLMILGAETLVRTIKMIADKDFKMQAQGININSKKAPKIYKDDCRIKWDSTAKEIDHFIRGLYPYPIAWTSLNNKSLRIYKANPSQINTLKPGELSIKNKKVYVGTGTFDIELINLQIEGKKKMSQADFINGFRVDESIILK

SEQ ID NO: 108363 - protein, 247 aa, Unknown
  Bacterial polypetide isolated from the Sargasso Sea
SDTVIKKIMSSNFVLGIIYAYGKLVPISLIEHCKFGIMNLHCSLLPRYRGAAPIQHALINGEEYTGYTFFRINEKLDEGNIILQERYQILKSDNCSSIQENLTELAVNNLSVAINRLIQGEFLDSDQPDEISYANKIQKEDSIFYWDLDVVTIFNRIRALSTWPVARTNLLGEDIKIIDANYIQQDHDMTFGEIKTFSKDELLVSAKGGYISINKLQLEGKKIITNRDLFNSNSEFKDRLLNNLGLN

SEQ ID NO: 108364 - protein, 273 aa, Unknown
  Bacterial polypetide isolated from the Sargasso Sea
MNKKIVFMGTPNFAVPVLKNIYQNGFEISAVYTQPPKKSYRGQKITKSPIHKLAETLNLEVRTPEKIKNNIEEYEYLKKINASLGVVVAYGQLLTNNILNLSKNGFINLHASILPLNRGASPIQRSIMNLDKQTGISVMKINEKLDSGDVSNIFKIDILENENAQSLSERLSLLAAEKISDVIDKIFDGTVIYEEQNHKNATYAKKIDKSEGKINWNEDAKKIIGQINGLFPYCYFIFNGVRYKILKALLSGSMGKPGHVLSEHLEIACGNIL

SEQ ID NO: 108365 - protein, 220 aa, Unknown
  Bacterial polypetide isolated from the Sargasso Sea
VVAFRMLPEVVWNMPPLGFFNLHASVLPQYRGAAPINWAIINGEKETGVSTFFLKHEIDTGKIIFQEKETVHSDDTVGSLYDRLMKRGGQLVVKTVQAIEDGDYPEEEQVATTALKHAPKIFREDCEIDWNRSSEEIRNFVRGLNPYPGAWTFFGDLNFKIFEVKPSEFASKKPIGEVDTDNKTFIRIKTNDHSVEVTDLQLQGKKRLRVEDFLRGFNFD

SEQ ID NO: 108366 - protein, 121 aa, Unknown
  Bacterial polypetide isolated from the Sargasso Sea
MAKKIIFMGTPMFAVPILKSLYQNGYPVTCVYTQPPQKSHRGQKINKSPIQGISETLNLEYRAPSTLKENKEEYEFFKSVDADLAIVVAYGQIIPKEFLSLTKKGFINIHASILPKWRGAA

SEQ ID NO: 108367 - protein, 189 aa, Unknown
  Bacterial polypetide isolated from the Sargasso Sea
MSPKKVKCAVFISGTGSNLKSLIHFSKKKKSPISVNLIISDNSKAKGLKFGKIYKISKKVINYKNRIIAENKIISEIKNNNIKFICLAGFMRILSKNFIRNFKGKILNIHPSLLPKYRGLNTHQRAIANNEKYSGCTVHFVSSKLDSGKIILQRKVKISKLDTAKSLAKKVLIQEHKLYPKAIRKVFSL

SEQ ID NO: 108368 - protein, 228 aa, Unknown
  Bacterial polypetide isolated from the Sargasso Sea
KADLIIVIAYGLIIPNEILNLPIFGCINIHLSLLPRWRGASPIEHTLLSGDSQSGITIIKLIKKLDAGPILAQEKIIVEKEINKDDLIDKLKKIGSTLLINNLPKLFNNEIILRNQTEQYATYAGKINSEMRKLDFRATSINVYNKIRAYSPSPGAWFKYKNERIKIISAKINKIKAEPQTILNKNFEIGCLEGSISPIYLQREGKKVMSIKEFLRGFDLVVGDKLDE

SEQ ID NO: 108369 - protein, 279 aa, Unknown
  Bacterial polypetide isolated from the Sargasso Sea
MKVLFAGSPESSATILNALIGEGFEVVGVISQPDKRSKRGKGKEASPVAKEALKLQIPTFKPISLDKSFKKEIELLDFDFLLVSAYGKILPDWLLESPNISSVNIHFSLLPKYRGASPIQTAILNNDKKTGVSIMKMIKEMDEGPVYCFHEIEILGEETKIDLEKKLTYLCIKNISKDLNNIFHKKLDPIEQNNSETSYCKKINKLSGKVEFTKENAADIFQKHKAYIGWPGLYFKKNNTVIKIHELEKYQGNREDLKIKNFRFVSNGLAVKTMDTVIV

SEQ ID NO: 108370 - protein, 253 aa, Unknown
  Bacterial polypetide isolated from the Sargasso Sea
DKKSGRGLKMNVSEVKSFSSDNNIPIKQPENLTNEDFLNEISSLGAELFIVVAFKKLPKEVFSIPALGTINLHASLLPDYRGAAPINWVLINNERITGVTTFFINEKIDHGDIILKQEILINDNDDFKSLYNKLSVIGSEVLLKTIKIVSSGKAKIQKQGDSKDLNLAPKLNARNTKINWNDNTDKILGMIRGLSPRPGSWTTLKNGDKEIRVKILKASLSSRRSFSESSIGKVLINNNQIHIYTKDGVINCT

SEQ ID NO: 108371 - protein, 175 aa, Unknown
  Bacterial polypetide isolated from the Sargasso Sea
GEYIDMKYITTDRVTLIYELPLAEVVTDFFDQMKTRTQGYASMEYSLIGYRKNQLVRLDVLINGERADALTTIVHQDKAYNVGKALVEKLKELIPRQQFKIPIQASIGSRIIASTSISAIRKDVLAKCYGGDISRKKKLLKKQAKGKKRMKAMGKVDVPQEAFMAVLKLNDGGGS

SEQ ID NO: 108372 - protein, 596 aa, Unknown
  Bacterial polypetide isolated from the Sargasso Sea
MKHIRNFSIIAHIDHGKSTLSDRLIQVCGGLSDREMDAQVLDSMDLERERGITIKAQSVTLEYKAKNGETYQLNFIDTPGHVDFSYEVSRSLAACEGALLVVDAGQGVEAQTLANCYTALDMNLDVVPILNKIDLPQADPERVAAEIEDIVGIDAMNAVRCSAKTGVGIDEVLEVIVDQIPPPEGDPEAPLQALIIDSWFDSYLGVVSLVRIKNGVLKKGDKFKVMSTGQNHTADRVGIFTPKQTDKTELKTGEVGFVIAGIKEIHGAPVGDTLTLAKHGAEKPLPGFKKVKPQVYAGVFPISTDEYENFRDALNKLSLNDASLFFEPESSSALGFGFRIGYLGLLHMEIIQERLEREYDLDLITTAPTVVYEVLLTSGETIYVDNPADLPAINNIEEMREPIVEANILVPKEYLGNVITLCIEKRGTQVNMVYHGNQVAVTYHLPMAEVVMDFFDRLKSTSRGYASLEYNFIRFDPADMVRLDILINGDRVDALAMIIHRSNIRHRGLALVEKMKELIPRQMFDIAIQAAVGSQIIARSTVKALRKDVTAKCYGGDVSRKKKLLNKQKEGKKRMKQVGNVEVPQEAFLAVLKLNE

SEQ ID NO: 108373 - protein, 487 aa, Unknown
  Bacterial polypetide isolated from the Sargasso Sea
MHAARVQPPHHRHDQRVRRSQHVHPRPRVHVRAETDRNRGRARGALRRRVEVLAVQPDPAELRPRDGLLGRAAAVAVVHRRDPVARLSRVVRAAARATLHRRRGSARRVHAVCHHVLPARRDHLRARPARRIRRPHLPAGACTAALPDPGRARAARRRAGSAGRRKPHGCHAMKPRAVVFAYHNVGVRCLQVLLARGVDVALVVTHEDNPNENIWFGSVASVAAEHGIPVVTPADPADPALRRAVSDAQPDFIFSFYYRHMLPVDLLAIAPKGAYNMHGSLLPKYRGRVPTNWAVLNGESETGATLHEMAAKPDAGAIIGQTAVPILPDDTATQVFDKVTVAAEQTLWRVLPALLAGEAPHLPNDLATGSYYGGRKPEDGRIDWSKPAAQVYNLVRAVAPPYPGAFTDVDGTRFVIARARLAAPGSAAAAAAADLPPGLHVSDNALFGVCGDSRALSILELWQQRDGSETVVTPAEFAQFIHSSRHS

SEQ ID NO: 108374 - protein, 316 aa, Unknown
  Bacterial polypetide isolated from the Sargasso Sea
MLDNQHPNKTIVYAGSDAFSIQPLKKVLSLKYKKVTVLTRPPKRQGRGMKEKNNPLAEFALHNNLETLMPESPNDNNFLSKLEEKKYDLLISCAYGRIMSERLFGCFHMGNINIHPSLLPRWRGPSPIESSILEGDKITGVSLMQMTKELDAGPVYEQRSINMNGENTKTLSEKLALLAGDMIESFLPSFFEGDIKAKQQDERLVTESKIIKKEDARVDWNETSEVIDSKIKAYYPWPVAHTYLDDKYLRILDSEAILEDEDGTDPGQIVDINNKGVTVKCKRGKIILKGIQPEGKKEMLAADFARGNKLEGKRFS

SEQ ID NO: 108375 - protein, 947 aa, Unknown
  Bacterial polypetide isolated from the Sargasso Sea
MNRPDPDQLLDKLQRDEEKQRRGQLKIFFGASAGVGKTYAMLQAARQRLQEGVDVVVGIVETHGRSETAALLDGLDVLPLARIDYRGRTLAEFDLDGALARQPQLILVDELAHSNVQGARHLKRWQDVYELLDAGIDVYTTVNVQHLESLNDVVGAITGIRVWETVPDRVFDAADEVTLVDLPAEELLERMRDGKVYLAQQAERAVRNFFRKGNLIALRELALRRTADRVDAQMREYRADRSIQRIWQARERLLVCVGPGPEAPTLVRAAARLAASLKADWIAVYVETPRLQRLPDARRQRTLDALKLAAELGAETATLAGADAVAALIGYAKVRNVSKIVAGGSPKVGLVRRFVRPFGEKLAERAGDVDLMLIRASASDEARAAPLDARARDWRDAFAQFGTHRSPPRHYVYAAAICAAITVVASLVSERLDLTNLVMLYLLGVVFSAVRLGRGPGVLQSFLSVAAFDFFFVPPRMSFSVSDTQYLLTFFGMLLTSLVISHLTSTLTRQASVAQRRERRTGAIYAMARELGAALTTEQIVEIGSRHVGEVFRARVAFLLPDSADKVRQKIEEPDAAVTLTGADLDSDVGQWVYDQQKPAGRGTDTLPATAALYLPLKAPMRTRGVLAVASREPRELEVPEQQRMLDAFAAQIALALERVHYVEIARDALVNMESERLRNSLLSAISHDLRTPLTTIVGFSSMLANGRAAAQGGDAAAAERFAQREGELVDAIHDEALRMTGIVTNLLDMARLQAGSLQLKRQWSLLEETVGAALAACKRVLARHPARVVLPADLPLLQMDAVLMERLFTNLFENAAKYTPADTPLDIGAERVTDDGLPFVRVLVDDYGPGLPAGMETRIFDKFTRGEKESATPGIGLGLAICRAIVEAHGGKIGAFNRTAPDGHVTGARFWFTLPVETPPAAPAVPDDEPEVPGASSPSESLPDHE

SEQ ID NO: 108376 - protein, 320 aa, Unknown
  Bacterial polypetide isolated from the Sargasso Sea
MPIASVQASESCTPLTGKEAGLDTGRSSAARCLPGINPLQDQQWHLLNSGQNAFSSRGGVAGNDLNLWWAHRTGVQGQGINVAVVDDGLAIAHPDLADNVRPGSKNVVTGSSDPTPTDPDSAHGTSVSGLIGAVDNRIGTLGVAPRVQLQGFNLLDERSKQLQKDWIYALGGSTATADNRVFNQSYGMSLVDPQSASGLDQVQLDRLFEQQTQQAQGAAYIKAAGNGFNRIAAGDYMFSRTGVLPKLPFENSNIDPSNSNFWNLVVSAINADGVRSSYSSVGSNVFLSAPGGEYGTDAPAMVTTDLPGCDMGYNRTDDPS

SEQ ID NO: 108377 - protein, 255 aa, Unknown
  Bacterial polypetide isolated from the Sargasso Sea
MWDNQHPNKTIVYAGSDAFSVQPLKKVLSLKYKKVTVLTRPPKRQGRGMKEKNNPLAEFALQNNLETLMPENPNDNGFLTKLEEKKYDLLISCAYGRIMSERLFGCFHMGNINIHPSLLPRWRGPSPIESSILEGDKITGVSLMQMTEELDAGPVYEQRSINMNGENTKTLSEKLALLAGDMIEDFLPSFFKGDIKAKQQDERLVTESKIIKKEDARVDWNETSEVIDSKIKAYYPWPVAHTYLDDKYLRIWIQK

SEQ ID NO: 108378 - protein, 410 aa, Unknown
  Bacterial polypetide isolated from the Sargasso Sea
MQRNSSQHEDSTSVRTYSFEECEVLRKRVADLQALGLDNPFLLAHESVTGKHASIRGKDVISFTSFDYLGLTSHPAVTSAAKTAIDQFGCGATASRMVGGNTTLLNALDKAIADFIGTERATVFPCGFGTNASVFGHLFNAQDLILYDELAHKSITEGAMTSQAASRSFRHNDFDQLDGLLQDIRHKYRRTVIAIEGVYSMDGDYPDLPEFIEVKQRHDALLYIDEAHSLGTMGDNGRGIAEFFGIDPKTVDIWMGTISKSLGSGGGYLAGSRELIDYLGLTTPAFVFSTACSPPNTAAALASLQTLQAEPWRVRQLHERSALFLSLAKEAGLDTGPSLNTPVIPIIVGSSQKALAVSQRLLAAGINARPILYPAVRESAARIRFFITCEHTDSDIHQAVKAVTEAVATC

SEQ ID NO: 108379 - protein, 316 aa, Unknown
  Bacterial polypetide isolated from the Sargasso Sea
MSSNDNLNKLIVYAGSDTFSIQPLQRLLSLNYRRIKVLTRPPKRQGRGMKIKNNPLAEFAIQHNLETFLPERPNDNRFLEKLAERKPDVLISSAYGKIMSEAFLNCFSLGNINIHPSLLPRWRGPSPIESTLLEGDNITGVSLMQMTDELDAGPIYQQESIQLSGENSKTLSEKLSLLAADMVQKFLPVFLQGNSNPKHQDESLVTYSKIIKKEHARIDWSETSEVIDKKIKAYYPWPVAHTYLDDKYLRILDSETLMGDEDKSPPGKIVNANKKGVVVKCKHSKIIIKGVQPEGKKEMLAADFARGKKLEGKQFS

SEQ ID NO: 108380 - protein, 175 aa, Unknown
  Bacterial polypetide isolated from the Sargasso Sea
MNIIFFGSSDESIQLLDEISKNHTILAIVSKPLPKNSKRRKFTNPKLFEYTNKNNILFLDPLKLDVSFVEKIHSLEPDLSIVMSYGKILKKDLIDIPKYGTINIHPSLLPKYRGPSPVQSTILNQDNETGFTVIQMDEGVDTGDILYISKKYDLGLEETYLELLRFLFNESSKNI

SEQ ID NO: 108381 - protein, 308 aa, Unknown
  Bacterial polypetide isolated from the Sargasso Sea
MASRRIIFMGTPEISSIYLQSLIDSDQNIIAVFTQPPRKKGRGMKIQQSPVHKLAEDNSISVFTPTDLNLNISLNKIKELKPDLIVIMGYGLKIPKNILDLPEYGCINIHVSLLPRWRGASPIEYTLLNGDTEAGITIFKLIEKMDAGPIIFQDSIEIDNTINKDDLTSKLNNIGKKSLIRILPNIFDNKIKFKDQDNNKVTYTKKILPDMRKLDFNENVETIHNKIRAFSPYPCAWFELNNERIKIIKSNFVKGNWLPSTIINDQFHIGCTFGKICPQIIQREGKKPMLLSDFLKGYNFEIGTKINA

SEQ ID NO: 108382 - protein, 215 aa, Unknown
  Bacterial polypetide isolated from the Sargasso Sea
TWQPSLKKFAKKNGFKITSLKNLYKIENLIFFSIEFEKIINVDKFKSNELFNLHFSLLPKYRGCHTNFYQIYKGERYSGVTLHKINNGIDEGDIIDQKKFKVKINDTAFDNYFKLMKCSVILFKRNIVNIIKTKYNTKKQNLSKGDYYSRSSVNYKKILKLNMKKPTLKFHNKIRSLIFPPYQLPIVNGIKVKKSFYKNNKIYLIESSTNKFKNR

SEQ ID NO: 108383 - protein, 192 aa, Unknown
  Bacterial polypetide isolated from the Sargasso Sea
MNILFAGTPKSSADILQCLIDNDDFNIVGALTQPDKKGKRGNKLLESEVSSLAKKYNIPLYKPSDLKDSHILDKIKLIKVDYLIVIAYGKILPDWLIEIPAICSINIHFSLLPKYRGASPIQSALLNGDKKTGITYMKISSELDAGDILSSYEIDIKDSDNKLILEENLTSLCVDSISEVLNNISNNKISIK

SEQ ID NO: 108384 - protein, 420 aa, Unknown
  Bacterial polypetide isolated from the Sargasso Sea
QVPVSDYGLCKTSFAGKSGEAMAIGERTPLSLISSKSAAKISVAEVITNIIPSGIAKLSDIKLSANWMGSPGKLDGNKDLFEAVEAIGMDLCPKWNITIPVGKDSLSMSTEWTDVKNDKSVISPLSLIVSGFAAVEDISIATTPQLKADKDTSLIFIDLAKGKKRMGGSILAQVNKQIGGDSPDVECLQEMPNFVESIHKLLTDKKILAYHDRSDGGLITTLIEMSFASRLGLEINLDTSLEDDKKLIDFLFNEELGVVIQVATKDLDCVYDLLDESGLKDHFHNLGCISANKEINFSYRDKKILSFPLKALLENWHKVGFEIQSLRDNPVTAEAEFRNDTDINNSGLRPKINFSIPKKIQLNSTRPRVAILREQGVNGQNEMAAAFNEVGFNCIDVHMTDLISARHTLAEFEGLVACGG

SEQ ID NO: 108385 - protein, 201 aa, Unknown
  Bacterial polypetide isolated from the Sargasso Sea
MNIIYFGTDNNSKLVLEDLVNSENKVVLVITAEDSVRTRGNKKTPSVVKDYCIKNNINCIDKIPDYKQLETLNSDIIIVASFGKIIPMEILETPKYGALNLHPSLLPKYRGPSPVHTAIKNGEEDFGVSIIRLSEDIDAGPIVCQNIYPGSSIILDTEDLTKKLFTLGSKIILNILSSPEVIKNAKEQDHSLSTMTKKIRK

SEQ ID NO: 108386 - protein, 190 aa, Unknown
  Bacterial polypetide isolated from the Sargasso Sea
MINIGVLGSTNGTDLQAILDAIKNKIIDATVKIVVSNRESAFILERAKNHGVDAHYISHKHKTREEFDREVTSLLEKKNVDLVLLIGFMRILSKEFCQKWQDKILNVHPSLLPKYAGGMDTNVHEEVLKNGDTETGCTIHFVTEEVDGGPILIQKSCSVEKDDTIESLKTKVQSLEGQAFIEAINLITNK

SEQ ID NO: 108387 - protein, 187 aa, Unknown
  Bacterial polypetide isolated from the Sargasso Sea
MVKRSVCVFISGKGTNLNNLIKRSRDYNFPINVKLVISNKKDALGIKYAKKNSIPFIFINTKHKRYENLVLNKLKEFKIELICLAGFMKIISKKFLRSYRKKIINIHPSLLPKYRGLNTFEKVLKNQDAKTGCTIHYVNEKLDAGKIIVQKRINVDKKDNIITLKKKTQKLEYLAYPEAVIKIFRNC

SEQ ID NO: 108388 - protein, 300 aa, Unknown
  Bacterial polypetide isolated from the Sargasso Sea
MIKISIIGQSAFGESVAEEILKMNGTIISSIFSSSNPKDPLNQFGIENDLPVKNFKRLRDNEAIESFKSFDVDLLVMAYVTDIVPMEIIKSPRLGTIQYHPSLLPLHRGPSSINWAIINGDKKTGISIFWPDEGLDTGPILLQKEVEIDKSDTTGSLYFNKLFPIGVESIIESIKLVIQNKAPKIDQNENYASYESWCSEKQIDWNDSPNKIYDLIRGCDPQPGSWTIINSKKVFLYDCKMIKNDKKIKKQELYFSDKQVCIGIDENLLVIGRMKTEGEKKISSIEWVRKNKIEGKIFVG

SEQ ID NO: 108389 - protein, 315 aa, Unknown
  Bacterial polypetide isolated from the Sargasso Sea
MNNQHPNKTIVYAGSDAFSVQPLKKVLSLKYKKVTVLTRPPKRQGRGMKEKNNPLAEFALHNNLETLMPESPNDNNFIAKLEEKKYDLLISCAYGRIMSEKLFGCFHMGNINIHPSLLPRWRGPSPIESSILEGDKITGVSLMQMTEELDAGPVYEQRSINMNGENTKALSDRLALLAGEMIESFLPLFFEGDAKTKQQDERHVTHSKIIKKEHARVDWNEASEVIDSKIKAYYPWPVAHTYLGDKYLRIWDSEALLEDEDGSDPGQILGANKEGVIVKCKSGKIILKGIQPEGKKEMLAADFARGNKLEGRRFS

SEQ ID NO: 108390 - protein, 604 aa, Unknown
  Bacterial polypetide isolated from the Sargasso Sea
DAPVSRIRNFCIIAHIDHGKSTLADRLLQDTGTVANRDMQEQFLDNMDLERERGITIKLQAARMNYTAADGEEYVLNLIDTPGHVDFSYEVSRSLQACEGALLVVDASQGVEAQTLANVYLALDNDLEIIPVLNKIDLPGADPDRIKEEVEAIIGLDCDNAIPCSAKTGLGVPEILQAVVDRVPPPKDAVAEPTKALIFDSYYDPYRGVIVYFRVMSGRINCKDKVLLMASKKTYELDEIGIMAPDQKKVDELHAGEVGYLAASIKAVADARVGDTITLLNAPADEALPGYTEAKPMVFCGLFPTEADQYPDLRDALDKLQLSDAALKYEPETSSAMGFGFRCGFLGLLHMEIVQERLEREYDLDLIVTAPSVIYKVNMIDGTEVMVDNPATLPDPQKRESIEEPYVKMEIYAPNDYNGALMGLCQERRGEYIDMKYITTDRVTLIYELPLAEVVTDFFDQMKTRTQGYASMEYSLIGYRKNQLVRLDVLINGERADALTTIVHQDKAYNVGKALVEKLKELIPRQQFKIPIQASIGSRIIASTSISAIRKDVLAKCYGGDISRKKKLLKKQAKGKKRMKAMGKVDVPQEAFMAVLKLNDGGGG

SEQ ID NO: 108391 - protein, 149 aa, Unknown
  Bacterial polypetide isolated from the Sargasso Sea
TDFFDQMKTRTQGYASMEYSLIGYRKNQLVRLDVLINGDRADALTTIVHQDKAYNVGKALVEKLKELIPRQQFKIPIQASIGSRIIASTSISAIRKDVLAKCYGGDISRKKKLLKKQAKGKKRMKAMGKVDVPQEAFMAVLKLNDGGGS

SEQ ID NO: 108392 - protein, 308 aa, Unknown
  Bacterial polypetide isolated from the Sargasso Sea
MLSNENLNKSIFYAGSDTFSIQPLQRLLSLKYKRITVLTSPPKRQGRGMKIKNNPLAEYAAQHNLETLMPISPNDNNFLENLDKRKPDALITSAYGKILSEAFLNSFCLGNINIHPSLLPRWRGPSPIESALLEGDEATGVTLMQMTDKLDAGPIYQQESIQLSGENSKALSKKLSLLAADMVQKFLPVFLDGNSAAKHQDERLVTYSKIIKKEHARIDWNETSQTIDKKIKAYYPWPVAHTYLDDKYLRVWDSEALVGDEEKSKPGEIMDTNKEGVIVKCNGSKIILKGVQPEGKKEMLAADLREGT

SEQ ID NO: 108393 - protein, 596 aa, Unknown
  Bacterial polypetide isolated from the Sargasso Sea
MKHIRNFSIIAHIDHGKSTLSDRLIQVCGGLSDREMDAQVLDSMDLERERGITIKAQSVTLEYTAKNGETYQLNFIDTPGHVDFSYEVSRSLAACEGALLVVDAGQGVEAQTLANCYTALDMNLDVVPILNKIDLPQADPERVAAEIEDIVGIDAMNAVRCSAKTGVGIDDVLEVIVEQIPPPEGNPDAPLQALIIDSWFDSYLGVVSLVRIKHGVLKKGDKFKVMSTGQNHTADRVGIFTPKQTDKTELKTGEVGFVIAGIKEIHGAPVGDTLTLAKNGADKPLPGFKKVKPQVYAGVFPISTDEYENFRDALNKLSLNDASLFFEPESSSALGFGFRIGYLGLLHMEIIQERLEREYDLDLITTAPTVVYEVLMTSGETIYVDNPADLPAINNIEEMREPIVEANILVPKEYLGNVITLCIEKRGTQVNMVYHGNQVAVTYHLPMAEVVMDFFDRLKSTSRGYASLEYNFIRFDPADMVRLDILINGDRVDALAMIIHRSNIRHRGLALVEKMKELIPRQMFDIAIQAAVGSQIIARSTVKALRKDVTAKCYGGDVSRKKKLLNKQKEGKKRMKQVGNVEVPQEAFLAVLKLNE

SEQ ID NO: 108394 - protein, 264 aa, Unknown
  Bacterial polypetide isolated from the Sargasso Sea
MNILFAGTPHSSASILKYLANHENISVKGVITQPNKRGKRGKKLNESPVAIQAKDLELDIFKPKSLDNKELKDNLGKFDDIDYLVVVAYGKMVPAWLISLPRVASVNAHFSILPKYRGASPIQSALLNGDTETGISFIEINSDLDAGDIISLHKIKILSHDNKLTLEKKLTDKCINKIVKTLSDFKDHKILAYLQDNSKATYCKKISKNDSFTNFNEKSLNIINKFRAFYEWPGLAFNHNDITIKIHGIELSKENSEGKPGKIK

SEQ ID NO: 108395 - protein, 151 aa, Unknown
  Bacterial polypetide isolated from the Sargasso Sea
MNKKIVFMGTSNFAVPILKSLYQNGYPISVVYTQPPKKSNRGLKLSKSPINLFAENITLDVRTPQSLKNNNEEELFLNELKPDIILVVSFGQMIPKNLLNIPKYGFLNIHASLLPKLRGAAPIQRSIMNRDKESGISIMKINENLDEGPVC

SEQ ID NO: 108396 - protein, 315 aa, Unknown
  Bacterial polypetide isolated from the Sargasso Sea
MDKQHPNKTIVYAGSDVFSVQPLKKVLSLKYKKVTVLTRPPKRQGRGMKEKNNPLAEFALHNNLETLMPENPNDNNFLTKLEEKKYDLLISCAYGRIMSERLFGCFHMGNINIHPSLLPRWRGPSPIESSILEGDKITGVSLMQMTKELDAGPVYEQRSIKMNGENTKTLSEKLTLLAGDMIESFLPSFFEGDIKAKQQDERLVTESKIIKKEDARVDWNETSEVIDSKIKAYYPWPVAHTYLDDKYLRILDSEAIVEEEDGTDPGQIVDINNKGITVKCKRGKIILKGIQPEGKIEMLAADFARGNKLEGKQFS

SEQ ID NO: 108397 - protein, 303 aa, Unknown
  Bacterial polypetide isolated from the Sargasso Sea
MKIIFFGTPPSCINILNSLLKNHNIVSIVSKKQPEASKRRKFKVSEISLFASQNNIPYMDPSILDSKLENQLKKMNPDLFLVCAYGKILSNDFINIPTYGTINIHPSLLPKYRGPSPIQSTIINLDDKSGYTIIKMDKGIDTGDILFKSDPILLRKDEKYLDLLNFLLSESSKGITQAINNLINNKNIDKQDNERASYTKLIKKSDGLIEWNSSAEKIEARFRAFSTWPQSYSFHNNKRFKILDMEITNLESELCGKISKFENNILVDTKTKKLSIKNIQFDGKKPVDALAYFGNFDLLKTKL

SEQ ID NO: 108398 - protein, 437 aa, Unknown
  Bacterial polypetide isolated from the Sargasso Sea
EILFGKPPKTHLSFQSSNKNSSSLNLPKKITEDLLCEVLRHPTVASKGFLITIGDRSVTGLIARDQFVGPWQVPVSDYGLCKTSFAGNSGEAMAIGERTPLSLISSKSAAKISVAEAITNIIPSGIAKLSDIKLSANWMGSPGKLDGNKDLFEAVEAIGMDLCPKWNITIPVGKDSLSMSTEWSEGKNNKSVISPLSLIVSGFAAVKDIRIAATPQLKADEATSLIFIDLAKGKKRMGGSILAQVNKQIGGDSPDIECLEEMPTFVEAIYKLLTDKKILAYHDRSDGGLITTLIEMSFASRLGLEINLDNVLEDNNKLIDLLFNEELGVVIQIHTKDLDCVYDLLDESGLKDHSHNLGCISSEKEINFSYRDKKILSFPLKALLENWHKVGFEIQSLRDNPVTAEAEFRNDTDINNSGLRPKINFSIPKKIQLNSTR

SEQ ID NO: 108399 - protein, 44 aa, Unknown
  Bacterial polypetide isolated from the Sargasso Sea
MPKKIIFMGTPMFAVPILKSLYQNGFPISTVYTQPPQRSNRGQK

SEQ ID NO: 108400 - protein, 258 aa, Unknown
  Bacterial polypetide isolated from the Sargasso Sea
MRKVIFLGTPNFAVPILNRIIKDELEIICVFTQPPKKSNRGQKILKSPVHNYAEKFNLKIKTPENLKKEENYIKTAEFDLGIVVAYGQIIPEPILESCKFGFINIHASLLPKYRGAAPIQRSLINLEKFTGISFMKLNNVLDSGPIFNQYKIPINKTDNSETLSKKLSELSAEKITKNIELIFSNKATFVDQIHNQASYAEKINKKEGKINWNESAQNILGKINGLFPNPGAWFEFRKERYKITKSELSELSGKPGEV

SEQ ID NO: 108401 - protein, 252 aa, Unknown
  Bacterial polypetide isolated from the Sargasso Sea
GLPVRSPSILKNNIDEYNFIKKIKPTIVIVISYGQIIPKEFLELSEKGFFNIHASILPKFRGAAPIQRAIMSQNTETGISFMKINENLDTGPVLETYKIKIDLNLNATELEKKLSQLAAEKIIENINNIIKGKVKLKEQDHSEATYAEKINKKEGKINWNDNSKKIIGKINGLHPNPGAYFIFNGDRYKILKAEIGNGSGHPGEVLNDKLEIACFNNESIKVIEIQKEGKKIQEIDEFLNGSKIHKGCTLNE

SEQ ID NO: 108402 - protein, 152 aa, Unknown
  Bacterial polypetide isolated from the Sargasso Sea
RATPIGATETTGELHDRLSAMGAEAIVEALAHLDSLTPEPQPNAGVTYAEKIDKSEARVDWSHPAPEVDAHIRGLSPFPGAWTEAGGQRIKLLASTLTDGTGQPGDILDNTLTVACGTGAVRLLRLQRAGKGAQDVETFLRGMALPAGTTLT

SEQ ID NO: 108403 - protein, 94 aa, Unknown
  Bacterial polypetide isolated from the Sargasso Sea
KKFLSLTKTGFINIHASLLPKWRGAAPIQRSIMNLDQETGISIMRIAEKLDTGPVCNNYKIQLDENLNALEISEKLSNLAAEKILDNVYDILED

SEQ ID NO: 108404 - protein, 279 aa, Unknown
  Bacterial polypetide isolated from the Sargasso Sea
VALDQDFPVFAPEFPSGEAFLEEIGQLGPDISVVVAYGHILRPEVLDLPPMGSINVHASLLPELRGAAPINWAIARGFSETGVTIMRMAEGMDSGAIISQVAEPILEDETTSELTVRLSEIGAVALVEALALISEGATDEQEQDHTAATFAPKVSRHVARISWTKPAHEVSAHVRAMDAVPGAWTKLVDAPVKLFRPAVWSEARVKALGSEFLEDNVRPTITGDNDGGLVIRATVSDGLVVRCAQGAVAFSEVQPPGRKRMLVSDWINGRGINEGQRLV

SEQ ID NO: 108405 - protein, 280 aa, Unknown
  Bacterial polypetide isolated from the Sargasso Sea
IDIIYNSDHKLCAIYTQPPSISGRGMRLRDNAIGVKAKELNIQLFYPSNINNTIEINKFKSLNPDIAIVSAYGQILSSNLLKVPKFGFINLHPSLLPRWRGAAPIERALMSGDKETGICTIKMVRELDSGPILAREKFVINSNETNTSLSHKLSKIGALQLLEVINNFEFISEIPQESDGITYASKIQKSETRINWNLSGIVVDRMIRSLSEKPGAWCILNGARVKILNSKYLKLEGKTGHNIISSANKSSLIIACREGAVEIMTLQKEGKKPISAKGIS

SEQ ID NO: 108406 - protein, 122 aa, Unknown
  Bacterial polypetide isolated from the Sargasso Sea
MSEKIVFMGTPEFAVPILKSIYQNGFPISAVYTQPPKKSNRGQKLNKSPVHLISETLNLDVRTPFTLLGNQEETNFLKNLNFDLAIVVAYGQIIPKNFLDFAKKGFINIHASLLPKWRGAAP

SEQ ID NO: 108407 - protein, 139 aa, Unknown
  Bacterial polypetide isolated from the Sargasso Sea
MAQKIVFMGTPKFAVPILKSLYQNGYPITHVYTQPPQKSQRGQKINKSPIQGIAETLNLEFRIPKYLKDNEEEYKYFKSIDADLAIVVAYGQIIPKEFLNLTKKGFINIHASLLPKWRGAAPIQRSIMNLDKEIGFSVM

SEQ ID NO: 108408 - protein, 262 aa, Unknown
  Bacterial polypetide isolated from the Sargasso Sea
MVGNLARKLNLDLFTPEKLSNPNLKEWIVDLKPDILVVVAFKILPKTITDISNLKAVNLHASLLPKYRGAAPIHHALMNGETVTGNTTFLIQSKVDTGNIILQQKIDIKPNDNFATLSKKMSKLGAELLVESLSVIENPDFKPMSQDDSVATFAPKIDKSFGKIDWSESAHIIYSKIKALSFSPGTFASINGKRLKIYESKLTSKKLDDQPGVVICINNKVFVSCLDFSLELIHVQFEGKKKMSAIDWYRGINEQSGLKFDK

SEQ ID NO: 108409 - protein, 255 aa, Unknown
  Bacterial polypetide isolated from the Sargasso Sea
MSNKIVFMGTPMFAVPILKSLYQNGYFVSEVYTQPPQKSQRGQKINKSPVQSMAETLNLNFRTPDSLKNNFDEYDYFKKIDVDLAIVVAYGQIIPKEYLDLPKKGFINIHASILPNWRGAAPIQRSIMNLDKETGISIMKISEKLDTGPVSKIYKISLKNDLNALDVTEKLSTIAAEKILDNIDDILDGNAKFEEQDHSKATYAHKIEKSEGKINWNESAEKIIGKINGLYPAPGAFFIFSGERYKVLKGEIGNG

SEQ ID NO: 108410 - protein, 193 aa, Unknown
  Bacterial polypetide isolated from the Sargasso Sea
MRIVFFGTPDFAIPSLESILNSKHELLSVVTNPDKKSGRGLKTKPSPISTFCSSKSIECLHYSDFENQDVYNALENMNPDLFVVVAFKILPEKIINIPKHGSINVHPSLLPKYRGSSPIQHAILNGDRETGVTVFKLNEKVDSGHVINQNKYIIKDQINFSDLYIELSKFGAKTLMEAIELIESGKVDYVAQD

SEQ ID NO: 108411 - protein, 269 aa, Unknown
  Bacterial polypetide isolated from the Sargasso Sea
MNKKILFMGTPSISAQILKTLYQNGFEIEIVYTQPPIASNRGQKVNKSPVHIMAEIFNLQVRTPSVLNGSEEINFLKSKDIALGVVVAYGQILKKDILDIPKYGFINIHYSLLPKLRGAAPIQRAIMNNEKTTGISIMKIDEGLDHGPICNQYSLNILENENSEELSLRLSNLASEKILENIDNILENKALFKDQNHSLTTYAKKILKEEGKINWLESNKKIIGKINGLYPNPGAWFEFKGERYKVLKAELSIKTGKSGYVLTDSLEIG

SEQ ID NO: 108412 - protein, 275 aa, Unknown
  Bacterial polypetide isolated from the Sargasso Sea
MFAVPILKSLYQNGYPISCVYTQPPQRSKRGQKINKSPIQLISETLNIEFRTPNSLKENPKEFEYLKSLEADLAIVVAYGQIIPKSYLNLTKKGFINIHASILPKWRGAAPIQRSIMSLDKETGISIMKIREELDTGPVCNVYKINLENNLNTEDINEKLSSLAAEKILDNIDDIYEDKANFIEQDHSLATYASKIEKIEGQINWKEDAKIIIGKINGLYPVPGAYFMFNGERYKILKAEIGHAQGKPGEVLSDYLEISCGDKKSIKIKEIQRQG

SEQ ID NO: 108413 - protein, 246 aa, Unknown
  Bacterial polypetide isolated from the Sargasso Sea
MSKKIAFMGTPTISGQILKSLYQNGFDIEVVYTQPPVASNRGHRLNKSPVHIMAEILNIPVRTPIVLNNTEEKNFLKKQNISLGIVVAYGQILKKDILKIPKYGWINIHYSLLPKLRGAAPIQRAIMENETSTGISIMKINEGLDSGPVCNQYSINILENENSEDLSQRLSNLASEKILQNIDDIFDNKAHFKEQDHSKSTYAKKIKKEEGKINWEDSNLKTIGKINGLYPNPGGWFEFKGEDTRY

SEQ ID NO: 108414 - protein, 208 aa, Unknown
  Bacterial polypetide isolated from the Sargasso Sea
MSKKIAFMGTPTISGQILKSLYQNGFDIEVVYTQPPIASNRGHRLNKSPVNIMAEILNIPIRTPIVLDDPEEKNFLEKQNISLGIVVAYGQILKKDILEIPKYGWINIHYSLLPKFRGAAPIQRAIMNNEKSTGISIMKIDEGLDSGPVCNQYSINILENENSEDLSQRLSNLASEKILQNIDDIFDNKVHFKQQDHSKSTYAKKIKK

SEQ ID NO: 108415 - protein, 224 aa, Unknown
  Bacterial polypetide isolated from the Sargasso Sea
MSKKLVFMGTPMFAVPILKSLYQNGYNISCVYTQPPQKSKRGQKINKSPIQGISETLNLEYRTPPILNNEEEYNFLNSLDADLAIVVAYGQIIPKKFLSLTKTGFINIHASLLPKWRGAAPIQRSIMNLDQETGISIMRIAEKLDTGPVCNKYKIQLKENLNALEISEKLSNLAAEKILDDVDDILEDKANFIEQDHLNATYASKIQKTEGQINWDENAEKIIG

SEQ ID NO: 108416 - protein, 106 aa, Unknown
  Bacterial polypetide isolated from the Sargasso Sea
MRVLTPVFIDAFKGRMLNIHPSLLPKYRGLNTHARAIEAGDAEAGCTVHEVTPELDDGPILGQARVPIRPDDTAQTLAARVLIQEHRLYPAVLRRFAEGDRSPLYL

SEQ ID NO: 108417 - protein, 260 aa, Unknown
  Bacterial polypetide isolated from the Sargasso Sea
QIKNSPVHKLAQEKKITIYHPENFNSSKIIDEFKKIKSDIVVVMGYGLILPKKILNIPTYGFINIHLSLLPRWRGAAPIEHAILHGDKITGVSIFQIEQKLDSGPIISSKSVKIKNNYSKDKLTKLLNEAGSNLLNLSLPKIFEKKILFKNQDNSKATYAAKITSELRKINFNQKVDDVYNHIRAFSPKPSAWFFFENKRINIIKCSKQICNSKKSTILNKEFHIGCNDGKIIPEIIQKEGKKPMDIKEFLRGFNFSIDQ

SEQ ID NO: 108418 - protein, 179 aa, Unknown
  Bacterial polypetide isolated from the Sargasso Sea
MSKKIAFMGTPVISGQILKSLYQNGFDIEVVYTQPPVESNRGHKLNKSPVHIMSEILNIPVRTPFKLDNSEENKFLQSKNISLGIVVAYGQILKKDILDIPKYGWINIHYSLLPKLRGAAPIQRAIMNNEIKTGISIMKMNEGLDTGPICNQYSVNILENENSEDLGQRLTNLASEKIL

SEQ ID NO: 108419 - protein, 243 aa, Unknown
  Bacterial polypetide isolated from the Sargasso Sea
MRIVYMGTPDFAVPALERLHASDHEIVSVVTRPDSKRGRGRGLSASEIKVAAESLGLPVLQPESLKDPTLHEELRDLEPDLFVVVAFLILPRSVLKIPKHGSLNLHPSLLPRYRGAAPIQWAVINGESETGISTFLLNPRVDAGDILIQRPVSISSEETAGALYERLRVKGADVVLETVDGFEAGTLNPTQQDDARATPAPKLTKETGRIDWTKKAETIRNLVRGTNPFPGALTEWKNGILKI

SEQ ID NO: 108420 - protein, 214 aa, Unknown
  Bacterial polypetide isolated from the Sargasso Sea
MSKKIAFMGTPTISGQILKSLYQNGFDIEVVYTQPPVASNRGHRLNKSPVHVMAEILNIPVRTPIILDNTEEKNFLEKQNISLGIVVAYGQILKKDILEIPKYGWINIHYSLLPKLRGAAPIQRAIMENEKTTGISIMKINEGLDSGPVCNQYSINILENENTEDLSQRLSNLASEKILQNIDDIFDNKAHFKEQDHSKFTYAKKIKKEEGKIN

SEQ ID NO: 108421 - protein, 247 aa, Unknown
  Bacterial polypetide isolated from the Sargasso Sea
MRIVIFASSKFSIPLLEKLHKSEHEICAVYSQPPSISGRGMKLKENEVCLKSSELNLKLLFPDNINKDVEINKLEQMKPDIAVVSAYGQILSSKLLRVPKFGFVNLHPSLLPRWRGAAPIERALMAGDKETGVCTIKMIKELDAGPILAKERFLINFDETNSSLSQKLSIIGANQLLDVINNLELISEIPQESEGVTYAFKIHKSETRINWNLPGKIVDRFIRGLSEKPGAWSMMNGSRVKILKSKY

SEQ ID NO: 108422 - protein, 292 aa, Unknown
  Bacterial polypetide isolated from the Sargasso Sea
MSKKIAFMGTPIISGQILKSLYQNGFDIEVVYTQPPVASNRGHRLNKSPVHIMAEILNIPVRTPMVLDNTEEKNFLHKQNISLGIVVAYGQILKKDILKIPKYGWINIHYSLLPKLRGAAPIQRAIMNNETSTGISIMKIDEGLDSGPICNQYSINILENENCEDLTQRLSNLASEKILQNIDDILDDKAYFKEQDHSKSTYAKKIKKEEGKINWEDSNLKIIGKINGLYPNPGGWFEFKGERYKILKAEKSILSGKLGYVLSDNFEIGCGENSIKIIEIQRQGKTVQKTKE

SEQ ID NO: 108423 - protein, 186 aa, Unknown
  Bacterial polypetide isolated from the Sargasso Sea
MSKKIAFMGTPTISGQILKSLYQNGFDIEVVYTQPPVASNRGHRLNKSPVHIMAEILNIPVRTPIALDNAEEKNFLNKQNISLGIVVAYGQILKKNILEIPKYGWINIHYSLLPKLRGAAPIQRAIMYNETSTGISIMKINEGLDSGPVCNQYSINILENENSEDLSQRLSNLASEKILQNIDDIF

SEQ ID NO: 108424 - protein, 282 aa, Unknown
  Bacterial polypetide isolated from the Sargasso Sea
NSDHKILAVYSQQATKANRGQKILPSIIENFAKKKSLRLRTPIKLDTDEEYNFIKKLKPDIGIVVAYGKIIPKRFLNLTKYGFINLHASLLPKWRGAAPIQRSIMNLDNETGISIMKIVEKLDAGPVMHQDRINIGENFDSLTLSKVLAKLGAKSILDAINKIGKGEAQFKEQDHSKATYAKKISKDESKLEWNESAKKVLAKINGLNPNPGAWFKYKNMRYKVWKAKIVNQNGIAGQTLDNSLTIACKEKSIKIVEIQKEGKSKQLIDQFLLGNNIKQDET

SEQ ID NO: 108425 - protein, 186 aa, Unknown
  Bacterial polypetide isolated from the Sargasso Sea
MSQKIVFMGTSNFAVPILKSLYQNGYPISVVYTQPPNKSNRGQKLNKSPINLFSENISLDIRTPQSLKNNYEEESYLTELKPDIILVVSYGQIIPKNLLTIPKYGFLNIHASLLPKWRGAAPIQRSIMNLDAETGISIMKINENLDEGPVSNQYSINISEKINSEELSEKLSAIASEKILNILDNV

SEQ ID NO: 108426 - protein, 199 aa, Unknown
  Bacterial polypetide isolated from the Sargasso Sea
MLKKIVFMGTPMFAVPILKSLYQNGYPISCVYTQPPQKSKRGQKINKSPIQLISETLNIEFRTPNSLKENLDEIEYFKSLEADLAIVVAYGQIIPKSYLNLTKKGFINIHASILPKWRGAAPIQRSIMNLDKETGISIMKIGEELDTGPVCNVYKINIENNLNAEDINEKLSNLAAEKILDNIDHIYEDKANLKNKITL

SEQ ID NO: 108427 - protein, 226 aa, Unknown
  Bacterial polypetide isolated from the Sargasso Sea
CYCGSLWKIIPKEFLNLTKKGFINIHASILPKWRGAAPIQRSIMNLDTETGISIMKINEELDSGPISNIYKMKLDQNINAQEVSEKLSLLAADKILDVVDNIFEGKSKFIDQDHSKATYAKKIIKSEGQINWNDEAPQIIAKINGLFPSPGAFFNFGGQRYKILKAKIGNGIGKSGEVISDNLEIACAKNKSIKILEIQREGKKIQKVEEFMLGSIIKKGSIILNV

SEQ ID NO: 108428 - protein, 281 aa, Unknown
  Bacterial polypetide isolated from the Sargasso Sea
MSNKDINIIFFGNTDFSNPTLLACKKKFNLKAIVTNKSKKMGRGQKILDTPVMTLAKKENLKIIEGEDLSDASFIDQLKDLNPDFFVVVAYRILPKYLLDIPKYGSINIHSSLLPKYRGAAPIQHALLNQEDSTGVSTFLIEPKVDTGKIIDQLKIVITKDDNYGSLSKKLSEAGAGLIESSINKCLHHSSELTEQNNSMATLAPKISKEDLKINWNDKSDVILAQVKAFSPTPGAFTTINSKRLKIFKAESIRNDNNHKIGSIYHVGKNFFDVQCGKNAH

SEQ ID NO: 108429 - protein, 58 aa, Unknown
  Bacterial polypetide isolated from the Sargasso Sea
SFGHDIRAVYTQPPRPAGRGKKNKVSPVQCLAELNGLTVKTPHSLKTDEEQEYFEKLG

SEQ ID NO: 108430 - protein, 266 aa, Unknown
  Bacterial polypetide isolated from the Sargasso Sea
NVEKSPIHLFAETLNFNVRTPDQLKNNVSEYDHIKNLDLDLVIVVAYGQIIPNDFLSLSKEGFINLHASILPKWRGAAPIQRSIMNQDKETGISVMKIKEKLDEGDVSHIIKINIKENENAQSLSERLSALASENIPDIIDSIFDKKISFKPQDHSKATYAKKIEKTEGLINWNDSSESIIGKINGLYPYPGGYFLFKGERYKILKAEKSFSKENPGKVLTNDLEISCGTNSIKILEIQREGKKSQKINEFLPGSQIKKGNNLLDA

SEQ ID NO: 108431 - protein, 248 aa, Unknown
  Bacterial polypetide isolated from the Sargasso Sea
MSQKIVFMGTSNFAVPILKSLYQNGYQISAVYTRPPKKSNRGQKLNKSPINLFSENISLDVRTPQSLKNNDEEESYLTELKPDIILVVSYGQIIPKNLLNIPKYGFLNIHASLLPKWRGAAPIQRSIMNLDRETGISIMKINENLDEGPVCNQYSISISEKMNSEELSEKLSAIASEKILDILDNIYEDKIEFKDQDYSQATYAKKIQKIEGKIDWNENAEKIIGKINGLYPYPGAFFSFNGERYKIL

SEQ ID NO: 108432 - protein, 266 aa, Unknown
  Bacterial polypetide isolated from the Sargasso Sea
MFAVPILKSLYQNGPFISCVYTQPPQKSKRGQKINKSPIQLISETLNIEFRTPNSLKENLEELEYFKSLEADLVIVVAYGQIIPKSYLNLTKKGFINIHASILPKWRGAAPIQRSIMNLDKETGISIMKIGEELDTGPVCNIYKINIENNLNAEDINEKLSSLAAEKILDNIDEIYEDKANFIEQDHSSATYAPKIQKFEGQINWKEDAKIIIGKINGLYPVPGAYFMFNGERYKILKAEIGQTLGKPGEVLSDHLEISCGDKKSI

SEQ ID NO: 108433 - protein, 267 aa, Unknown
  Bacterial polypetide isolated from the Sargasso Sea
GQKINKSPIQGISETLNIDYRIPKTLKDNHEEYEFLKELNADLAIVCAYGQIIPENFLNLTKKGFVNIHASILPSWRGAAPIQRSIMNLDPETGISIMKIKKELDSGPVSNIYKIKIDQNQNAQEISEKLSALAAEKILDNVDDILEDKAKFIDQDHSKATYAKKIDKEESRIDWDEDASKIIGKINGLFPSPGASFSFNGERYKILKAEIGNGIGQVGEIISNQLEVACKNNQSIKILEIQRQGKRPQKISEFMLGSQIKKGSKLS

SEQ ID NO: 108434 - protein, 254 aa, Unknown
  Bacterial polypetide isolated from the Sargasso Sea
YCGTLSIEVRTPKTLKKNFEEFEYLKKLGADIAIVIAYGQIIPENFLTLTKKGFINVHASLLPKFRGAAPIQRAIMNLNKETGISIMKINSKLDEGPVCSSYSLNINENDNTEVLSEKLSMLAAEKILDDIDKILDDKAIFKEQDNSKATYAKKIDKKEASINWNTPAKNIVANINGLNGAYFFFKGTRYKILEAKTINLAGKPGEVLSDSLEIGCKEMSLKVLKIQREGKRPQKISEFLLGSQIKKGSFLANA

SEQ ID NO: 108435 - protein, 197 aa, Unknown
  Bacterial polypetide isolated from the Sargasso Sea
FLLPCWRGAAPIEHALLSGDQNTGVTIFKLVEKMDAGPIITQESINIDDKISKEELTKRLNYVGVNLLKSVLPIIFNQKINYKTQDDNKATYAKKITPDIRRLNFNENAKSVYNKIRAFSPKPGAWFNYKKERIKIIKSNFVEGDFESSRILNNKFHIGCKFGKICPEIIQKEGKKPLNLENFLRGFKIKVGDKVNE

SEQ ID NO: 108436 - protein, 279 aa, Unknown
  Bacterial polypetide isolated from the Sargasso Sea
MYYRLNGFKNNVLWGTPNFAVPTLKAIHKSDHKILEVYTQPATKSGRGQKLKHSDIFNCAKQLNLSIRSPDKLETNEEINHIKKLKPDLAVVVAYGKILPSSLLSIEKLLFINAHASLLPKWRGAAPMQRAIMNQESETGVSIMKIIPQLDAGPVILQEKIKISKEMSYEDLSERISYIGAKLILDSMKLIENNKAIFIDQEESNATYAKKIHKNESKIDWNEDANKIIAKINAFHPNPGCWFKLSNARIKIVKAIEVEKSGETGTILDDKMTIACAKN

SEQ ID NO: 108437 - protein, 159 aa, Unknown
  Bacterial polypetide isolated from the Sargasso Sea
MQIILFASSEFSLPLLDIINNSDHKLCAIYTQPPSISGRGMRLRDNAIGIKAKELNIQLFYPSNVNNTIEINKFKSLNPDIAIVSAYGQILSSKLLKAPKFGFLNLHPSLLPRWRGAAPIERALMSGDKETGICTIKMVRELDSGPILAREKFVINSNE

SEQ ID NO: 108438 - protein, 261 aa, Unknown
  Bacterial polypetide isolated from the Sargasso Sea
MFWGTPAYAVPTLEALHGAGHQIVGVVTQPDRRRGRGSSLMPSPVKARALELTGDVTVLTPQRIRREPETQAQLAALQADLSVVVAFGQLLPPEVLQQPPLGCWNGHGSLLPRWRGAGPIQWCLMEGDAQTGVGIMAMEPGLDTGPVLLERALDVQLLENAAALAGRLSHLTAELFVEALPQIEAAGPGPEAERLSRLAVTPQSDDGVSLARLLSKDDYRLDWSERALAIHRKVMGLFPGAYCSWRGKRLKLLATEPLVAR

SEQ ID NO: 108439 - protein, 294 aa, Unknown
  Bacterial polypetide isolated from the Sargasso Sea
KNYFYGYFYVRCANFKIFISKWLSNISGLYSASSKISSWTKINKSPIQGISETLNIDFRSPQSLKSNNKEINFIKNLNVDLAIVVAYGQIIPKEYLNLTKKGFINIHGSILPKWRGAAPIQRSIMNLDEETGISIMKIVEELDSGPISKIYKIKLDQNNNALEISEQLSNLAAEKILDYVDEVLEDKVKFNEQDHSKATYAKKIDKSEGQIDWNDEALKIIGKINGLFPSPGAYFNFNGERYKILKAEIGNGIGKIGEVISDRLEIACGNNKSIRIIEIQRQGKKSQKIGEFMH

SEQ ID NO: 108440 - protein, 260 aa, Unknown
  Bacterial polypetide isolated from the Sargasso Sea
MRVVFMGNPEFAIPTLKLLQKSRHDLLAVVSNKPKPMGRGRALRSTPVGQFAKENKIKLLEPDSLNAIDFQNQLKNLEADIFVVVAYRILPEKVIGIPKHGAINLHVSLLPKYRGAAPIQWALMNGDTETGVTVFQINRKVDTGDILVQKKFPIYKDDNMLTLGTRLCNSGAKIIIDAIGKIEEGSIKILKQTQESVSFAPKITKKMRCINWDWPAIKINNWVRGLSPYPSMYTFLNGKNLKVFKTFIEKSSISKPGRNH

SEQ ID NO: 108441 - protein, 135 aa, Unknown
  Bacterial polypetide isolated from the Sargasso Sea
EVVNEFDRYTPTKQDDSQATYAKKLSKEEALINWADDAEQIERNIRAFNPWPVAWMQVEDQNVKVWSASVVPLNKGATPGTVVSANKEGITIATGRDALCITTLQIPGKKALPASDVINARQTWFEVGRCLTQAD

SEQ ID NO: 108442 - protein, 221 aa, Unknown
  Bacterial polypetide isolated from the Sargasso Sea
VVAYGQIIPKRFLDIPKFGFVNVHASLLPKWRGAAPMQRSIMNLDKETGVSIMKIVEKLDAGPVIHQDKINLNENIDTSILSKLLSQLGAKSLMNAIEKIENKEANFVEQNHNEATYAKKITKQEAELKWSENANIILAKINGLNPNPGAWFKYKNERYKVWKAKISNASGLQGSTIDNNLTIACKDKSISILEIQKEGKSRQATDQFLLGSKIPKGEKIL

SEQ ID NO: 108443 - protein, 284 aa, Unknown
  Bacterial polypetide isolated from the Sargasso Sea
MQKKIGFMGTPNFAVPILKNIYQNGYEVSVIYTQPPSKSNRGQKFEKSPIHSFAETLSYVIRTPNQLKNNKSEYEYFKNLDLDLVIVVAYGIIIPKEFLSLSKQGFINLHASILPKWRGAAPIQRSIMNNDKETGISVMKINEKLDEGDISDVFKISIMENENAQVLSDRLSNLASEKISYIIDGIIDKEVNFKPQDHTQATYAEKIKKMEGLIDWNDKAENIIGKINGLYPYPGGYFIYRGERYKILKAQISLNKDQPGKVLSNDLEISCGENSIKILEIQRE

SEQ ID NO: 108444 - protein, 178 aa, Unknown
  Bacterial polypetide isolated from the Sargasso Sea
MNVVFMGTPAFVVPVLNVVNQICKEEKWKLTCVYTAPDKPKGRGQVLTASPVKERAQELGIEVLSPPKLTEAGTIAQFRRLEPTVVILAAFGLLLPPPFLFDPPFGSINIHPSLLPKYRGAAPVAGAILEGAMETGTSIIRMDEGLDTGPLLSQRKVALQGNETSEKLTRQLFSLGAA

SEQ ID NO: 108445 - protein, 225 aa, Unknown
  Bacterial polypetide isolated from the Sargasso Sea
MSKKIAFMGTPSISGQILKSLYQNGFDIEIVYTQPPIASNRGHKLNKSPVHIMAEILNIPVRTPVKLDNLEEKKFIKNKNIDLGIVVAYGQILKKDILVLPKFGWINIHYSLLPKLRGAAPIQRAIMNNENLTGISIMKMDEGLDTGPVCNQYPINILDNENSEDLSKRLSNLASEKILENIDNIFENRALFKDQDHSQSSYAKKIKKEEGKIIGKKIIKRLSEK

SEQ ID NO: 108446 - protein, 227 aa, Unknown
  Bacterial polypetide isolated from the Sargasso Sea
NPDLIIVVSYGQIIPKNLLNIPKYGFLNIHASLLPVWRGAAPIQRSIMNLDKETGISIMKINENLDEGPVCKQYSLEISEQMNSEELSEKLSLLASEKILDVLDNIYDGNINFQDQDHSKATYAKKIEKTEGKINWNENASKIIAKINGLYPYPGAFFLFNGERYKILNAEKSYSSGKPGNIITEDFEICCGEDSIKVLSIQREGKKVQKIKEFLLGSKINKGTNIS

SEQ ID NO: 108447 - protein, 266 aa, Unknown
  Bacterial polypetide isolated from the Sargasso Sea
MRNIFMGTPYFGKEILKKLHTDFSVHTVVCQPDKPVGREKKIIYSEVKNFALKANLKILQPEKIKNNEAFLNELRKINPDFIFVAAYGKILTNDILDIPKFGCINVHSSLLPKYRGAAPINWSIINGDKETGVTIMEMDEGMDTGNIILSKKIAIAESDNVSSLTEKLASCGCDAIGEFVQKFLKTGSIDSKPQDNALASIAPKIDKEKCKIDWSGKSFDILNLIRGSNPWPGATTTLFKNKITIWEAKNAGPALAKPGSIRKMKK

SEQ ID NO: 108448 - protein, 146 aa, Unknown
  Bacterial polypetide isolated from the Sargasso Sea
MSKKIVFMGTPMFAVPILKSLYQNGYPVSCVYTQPPQKSKRGQKINKSPIQLISETLNIEFRTPNSLKENLEELEYFKSLEADLAIVVAYGQIIPKSYLNLTKKGFINIHASILPKWRGAAPIQRSIMNLDKETGISIMKIGEELD

SEQ ID NO: 108449 - protein, 263 aa, Unknown
  Bacterial polypetide isolated from the Sargasso Sea
MNIIFMGTPDFAIPVLERLHKHHGIPAVFTAPSKRTGRSQVMTNSPVQQWAQSYDIPVYTPKSLRLPDVQELIESIEPDLVVVAAYGLFIPDTILTLPRLGCWNIHPSLLPKLRGPSPVVTSILQRDIVTGVSIMKLDQNMDSGPILAQHSYHMSFSETASSLTRSLFEIGADLLHDCIARADRDNLVETIAQNDAEATFTSKQRKEDGLINWDSTSQDIEAQIRAYTPWPGSFTYWNGKNLRYYLRISQLQTQTANSLPVLS

SEQ ID NO: 108450 - protein, 264 aa, Unknown
  Bacterial polypetide isolated from the Sargasso Sea
KKVIPSPVKEIGINNGIGVLQPYSLKDESIVRSLESLKPDLLLVVAYGLLIPNKVLDIAEKGSINIHASILPRWRGAAPMEYSIYSGDNESGISYMRMTEGLDEGPTLEIHKCKIEKEDDLGTLENKFMELSKKSLLNFLEKFERGELKETPQENSKATFAPKIDSDFQKIDWNCLSNEIDQKIRSLNPKYGAYTFLGNKRIKIYKSSPAKNTSKLDPGKIEISEDGKLLVGCSQETAIIIDTVQMEGKSAIQSEEFIRGYRSL

SEQ ID NO: 108451 - protein, 131 aa, Unknown
  Bacterial polypetide isolated from the Sargasso Sea
MRIVIFASSKFSIPLLEKLHKSDHEICAVYSQPPSIAGRGMRLIENEVCLKSRELNLQLLFPDNINKDIEINKLESMKPDIAVVSAYGQILSSKLLRVPKFGFINLHPSLLPRWRGAAPIERALMAGDKET

SEQ ID NO: 108452 - protein, 279 aa, Unknown
  Bacterial polypetide isolated from the Sargasso Sea
GFTHKSQRKNLEGQKKFNTPVQRWAESQLLPVFTPKILDDKSLTEFQSLKPDLAILFAYGKIVPLNWLNTPLNGFINIHASLLPRWRGAAPVQRAIENNDKETGISIIKMNDKIDEGPILAQQNIEINELTDGKQLIDQISHDSCSLLFNTLKKYFLGQVQLKEQDHSQSTYAKKIDKVETRVDWGLSADIIEKKVRAFYPSPAMWFKYKGQRFKILKAKISNKQDDEGKIINLPLTVACKNNSLDILKIQAEGKKPLDIKEFILGNNQFQLNAMIDND

SEQ ID NO: 108453 - protein, 188 aa, Unknown
  Bacterial polypetide isolated from the Sargasso Sea
MAKKLVFMGTPMFAVPILKSLYQNGYNISCVYTQPPQKSKRGQKINKSPIQGISETLNLEYRTPPVLNNEEEYNFLNSLDADLAIVVAYGQIIPKKFLSLTKIGFINIHASLLPKWRGAAPIQRSIMNLDQETGISIMRIAEKLDTGPVCNNYKIELNENLNALEISEKLSNLAAEKILDNLDDILED

SEQ ID NO: 108454 - protein, 219 aa, Unknown
  Bacterial polypetide isolated from the Sargasso Sea
MSKKIAFMGTPTISGQILKSLYQNGFDIEVVYTQPPVASNRGHRLNKSPVHIMAEILNIPVRTPIVLDNTEEKNFLKKQNISLGIVVAYGQILKKDILEIPKYGWINIHYSLLPKLRGAAPIQRAIMNSEKSTGISIMKIDEGLDSGPVCNQYSINILENENSEDLSQRLSNLASEKILQNIDDILDNKVSFKEQDHSKSTYAKKIKKEEGKINWEDSN

SEQ ID NO: 108455 - protein, 258 aa, Unknown
  Bacterial polypetide isolated from the Sargasso Sea
SIELFAKKHSLNTRTPTKLDIDEEYNFLKELKPDIVIVVAYGKIIPKRFLNLSKFGFINIHASLLPKWRGAAPIQRSIMNLDNETGISIMKIVEGLDSGPVMQQNKIKINENIDSLTLSKVLSKLGAKSIIEAIKKIEKGEAKFVEQDHNQTTYAKKILKTEARIQWDETARKILSKINGLNPNPGAWFEFKGQRYKVWKAKILSQKGVPGKILDNKLTVACKDKAIKILEIQKEGKDRQETEQFLLGNKMKQGESIF

SEQ ID NO: 108456 - protein, 253 aa, Unknown
  Bacterial polypetide isolated from the Sargasso Sea
FQKKKELKLEQIILKDGKVYDEFMGLQADLVVVIAYGKIIPENYLKNSNLIFLNVHASLLPKWRGAAPIERAILNKDIETGISIMKIEKTLDTGPFIKQIKVKIDKDTNSGELIKKLSVVGAKALLESIELVSSGKAIFIKQNEKDATYAKKIDKAETRINWKENSENIIAKINAFNPKPGAWFLFNGERIKILKAKSVIMNGEEGKILDNKLTVGCSNNSIQILRIQREGKKEMNAEEFLVGNNLKKGVKLN

SEQ ID NO: 108457 - protein, 136 aa, Unknown
  Bacterial polypetide isolated from the Sargasso Sea
MKIIFMGNPEFACPPLKAFFDSDHDLVGVISNKPKRMKRSMNKSFTPLGRLAIDLDQNLFTTDNLSDVNLQTWAKKLKPDIFIVVAFKILPNTLLKIPKIGAINLHASLLPRYRGAAPIQHALINGDKVTGNSTFF

SEQ ID NO: 108458 - protein, 197 aa, Unknown
  Bacterial polypetide isolated from the Sargasso Sea
MTNIVFMGTPKFAVPTLRHLSNKFNIKCVFTQPPSKSNRGQKFTKSPIHISAEELNLKIKTPKNIDEEFEYLKELNLDLGIVVAYGQILPKKVLNLSKKGFLNIHASLLPKWRGAAPIQRSILSNEKETGVSFMRINEKLDSGPICSKYKIKISDQDNTEILSEKLSNLSAEKIFENVQKILKDEAIFEDQNEAQAT

SEQ ID NO: 108459 - protein, 294 aa, Unknown
  Bacterial polypetide isolated from the Sargasso Sea
MNNIQVKKTKIIFFGTPDFAVKSLKVINDNFDVLCVVTSPDKKSGRGLKINESEVKRFSSNNNIPVKQPENLTNEDFLGEISSLGAELFIVVAFKKLPKEVFSIPALGTINLHASLLPDYRGAAPINWVLINNERITGVTTFFINEKIDHGDIILKKEILINDDDNFKSLYNRLSVIGSEVLLKTIKIVASGKAKIQKQEENKDLNMAPKLNARNTRINWNDNIDKILGMIRGLSPQPGSWTTLKNGEKEIRMKILKASLFSRNNFRESSIGKVLVYNDNIHINSKDGIVNCIK

SEQ ID NO: 108460 - protein, 107 aa, Unknown
  Bacterial polypetide isolated from the Sargasso Sea
MKIVFMGTPEFAIPTIQKIHNSSHSLLSVVTQPDRPKGRGQKQVSSPIKNFAVENNIPVLQPEKVNTEDFISSLLKNRPDYIIVVAFGQILGEKFLKIPKQFASITL

SEQ ID NO: 108461 - protein, 181 aa, Unknown
  Bacterial polypetide isolated from the Sargasso Sea
AMLMDEGLDTGKLLARRTCQIDDTETAGSLHDKLAALNAKLLDDVVMDIASLRAAATPQDDSQAIYAAKISSQEAEIDWSRDSATLDCHIRAFTPFPGAWCHGPKGRLRILRARPVAMEWPQNAAAGSVVFVSKNTLHLATGDGALAIEQLQPAGKKPMSVADFLNGQKLTSGQLFIAQAG

SEQ ID NO: 108462 - protein, 266 aa, Unknown
  Bacterial polypetide isolated from the Sargasso Sea
MRLRDNAIGRKAKELNIKLFYPSNINNTIEINKFKSLDPDIAIVSAYGQILSSNLLKVPKFGFLNLHPSLLPRWRGAAPIERALMSGDKETGICTIKMVRELDSGPILAREKFVINSDETNTSLSYKLSKIGALQLLEVINNFEFISEIPQESDGITYASKIQKSETRINWNLSGIVVDRLIRSLSEKPGAWCILNGSRVKILNSKYVKLEGKTGHNIVSSANKSSLIIACREGAVEIITLQKEGKKPVSAKEFLSGYKENNIYFN

SEQ ID NO: 108463 - protein, 197 aa, Unknown
  Bacterial polypetide isolated from the Sargasso Sea
FLPFWRGAAPINHVIFNRDPYTGVSIIKMSEELDAGPILRQEKVMLDHKETFGSLHRVLSELGAKNLLKTLNNFFEIEEISQNEKFVSYAPKIKKLDAKLDFNSHASALEARIRGLAPTPGAWFEYKKERFKVFSAEVVEGNGKAGSIINENLTIACGEKALNILKIQRQGKDIMSVSDLLRGFKFKKGDTVNHSTH

SEQ ID NO: 108464 - protein, 164 aa, Unknown
  Bacterial polypetide isolated from the Sargasso Sea
MKKNRKINIAFAGTPEIAFNIFEELSKKDFQINFILTQTDKKAGRGAHLKSSRFLEKKETYNLLQPENLNDGNFKKIILNQSIDLLIVVAYGKILPRWLLEHPKYGCLNVHFSKLPKWRGAAPMQRAIANGDKSFGVSFMKIEEKLDTGGIYKTFSTSNRGQDI

SEQ ID NO: 108465 - protein, 316 aa, Unknown
  Bacterial polypetide isolated from the Sargasso Sea
MKKTKIIFFGTPDFAVKSLKAINDSFDVVCVVTSQDKKSGRGLKMNESEVKRFSSDNNIPIKQPENLTNEDFLYEISSLGAELFIVVAFKKLPKEVFSIPALGTINLHASLLPDYRGAAPINWVLINNERITGVTTFFINEEIDHGDIILKQEILINDNDDFKSLYNRLSVIGSEVLLKTIKIVASGKAKIQKQDQSKDLNLAPKLNSTNTRINWNDNTNKILGMIRGLSPRPGSWTTLKNGDKEVRVKILKASLLRRRSSNESSIGKVLVINNEIHIFSKDGVINCIRIQLENKKEMLSKDLLNGYKFYDNSIVY

SEQ ID NO: 108466 - protein, 275 aa, Unknown
  Bacterial polypetide isolated from the Sargasso Sea
MAKIIFFGTPEFALPILRKINNSKHEILTVYTQSPKKSLRGQKINKSVIHEFAEKNKLNVKTPERLEVEENFLESNSFDLGIVVAYGKLIPKKILNFSKYGFINIHASLLPKYRGAAPIQRSIINRDKETGISFMKIIEKLDAGPICKKYKIEIKKNENYNSLLDRLSNLAEETVIEIIDKIIENKIKFVDQNHHEATYANKIEKIDGKINWSESAELIQAKINALNPNPGGWFIFNNERYKILDADISSKYGQPGEVLDENLIIGCGNNSLKIL

SEQ ID NO: 108467 - protein, 239 aa, Unknown
  Bacterial polypetide isolated from the Sargasso Sea
MRVAFMGNPNFAISSLESILQSRHHVVAVISNPPKPMGRKKILKHTEVGSYAIKNNLELIELDSFNNDDIYKKIMSLKIDIFVVVAFRILPEKYISIPRCGSINLHASLLPKYRGAAPIQWALMNGEKATGVSVFQIEKKVDTGKIIYQKKLDINESDNFESLSNRLSNLGAEVILKALNSIEVGVHNLLEQDNTLSTKAPKISKEMLRIKWDWSAVKINNWIRGLSPRPGMTTNLEKR

SEQ ID NO: 108468 - protein, 283 aa, Unknown
  Bacterial polypetide isolated from the Sargasso Sea
LLWSILNHHKNLHRGQKINKSPIQGISETLNIDYRTPKTLKDNHEEYEFLKELNADLSVVCAYGQIIPKNFLKLPKKGFINIHASILPSWRGAAPIQRSIMNLDAETGLSIMKMNEELDSGPVCNTYKVKIDKNKNAQEISEILSALAAEKILDNVDDIIEDKAKFIDQDHSKATYAKKIYKEESQIDWEEDASKIIGKINGLFPSPGATFSFNGERYKILKAEISNGIGQVGEIISNQLEVACNNNQSIKILEIQRQGKRPQKISEFMLGSQIKKGSKLLNV

SEQ ID NO: 108469 - protein, 307 aa, Unknown
  Bacterial polypetide isolated from the Sargasso Sea
MAKKIVFMGTPMFAVPILKSLYQNGYPISDIYTQPPQKSQRGQKINKSPIQGIAETLNLKFRSPKSLKNNDEEYEYFKKIDADLAIVVAYGQIIPKKFLDLTKKGFINIHASILPKWRGAAPIQRSIINLDKKTGISIMKITEKLDTGPVCNIYNLNLSSNLNAREVSDKLSLLAAEKILENIDDILDDRANFIEQDHSKATYASKIKKEEGKIDWNENAQNIIGKINGLYPAPGAFFIFKGVRYKILKAEIGVREGNPGEIISDELEVVCGDKRSIKIKEIQREGKKPQNISEFKLGTHIKKGSII

SEQ ID NO: 108470 - protein, 311 aa, Unknown
  Bacterial polypetide isolated from the Sargasso Sea
MKIAFAGTPEIAATILQSIIDKKDHQVVCVITSVDKPSGRGRKLKPSPVKEIALENNLTLMQPDSPKSEEFINEFKNYQCDVLLVVAYGHILTEELLETPKYGSVNIHASLLPKYRGAAPIQRAILNGDKKSGLTFMKMTKGLDSGPMSKRFEIKIEKDDTTADLTSKMASIAAKEVNEFCSDWPNLIDSLEEQNETDASYCPKITRNDAVIEWSDEAKKISKTINAMYPNPIISIDVNGVGINLCKSKVNKKLIGDPGEIIEFNKDILAIGCGDFAVEVTELCRTGKNKLSIKDFYNGAQKLLKEGDIIS

SEQ ID NO: 108471 - protein, 308 aa, Unknown
  Bacterial polypetide isolated from the Sargasso Sea
MRVAFMGNPNFAISSLESILKSRHHVVTVISNSPKPMGRKKILKHTEVGSYAIKNNIELIELGSFDDDNIYKKIVSLDIDIFVVVAFRILPEKYISIPRFGSINLHASLLPQYRGAAPIQWALMNGDKATGVSVFQIEKKVDTGKIICKKKVNINESDNFESLSNRLSNLGAEVILKALNNIEDGETNFIEQDNTLSTKAPKISKEMLRIKWDWPAVKINNWIRGLSPKPGMTTIIRKKKIKILKSVVIDKVTKGVPGTVSNVNKSLLEIYTGSGLLSIKELQQEGKKCLPIEEFLKGNDINDKDIFS

SEQ ID NO: 108472 - protein, 309 aa, Unknown
  Bacterial polypetide isolated from the Sargasso Sea
MKKKRVVYFGSPEFSLPPLKTLYLGGYDLVGVYTQEPKKKFRGQKKYNTPVQQWAESQLLPVFTPKILDDTSLKEFQSLKPDVAILFAYGKIVPLNWLNTPLNGFINIHASLLPRWRGAAPVQRAIENNDKETGITIIKMNDKIDEGPILVQQNIEINDLTDGKQLIDQISHDSCSLLYNTLKKYFLGQIQLKEQDHSQSTYAKKIDKFETQVDWGLSASIIEKKVRAFYPSPAMWFKYKGQRFKILKAKISNLQDEKGKIINLPLTIACKNNSLDILEIQAEGKKPLSIKEFILGNNQFQLNAIIDND

SEQ ID NO: 108473 - protein, 306 aa, Unknown
  Bacterial polypetide isolated from the Sargasso Sea
MSKKIAFMGTPTISGQILKSLYQNGFDIEVVYTQPPVASNRGHRLNKSPVHIMAEILNIPVRTPIVLDNTEEKNFLHKQNISLGIVVAYGQILKKDILEIPKYGWINIHYSLLPKLRGAAPIQRAIMENETSTGISIMKINEGLDSGPICNQYSINILENENAEDLSQRLSNLASEKILQNIDDIFDNKAHFKEQDHSKSTYAKKIKKEEGKINWEDSNLKIIGKINGLYPNPGGWFEFKGERYKILKAEKSILSGKSGYVLSDNFEIGCGENSIKIIEIQRQGKTVQKTKEFLRGSQITKGTDLN

SEQ ID NO: 108474 - protein, 308 aa, Unknown
  Bacterial polypetide isolated from the Sargasso Sea
MANIIFAGTPEFSVPSLMALTEIGFNPSLVITQPDRRAGRGKKIKKSPVKIAAEKLQIPISQPVSINESEYLEYLNQLDIEIIVVAAYGMIFSEELLAIPKLGCINIHASLLPSWRGASPVQATIMNGEKETGITLMKMTKGLDCGPIYSQHKMKLTQTESGDILMEMLGNLGAKAIRNDFKSILKQNLKAESQINSKASYSGKIDKKDAKLDWSKSSEILAREVRAFNSNPGAYFMYKNEAIKCWHAIPKDTDSLPGKVISSDKSGIEIGCGSGSLVMLELQRPGKRRITAGEFAAQVDLNNKELLS

SEQ ID NO: 108475 - protein, 313 aa, Unknown
  Bacterial polypetide isolated from the Sargasso Sea
MKKNRKINIAFAGTPEIAFDIFEELSNKDFQINFILTQTDKKSGRGAQLKSSKFLEKKDICNVLQPENLNDDDFKKIILNQNIDLLIVVAYGKILPSWLLEHPKYGCLNVHFSLLPKWRGAAPMQRAIANGDKSFGVSFMKIEEKLDAGGIYKTFSTNNHGQDIYALEEELVEITNMDLSNTIIEICSEKIIPETQEEEKATYADKIAKEEGLINWNIDSSQIFRNFLAFKRWPGCYFKLNDELVRAINIENIKTIKGNPGEISSFNKDGMIVCCNKGAINLKSVQFPGKKVISSNDFFNSKRDIIPLKENLI

SEQ ID NO: 108476 - protein, 259 aa, Unknown
  Bacterial polypetide isolated from the Sargasso Sea
MLKKIVFMGTPMFAVPILKSLYQNGYPISCVYTQPPQKSKRGQKINKSPIQLISETLNIEFRTPNSLKENLDELEYFKSLEADLAIVVAYGQIIPKSYLNLTKKGFINIHASILPKWRGAAPIQRSIMNLDKETGISIMKIGEELDTGPVCNVYKINIKNNFNTEDINEKLSSLAAEKILDNIDDIYEDKANFVEQDHSSATYASKIQKLEGQINWKEDAKIIIGKINGLYPVPGAYFIFNSERYKILKAEIGQAQGKT

SEQ ID NO: 108477 - protein, 312 aa, Unknown
  Bacterial polypetide isolated from the Sargasso Sea
MSNKDINIIFFGNTDFSNPTLLACNNSFNLKAVVTNKSKKMGRGQKILDTPVMTLAKEENLKIIEGVDLNDASLIDQLKDLNPDFFVVVAYRILPKSLLGIPKYGSINIHSSLLPKYRGAAPIQHALLNQEDSTGVSTFLIEPKVDTGKIIDQLKIEITKDDNYGSLSKKLSEAGADLIESSINKCLHHSSELIEQDNSMATLAPKISKDDLKINWNDKSDTILAKVRAFSPTPGAFTTINSKRLKIFKAESINNDNNHEIGSIYHVDKNFFDVQCGQNALRLHNVQLEGKKAMDSKDFIVGYQDLGSNILI

SEQ ID NO: 108478 - protein, 312 aa, Unknown
  Bacterial polypetide isolated from the Sargasso Sea
MKIIFMTNSEFSFPSLNLLVKSNYDILNVVTNPPKAIGRKKKNISNNIILKCKEFGIDIIKQKDLSDLNFENELKKCKPDLFVVVAYRILPKSLLSIPKLGSINLHGSLLPAYRGAAPIQWSLINGDTQTGLSTFFIESRVDTGKIISQKKIKILDNDNYGSLSAKMALKGSKLLLDSIQLISNGKTLLIKQDEGSVSYAPKITSDITDIDWNSSALSIHNLIRGLTPNPGAKSKINGKQIKIQDTILNYNNLNISSFKPGQVVDISKNNLSILTGNGVLSINRLQLEGKKSLDIKSFLNGYIINIGDSFGN

SEQ ID NO: 108479 - protein, 306 aa, Unknown
  Bacterial polypetide isolated from the Sargasso Sea
MSLQIIFMGTPEFSINTLKLLIDNGHEILRVYTQPPKKKQRGHKIIKTPLHIVAEELKIDVKTSNNLDNEEDYSFFKDKKIDYVVVVAYGNIIPERFLKIPKLVFLNLHASLLPKWRGAAPIERSILSHEKETGISIMKIVPGLDEGPYMMQEKFMINKNMSTGELKKNLSLIGAKAMVRSIKLISEGKAVFVEQDHSKSSYAKKIKKSETEINWNDKAENIVAKINAFNPKPGAWFLYKKERIKVFKANEIEQNGNPGEILDNELIIGTGHNAIKILELQKEGKNTLNSKEFLKGNKLFKGTKLL

SEQ ID NO: 108480 - protein, 307 aa, Unknown
  Bacterial polypetide isolated from the Sargasso Sea
MFKKIVFMGTSNFAVPILKSLYQNGYPVSVVYTQPPKKSNRGQKFNKSPINLFSENISLEIRTPNILKNNIEEEQYLNKLEPDLILVVSYGQIIPKNLLKIPKYGFLNIHASLLPKWRGAAPIQRSIMNLDKETGISIMKINENLDEGPVCNQYKIKISENMNADELSDKLSLLASEKILDILDNIYRHKTQFKDQDHSKASYAKKIEKIEGKINWDENSDKIIGKINGLYPFPGAFFLFNGERYKILKAEKSHTNGEPGSVISEDLEICCGEGSVKVLIIQREGKRVQQINEFLPGNQIKKGSKIT

SEQ ID NO: 108481 - protein, 187 aa, Unknown
  Bacterial polypetide isolated from the Sargasso Sea
MLKKIVFMGTPMFAVPILKSLYQNGYPISCVYTQPPQKSKRGQKINKSPIQLISETLNIEFRTPNSLKENLEELEYFKSLEADLAIVVAYGQIIPKSYLNLTKKGFFNIHASILPKWRGAAPIQRSIMNLDKETGISIMKIGEELDTGPVCNVYKINIENNLNAEDINEKLSSLAAEKILDNIDDIY

SEQ ID NO: 108482 - protein, 279 aa, Unknown
  Bacterial polypetide isolated from the Sargasso Sea
SVVYTQPPQKSKRGQKINKSPVQAIAETLNLEFRTPENLKDNDDEFEFFKKIDADLVIVVAYGQIIPKKFLDLTKKGFINIHASLLPKWRGAAPIQRSIMNLDKETGISVMRIVEQLDAGPVCNSYKIDLKNNLNASDVTDKLSLIASEKILDNIDDILDDKANFIEQDHSKATYASKIQKTEGEINWSNNAKDINGKINGLYPVPGAFFIYKGERYKILKAEIGNGVGDPGEVVSDYLEVACGDRKSIKIKEIQREGKKPQNIGEFMLGSQIKKGIRI

SEQ ID NO: 108483 - protein, 306 aa, Unknown
  Bacterial polypetide isolated from the Sargasso Sea
MSKKIAFMGTPAISGQILKSLYQNGFDIEVVYTQPPVASNRGHRLNKSPVHIMAEILNIPVRTPIVLDNTEEKNFLHKQNISLGIVVAYGQILKKDILEIPKYGWINIHYSLLPKLRGAAPIQRAIMENETSTGISIMKINEGLDSGPVCNQYSINILENENTEDLSQRLSNLASEKILQNIDDIFDNKANFKEQDHSKSTYAKKIKKEEGKINWEDSNLKIIGKINGLYPNPGGWFEFKGERYKILKAEKSILSGKSGYVLSDNFEIGCGENSIKIIEIQRQGKTVQKTKEFLRGSQITKGTDLN

SEQ ID NO: 108484 - protein, 199 aa, Unknown
  Bacterial polypetide isolated from the Sargasso Sea
MLKKIVFMGTPMFAVPILKSLYQNGYPISCVYTQPPQKSKRGQKINKSPIQLISETLNIEFRTPNSLKENLEELEYLKSLEADLAIVVAYGQIIPKSYLNLTKKGFINIHASILPKWRGAAPIQRSIMNLDKETGISIMKIGEELDTGPVCNVYKINIENNLNSEDINEKLSSLAAEKILDNIDNIYEDKANFVEQDHS

SEQ ID NO: 108485 - protein, 239 aa, Unknown
  Bacterial polypetide isolated from the Sargasso Sea
DNHEEFEYFKNIEADLAIVVAYGQIIPKNFLNLTKKGFINIHASILPKWRGAAPIQRSIMNLDKETGISIMKITEELDTGPVCNIYKIDLEKNLNVNDISEKLSLLAAEKILDNIDDILNEKAKFIEQDHSKATYASKIQKAEGKIDWNESAQNIIGKINGLYPIPSAFFTFKGERYKILKGEIGNSVGNPGEVVSDYLEVACGNKQSIKIKEIQREGKKRQNINEFMLGSQIKRGSTI

SEQ ID NO: 108486 - protein, 312 aa, Unknown
  Bacterial polypetide isolated from the Sargasso Sea
MPNKQINIIFFGNTNFSNPTLLACNKNFNLKAVVTNKSKKMGRGQKILDTPVMSLAKEKSFKVIEVEDLNDKSFINQLKNLNPDFFVVVAYRILPKSLLKIPKFGSINIHSSLLPKYRGAAPIQHALLNQEKLTGISTFLIEPKVDTGKIIDQFQVEISPEDNYGSLSKKLSEAGAELIESSVTKCYTNSADLIKQNDSEATLAPKILKDDLKINWNQDSKVILAMIKAFSPTPGAFTTINSKRLKIFKAEVIDCNSNNDVGVIYNVSKNYFDVQCKHNSLRIHRTQLEGKKVMDSKDFILGYQNLDSSSLL

SEQ ID NO: 108487 - protein, 201 aa, Unknown
  Bacterial polypetide isolated from the Sargasso Sea
MSKKIVFMGTSNFAVPILKSLYQNGYPVSVVYTQPPKKSNRGLKLRKSPINLFAENITLDVRSPQSLKNNKEEELYLNELKPDIILVVSFGQMIPNNLLNIPKYGFLNIHASLLPKWRGAAPIQRSIMNRDEETGISIMKINENLDEGPVCNQYSLKISEKMNAEELSEKLSLIASEKILDILDNIFDNNVEFKDQDHSKA

SEQ ID NO: 108488 - protein, 77 aa, Unknown
  Bacterial polypetide isolated from the Sargasso Sea
MSTPLKVVFAGTPDFAARHLQGLIDSPHRIVAVMSQPDRPAGRGKRLQPSPVKAVALEAELPIWQPASLKNADSEAT

SEQ ID NO: 108489 - protein, 372 aa, Unknown
  Bacterial polypetide isolated from the Sargasso Sea
MTYLADERIVLTAAESSHIRTTLGALAYDPAGGAGYISAVRKLAYNAFPDRVVDAFDRAKAPTADAHGSIEIDNLPIDEGVKGSPRFEETGRSFKAGVLSENVLVALSTLAGEPYSIAHEGRELVNNLTPHKATARDYTGLGSEVELDFHIENAAQAHMPEGDTSPFALLLLGVRSEAGGGPYTRLADARRALQLLSPEDIAQLYGEHYIIRVPYRWRGAAPTPRDNTDLSAVLSGPLDAPRVTVAFYPDMVLAVNTRAQEALANLYRAVREVSFGVQIQPGKLVLINNHFTLHSRDRFDPQYDENDRALRWVQRVFVARSLWNFRAFTPLQARVFDPKALYAGESQATRPSPVAQPVTQRAAAAELEATPA

SEQ ID NO: 108490 - protein, 307 aa, Unknown
  Bacterial polypetide isolated from the Sargasso Sea
MLKKIVFMGTPMFAVPILKSLYQNEYPISCVYTQPPQKSKRGQKINKSPIQLISETLNIEFRTPNSLKENLEELEYFKSLEADLAIVVAYGQIIPKSYLNLTKKGFINIHASILPKWRGAAPIQRSIMNLDKETGISIMKIGEELDTGPVCNVYKINIENNLNAEDINEKLSNLAAEKILDNIDDIYEDKANFIEQDHSSATYAPKIQKLEGQINWKEDAKIIIAKINGLYPVPGAYFMFNGERYKILKAEIGQAQGKPGEVLSDHLEISCGDKKSIKIKEIQRQGKKPQSIGEFVLGTQIKKGSFL

SEQ ID NO: 108491 - protein, 314 aa, Unknown
  Bacterial polypetide isolated from the Sargasso Sea
MDNSIIFMGTPDFAVKSLDFLIKKNLSIDCVVTSPDKKSGRGLKINESEVKKYSKLNKIKLLQPNNLTDPDFIKQIKELNPALIVVVAFRKLPRILYEIPKHGTINLHASLLPDYRGAAPINWCLINNEKFTGVSIIKINEKIDYGKILMQEKVIIDKDEDYGTLKNKLSLIGSKILYKTIDLIFKNQIKEKAQIITENDKKAPKLTSENTRIDWDSSIDSIIGKIRGLAPKPGAWTILINDEDEIRMKILKARPASYSKSNSKSILLTQDKRIFISTPNGEIECDIIQLENKKAMTAKDTLNGYNFSSKCLVK

SEQ ID NO: 108492 - protein, 248 aa, Unknown
  Bacterial polypetide isolated from the Sargasso Sea
MSNEIIFMGTPDFAVKSLDSLLKKNLNISCVVTSPDKRSGRGLKIGKSEVKRYSELNNIRLLQPDNLSDPSFINQIKKINPVLIVVVAFKKLPSILYEIPKYGTINLHASLLPNYRGAAPINWCLINNETYTGVSIIKINEKIDCGDILMQKKVLIDKNDDFETLKDKLSVIGSRILYKTIVLILKNQIQGKKQVISKNDKLAPKLNTKNTRIDWDDSIDLIIGKIKGLNPKPGAWTILLNGDDQVRI

SEQ ID NO: 108493 - protein, 310 aa, Unknown
  Bacterial polypetide isolated from the Sargasso Sea
MKNKIVFMGTPIFSVPILKSLYQNGYPVSVVYTQPPKKSQRGQKLKNSPIHNISEILNLEVRTPLNLKNNENEYNYLKNLNADLAIVVAYGQIIPEEFLNLTNHGFINIHASLLPKWRGAAPIQRSIMNLDKETGISFMKIVKKLDEGPVCKKFNIKISEKDNYETVSDKLSSLASENMLDIIDDIFEEKVLYEEQNHEEATYANKILKSEGEIKWTENAENILGKINGLYPSPGAWFVYKGERYKILNAELGFKSDQAGKVVDNNLEIACGNNKSIKVIQIQRQGKNIQNIGEFMLGSSIKKDTNLNNA

SEQ ID NO: 108494 - protein, 307 aa, Unknown
  Bacterial polypetide isolated from the Sargasso Sea
MLKKIVFMGTPMFAVPILKSLYQNGYPISCVYTQPPQKSKRGQKINKSPIQLISETLNIEFRTPNSLKENLDELEYFKSLEADLAIVVAYGQIIPKSYLNLTKKGFINIHASILPKWRGAAPIQRSIMNLDKETGISIMKIGEELDTGPVCNVYKINIENNLNAEDINEKLSSLAAEKILDNIDDIYEDKANFIEQDHSSATYASKIQKLEGQINWKEDAKIIIGKINGLYPVPGAYFIFNGERYKILKAEIGQAQGKPGEVLSDHLEISCGDKKSIKIKEIQRQGKKPQSIGEFVLGTQIKKGLFL

SEQ ID NO: 108495 - protein, 303 aa, Unknown
  Bacterial polypetide isolated from the Sargasso Sea
FAGTPEFSVPSLMALTEIGLNPSLVITQPDRRAGRGKKIKKSPVKIAAEKLQIPISQPVSINESEYLEYLNQLDIEIIVVAAYGMIFSEELLAIPRLGCINIHASLLPSWRGASPIQATIMNGDKETGITLMKMTKGLDCGPIYSQHKMKLTQTESGDVLMKMLGNLGAKAIRNDFKSILNQDLIAESQINSKASYSGKIDKKDAKLDWSKSSDTLAREVRAFNSNPGSYFMYKNEAIKCWHAIPKDTDSLPGKVISSDKNGIEIGCGSGSLVMLELQRPGKRRITAGEFAAQVDMNNKELLS

SEQ ID NO: 108496 - protein, 108 aa, Unknown
  Bacterial polypetide isolated from the Sargasso Sea
LSKEEARIDWSMEAVAIERCIRAFNPWPISWFEVAGQTVKVWQAEVVAQDHGQAAGTLLKADKQGIDIATGKGVLRLLTLQPPGKKAMSVTDLLNSRRDWFEPGTQLN

SEQ ID NO: 108497 - protein, 306 aa, Unknown
  Bacterial polypetide isolated from the Sargasso Sea
MSKKIAFMGTPTISGQILKSLYQNGFNIEVVYTQPPVASNRGHRLNKSPVHIMAEILNIPVRTPIVLDNTKEKNFLKEQNISLGIVVAYGQILKKDILEIPKYGWINIHYSLLPKFRGAAPIQRAIMNNEKATGISIMKIDEGLDSGPVCNQYSINILENENSEDLSQRLNNLASEKILQNIDDIFDNKASFKEQDHSKSTYAKKIKKEEGKINWKDSNLKIIGKINGLYPNPGGWFEFKGERYKILKAEKSILSGKSGYVLSDNFEIGCGENSIKIIEIQRQGKTVQKTKEFLRGSQITKGTDLN

SEQ ID NO: 108498 - protein, 297 aa, Unknown
  Bacterial polypetide isolated from the Sargasso Sea
TVGSSPVKARAEELGLFVFTPERIRRDDDCKAKLAALGADTSVVVAFGQILPKDVLEQPPLGCWNGHGSLLPRWRGAGPIQWALLEGDQETGVGIMAMEEGLDTGPVLLEQRTPIPLLEPSIALAERLSALTAELMVQAMPLIEAVGPGPEDERWARLNVRIQAKGSTYARMLEKEDFQLDWSASALSIHRKVMGLHPGAFTQWQGKRLKVLRTEPLIERLEDQLSAEGRNLVGQWPTGGHPPGTILALIEDLGLVVSSSGCPLLIREAQLQGKARSTAPVLLQQLKATPGDRLGER

SEQ ID NO: 108499 - protein, 209 aa, Unknown
  Bacterial polypetide isolated from the Sargasso Sea
FLNLTKKGFINIHASLLPKYRGAAPIQRAIMNLEKKTGISIMKINSQLDEGPVCKSYEIDINEKDSSDDLSEKLSDLAVEKILDDIDDILDDKAKFKDQDHSKATYAKKINKKESSIDWNAPAKSVIAKINGLNGAHFIFQGARYKILKAELNNLSGKPGEIIGDSLEIACKEKSIKVMVIQREGKKPQKTAEFLLGSQIKKGLFLSNV

SEQ ID NO: 108500 - protein, 307 aa, Unknown
  Bacterial polypetide isolated from the Sargasso Sea
MQKKIVFMGTPMFAVPILKSLYQNGYPISCVYTQPPQKSKRGQKINKSPIQLISETLNIEFRTPNSLKENTEEFEYFKSLEADLAIVVAYGQIIPKSYLNLTKKGFINIHASILPKWRGAAPIQRSIMNLDKETGISIMKIGEELDTGPVCNIYKINIENNLNAEDINEKLSSLAAEKILDNIDDIYDDKANFIEQDHSSATYASKILKLEGQINWKEDAKIIIAKINGLYPVPGAYFMFNSERYKILKAEIGQGQGKPGEVLSDYLEISCGDKKSIKIKEIQRQGKKSQSIGEFILGTQIKKGSFL

SEQ ID NO: 108501 - protein, 211 aa, Unknown
  Bacterial polypetide isolated from the Sargasso Sea
NLTKKGFINIHGSILPSWRGAAPIQRSIMNLDKETGISIMKLVEALDSGPVSNVYKIKLDQNNSAEEISEKLSFLAAEKILDDIDDILDDKAKFIDQDHSKASYAKKIEKIEGEINWDDEALKIIGKINGLFPVPGAFFNFKGERYKILKAEIGNGIGQAGEVLSDKLEIACTNNQSIKILEIQRQGKKPQKIGEFMLGSSIRKGSLLSNA

SEQ ID NO: 108502 - protein, 241 aa, Unknown
  Bacterial polypetide isolated from the Sargasso Sea
MNIIFMGTPDFAVPSLKLVASNFNVIAVFSQPARPNGRGMKSKKSSVEIAARELNLNVVTPITLQNEDIFYEFNLLKPDIVVVVAYGLLLPEKYLKVPKYGCINGHASLLPRWRGAAPIQRAIEAGDNKTGTCIMLMEKGMDTGPIISSEIIDIKKNDTSKIIHDKLSKSTAKLLLQAIKNYEEGIVFPINQKLDGIKYANKIHKNEAEIDWELTSIEIFNKVRAFDPFPGTYTKYSNKKL

SEQ ID NO: 108503 - protein, 182 aa, Unknown
  Bacterial polypetide isolated from the Sargasso Sea
MSQKIVFMGTPEFSVPTLESLVNSNNQILAVYSQPPSKANRGQKITPSSVEAFAKEHSLNLRTPDNLNNDKEYNYLKKLNPDIVVVIAYGKIIPKKFLDLSKHGFINVHASLLPKWRGAAPIQRAIMNLDNQTGISIMKIVEELDAGPVMQQDKIQINENIDALTLSKVLSKLGANSILNAI

SEQ ID NO: 108504 - protein, 274 aa, Unknown
  Bacterial polypetide isolated from the Sargasso Sea
MKNKKIIFMGTPDISAKYLNTLIEKNIQIHTVFTQAPKKQSRGMKLSKTPVHLLANKKNINVFHPQNFDIETINILKKIKPDLIIVMAYGKILPKVILELPNYGCINIHVSILPRWRGAAPIEHALMNGDKETGISIIKLIEKLDAGPIIVQKKFIIPENCNKLELTDNLTKIGTKLLVDVIPRILNDNIKLKIQDEKKATYAKKINSITRKINFNNSMKDIINQIRAHAPKPGAWFFINKERIKLIDAKKGTGRGKLSTVLNNKFEIGCNDGS

SEQ ID NO: 108505 - protein, 318 aa, Unknown
  Bacterial polypetide isolated from the Sargasso Sea
IIFWGTPEYSIPSLDIFIKSKHEVIAVVSQPDKKRSRGNKLIASPVKSIAEKESIKIYTPEKIRGNIDFINELKSLSCDLFIVIAYGKILPKEILEIPKFGCWNAHASLLPRWRGAAPIQWSLIRGDEFTGVGIMKMNEGLDTGDILLEEKIKINNNDNLNTLSEKLSILSAKLFLNATSLIEENINKNTNPQLIKQNTLGREITYARMIEKSDFKVDWGNEAIKISQKIKGLYPRTNTNFRGKNLKILKIKVLTSDVMKNEKYLFMSNYSRPGIILAVIENEGIIISTKTDPIILLEAKLEGKNISSKKQLIQQLKP

SEQ ID NO: 108506 - protein, 167 aa, Unknown
  Bacterial polypetide isolated from the Sargasso Sea
MGTPDIAAQHLNILIENNLNIIGVFTQPPRKKNRGLRIHETQVHQIAKKNNIEVYSPTVIDNKVIKKIKNLDPDLIIVVAYGIILPKSFLNIPKYGCINIHVSLLPRWRGAAPIEHALLAGDEKTGITIINISPKLDAGDILMQKTLSIDNNIYSDDLTLNLTNLGK

SEQ ID NO: 108507 - protein, 87 aa, Unknown
  Bacterial polypetide isolated from the Sargasso Sea
MTTPLRIIFAGTPDFAARHLAALLDSPHQVIAVYSQPDRPAGRGHQLQQSPVKQLALQHDIPVYQPKSLKKAAAQQELAALNADLMI

SEQ ID NO: 108508 - protein, 214 aa, Unknown
  Bacterial polypetide isolated from the Sargasso Sea
MKIIFAGTPQFAAEHLKILVASDHHIGCILTQPDRRSGRGKQIKLSPVKEVGLENRIEVLQPSSLKDKLTVEALKLNEPDLMLVVAYGLLVPKEVLDIPKMGCVNVHASILPRWRGAAPIENSIYSGDKETGITYMLMSEGLDEGPILEVHKCRIEDEDNLGTIENKFVNLSKANLLNFLEEFEKGKIKEVQQDHSKATLAPKITSLDQEINWD

SEQ ID NO: 108509 - protein, 282 aa, Unknown
  Bacterial polypetide isolated from the Sargasso Sea
YPISVVYTQPPKKSNRGQKFNKSPINLFSENISLDVRTPRSLKNNLEEELYLNKLQPDIVLVVSYGQIIPKNILKIAKNGFINVHASLLPKWRGAAPIQRSIMNLDSETGISIMKINENLDEGPICNQYSLNISEKMNSEELSEKLSLMASEKILDILDNIYDGNIEFKDQDHSKATYAKKIQKIEGKIDWNENAEKIIGKINGLYPYPGAFFSFNGERYKILKAEKSSTTGKPGDIVSENFEVCCGKGSIKVLTIQREGKRVQQINEFLLGTQIKKGTNIV

SEQ ID NO: 108510 - protein, 251 aa, Unknown
  Bacterial polypetide isolated from the Sargasso Sea
NFRTPEKLKNNNEEYQFIKNMNADLAVVVAYGQIIPPEFLKLTKKGFINIHGSILPKWRGAAPIQRSIMNLDNETGISIMKIVEKLDSGPVSNIYKIELNNKNNAQEISEKLSILAAEKIIDNVDEILEDSAKFVEQDNSKATYAKKIKKTEGKINWNDKAISIVGKINGLFPTPGAFFNFNSERYKVLKAEIGNGLGEIGEVLSDKLEVACANNQSIKVLEIQREGKKPQKIGEFMLGSQIKKGSVISNV

SEQ ID NO: 108511 - protein, 272 aa, Unknown
  Bacterial polypetide isolated from the Sargasso Sea
MQQKIAFMGTPNFAVPILKCIYQNGHAISAVYTQPPKKSNRGQKIEKSPIHLLAETLNLNVRIPDKLKENDSEYEYIKNLDLDLAIVIAYGQIIPKNFLSLSKNGFINLHASILPKWRGAAPIQRSIMNQDKETGISVMKINERLDEGDISNIFRINILENENAESLSDRLSILASKNISNIIDCIFEKKVSYQSQDHSKATYAKKIKKTEGLIDWNDTAENIIGKINGLYPYPGGYFLFKGERYKILRAEKSFSKENPGKVLTNDLEGGLW

SEQ ID NO: 108512 - protein, 229 aa, Unknown
  Bacterial polypetide isolated from the Sargasso Sea
KILPKEILEIPKFGCWNAHASLLPRWRGAAPIQWSLMKGDEFTGVGIMKMDEGLDTGDLLLEEKIKIDNNDNLNTLTERLSILSAKLFLNATSLLEENINKKTNSHLTKQTTLEREITYARMIEKTDFKVDWGNDAIKISRKIKALFPRANTTFRGKNLKIIKIKVLSSNEIKNEKYLFISNYSKPGIIIAVIENEGIIISTKTDPIILIEAKLEGKNISSKKQLIQQL

SEQ ID NO: 108513 - protein, 238 aa, Unknown
  Bacterial polypetide isolated from the Sargasso Sea
NKQEIKFFEKINPDVAIVVAYGKILPKKILDLKNIKFLNIHASLLPKWRGAAPIQRSIINMDKETGISIMKILPKLDSGPIMLQEKIKITNDDDYNSLSRKLSILGSKLILETLNLIEKKSFKFIDQDEQLATYAKKVNKDEAMADWNMTAEQIVAKVKGLNPFPGVWFVHKRVRIKIISASVTSSRGNPGEVLDDELTIACKEKSIKISMLQKEGKKKLTSKDFLIGYKIKKGEKLS

SEQ ID NO: 108514 - protein, 179 aa, Unknown
  Bacterial polypetide isolated from the Sargasso Sea
MKNKKIIFMGTPDIAAQHLNILIENNFNIVGVFTQPPRKKNRGMRIEKSDVHQIAEKNNIEVFYPTSIDNTVTEQVKSLKPDLIIVIAYGIILPSKFLYIPTYGCINIHLSLLPRWRGAAPIEHALLAGDVKTGISVISVSPKLDAGDILMQESFALDTYMNSDDLTLNLTNLGKKILI

SEQ ID NO: 108515 - protein, 162 aa, Unknown
  Bacterial polypetide isolated from the Sargasso Sea
MANKIIFMGTPIFCVPILKSLYQNGYNISVVFTQPPQKSHRGQKINKSPIQGISETLNIDYRTPKTLKDNQEEYEFLKELNADLAIVCAYGQIIPENFLNLTKKGFVNIHASILPSWRGAAPIQRSIMNLDPETGISIMKIKKELDSGPKSNIYKIRIDQNQ

SEQ ID NO: 108516 - protein, 295 aa, Unknown
  Bacterial polypetide isolated from the Sargasso Sea
MQARQGKTSDMRIAFLGTPDFSVPALDALLSAGHEVTCVYTQPPRPAGRGKAERRSPVHDRAEAVGISVRTPKTLRDPNVQAAFAALNLDAAVVVAYGLILPQPVLDSPAHGCINIHASLLPRWRGAAPIQRAILAGDAETGITIMQMDAGLDTGPELLRKPVLIAPDTNAGMLHEALAETGGRLIVAALAGIEDGTLQAVPQSETGDTYAQKIKRGEERIDWSQPATMLDRHVRAFAPWPGAWFEHDGDRIKVLKAAIAATDGAPGEVMDDALTVACGEGALRLMTRPTGWQGG

SEQ ID NO: 108517 - protein, 275 aa, Unknown
  Bacterial polypetide isolated from the Sargasso Sea
MSGLRLAFMGTPDFAVPSLVALHEAGHEIAAVYTQPPRRAGRGQKERPTPVQAWAVEHGLPVYTPTSLRDESAQTAFSALGLDAAVVAAYGLILPLPILAAPRLGCVNVHASLLPRWRGAAPIQRSILAGDVETGISIMMMEEGLDTGPVLSMESIATVGETTAGELHEALAELGGRMIVSALEEYAAGAITPQPQVDADATYARKIDKSEARIDWSEDSMAVQRRINAFAPWPGAWFEVAGERIKVLAAETVDASGAKGETLDDDLTVACGMVR

SEQ ID NO: 108518 - protein, 148 aa, Unknown
  Bacterial polypetide isolated from the Sargasso Sea
MALKLIFMGTPEFAVPILKTIHSSEHKILCVYTQPPKRKHRGQKIYSSPVQQYAERSNLKLRYPSDLNEEEYQYIKTLKPEAVIVVAYGKILPKKILGLKNIEFLNVHASLLPKWRGAAPIQRAIMNLDKTSGISIMKIVSKLDAGPT

SEQ ID NO: 108519 - protein, 198 aa, Unknown
  Bacterial polypetide isolated from the Sargasso Sea
MIDKKIIFMGTPDIAAQHLNTLIENKLNLVGVFTQPPRKKNRGMQIEESAVHQIAKKNNIEIYYPSKIDDKVIEHTKILKPDLIIVVAYGIILPTSFINIPKYGCINIHVSLLPRWRGAAPIEHALLAGDNKTGISIINITSKLDAGDILMQDSFLLDQNMYSDDLALNLTNLGKKAMIKILPLIFKNKIIGKKQDEK

SEQ ID NO: 108520 - protein, 241 aa, Unknown
  Bacterial polypetide isolated from the Sargasso Sea
YGKILPKEILEIPKFGCWNAHASLLPRWRGAAPIQWSLIKGDEFTGVGIMKMNEGLDTGDILLEEKIKINNNDDLNSVSEKLSILSAKLFLNATSLIEENINKNTNPQLTKQNTLGREITYARMLEKSDYKVIWSIEAFKISQKVKALYPRANTTFRGKNLKIIKIKVLSSDEVKNEKYPLMSNYSKPGIIIAVIENEGIIIATKTDPIILLQAKLEGKNISSKNQLIQQLKPTVGDYFSD

SEQ ID NO: 108521 - protein, 249 aa, Unknown
  Bacterial polypetide isolated from the Sargasso Sea
MTNFRILFMGTAPFSIPTLQKIITSGHELKGVYTSPSKKANRGMQISKSPVALYAEENNLEIYSPKELRSPEEIKFIKDMNLDFIVVIAYGLILPEEILNLPKFGCYNLHASILPRWRGAAPIQRSMIEGDEMTGVTIMKMNKGLDTGDIVLQDKIKINISESYTELETRLSLMGAELFEKFFKDSLFKNIMQKQDDTFSSYAEKISKQETKIDWKEDALKIVRRINAYNPNPGAWVMWKNKRVKIIKA

SEQ ID NO: 108522 - protein, 145 aa, Unknown
  Bacterial polypetide isolated from the Sargasso Sea
MTNFRILFMGTAPFSIPTLKKISTSGYELKGIYTSPSKKANRGMKLSKSPVALYAEENNLKLYSPKELSSTEEIKFIKDMKLDFIVVIAYGLILPEEILNLPKFGCYNLHASILPRWRGAAPIQRSMIEGDEMTGVTIMKMNKGL

SEQ ID NO: 108523 - protein, 250 aa, Unknown
  Bacterial polypetide isolated from the Sargasso Sea
MAYEILFMGTPEFSVPILKCLNSKHKILSVYTQPPKKKSRGQKIVKSPIHLESEKLKLPIRFPENLNNNEEYKFIKESKAKFVIVVAYGQIIPENFLNTKNLIFLNIHASLLPRWRGAAPIQRSIIEMDKETGITIMKIIPKLDAGPYMLQKKIVINDNDNFVSLSKRLSDLGSESILEALSLFENNKVHFINQQEQMITYAKKINKKESEIDWNDSAKKIVAKINGLNPYPGVWFEHKGTRIKIIKAET

SEQ ID NO: 108524 - protein, 188 aa, Unknown
  Bacterial polypetide isolated from the Sargasso Sea
MNNKKIIFMGSPKIASDYLEALIKNNFTISAVFSQPPKKKSRGMKIIKSEVHQLANKNNIEVFCPNIFDKDTIETVIKLNPDLIIVMAYGKILPNDILDLPPFGCINIHVSLLPRWRGAAPIEHSLMSGDKETGVSIIQLIEKLDAGPIIKQKKIDIEHDCNKNELSQKLTETGIQLLVETIPLIFNK

SEQ ID NO: 108525 - protein, 220 aa, Unknown
  Bacterial polypetide isolated from the Sargasso Sea
MANKIIFMGTPIFCVPILKSLYQNGYNISVVFTQPPQKSHRGQKINKSPIQGISETLNIDYRTPKILKDNQEEYEFLKELNADLAIVCAYGQIIPENFLNLTKKGFVNIHASILPSWRGAAPIQRSIMNLDPETGISIMKIKKELDSGPVSNIYKIKIDQNQNAQEISEKLSALAAEKILDNVDDILEDKAKFIDQDHSKATYAKKIQKEESQIDWNKDA

SEQ ID NO: 108526 - protein, 254 aa, Unknown
  Bacterial polypetide isolated from the Sargasso Sea
MAFNIIFMGTPVFAVPILKAIFESKHNVLEVYTQPPKKMYRGQKINFSPIHKYCLDNKIKVRHPETLDTITECNYFSKLKADLVVVVAYGKILPKNLLSIKNLKFINIHASLLPKWRGAAPIHRAIMNLDQETGISIMQIIPKLDAGPVMMNSKINITKTTNFETLSNELSMLGSRLILESLDKIEKGEEKFIPQNESKATFAKKITKSESRIDWCDSASKVVAKINALNPQPGTWFEYNKSRIKVIKAIELKK

SEQ ID NO: 108527 - protein, 194 aa, Unknown
  Bacterial polypetide isolated from the Sargasso Sea
MSLKILFMGTPEFAVPVLKSLSESEHKILSVYTQPPKKKFRGQKVIETPVHILSKKLNYEIRCPKNLSNDNEYDFIKKLSPNVVIVVAYGQIIPEKILNIPHILFLNVHASLLPKWRGAAPIQRSIMEMDEETGVSIMKIIKKLDAGPYLLQEKIKLKKNENSESLAFKLSKIGSKLIIKALKLISSGDAIFNE

SEQ ID NO: 108528 - protein, 206 aa, Unknown
  Bacterial polypetide isolated from the Sargasso Sea
MKKKIIFMGTPLFAVPILKSLYQNGYPVSVVYTQPPNRSQRGQKLKNSPIQNMSEILNLEVRTPKNLKNNKEELNFFQSLNADLGLVVAYGQIIPEEYLNLTKYGFINIHASLLPKWRGAAPIQRSIINLDQETGISFMKLVKNLDEGPVCKKFKITINKKDNYETLSDKLSSLASEKILDIIDDIFDEKVLFEKQKHNEASYANK

SEQ ID NO: 108529 - protein, 87 aa, Unknown
  Bacterial polypetide isolated from the Sargasso Sea
MRIVFAGTPEFAVASLGAAARHHEVVAVYTQPDRPAGRGRGLMPSPVKLDAIARGIPVFQPESLKTPEAQRQLRDLQPDLMIVVAYG

SEQ ID NO: 108530 - protein, 167 aa, Unknown
  Bacterial polypetide isolated from the Sargasso Sea
MQQKIVFMGTPEFSIPTLEALITSKHKVLTVYSQPAKKANRGQKIISSSVETFARNKSLNVRTPTNLNTNNEYNFFKKIKPDIVIVVAYGNIIPKRFLNLAKNGFINLHASLLPKWRGAAPIQRSIMNLDNETGVTIMKIEEELDAGPIIHQDKIKINEKINTLKLV

SEQ ID NO: 108531 - protein, 211 aa, Unknown
  Bacterial polypetide isolated from the Sargasso Sea
MKIVFMGTPSFALPVLNALSLSKNKICTIYTQAPKKSGRGKKVNKSAVHNFAVENNIQVKTPKKLTTDTDAYHIKKIKADICVVAAYGLILPESVLSAPLLGCINIHASLLPKWRGAAPIQRSILAGDNETGITIMRMNKELDSGNILSQAKIKITQKTNFSDLENSLSIIGANELMKVLKNFSENKIKEIEQEHKLATYATKLKKMKVKL

SEQ ID NO: 108532 - protein, 260 aa, Unknown
  Bacterial polypetide isolated from the Sargasso Sea
RSEVHQIAKKNNIEIYYPSAIDETVIQQIKNLEPDLIIVVAYGIILPASFINIPKYGCINIHVSLLPRWRGAAPIEHALLAGDNKTGISIININSKLDAGDILMQESFLLDQNMYSDDLTFKLTNLGKKAMIKILPLIFKNKIIRKKQDENKVTFANKFLNEDRKINFHNSTSDVYNHIRAHGPKPGSWFIYKGERIKIIKAKKTKESGQSSTILNKDFIIGCKDGGIIPLLIQREGKKIVNLVDFLRGFTFSIHDKLNV

SEQ ID NO: 108533 - protein, 248 aa, Unknown
  Bacterial polypetide isolated from the Sargasso Sea
MKIVFAGTPEFASKHLEMILKSEHEIVGVMTQPDRKSGRGKKINFSPVKQLAELERLNLLQPSNLKNDEFIESFTSLEPDLFLVVAYGLIIPKQILKIPNLDSINVHASILPRWRGASPMEYAILNGDNKTGISYMRMNEGLDEGPIYEIHECEISLSDGLEEIENKLISLSDQYLINFLDRISEDNMSPTSQPETGITFAPKIGKDLLSIRWDKDRAEEIVKKINALGTKYGTYTFLGRDRVKIIKA

SEQ ID NO: 108534 - protein, 132 aa, Unknown
  Bacterial polypetide isolated from the Sargasso Sea
MAKKIIFMGTPMFAVPILKSLYQNGYPVTCVYTQPPQKSHRGQKINKSPIQGISETLNLEYRAPSTLKENKEEYEFFKSVDADLAIVVAYGQIIPKEFLSLTKKGFINIHASILPKWRGAAPIQRAIMNLDK

SEQ ID NO: 108535 - protein, 242 aa, Unknown
  Bacterial polypetide isolated from the Sargasso Sea
DTLETSEEINHFKTLKPDLVVVVAYGKILPSKLLNIDKLLFINAHASLLPKWRGAAPIQRAIMNMDSETGISIMKIIPKLDAGPVMLQEKIKISKEMSYENLSNKMSEIGAKLILESIKLIENNKVNFIEQKESEASYAEKIRKNESKINWNESAKKIIAKINALHPNPGCWFKFSESRIKIIKAIEVEKTGEAGTILDDKMTIACAKNAVQILELKKEGKKQMLIDEYLKGNEIKIGQKLN

SEQ ID NO: 108536 - protein, 131 aa, Unknown
  Bacterial polypetide isolated from the Sargasso Sea
MSKKIVFMGTPAFAVPSLEALKNSNHNILAVYSQPASRANRGQKLVESKVEITAKKFSLNIRTPSVLDSKTEYNFFKSIQPDIVIVVAYGKIIPKKFLSIPKYGFINVHASLLPKWRGAAPIQRSIMKLDK

SEQ ID NO: 108537 - protein, 210 aa, Unknown
  Bacterial polypetide isolated from the Sargasso Sea
LLNLDKVLFINVHASLLPKWRGAAPIQRAIMNLDNETGVSIMKIVTELDAGPVLMQSKIKITKETNYKELSGQMSELGAKLILDTLKLIENKKANFVEQNDTEATYAKKIEKKETKINWNDDAEKIIAKINAFYPNPGCWFEFEGIRIKIIKAKEIIIKAIPGKILDDKFTIACSKNAVQIIELQKEGKQKMTVDQFLRGNKIKIGQNLN

SEQ ID NO: 108538 - protein, 142 aa, Unknown
  Bacterial polypetide isolated from the Sargasso Sea
MAKKIIFMGTPMFAVPILKSLYQNGYPITCVYTQPPQKSHRGQKINKSPVQGISETLNLDYRAPSTLKENKEEYEFFKSVDADLAIVVAYGQIIPKEFLRLAKKGFINIHASILPKWRGAAPIQRAIMNLDKETGVSIMKID

SEQ ID NO: 108539 - protein, 185 aa, Unknown
  Bacterial polypetide isolated from the Sargasso Sea
KIICVYTQPPKKKARGQKIISSPIYEYAKKLNLSTRCPIKLNDDKEYDFIKKKNPSIVIVVAYGQIIPKKFLDLPKVIFLNIHASILPKWRGAAPIQRAIMNLDKESGISVMKIEPKLDTGPVMMKSKVIIYKETSYEDLSKKLSNLGAKLILDSLNLIQNKKANFVDQDEKEASYAKKIEKKES

SEQ ID NO: 108540 - protein, 232 aa, Unknown
  Bacterial polypetide isolated from the Sargasso Sea
FIQKLNPDIIVVVAYGKIIPPEYLKIKNIKFINIHASLLPKWRGAAPIQRSLMEMDEETGISIMKIIPKLDSGPFLLQEKIQIKKSDNYDSLSAKLANLGSRLIIKSLNLIEANNFKLIDQDETKATYARKIDKKESKIDWNIPAKKLIAKINGLSPFPGAWFEHKKKRIKILEALEVEQTGETGEILDDNLTIACKEKAIKVLSVQKEGKKILKTKEFLSGYLVRKGEKLI

SEQ ID NO: 108541 - protein, 247 aa, Unknown
  Bacterial polypetide isolated from the Sargasso Sea
MSLNVIFMGTPKFSLPALEELIRNNFNILTIYTQPPQKSKRGQKINPSAIEEFSRKKNLNLRSPKSLNNGEELKFFKNLSPDLVVVVAYGQIIPKNFLEIPKFGFINIHASLLPKWRGAAPIQRAIMNQDKKIGVSIMKVEEKLDTGPVLNSKEMELNKNSTYGEIEKKLSIIGASLLVETLKKLSIKKIEFIKQDNNKVTYAKKISKDETRINWNLEADKVIAHIHGLSPSPGAWFEHKGDRFKVF

SEQ ID NO: 108542 - protein, 207 aa, Unknown
  Bacterial polypetide isolated from the Sargasso Sea
MSKKIIFMGTPFFAVPILKSLYQNGYPISVVYTQPPKKSKRGQKINKSPIQGLSETLNINFRSPITLKNNQEEYEFLKEMKADLAIVVAYGQIIPKEFLNLTKKGFINIHGSILPKWRGAAPIQRSIMNLDKETGISIMKIVEELDSGPVCDVYKVKMNYLNNAQEVSEKLAVLASEKILANIDDILDDKAKFIEQDHSKATYAKKI

SEQ ID NO: 108543 - protein, 221 aa, Unknown
  Bacterial polypetide isolated from the Sargasso Sea
SFKSDKDRTIFRNLKADIAVVVAYGLILPNQILSAPKFGCLNIHASLLPRWRGAAPIQRAIMEGDDETGVCIMKMEEGLDTGPILSSRKIQIRENDNAKILSERLSSVGSKLIVKVLDTLSEFRPYSQSAAGVTYARKIEKSETKIDWSLPAKTIDRKIRALSPFPGAWTEINGERIKLLASKVINKENEPGMVLDKGFSIACGQKAVEITEAQRPGKSAQ

SEQ ID NO: 108544 - protein, 201 aa, Unknown
  Bacterial polypetide isolated from the Sargasso Sea
INLHTSLLPKWRGAAPIQRAIMNGDKTIGMSIMKIEEKLDCGPILLSKEINLDQKTTYGEIEKKLSIMGANLLIESLKNIEAGDVKFTDQDHSKATYAKKIDKNETKINWNQDANKVLAHINGLSPIPGAWFEYKNERFKILKAKISSQKGKYSTVLDDYLTIGCKSDSIQVLELQRQGKNKQTTKEFLLGNKIPKGLILN

SEQ ID NO: 108545 - protein, 234 aa, Unknown
  Bacterial polypetide isolated from the Sargasso Sea
MPKKIVFMGTPMFAVPILKSLYQNGYPVSCVYTQPPQKSKRGQRINKSPVQLISETLNIDFRTPNSLKENLEELEYFKSLKADLAIVVAYGQIIPKSYLNLTKKGFINIHASILPKWRGAAPIQRSIMNLDKETGISIMKIGEELDTGPVCNVYKINIENNLNAEDISEKLSSLAAEKILDNIDDIYEDKANFIEQDQSSATYASKIQKFEGQINWKEDAKNIIGKINGLYPVP

SEQ ID NO: 108546 - protein, 154 aa, Unknown
  Bacterial polypetide isolated from the Sargasso Sea
MLKNIVFMGTPEFSVPILKSLYQNGYPIKTVYTQAPQKSNRGQKINKSPIHKISELLNLEVRTPITFKNNKEEFEYLKKIDADLVIVVAYGQLIPESFLKLAKKGFINVHASLLPKWRGAAPIQRAIMNLDDKTGISIMKITKELDSGPICNLY

SEQ ID NO: 108547 - protein, 224 aa, Unknown
  Bacterial polypetide isolated from the Sargasso Sea
MKIIFAGTPEIGLETLKTIHGSNHEISLVLTNEDKPSGRGKLISKSPVKIFAEDNEIMLKQPKNLKEKGLVTYLKNINADLLVVFAYGHIIPEEILEIFEKGALNVHTSLLPELRGAAPIQRAIMNGDTETGISFMKMEKGLDTGPIYSQEKIEIEENETSETLTAKMSEVSSSRILQIIDLIDKNNFKLTPQNSSNATYAPKIMKEEAKINWDESAIKIVNLI

SEQ ID NO: 108548 - protein, 226 aa, Unknown
  Bacterial polypetide isolated from the Sargasso Sea
MLKKIIFMGTPMFAVPILKKLYQNGYQISAVYTQPPKKSNRGQQLKISPIHGISETLGLDIRSPNYLNGNEKEINFIKNLDADLAIVVAYGQIIPKEFLSLTKKGFINIHASLLPKWRGAAPIQRSIINLDNETGISIMKINSKLDAGPVCKFYKVPIYEQDNFLSLSEKLSDLASEKLLDNIDEILEGSMKFIDPDNTKATYAKKILKSEGKINWNESAIQIIGK

SEQ ID NO: 108549 - protein, 309 aa, Unknown
  Bacterial polypetide isolated from the Sargasso Sea
MKIIFMANPEFSCPSLKAFYNSDHDLVGVISNKPKRMKRSMDKSFTPLGNLAIDLDQNLFTTDNLSDTNLQTWAKKLKPDIFIVVAFKILPNTLLEIPKIGAINLHASLLPKYRGAAPIQHALINGDKVTGNSTFFIKPKVDTGKIILQEKILIDDKDNYESLSKKMSTSGAELLLKSLDKINESSFKALEQNDKKATYAPKIDKSFCKINWNESAQSIHSKVRALSPVPSAFTLLNGKRLKIYDTRLVKDPLKSPPGSITHINDKILISCFDYQLELISVQYEGKKRMSAIDWIRGINYTSGFSFDKE

SEQ ID NO: 108550 - protein, 211 aa, Unknown
  Bacterial polypetide isolated from the Sargasso Sea
MGLYSDRFINIHASLLPKWRGAAPIQRSIMNLDKETGITIMKINEKLDQGDFCSQYKLKIENNENAENLAQRLSNLAANKIIGDLDDILENKKLFIKQNNNEASYAKKISKTEGKINWDKSAEQIIANINGLYPKPGAWFYFKKNRYKILKAEVSNNNSVPGLVVNENLEISCGSNSIKIIKIQREGKKEQNIEDFILGTKIKKGVNLKDV

SEQ ID NO: 108551 - protein, 276 aa, Unknown
  Bacterial polypetide isolated from the Sargasso Sea
ILNLPQKSKRGQQVNRSPIQSMSEVLNIEFRTPQTLKNNNEEYEYLKKLDADIAIVVAYGQIIPPEILKLTKKGFINIHASLLPKWRGAAPIQRAIINLDKLTGISIMKINENLDSGPVCNSYKVDILNNENAEEISNKLSSLAAEKILENLDDIFGDKANFTEQDHSQATYAKKINKLEGKINWNEKSMAIIGKINGLYPNPGAWFIFKGERYKILKAIISEKEGEPGIVLNDYLEIACNDKSIKILEIQREGKRQQKIEEFVLGSKIKKGSNLN

SEQ ID NO: 108552 - protein, 270 aa, Unknown
  Bacterial polypetide isolated from the Sargasso Sea
MNDKKIIFMGTPHIAAQHLQYLIDNSLNIIGVFTQPPRKKNRGMHIEESPVHQIAKKNNLQTYYPSSIDYSVIEKINSLNPDIIIVVAYGIILPSQILDTPKFGCINIHVSLLPRWRGAAPIEHALLAGDVKTGISVIKISPKLDAGDILHQESLNISADMYSDELTVALTNLGKQTILKVLPKIFENKTLSKKQESNKVTYAKKFISNDRKINFNNSTTQVYNHIRAHGPKPGSWFVYRGERIKILKAIKHKEKGQQSTILNNKFMLAC

SEQ ID NO: 108553 - protein, 136 aa, Unknown
  Bacterial polypetide isolated from the Sargasso Sea
MQQKIAFMGTPDFAVPILKNIYQNGYEILTVYTQSPKKSNRGQKVEKSPIHLFAETLNLNVRTPDQLKNNILEYDHIKNLDLDLVVVVAYGQIIPSDFLSLSKEGFINLHASILPKWRGAAPIQRSIMSPDKETGI

SEQ ID NO: 108554 - protein, 268 aa, Unknown
  Bacterial polypetide isolated from the Sargasso Sea
MPKKIIFMGTPMFAVPILKSLYQNGFPINLVYTQPPQKSHRGQRINKSPVQGISETLNIEFRSPQNLKNNTEEYEFFKKIDADLAIVVAYGQIIPKEFLSLTKKGFINIHASILPKWRGAAPIQRAIMNLDTETGISIMKINEELDSGPVSNIYKIKLDQSLNAKEVSEKLALIAAEKILDVVDEIFEGKSNFVDQDNSKATYAKKISKNEGQIDWKSDALKIIGKINGLYPSPGAFFNFNGQRYKILKAKIGNGIGKMVRLYQTIFE

SEQ ID NO: 108555 - protein, 189 aa, Unknown
  Bacterial polypetide isolated from the Sargasso Sea
MTRYRIVFMGSPDFAIPALQKLAKTHNICAVYTQPARPAGRGMDPTPVPVAAYAADKSLKLFSPASLKTDDTQHQLAAHDADLFVVVAYGLLLPKIVLNMPKLGCINGHASLLPRWRGAAPIQRAIAAGDAVTGISVMLMDEGLDTGKVLMRRSIKIDPAETAGSLHDKLATLNAETLGEVVGDITSLL

SEQ ID NO: 108556 - protein, 220 aa, Unknown
  Bacterial polypetide isolated from the Sargasso Sea
PAYAVPTLRKLHQAGHTIVGVVSQPDRRRGRGQQLVASAVKQEALNLNLPVFTPERIKKDSDCQAQLAALQADASVVVAFGQILPLEVLEQPPLGCWNGHGSLLPRWRGAAPIQWSILDGDAETGVGVMAMEEGLDTGPVLLERRLSIGLQDNAHELAEKLSDLTAELMVEAMPLIEAAGAGPTDERLKRLSVQHQADASCYARMICKQDYQIDWSNSAL

SEQ ID NO: 108557 - protein, 228 aa, Unknown
  Bacterial polypetide isolated from the Sargasso Sea
MNKLKIVFAGTPQFAESYLASLISSRHDVVCVFTQPSKRSGRGLKFNHSPVRNTAQANNIDIRQPEKITIVETDALSEINPDIVIVVAYGLMLSKEFMSVPRFGCVNVHPSLLPRWRGAAPIQRSIESGDKLSGITIIKMKEKLDAGDIIYQEPVKIDTNDSSLSLHKKFVEVGTDILLLTLDSITENNYMMYPQDENLATYAKKIKKEEAKINWDNSAEKIHRKIMA

SEQ ID NO: 108558 - protein, 207 aa, Unknown
  Bacterial polypetide isolated from the Sargasso Sea
MSLNVVFMGTPEFSVPTLNALIKNKHNVIKVYTQPPKKSKRGQKVNPSPIEEFCKKNNINLSNPTNLNNKEELEILKKLSPDIVVVVAYGQIIPKNFLDIAKFGFINIHASLLPKWRGAAPIQRAIMNGDKKIGVSIMKIEKKLDSGPILASEELELDQNATHGEIEKQLSIMGANLLIKSLKNIEDGNSKFVDQVHSEATYAKKID

SEQ ID NO: 108559 - protein, 273 aa, Unknown
  Bacterial polypetide isolated from the Sargasso Sea
KSLKVYTPAKIKNNTQFINELKSLSCDLFIVIAYGKILPKEILEIPKFGCWNAHASLLPRWRGAAPIQWSLIKGDEFTGVGIMKMNEGLDTGDLLLEEKIKIDNDDNLNTLSEKLSILSAKLFLNATSLIGENINKNSNYQLTKQNTLGREITYARMIEKSDFKVDWGNEVIKISQKIKALYPRANTTFRGKNLKILKIKVLTSYEIKKEKYLFISNYSRPGIILAVIENEGIIISTKTDPIILLEAKLEGKNISSKNQLIQQLKPTVGEFSQ

SEQ ID NO: 108560 - protein, 254 aa, Unknown
  Bacterial polypetide isolated from the Sargasso Sea
MSKKIVFMGTPSFAVPILKNIYQNGFDISAVYTQPPKKSNRGQKLNKSPIHLFAETLNLEVRVPKNLKDNREEIEFLKKLNIDLVIVVAYGQIIPSNYFELSKNNFINIHASILPKWRGAAPIQRSIMNSDTETGISIMKINNKLDQGDILDVYKLQIVKNENSQSLADRLSELASVKICEVIDKIFDGKVNYRSQDNSKATYAKKIEKSESKINWNEKAKKVLAKINGLYPHPGSYFVFNGERYKILKAEISI

SEQ ID NO: 108561 - protein, 191 aa, Unknown
  Bacterial polypetide isolated from the Sargasso Sea
MDDLTGVKIGFFGTPDFALKFLNYLYENNADISFIVTQPASVSGRGKKITPSPVERWGVEKNLKVYSPKKVNDQSFRKEIKRKNVDFIVVVAYGNLVDNFIINFPKFLTINVHASLLPKWRGAAPIQRSILNNDKETGICIMKVDEKLDAGPIIKFEKIKINFDDNAGSIYKKMISVGLPLLVKAIKDIRK

SEQ ID NO: 108562 - protein, 290 aa, Unknown
  Bacterial polypetide isolated from the Sargasso Sea
LKSLYQNGYPISAVYTQPPKKSNRGQKLNKSPINLFSENISLDVRVPQSLKNNNEEELYLTKLKPDIILVVSYGQIIPKNILNIPKYGFLNVHASLLPKWRGAAPIQRSIMNLDRKTGISIMKINENLDEGPVCNQYSTNISEKMNSEELSEKLSLIASEKILDILDNIYDGNIEFRDQDHSKATYAKKIQKIEGKIDWNENAEKIIGKINGLYPYPGAFFSFNGERYKILKAEKSNTNGKAGSIVSENFEVCCGEGSIKVLSIQREGKRVQQINEFLLGTQIRKGSNIA

SEQ ID NO: 108563 - protein, 166 aa, Unknown
  Bacterial polypetide isolated from the Sargasso Sea
MPKKIVFMGTPMFAVPILKSLYQNGYPVSCVYTQPPQKSKRGQKINKSPVQLISETLNIDFRTPNSLKENLEELEYFKSLKADLAIVVAYGQIIPKSYLNLTKKGFINIHASILPKWRGAAPIQRSIMNLDKETGISIMKIGEELDTRPVCNVYKINIENNLNTED

SEQ ID NO: 108564 - protein, 226 aa, Unknown
  Bacterial polypetide isolated from the Sargasso Sea
MKQHRILFMGTAQFAVPSLIKLLELDQKIINIYSSPSKKANRGMRFSKSPVTEFAMRNGYQILKNNLYQPESLDNYKQIRRIEILDPDIIIVIAYGLIIPKEILSIPKLGCFNLHGSLLPRWRGAAPIQRAMIEGDTKTGITFMKMDEGLDTGDIVLSKEISVNVNDNYKNLEEKLSNLGADSFSEFFNLIENKKDFVRQNNDLSTYAKKIEKSETRLNWSESAEK

SEQ ID NO: 108565 - protein, 211 aa, Unknown
  Bacterial polypetide isolated from the Sargasso Sea
MKNYRILFMGTAPFAVPSLKKIFSSNNHLVGVYTSPAKKANRGMKLSISPVAEFAEAENIEISSPPSISSSEELKKLQEMNLDMIIVVAYGLILPEEVINLPKLGCFNVHASLLPRWRGAAPIQRAMIEGDQTTGVTIMKMDKGLDTGDIGLQKEIKIDQQNYSELEKELANEGAELLINFLDRLDGSIQFAKQNDMQACYAKKIQKQEAL

SEQ ID NO: 108566 - protein, 272 aa, Unknown
  Bacterial polypetide isolated from the Sargasso Sea
KKLTASPVKVLAEENAIPVYQLQSLKAQDAQEELASLNADLMVVVAYGLILPTTVLNAPKLGCINVHGSILPKWRGAAPIQRSIWAGDAETGVTIMQMDEGLDTGDMLHIATLPITSEDTSATLYEKLAELGPQALVEVVNEFDRYTPTKQDDSQATYAKKLSKEEALINWADDAEQIERNIRAFNPWPVAWMQVEDQNVKVWSASVVPLNKGATPGTVISANKEGITIATGRDALRITSLQIPGKKALPASDVINARQTWFEVGRCLTQAD

SEQ ID NO: 108567 - protein, 121 aa, Unknown
  Bacterial polypetide isolated from the Sargasso Sea
MHNKKIIFMGTPNIAADYLNSLIKNKINIFSVITQPPKKQSRGMKIIKSPVHTLAEENDLKVLTPQIFDNEIIYDFKKIQPDLIIVVAYGKILPKKILELPKLGCINIHLSILPRWRGAAP

SEQ ID NO: 108568 - protein, 241 aa, Unknown
  Bacterial polypetide isolated from the Sargasso Sea
MSIQKYKIIFMGTPDFSVKPLNALIEAGHDVVAVYAQPPRPKDRGQKLQKSPVHLFAEEKNIPVFTPNSFKKDLEAVAHFQSLKADFAVVAAYGLLLPKVILDAPKYGCVNIHASLLPRWRGAAPIQRSILAGDQSTGITIMQMDEGMDTGDMLLKDEVAITDQTTASSLHDQLSEIGSDLIVQALIEHAKKGFSPIAQSEHEATHAPKLQKEEGAINWQMRAIEIGCKIRAFTPWPGVYF

SEQ ID NO: 108569 - protein, 258 aa, Unknown
  Bacterial polypetide isolated from the Sargasso Sea
MSKKIIFMGTPFFSVPILKSLYQNGYPISVVYTQPPQRSNRGHKINKSPIQGISETLNIDFRAPITLKDNQKEYEFLKELNADLAIVVAYGQIIPKEFLELTKKGFINIHGSILPKWRGAAPIQRSIMNLDEEVGISIMKIVEELDSGPVCNSYKFKLDKKHNAQEISEKLSILAAEKILDNIDDIFEDKSKFIEQDHSKATYAKKIDKKEGQIDWRQEASKIIGKINGLFPSPGAFFNFHGERYKILKAEIVNGVGK

SEQ ID NO: 108570 - protein, 249 aa, Unknown
  Bacterial polypetide isolated from the Sargasso Sea
RLSERIIKNNFLISALLSQPPKKKSRGMKIIESEVHQLASKNNIEVFCPNIFDRNIIETVKNLNPDLIIVMAYGKILPKEILDLPVFGCINIHVSLLPRWRGAAPIEYSLINGDKETGISIIQLTDKLDAGPIITQKKVVIEDNCNKKELSEKLTKVGKKLLIETIPLIFNKKITYSVQDENYATYTRKISSEDRKINFNKSVKEVLNLIRAHSPKPGAWFTIKNERIKIIKARKSNYTGNASTIIDKS

SEQ ID NO: 108571 - protein, 273 aa, Unknown
  Bacterial polypetide isolated from the Sargasso Sea
MALKIIFMGTPEFAVPILEKIHKSNHKVLCVYTQTPNKRDRGQKISITPVHEISKKKKIDVKHPLNLDHDEYEYIKKLKPDVVVVVAYGKIIPAKILELKDVQFLNIHASLLPKWRGAAPIQRAIMNLDKETGISIMKIVPKLDSGPIMMQSKIEIFESTTFEELSSKMSNLGAQMILDSLNLIEKDKAKFFPQQEKNASYAKKIKKSEGKIDWKDNAKKIIAKINALTPNPGCWFELNGIRIKIISAEMVKANGTPGEILNIILLSHVQKMQ

SEQ ID NO: 108572 - protein, 168 aa, Unknown
  Bacterial polypetide isolated from the Sargasso Sea
MNNKKIIFMGSPKIASDYLEALIKSNFIISAVFSQPPKKKSRGMKIIESEVHQLANKNNIEVFCPNIFDKNTIETVKKLNPDLIIVMAYGKILPKDILDLPPFGCINIHVSLLPRWRGAAPIEHSLMNGDKETGITIIQLIEKLDSGPIIKQKKVDIEDDCNKNELSQ

SEQ ID NO: 108573 - protein, 258 aa, Unknown
  Bacterial polypetide isolated from the Sargasso Sea
MSQKIVFMGTPEFSVPTLESLVKSNHKILAVYSQPASKAKRGQKIIPSQVEVSAKEHSLNLRTPDILDNNEEFNFFKKLEPDIVIVVAYGKIIPKKFLNLSKYGFINVHASLLPKWRGAAPIQRSIMNLDNETGISIMKIVEELDAGPVMHQDKIQINENVDALTLSKILSKLGAKSIINAIDKMEKGEARFIEQNHGEATYAKKILKTEGRINWNESAKKVLAKINGLNPNPGAWFEYKNERFKVWKAEIVNQNSNA

SEQ ID NO: 108574 - protein, 144 aa, Unknown
  Bacterial polypetide isolated from the Sargasso Sea
MNIIFMGTPQFAVPILKAINDSGHKILEVYTQPATKSGRGQKFSQSEIFNFAEKLNLKVRSPNSLETSEEINHIKKLNPDLVVVVAYGKILPIKLLDINKLSFINVHASLLPRWRGAAPIQRAIMNMDSETGISIMKIIPQLDA

SEQ ID NO: 108575 - protein, 221 aa, Unknown
  Bacterial polypetide isolated from the Sargasso Sea
MNIIFMSSSEFGLPALKKLVESQNKISSVYTQPPKKSGRGLKMNKSVIHQFALQNNLCVRTPTNLEIQTEIDFLKKSNPDLGIVVSYGLIIPTEILEIPRFGFLNIHPSLLPRWRGAAPIQRAIMNGDEKTGVNIMKLDDGLDTGDICKKIEIEIKTTDNNESLSLKLSKLGAEVLMQAVIELQDGNLNFTRQDNRNITYAKKIDKKETELDFNCAAQGDT

SEQ ID NO: 108576 - protein, 149 aa, Unknown
  Bacterial polypetide isolated from the Sargasso Sea
MKIVFAGTPQFAAEHLKILIASDHQICCILTQPDRRSGRGKQIKLSPVKEVGLENRIKVLQPSTLKEKLTVEALKLIEPDLMLVVAYGLLVPKEVLNIPKMGCVNVHASILPNWRGAAPIENSIYSGDKETGITYMQMSEGLDEGPILE

SEQ ID NO: 108577 - protein, 245 aa, Unknown
  Bacterial polypetide isolated from the Sargasso Sea
MDIIFAGTPQFAADHLKLLIDSPHKIKCILTQPDRGSGRGKKIKSSPVKEIGLDNGIEVLQPTSLKDESILRSLKSDKPDLMLVVAYGLLIPKEVLEIAERGCVNVHASILPRWRGAAPMEYSIYSGDSESGISYMRMNEGLDEGPILEIHKCKIEKEDDLGSLESKFVELSKKSLLNFLKKFEKGELKETPQEESKATFAPKINSDFQKIDWSCVSSEIERKIRALNPKYGAFTFLGNKRVKIT

SEQ ID NO: 108578 - protein, 279 aa, Unknown
  Bacterial polypetide isolated from the Sargasso Sea
MSKKIVFMGTSNFAVPILKSLYQNGYLVSIVYTQPPKKSNRGQQLTKSPINLFSENISLNVRTPQSLKNNKEEELYLTKLKPDIILVVSYGQIIPKNFLNIPKYGFLNVHASLLPKWRGAAPIQRSIMNLDKETGISIMRINENLDEGPVCNQYSLKISEEMNSEELSEKLSLIASEKILDILDNIDDGNVEFKEQDHSKATYAKKIEKTEGKIDWKENAEKIIGKINGLYPYPGAFFSFNGERYKILKAEKSSTTGKPGDIANENFEVCCGEGSIKVL

SEQ ID NO: 108579 - protein, 186 aa, Unknown
  Bacterial polypetide isolated from the Sargasso Sea
MKNKKIIFMGTPDISAEYLSALLKENIPISAVFTQSPKRQSRGMKLIKSAVHTLANKKNIDVYHPENFDNEITNVLKEMDPDLIIVMAYGKILPKDILELPKHGCINIHVSILPRWRGAAPIEHSLINGDKETGISIIKLIEKLDSGPIIVQKKLIIPENCNKLQLTDNLNKIGTKLLVNTIPLIL

SEQ ID NO: 108580 - protein, 181 aa, Unknown
  Bacterial polypetide isolated from the Sargasso Sea
MLKNIVFMGTSNFAVPILKSLYQNGYAISCVYTQPPSKSNRGQKLNKSPVNLISETLNIDVRTPHRLKNNKVEEIFLKKINPSLIIVVSYGQLIPKNLLEIPKNGFINVHASLLPKWRGAAPIQRAIMNLDGKTGISIIKLNENLDEGPIINKYEFKISENMNASELSENLANLASQKIID

SEQ ID NO: 108581 - protein, 250 aa, Unknown
  Bacterial polypetide isolated from the Sargasso Sea
MKDKKIIFMGTPDIAAQHLNILIENNLNVVGVYTQPPRKKNRGMRIKKSDVHQIADKNNIEVFYPSAIDDITIEQVKKLEPDLIIVVAYGIILPSKFLNIPKYGCINIHVSLLPRWRGAAPIEHALLSGDVKTGISIISVSPKLDAGDILMQESFAIDIDMYSDDLTLNLTNLGKKTLIKTLPLLFENKLTSKKQEESKATYANKFLSKDRKINFYNSADHVYNHIRAHGPKPGSWFTYKGERIKIIKAK

SEQ ID NO: 108582 - protein, 226 aa, Unknown
  Bacterial polypetide isolated from the Sargasso Sea
MCCIRIIIPEIILKIPSYGCINGHASLLPKWRGAAPIQRAIEAGDKKTGCTSMLMEKGLDTGPMIHKKEIIIKMEDDVIDLFKRLSLLTAECLDETIKKLIYGESKQTPQNNSEASYANKLSKEEGLINWNNNSLNIFNKMRAFKIFPGSYFHYKNDTINIIDGFPLNKKHNANPGTILTTSDNIQIACSKNTVFQINSLKKSGKKSMSAKEFLNGNNLNVGEQID

SEQ ID NO: 108583 - protein, 160 aa, Unknown
  Bacterial polypetide isolated from the Sargasso Sea
MNNYNILFMGTSSFAVPILKELIILNQNITKVFTSPPKKANRGMKSSLSPIALAAKELNLQLESPEDLRDPSIINSIKSMKLDLIIVIAYGFIIPKEILNIPKYGCYNIHASILPRWRGAAPIQRSIIEGDQVSGVSFIKIDEGLDTGDIVFIDEIEIKK

SEQ ID NO: 108584 - protein, 233 aa, Unknown
  Bacterial polypetide isolated from the Sargasso Sea
REAFAELSADAAVVVAYGLILPQAVLDAPRLGCFNIHASLLPRWRGAAPIQRAIMAGDAESGVCIMQMEAGLDTGPVLMREVTPLTPHDTAATLHDRLADIGARLMVDALARLPDLTPAPQPEDGVTYAAKIDKAEARIDWTRPAIEVDRQIRGLSPFPGAWTTHGGKRLKLHLSALTDGHGSPGTALDDALTIACGDGAIRLIRLQREGRGVQDADEFLRGHPICTADRLGE

SEQ ID NO: 108585 - protein, 138 aa, Unknown
  Bacterial polypetide isolated from the Sargasso Sea
MSLKIVFMGTPEFSVPTLDLLIKNKFNVVRVYTQPPKKSKRGQKVNPSSVEEYCKKSKINFKNPISLDSEDEFKSFDELSANLVVVVAYGQIIPKNFLGIVKFGFINIHASLLPKWRGAAPIQRAIMNGDKRIGVSIM

SEQ ID NO: 108586 - protein, 142 aa, Unknown
  Bacterial polypetide isolated from the Sargasso Sea
MSLNIIFMGTPKFSVPILESIYNSKYQILAVYTQPPKKKSRGQKLIESPINAKAKKLSLQVRCPKNLDSKEEYNFIKKLSPDIVVISAYGKIIPSSLLNIPNIQFINVHASLLPKWRGAAPIQRSIISMEKETGISIMKVIP

SEQ ID NO: 108587 - protein, 142 aa, Unknown
  Bacterial polypetide isolated from the Sargasso Sea
MALNIIFMGTPDFAVPILKSINNLNHNILEVYTQPPNKKNRGQKIQNSPIHDFSNKLNLPVRYPIAFDEEEINHIKKLNPDLVVVVAYGKILPVKLLNLDKVLFINVHASLLPKWRGAAPIQRAIMNLDHETGVSIMKIETK

SEQ ID NO: 108588 - protein, 208 aa, Unknown
  Bacterial polypetide isolated from the Sargasso Sea
MKIVFMGTPEFSIPTLKSLINSEHKIVCVYTQPSQKKFRGQQIQKTPVHIFSETKGIQVRTNKLTDDNELIKFKNLKPDLVVVVAFGQIIPDIYLQIPNLIFLNVHASLLPRWRGAAPIERAILNGDEETGISIMKIVKKLDAGPYIKQTKINIDSDTSSGELREKLSLMGAEALKDSIDLILLKKEDFKEQNDKKATYAKKIEKVET

SEQ ID NO: 108589 - protein, 131 aa, Unknown
  Bacterial polypetide isolated from the Sargasso Sea
NSWAAAQINPVVQDESLVTHAEKLSKEEARIDWSLSAAQLERCIRAFNPWPMSWLEIDGQPVKVWQASVIAENTQAAPGTILEATKQGIQVATGDGILNLVSLQPAGKKAMSAQDLLNSRREWFVPGNRLV

SEQ ID NO: 108590 - protein, 273 aa, Unknown
  Bacterial polypetide isolated from the Sargasso Sea
MQRKIAFMGTPNFAVPILKCIYQNGYEVSAVYTQPPKKSNRGQKLEKSPVHLFAETLNFNVRTPNHLKENNSEHEYFKNLDLDMVIVVAYGQIIPKNFLLLSKQGFINIHASILPKWRGAAPIQRSIINQDKETGISVMKINENLDEGDISHIFKINIRENENANSLSERLSVLASENISNVIDSIFDNEVNFKPQDHSKATYAKKIKKTEGLIDWNDSAKNIIGKINGLYPYPGGYFLFKGGRYKILKAEKSFSKENPGKVLTNDLEISCGT

SEQ ID NO: 108591 - protein, 142 aa, Unknown
  Bacterial polypetide isolated from the Sargasso Sea
MKKRIIFMGTPEMSADYLDLLIENDFKVIAVYTQPPKRSGRGMKITNSPVHDLALNNNIPINYPKDFNSEIDKKKFKKLNPDLVVIMAYGLLLPKEILNFPKFGCINIHVSLLPRWRGAAPIEHSIINGDKKTGITIFKLEE

SEQ ID NO: 108592 - protein, 293 aa, Unknown
  Bacterial polypetide isolated from the Sargasso Sea
AAQHLSILIENKLNLVGVFTQPPRKKNRGMHVEESAVHQIAKKNNIEIYYPSTIDDKVIEQTKNLKPDLIIVVAYGIILPTSFINIPKYGCINIHVSLLPRWRGAAPIEHALLEGDNKTGVSIINITSKLDAGDILMQESFLIDQNMYSDDLTLNLTNIGKKAMIKTLPLIFENNIIGKKQDENKVTFANKFLSKDRKINFHNSTADVYNHIRAHGPKPGSWFTYKGERIKIIKAKKTKESGQSSTILNKDFIIGCKDGGIIPLLIQREGKKTVNLDDFLRGFTFSIQDKLNV

SEQ ID NO: 108593 - protein, 220 aa, Unknown
  Bacterial polypetide isolated from the Sargasso Sea
MKNYRILFMGTAPFAVPSLKKIVSSNNHLVGVYTSPAKKANRGMKFSISPVAEFAEAKNIEISSPPSISSSEELKKLQEMNLDMIIVVAYGIILPEEVINLPKLGCFNVHASLLPRWRGAAPIQRAMIEGDQTTGVTIMKMDKGLDTGDIGLQKEIKIEQQNYSELEKELANEGAELLINFIDRLDGSIQFAKQNDTQACYAKKIQKQEALIDWTENAEK

SEQ ID NO: 108594 - protein, 234 aa, Unknown
  Bacterial polypetide isolated from the Sargasso Sea
MTNFRILFMGTAPFSIPTLQKIITSGHELKGVYTSPSKKANRGMQISKSPVALYAEENNLELYSPKELRSPEEIKFIKDMNLDFIVVIAYGLILPEEILNLPKFGCYNLHASILPRWRGAAPIQRSMIEGDEMTGVTIMKMNKGLDTGDIVLQDKIKINISESYTELETRLSLMGAELFEKFFKDSLFKNIMQKQDDTLSSYAEKISKQETKIDWKEDALKIVRRINAYNPNPG

SEQ ID NO: 108595 - protein, 297 aa, Unknown
  Bacterial polypetide isolated from the Sargasso Sea
MINSHHNVIAVYTQPDRPAGRGKKLTASPVKELALAHNIPVYQPGSLRKEPAQQQLAALDADIMVVVAYGLILPKVVLDTPRLGCINVHGSILPRWRGAAPIQRALWAGDKETGVTIMQMDIGLDTGDMLLKTYLPIEDDDTSASLYEKLAQQGPDALLQALEGLANGTLAAEKQDETLANYAEKLSKEEARLDWTKSATQLWQEVRAFNPWPVSYFEHQGNTIKVWQTQVSTTSSNATPGTIISASKKGIEVATGDGVLTLLSMQLPGKKPLSVADILNARGEWFTPNTRLNNEAQ

SEQ ID NO: 108596 - protein, 299 aa, Unknown
  Bacterial polypetide isolated from the Sargasso Sea
MGTPEFAVPSLEALKKSNHNILVVYSQPASKAERGQRLVKSKIEITAKKLSLNIRTPPNLDNEAEYNFLKSIEPDIIVVVAYGKIIPKRFLTIPKFGFINVHASLLPKWRGAAPIQRSIMNLDSETGVSIMKIVEELDAGPVMHQDKIKINENIDSLVLSKLLSQLGANSIISAISKIENGEANFLEQNHKEATYAKKISKKESEINWNESAKKVLAKINGLNPNPGAWFKYKNERYKVWKAKVANVNGDVGKTLDDKLTVACKDQSITILEIQKEGKSRQPTDQFLLGNKIKQGESIA

SEQ ID NO: 108597 - protein, 264 aa, Unknown
  Bacterial polypetide isolated from the Sargasso Sea
MKIIESEVHQLANKNNIEFFCPNTFDKDTIETVKKLNPDLIIVMAYGKILPKDILDLPPFGCINIHVSLLPRWRGAAPIEHSLMNGDKETGISIIQLIEKLDAGPIIKQKKVDIEDDCNKNELSQKLTEVGIKLLVETIPLIFDKKISYSDQDDNDATYANKISSLNRKINFNKSVNEVLNLIRAHSPKPGAWFTIQNERIKIIKARKSNSNGNASTILNKTFDIGCNDGSIEPLILQREGKNAISKDDFLRGYSFKVNEVINA

SEQ ID NO: 108598 - protein, 309 aa, Unknown
  Bacterial polypetide isolated from the Sargasso Sea
MKKKIAFMGTPIFSVPILKNIYQNGYEISAVYTQPPRKSKRGQKFEKSPIHLFAETISFDVRTPDQLKNNKSEYDYFRNLDLDLVIIVAYGIIIPKEFLPLSKEGFINLHASILPQWRGAAPIQRSIMSQDKETGISVMKINEKLDEGDISHIFKIDIEENENAESLSERLSTLASEKISDVIDSILNKEVNFKSQDHSKATYAEKINKTEGLINWNENAQKIIGKINGLFPFPGGYFIYKGERYKILRAQISFNKDRPGKVLSNDLEISCGENSIKILEIQREGKKPQKVNEFILGSQIQLGTNLCNV

SEQ ID NO: 108599 - protein, 307 aa, Unknown
  Bacterial polypetide isolated from the Sargasso Sea
MIDKKIIFMGTPDIAAQHLSILIENKLNLIGVFTQPPRKKNRGMRVEESAVHQIAKKNNIEIYYPSTIDDKVIEQTKNLKPDLIIVVAYGIILPKSFINIPKYGCINIHVSLLPRWRGAAPIEHALLEGDNKTGISIINITSKLDAGDILMQESFLIDQNMYSDDLALNLTNLGKKAMIKTLPLIFENNIIGRKQDENKVTFANKFLSKDRKINFHNSTADVYNHIRAHGPKPGSWFTYKGERIKIIKAKKTKESGQSSTILNKDFIIGCKDGGIIPLLIQREGKKTVNLDDFLRGFTFSIQDKLNV

SEQ ID NO: 108600 - protein, 316 aa, Unknown
  Bacterial polypetide isolated from the Sargasso Sea
MKIIFAGTPEFAARHLEIVLQSEHEVLSVLTQPDRKSGRGKKINFSPVKKTALDNGISIHQPESLGIEKVFSDLKNITPDLILVVAYGLLVPKKILELPKYGCINIHASLLPRWRGASPMEHAIMSGDKNIGISYMEMSEGLDEGPVYEMHECSLKEYDTLHTVEEKFIQLSEKYLVSFLDNLESGSIKHKAQDENKATFSPKIDKKFLQIDWQGDSSIEIIRKINALGSKYGTHSFLGGKRVKIHRARRIESGIKHDPGYISVKDDKLVVFCKDASSILIEQIQMEGKNKVSGKDFIAGYLDLIKKNGNFELTIQ

SEQ ID NO: 108601 - protein, 309 aa, Unknown
  Bacterial polypetide isolated from the Sargasso Sea
MLKKIIFMGTPYFAVPILKSLYQNGYNIPAVYTQPPQKSNRGQKINKSPIQGFSETLNIEFRTPSSLKDNKEEYEFLKKLNPDLAIVVAYGQIIPKEILSLSKRGFINIHASILPKWRGAAPIQRSIMNLDKETGISIMKINDKLDSGPVCAYYKIEIKENDNTTSLSDKLSLLAAEKILDVVDDIMDGNLKFEEQIHSKASYANKINKIEGKIDWNNSARKIIGIINGLYPNPGGWFNFEGERYKILSAKISEKKGQIGEVLSENLEVGCADLSIKVLEIQREGKQSQKIGQFMLGSKIKKGSNLQNE

SEQ ID NO: 108602 - protein, 309 aa, Unknown
  Bacterial polypetide isolated from the Sargasso Sea
MSDNIIFMGTSKFAVPILEKISESKLNISAVYTQPPKKSSRGMRIQKTPIHVKSELLGLPIRTPNSLKNNIDEYNFIKKIKPTIIVVISYGQIIPKEFLDLSKNGFLNIHASILPKFRGAAPIQRAIMSQDIETGISFMKINEHLDAGPVLETYKIKIDLDLNATELQEKLSQLAALKIIENIDSIINGKANFKEQDHSKATYAEKINKAEGKIFWDDSAKKIIGKINGLHPNPGAYFMFKGDRYKILKAEIGNGSGPSGEVLNDKLEIACSNNESIKVIEIQKEGKKIQEINEFLNGSKISKGCILNE

SEQ ID NO: 108603 - protein, 309 aa, Unknown
  Bacterial polypetide isolated from the Sargasso Sea
MDNYKIFFMGTPPIAGEYLNFLIKNKINISAVYSQPPTKQSRGMKLIQSAVHKIAITNNIDTFTPKSFDNEALDHISKIKPDLIIVMAYGKILPKRVLEIPKYGCINLHVSLLPRWRGAAPIEHTLMNGDLETGISIIKLVEKLDAGPIIAQKKILIPDNFNKLQLSNTLTEIGTKLLVEVIPLIFKEEIKFVTQNENLATYANKLTTDNRKINFNNSSKNIINQIRAFAPKPGAWFNLNKERIKIIDAKKGKYKGRVSTILNEKFEIGCEDGSIEPLILQREGKNIISKDEFLRGYKINLNDKINAEL

SEQ ID NO: 108604 - protein, 290 aa, Unknown
  Bacterial polypetide isolated from the Sargasso Sea
RGNKLIASPVKSIAEKESIKIYTPEKIRGNIDFINELKSLSCDLFIVIAYGKILPKEILEIPKFGCWNAHASLLPRWRGAAPIQWSLIKGDEFTGVGIMKMNEGLDTGDILLEEKIKINNNDNLNTLSEKLSILSAKLFLKATSFIEENINKNTNPQLTKQNTLGREITYARMIEKADFKVDWGNEAIKISQKIKALYPRANTTFRGKNLKILKIKVLTSDVIKNEKYLFMSNYSRPGIILALIENEGIIISTKTDPIILLEAKLEGKNISSKKQLIQQLKPSAGEYLSG

SEQ ID NO: 108605 - protein, 243 aa, Unknown
  Bacterial polypetide isolated from the Sargasso Sea
MFAVPILKSLYQNGYPISNVYTQPPQKSQRGQRINKSPIQGIAETLNLDFKTPKSLKNNNEEYESFKKIEADLVVVVAYGQIIPKEFLSLSKKGFINIHASILPRWRGAAPIQRSIMNLDKETGVSIMKIAEKLDTGPVCNTYKIDLDNNLNAQDIGEKLSLLAAEKILDNIDDILDDKATFIEQDHSKVTYASKIQKSEGEIDWTESAKNIIGKINGLYPTPGAFFIYNGERYKILKAEIGN

SEQ ID NO: 108606 - protein, 310 aa, Unknown
  Bacterial polypetide isolated from the Sargasso Sea
MFKKIIFMGTPMFAVPILKSLYQNGFPINLVYTQPPQKSHRGQRINKSPVQGISETLNIEFRSPQNLKNNTEEYEFLKKTEADLAIVVAYGQIIPKEFLSLTKKGFINIHASILPKWRGAAPIQRAIMNLDTETGISIMKINEELDSGPVSNTYKIKLDQSLNAKEVSEKLALIAADKILDVVDEIFEGKSNFVDQDNSKATYAKKITKNEGQIDWKSDALKIIGKINGLYPSPGAFFNFNGQRYKILKAEIGNGIGNNGEVISDDLEIACGGEKSIKVVEIQREGKKAQKIGEFMLGSQIRKGSIISNV

SEQ ID NO: 108607 - protein, 316 aa, Unknown
  Bacterial polypetide isolated from the Sargasso Sea
MNIVFAGTPKFAADHLEILLNSEHKVTCILTQPDKASGRGKKVKFSPVKEIAIREGIEVLQPNSLSGEKILKALENTKIDLMLVVAYGLLIPKKVLEVPKKGSVNIHASILPNWRGAAPIEYSICSGDKETGISYMRMTEGLDEGPILEVHKCKIEEKDNLGTLENKFIDLSKKKLLPFLKKFARGEIKEVQQENSKATFAPKINTSYQQIDWSCNSNEIDRRIRSMNPKYGAFSFLGSKRIKIYKSSPTQSNLKLKPGVIEISETGELLVGCKNHTVLKIDEIQIEGKKVVSSKEFIQGYKALIQREIKFSGNAR

SEQ ID NO: 108608 - protein, 304 aa, Unknown
  Bacterial polypetide isolated from the Sargasso Sea
MLKKIIFMGTPIFAVPILKSLYQNGYPVSVVYSQPPKKSSRGMKTQKSPVHLMAETLNIEARTPDVLKGNSIEENFLKKLDADLAIVVAYGKLLPESFLNLTKKGFINIHASILPSWRGAAPIQRAIINLDKKTGISVMKINNKLDSGPVCNKYEIEIKKQDNSETISEKLSLIASEKILDEIDNIIDGKANFIEQEHDKATYANKIEKTEGKINWNIKAEEILGLINGLFPFPGAWFTFKGERYKILKAEVGNSKGEPGIVLGQNLEIGCKEGSLKITEIQREGKKVQKIGEFLLGSRIKKGS

SEQ ID NO: 108609 - protein, 154 aa, Unknown
  Bacterial polypetide isolated from the Sargasso Sea
MVKKIIFMGTPLFAVPILKSLYQNGYPISVVYTQPPQKSKRGQQINKSPIQGISETLNLDLRSPNTLKDNEEEYNFLKDLKADLAVVVAYGQIIPKKFLNLTKKGFINIHASLLPKWRGAAPIQRSIMNLDSETGISVMKINEELDSGPVSNIY

SEQ ID NO: 108610 - protein, 235 aa, Unknown
  Bacterial polypetide isolated from the Sargasso Sea
MTRKIIFMGTPLFAVPILKSLYQNGFPISVVYTQPPQKSQRGQKINKSPIQGISETLNIDFRTPQSLNDNEEEYNFIKALNADLAIVVAYGQIIPKNFLSLTKKGFINIHGSILPNWRGAAPIQRSIMNLDKETGISIMKIVEELDSGPVGNIYKIKVEYNDNAMEVSEKLSLLAAEKILDNIDDILDDKMKFIEQDHSRATYAKKIEKFEGNINWSNKASHIIGKINGLFPLPG

SEQ ID NO: 108611 - protein, 77 aa, Unknown
  Bacterial polypetide isolated from the Sargasso Sea
STRYGCFNVHPSLLPRWRGAAPIQRALLENDASTGVCIIRMDEGLDTGPICLREELCIDKNDNYGSLHTKLSLIGAN

SEQ ID NO: 108612 - protein, 254 aa, Unknown
  Bacterial polypetide isolated from the Sargasso Sea
TSEKLSLNLRTPSLLDNDEEYNFLKSIKPDMVVVVAYGKIIPKRFLNLPKFGFINVHASLLPKWRGAAPMQRSIMNLDNETGITIMKIVEELDAGPIIHQDKIKINENVDTLSLSKLLSQLGAKSLIKAMNKIFNGDTSFKEQNHKEATYAKKISKEEAKISWNNSAKTILAKINGLNPNPGAWFKYQNERYKVWKAKIENTSGSPGIILDKMLTIACKEQSIKILEIQKEGKSRQKIDQFLLGNNIKIGERID

SEQ ID NO: 108613 - protein, 307 aa, Unknown
  Bacterial polypetide isolated from the Sargasso Sea
MNDKKIIFMGTPHIAAQHLQYLVDNSLNIVGVFTQPPRKKNRGMHIEESPVHQIAKKNNLQTFCPNSIDYSVIEKTKSLNPDIIIVVAYGIILPSQFLNIPKFGCINIHVSLLPRWRGAAPIEHALLAGDVKTGISVIKISPKLDAGDILYQESLKISEDMYSDELTSALTNLGKRTMLEVLPIIFEKNISSNKQDSNKVTYAKKFTSNDRKINFNNSTTQVYNHIRAHGPKPGSWFVYRGERIKILKATKHKDKGQQSTILNNKFMLACSDGSILPTLIQREGKKAVEVKDFIKGFTFTVNDKINA

SEQ ID NO: 108614 - protein, 249 aa, Unknown
  Bacterial polypetide isolated from the Sargasso Sea
MNIIFMTNSEFSFPSLELLVQSKSKILCLVTNPSKRIGRKKRIISDTVKLKCNELGIDIIEQQDLNDISFKNKLKKYEPDLFVVIAYRILPKSLLNIPKLGSINLHGSLLPKYRGAAPIQWSLINGDKQTGLSTFFIDSKIDTGAIIKQKNIQIKEYENYGILKERMAIQGSILLLDTINSIYNGGATPVMQNDESVTYAPKITKKMTIIDWNSSSDGIHNLIRGLSPLPGAQSRINGKKIKILETRII

SEQ ID NO: 108615 - protein, 274 aa, Unknown
  Bacterial polypetide isolated from the Sargasso Sea
MAKTKIKVGFAGTPKIAFDIFSEILSSKDISTEFVLTQPDKSSGRGLVTSKSLFANIDNVPVLQPESLSEEELIKKIEAFNIDLLVVVAYGKILPSWLLNTPKFGCLNIHFSNLPKYRGAAPIQRAIENGEKETGISFMKLTEGLDEGPIYKNFVINIENKDYFEVESLLLEESLSSVCYVIKAVTENLQPKEQDHSLATLANKITKNEGQIDWTNRGREIVNKFLAFKKWPKVFFKFGGMDVEAVNLHIHSNDIGRPGEISEFNEESLKIYCG

SEQ ID NO: 108616 - protein, 145 aa, Unknown
  Bacterial polypetide isolated from the Sargasso Sea
RGAAPIQRAIMAGDTETGVSIMQMDEGLDTGPIIKKYRTSINADTTANSLHDKLAQLAALAICTTLKESDEGQFQSIPQSSEGVSYAKKIMREEGLINWQHSSADLVRRIRALNPWPGTWFEYGGERIRILSAEEEEDLASRERF

SEQ ID NO: 108617 - protein, 141 aa, Unknown
  Bacterial polypetide isolated from the Sargasso Sea
MNIFFMGTPEFAVPTLNILNRNYNVIGIFTQPPRPSGRGMKEIKSSIQQYSEKNKLNFYTPNNLKNDETLKLLVSLNPDLIVVVAYGLLIPEVILKIPLYGCINGHASLLPKWRGAAPIQRAIEAGDIKTGCTSMFMEKGL

SEQ ID NO: 108618 - protein, 310 aa, Unknown
  Bacterial polypetide isolated from the Sargasso Sea
MPKKIIFMGTPMFAVPILKSLYQNGFPINLVYTQPPQKSHRGQKINKSPVQGISETLNIEFRSPQNLKNNTEEYEFLKKIEADLAIVVAYGQIIPKEFLNLTKKGFINIHASILPKWRGAAPIQRAIMNLDSETGISIMKINEELDSGPVSNTYKIKLDQSLNAKEVSEKLALIAADKILDVVDEIFEGKSNFVDQDNSKATYAKKITKNEGLIDWKSDALKIIGKINGLYPSPGAFFNFNGQRYKILKAEIGNGIGKNGEVISDDLEIACGGEKSIKVFEIQREGKKVQKIREFMLGSQIRKGSIISNV

SEQ ID NO: 108619 - protein, 308 aa, Unknown
  Bacterial polypetide isolated from the Sargasso Sea
MKIIFMGTPDFALKSLESINQHFDVSLVVTQPDKPTGRKKEIIFSPVKTYCINRKVKFLQPEKIKDNKDFLFQINDIKPDIIVVAAYGKILPKEILSIPKIGCINIHASLLPQLRGAAPINRAIINGNKETGITLMEMDEGMDSGNIISTSKIEIQSTDTTTSLTEKLANLGASQIVKLIKELDISPIINSKKQDHSKATIAPKMTKEDGLIDWEKSFNEINDLIRGCNPWPVAYTKLDKSMIKIYEVTQNNSEKIPPGVIKKVKGSMVVGCKDKNIEILHIQKSGQKKISGKDFINGISFKSHIKFI

SEQ ID NO: 108620 - protein, 313 aa, Unknown
  Bacterial polypetide isolated from the Sargasso Sea
MNIVFAGTPQFAADHLKILLDSEHVIKCILTQPDRVSGRGKKIKTSPVKEIALINEIEILQPTSLTDESTIKALKSVKADLMIVVAYGLLIPKKILDIPEMGCVNIHASILPNWRGAAPIEYSIFSGDKETGISYMRMTEGLDEGPILEVHKCKIRKEDDLGSIENKFIELSKLNLLPFLDKFKKRDLKEVRQENSLATFAPKINPSDQQIDWNKVSDEIDRKIRSLYPKYVAYTFLGDKRIKLHKCFPAESSGLKPGFIGFSEEKKILVGCKDNTCIRIDKIQIEGKDVVKSEDFVRGYKALIDSERKFSSN

SEQ ID NO: 108621 - protein, 311 aa, Unknown
  Bacterial polypetide isolated from the Sargasso Sea
MNIIFFGSPSYSSDVLSYLVSSKHSVEAVVTQDIKASKKKKEAKTPVGIFGEQYNIQTYYPNNLSDPSFIQILKKFESDIFVIYAYGKILPKEIIEIPKYGVINIHCSLLPKWRGAAPIQRALLNNDKITGITFFRIDEKLDTGKIISKYEYEISNSDDSLSLQKSLTALAVKNIEDVFEKVMLDSNFISQDDSAATYAKKLSKAESFIKWEEDAEIIISKIKAFAGWPGVEAEIHGVRFKIIKAKYYKDVSSLSNGKVLNFNHDQFEVKAKNGIIQIDKLQLPGKNIITCRDFYNSNSVFSMKIKNDSVK

SEQ ID NO: 108622 - protein, 123 aa, Unknown
  Bacterial polypetide isolated from the Sargasso Sea
MKLVFMGTPNFSVPALQALNESSHQICAVYSQPPRPAGRGKKLKVSEVHREAVDMGLTVHHPENFKSEKDQIIFKNLNADVAVVVAYGLLLPKPILLSPKLGCVIYTHLFCHGGVVRLQFKEQ

SEQ ID NO: 108623 - protein, 319 aa, Unknown
  Bacterial polypetide isolated from the Sargasso Sea
MTTPLRIIFAGTPDFAARHLAALLDSPHQVIAVYSQPDRPAGRGHQLQQSPVKQLALQHDIPVYQPKSLKKAAAQQELAALNADLMVVVAYGLILPQAVLDAPRLGCINVHGSLLPRWRGAAPIQRAIWAGDAESGVTIMQMDIGLDTGAMLSKVSTPIAVDETSTSLYDKLALTGPVALVEALANLQALQAQAQPQQDELASYAEKLSKEEALLDFTKPAVALEREIRAFNPWPVSYLQLGNQQLKIWRAVTEHGSGQPGQVLRVDKKGIAIQTCDGVLVITELQPAGKKAMKVVDFLNGRADWFQPGQILPPVDGQS

SEQ ID NO: 108624 - protein, 314 aa, Unknown
  Bacterial polypetide isolated from the Sargasso Sea
MAKPEKIKIGFAGTPEIAFAHFNHLLNSPNIDVGFVLTQPNKKSGRGLEESKTLFDNIDRDIPIIQPDNLNDQDIINEISKMKIDLLVVVAYGKILPDWVLEHPKFGCLNVHFSLLPKWRGAAPIQKAIANGDKLSGISFMKIVNELDAGPIYASFNVDIEDNDFFQAEEKLLEVSLMHISSVINEIVVNNKQPKEQDSREVTYAEKIDRGDGLVNWSWGAKEIKNKFLAYRKWPLLSFMFKNEEVQIHDLEIASDQAGTPGTITEFTKESLSVFCGDGVINIKAVKFPGKKVISSIDFFNAKRDIISSGDILV

SEQ ID NO: 108625 - protein, 239 aa, Unknown
  Bacterial polypetide isolated from the Sargasso Sea
MAKKIIFMGTPIFAVPILKSLYQNGYPISVVYTQPPQKSQRGQKINKSPVQGISETLNIDFRYPKTLKDNDEEYNFINNLNADLAVVVAYGQIIPKKFLNLTKKGFINIHGSILPRWRGAAPIQRSIMELDNETGISIMKINEELDSGPVSNTFKINIDYNSNAQEISEKLSLLAAEKILDIIDDVLEDKVKFIDQDHSNATYAKKIDKAEGKINWSDKAINILGKINGLFPHTLVPSL

SEQ ID NO: 108626 - protein, 275 aa, Unknown
  Bacterial polypetide isolated from the Sargasso Sea
MTNNNDLIKKLKIGFMGTPSFAVPILNSLIKDNYHIEFVYTQSGRPAGRGLRKKNSEIYEVAKTKNINIRVPEKLDHEEINFISNKEIDIIIVAAYGLILPERILKIPKYGCLNVHASLLPKWRGAAPIQRSIMAGDKKTGISYMLMDKGLDTGPVILQKETQIGENDNFLKVHDSLSLIASQTISETILKFIEGKLATKEQNDDIASYADKIEKHETKIDWNLTAKEIRNLIYSLSPLPGAWTITKEGKRLKILSASIEEAKEEIAVLGENQIL

SEQ ID NO: 108627 - protein, 307 aa, Unknown
  Bacterial polypetide isolated from the Sargasso Sea
MKDKKIIFMGSPKIASDYLEVLIENNFIISAVFSQPPKKKSRGMKIIESEVHQLANKNNIEVFCPNIFDKNTIEIVKKLNPDLIIVMAYGKILPKDILDLPPFGCINIHVSLLPRWRGAAPIEHSLMSGDKETGISIIQLIEKLDAGPIINQKKVDIEDDCNKNELSQKLTDVGIKLLVETIPLIFDKKISYSDQDDNDATYANKISSLNRKINFNKSVHEVLNLIRAHSPKPGAWFTIQNERIKIIKAKKSNSSGNASTILNETFDIGCNDGSIEPLILQREGKNAISKDDFLRGYSFKVNEVINA

SEQ ID NO: 108628 - protein, 318 aa, Unknown
  Bacterial polypetide isolated from the Sargasso Sea
MKPLNIIFAGTPDFAARHLQALINSHHNVIAVYTQPDRPAGRGKKLTASPVKELAVSHDIPVYQPGSLRKEPAQQELAALNADIMVVVAYGLILPKVVLDTPRLGCINVHGSILPRWRGAAPIQRALWAGDKETGVTIMQMDVGLDTGDMLLKTYLPIEDDDTSATLYEKLALQGPDALLQALEGLANGTLAAEKQDEVLANYAEKLSKEEARLDWSKSATQLWQEVRAFNPWPVSYFEHQGNTIKVWQTQVSTSSSNAAPGTIISASKKGIEVATGDGVLTLLSMQLPGKKPLSVADILNARGDWFTPNTRLNNEAQ

SEQ ID NO: 108629 - protein, 59 aa, Unknown
  Bacterial polypetide isolated from the Sargasso Sea
MKVIFAGTPDFAAKHLSALLESEHEVIAVYTQPDRPAGRGKKLTASLGKVLAEENAIPV

SEQ ID NO: 108630 - protein, 309 aa, Unknown
  Bacterial polypetide isolated from the Sargasso Sea
MSSLKILFAGTSKFAEYHLQKLIESKHNVISVFTQPGKRSGRGLKFTQSPVREMAFNNNIEIWQPEKISNKEVSIIKELNPDIIIVVSYGLLIPKEILSIPKLGCINVHPSLLPRWRGAAPIQRSIESGDTITGVTIMMMNEKLDTGDIIYQEPHRIDSHKKAWELEEELMNLGGHILLLALESILNNKFVLYPQEHRLSTYAKKITKEESKIDWNMTAQEIHNKIMAFNSWPIAETTLSGERIRIYDSKYNENDIIGIPGNIKSYENNIEVFTKKGTLSILSLQKENSKVLGVKDFLNSNDLSGKKFN

SEQ ID NO: 108631 - protein, 321 aa, Unknown
  Bacterial polypetide isolated from the Sargasso Sea
MRNKKSVIFMGTPDFAVPSLEKIHKEYHLLSVYTQPPKKSGRGLRTKLNPIHEMSNDYNLPVKTPQNFKSFDIIKEIKNLRPDFIIVVAYGIILPKTVLDIPNFFCLNGHASDLPRWRGAAPIQRAIEAGDKTTAACAMIMEETLDTGPVIAKKKINILNKDTASSLHDKLSKLTANVLIESMDKIIQNKYKPIKQKITGITYANKITSNDTLINWSQNNEEILRKLRSLSNWPGGWTYHNQNRIRIHEAKKIEFSVGKENIKPGEFIGYSGNGSPIIQCGSNSFLEITQIQKEGKKKMNSQDFLRGYKINIGDKFRRDKM

SEQ ID NO: 108632 - protein, 281 aa, Unknown
  Bacterial polypetide isolated from the Sargasso Sea
MLRKIVFMGTSNFAVHILKSLYQNGYPISAVYTQPPKKSNRGLKLVKSPINLFSENISLYVRTPQSLKNNKEEELYLSELQPDIILVISFGQIIPKNLLNIPKHGFLNVHASLLPKWRGAAPIQRSIMNLDKETGISIMRINENLDEGPVCNQYSLKISEEMNSEELSEKLSLIASEKILDILDNINDGNVEFKDQDHSKATYAKKIQKTEGKIDWNENAEKIIGKINGLYPYPGAFFSFNGERYKILRAEKSSTTGKPGDIVSENFEVCCGEGSIKVLTI

SEQ ID NO: 108633 - protein, 259 aa, Unknown
  Bacterial polypetide isolated from the Sargasso Sea
NFINELKSLSCDLFIVIAYGKILPKEILEIPKFGSWNAHASLLPRWRGAAPIQWSLMKGDEFTGVGIMKMNEGLDTGDILLEEKIKIDNNDNLKTLTEKLSILSAKLFLNATSLLEENINKNTNSQLTKQNTLGREITYARMIEKSDYKVDWDNEAIKISRQIKALYPRAKTTFKGKNLKIIKIKVLSSDELNNEKYFFMSNYSKPGIILAVIENEGIIISTKTDPIILIEAKLEGKNISSKKQLIQQLKPSVGEYLSD

SEQ ID NO: 108634 - protein, 304 aa, Unknown
  Bacterial polypetide isolated from the Sargasso Sea
MSNIVFMGTPQFAVPILKKINQKYKINCVFTQPPSKSNRGQKFTKSSIHICAEELNLEVKTPKKIDEEFEYLKELNLDLVIVVAYGQLISKKILDLSKKGFLNIHASLLPKWRGAAPIQRSILNNEKKTGISFMKIDEKLDSGPVCNKYSIDILDQDNAEILSEKLSYLSTEKILENVQKVLDGEAIFKEQDHSKATYAKKIQKIEGKIDWNNSARKIIAQINGLYPKPGAWFELNNKRHKILKAKINKQSAKIGEVIDEQMTIACGENSINIIEIQKEGKNPQLIKEFLLGNKIRKGTIITSE

SEQ ID NO: 108635 - protein, 198 aa, Unknown
  Bacterial polypetide isolated from the Sargasso Sea
MHSKKIIFMGTPLIAKEYLNTLIENNIKVEAVFTQPPKKQSRGMKLTKSPVHELAIKNNINVFHPIIFDTEIINQIKKIEPELIIVMAYGHILPKSVLELPNNGCINIHLSILPRWRGAAPIEYCLMNGDKETGISIIKLVEELDAGPIIVQEKLAIPSNFNKLELSNHLTTIGKKLLIDTIPRILKNEITLKDQDKE

SEQ ID NO: 108636 - protein, 310 aa, Unknown
  Bacterial polypetide isolated from the Sargasso Sea
MAKKIIFMGTPLFAVPTLKSLYQNGYPISVVYTQPPKKSHRGQKINKSPIQDISETLNIDFRCPENLKDNDEEYKFIKNLNADLAIVVAYGKLIPKNFLNLTKRGFINIHGSILPNWRGAAPIQRSIMNLDKETGISIMKLVEKLDSGPVSKIHKIKLDQNNNAEEISEKLSFLAAKKILDEIDDILDDKAKFIDQDHSKASYAKKIEKIEGEINWNDDAQKIIGKINGLFPVPGAFFNFKGERYKILKAKIGNGIGPAGEVLSNKLEIACTNNQSIKILEIQRQGKKPQKIGEFMLGSGIRKGSLLSNA

SEQ ID NO: 108637 - protein, 172 aa, Unknown
  Bacterial polypetide isolated from the Sargasso Sea
MKLIFAGTPDFAARHLAALLSSDHEVVAVYTQPDKPAGRGQKLTASPVKELALAHDLPVYQPATLRKEEAQAELAALGADLMVVVAYGLILPKAVLDTPRLGCINVHGSLLPRWRGAAPIQRSIWAGDAETGVTIMQMDVGLDTGAMIRKVNCPIAADETSASLYDKLAGLG

SEQ ID NO: 108638 - protein, 228 aa, Unknown
  Bacterial polypetide isolated from the Sargasso Sea
MALNIIFMGTPEFAVPSLKSINNSKHNLLHVYTQSPKKSKRGQKTNISSIHHISKILKLNVRHPEDLNSEDEIKYLEKLKPDVVVVVAYGKIIPEKILNIKNIKFINLHASLLPKWRGAAPIQRSIMNMDKETGISIMKIINKLDAGPYMLQKKIIVQKDDNYTSLSKKLADIGSISILDALEMIEKNNFKWFDQDETKATYAKKISKKESEVNWSQNADQLIAKIKG

SEQ ID NO: 108639 - protein, 326 aa, Unknown
  Bacterial polypetide isolated from the Sargasso Sea
MFWGTPDFSVPSLRALSAEGYEVVGVVTQPDRPAGRGRRLRPSSVKKVALDRDFPVFTPEFPSGEAFLEEIGQLGPDISVVVAYGHILRPEVLDLPAKGSINVHASLLPDLRGAAPINWAIARGLSETGVTIMRMAKGMDSGAIISQVAEPILEDETTSELTVRLSEIGAVALVEALGLISEGETDEQEQDHTAATFAPKVSRHVARISWTKPAHEVSAHVRAMDAVPGAWTTLADAPVKLFRPAVWSEARVKALGSECLEDNVRPTIPGDSDDGLVIRATVLDGVVVRCTQGAVAFSEVQPPGRKRMLVSDWINGRGINEGQRLV

SEQ ID NO: 108640 - protein, 310 aa, Unknown
  Bacterial polypetide isolated from the Sargasso Sea
MANKIIFMGTPIFCVPILKSLYQNGYNISVVFTQPPQKSHRGQKINKSPIQGISETLNIDYRTPKTLKDNHVEYEFLKELNADLAIVCAYGQIIPENFLNLTKKGFVNIHASILPSWRGAAPIQRSIMNLDPETGISIMKIKKELDSGPVSKIYKIKIDQNQNAQEISEKLSTLAAEKILDNVDDILEDKAKFIDQDHSQATYAKKINKEESRIDWDEDASKIIGKINGLFPSPGASFSFNGERYKILKAEIGNGIGRVGEIISNQLEVACNKNQSIKILEIQRQGKRPQTISEFMLGSQIKKGSKLSNV

SEQ ID NO: 108641 - protein, 306 aa, Unknown
  Bacterial polypetide isolated from the Sargasso Sea
MTDQRILFMGTAQFAVPSLAKLLSLKKNIINVYSSPPKKANRGMELTDSPIIRFAKSNGLDFSHPTNLHDESEVKKIRELNPDIIIVIAYGYIIPNEILKIPKVGCFNLHGSLLPRWRGAAPIQRAIIEGDQKTGITFMKMDEGLDTGDMVFSKEIAVTINDSYKYLEQKLSDLGAESFPEFFNLIQRNTTFTKQNNDLVTYANKIEKSETKLNWTETADKIIRRINAYNPNPGAWFEFNGKRIKILEASLHDQSGIPGTILSDDFIIGCGNKSIQPQTLKKEGKEEVSLEDFLRGNKIPKDYSIQ

SEQ ID NO: 108642 - protein, 309 aa, Unknown
  Bacterial polypetide isolated from the Sargasso Sea
MYKKIVFMGTSYFAVPILKSLYQNGYPISVVYTQPPKKSNRNQKLNKSAINLFCENISLEVRTPQILKNNNEEELYLRNLKPDIIVVVSYGHIIPINLLNIPKKGFLNVHASLLPKWRGAAPIQRSIMNLDKETGISMMKINKNLDEGPVCNQYTLKISEKMNSEELSEKLSLLASEKILDILDNIHDDSIKFIDQDHSKATYAKKIQKVEGKIDWNENADKIIGKINGLYPFPGAFFIYNGERYKILKAEKSYTKGKAGNIISEDFEICCGEGSLKVLTIQREGKRVQQISEFLLGTQIKKGSILLMH

SEQ ID NO: 108643 - protein, 314 aa, Unknown
  Bacterial polypetide isolated from the Sargasso Sea
MAKDEKIKIGFAGTPEIAFAHFNHLLSSPDIDISFVLTQPNKKSGRGLEESKTLFNDIDKDIPVLQPENLNDQDTISAINKMKIDLLVVVAYGKILPDWVLEYPKFGCLNIHFSLLPKWRGAAPIQKAIANGDKLSGISFMKIVNELDAGPIYERFNVDIEDNDFFQAEEKLLETSLMHISSVINEIVANNKQPEEQNSKEVTYAEKIGRGDGLVNWSWSAKEIKNKFLAYRKWPVLSFMFKNEEVQIHDLEIVSEEASTPGVIKEFTKDSLSVSCGDGIIKIKAVKFPGKKVISSIDFFNAKRDIISSGDILV

SEQ ID NO: 108644 - protein, 223 aa, Unknown
  Bacterial polypetide isolated from the Sargasso Sea
VIAYGQIIPKNFLSLSKNGFINLHASILPRWRGAAPIQRSIINQDKETGISVMKINENLDEGDLSHIFKINIIENENAQSLSDRLSILASENISNVIDSIFDKEVNFKPQDHSKATYAKKIKKIEGLIDWSDNAENIIGKINGLYPYPGGYFLFKGERYKILKAEKSFSKENPGKVLTNDLEVSCGINSIKILEIQREGKKSQKINEFLLGSQIKKGTSLIDV

SEQ ID NO: 108645 - protein, 314 aa, Unknown
  Bacterial polypetide isolated from the Sargasso Sea
MAKDEKIKIGFAGTPEIAFAHFNHLLNSSDIDISFVLTQPNKKSGRGLEESKTLFNDIDKNIPILQPENLNDQDTISTISKMKIDLLVVVAYGKILPDWVLEYPKFGCLNIHFSLLPKWRGAAPIQKAIANGDKISGISFMKIVNELDAGPIYESFSVDIEDNDFFQAEEKLLETSLMHISSVINEIVANNKQPEEQNSKEVTYAEKIDRGDGLVNWSWSVKEIKNKFLAYRKWPVLSFMFKNEEVQIHDLEIASDQAGDPGVITEFTKDSLSVSCGDGIVKIKAVKFPGKKVISSIDFFNAKRDIISSGDILV

SEQ ID NO: 108646 - protein, 231 aa, Unknown
  Bacterial polypetide isolated from the Sargasso Sea
MTELKPDIIIVVSYGQIIPKNLLTIPKYGFLNVHASLLPKWRGAAPIQRSIMNLDRETGISIMRINENLDEGPVCNQYSLNISEKINSEELSEKLSVIASEKILDILDNIYDDNIEFKDQDHSKATYAKKIQKKEGKIDWNENAEKIIGKINGLYPYPGAFFSFNGERYKILKAEKSNTNGKAGNIVSENFEVCCGEGSIKVLSIQREGKRVQQINEFLLGTQIRKGTNIA

SEQ ID NO: 108647 - protein, 218 aa, Unknown
  Bacterial polypetide isolated from the Sargasso Sea
MNNKKIIFMGSPKIASNYLEALIKSNFIISAVFSQPPKKKSRGMKIIESEVHQLANKNNIEVFCPNKFDKDTIETVKKLNPDLIIVMAYGKILPKDILDLPPFGCINIHVSLLPRWRGAAPIEHSLMNGDKETGISIIQLIEKLDAGPIINKKKVDIEDGCNKNELSQKLTEVGIKLLVETIPLIFDKKISYSDQDDNGATYANKISSLNRKINFNKS

SEQ ID NO: 108648 - protein, 177 aa, Unknown
  Bacterial polypetide isolated from the Sargasso Sea
MSKKIIFMGTPMFAVPILKSLYQNGYPISVVYTQPPKKSNRGHKINKSPIQGISETLNIEFRSPKNLKENKDEYQFIKNLNADLAVVVAYGQIIPKEFLELTKKGFINIHGSLLPAWRGAAPIQRAIMNLDEEIGISIMKIVEKLDSGPVNKVYKFKLDKNNNAQEISEKLSLLQQK

SEQ ID NO: 108649 - protein, 307 aa, Unknown
  Bacterial polypetide isolated from the Sargasso Sea
MAKKIIFMGTPMFAVPILKSLYQNGYPVTCVYTQPPQKSHRGQKINKSPIQGISETLNLEYRAPSTLKENKEEYEFFKSVDADLAIVVAYGQIIPKEFLSLTKKGFINIHASILPKWRGAAPIQRAIMNLDKVTGVSIMKIEEKLDTGPVCNTYKINMENNFNSAEIAEKLSFIAAEKILDNIDDILEDKATFVDQDHSKATYAPKIQKIEGLIDWTSNAENIIGKINGLYPVPGAFFISSGERYKILKGEISNGIGNPGEVLNDYLEIACGDKKSIKVTEIQRQGKRPQNIGEFMLGSRIRKGHQI

SEQ ID NO: 108650 - protein, 186 aa, Unknown
  Bacterial polypetide isolated from the Sargasso Sea
MSFNLIFMGTPEFGREFLEYIHSNVEFNIKAVYTQAPKKSNRGQKVNLSPVHKYAKDKNLNVFFPSKFTKSEIENIKRIKPDVILVVAYGLILPEEVLMIPSCGSVNVHASLLPKWRGAAPIHRAIINGDEKTGISIMRMEKGLDEGPTYLQTAIPIGENDTYGDIYNTLVEAGKKTLNDYFFLLA

SEQ ID NO: 108651 - protein, 308 aa, Unknown
  Bacterial polypetide isolated from the Sargasso Sea
MIKNLKLGFMGTPSFAAPILERLIADNYYIDYVYTQSGRPAGRGMKVRNSIIYEVAKKNNIEIRVPKKLDDEEFSFLKEREVDIIIVAAYGLILPEKILAIPKFGCLNVHASLLPRWRGAAPIQRSIMSGDEKTGISFMIMEKGLDTGPVILQKEIKIGKKDNFLKVHDSLSNLAAETISNTVSKYIEGKLPIEKQNNVEATYADKIEKHETKINWSLAANEIRNLIYSISPSPGAWTMTKEKKRLKILSASIQEIDGEEGVLLKNQFVGCGLKSLKITEVQPEGKKAMPFEDYLRGKNFSVSERIFD

SEQ ID NO: 108652 - protein, 100 aa, Unknown
  Bacterial polypetide isolated from the Sargasso Sea
MPRYRIVFMGSPNFAIPALQKLAEAHDICAVYTQPNKPAGRGMKSTPVPVATYAADTSLSLFSPASLKTDDAQQQLAAHDADLFVVVAYGLLLPEIVLDI

SEQ ID NO: 108653 - protein, 289 aa, Unknown
  Bacterial polypetide isolated from the Sargasso Sea
MSKKIVFMGTPEFAVPTLEALKNSNNEIIVVYSQPASKANRGQKLLDSKVGSLAKKFSLSLRTPKTLDSDEEFKFFSSLKPDIAVVVAYGQIIPRRFLDIPKFGFINVHASLLPKWRGAAPIQRSIMNLDKETGVSIMKIVEKLDAGPVIQQDKINLNENIDTSILSKLLSQLGAKSLMNAIDKLEKNEVNFVEQNHNEATYAKKITKEEAELKWNQNAKIILAKINGLNPNPGAWFKYKNERYKVWKAKISNTSGLQGSTIDNNLTIACKDKSISILEIQKEGKSRQA

SEQ ID NO: 108654 - protein, 170 aa, Unknown
  Bacterial polypetide isolated from the Sargasso Sea
MLKNIVFMGTSNFAVPILKSLYQNGYAISCVYTQPPSKSNRGQKLNKSPVNLISETLNIEVRTPHRLKNNKEEEIFLKKINPSLIIVVSYGQLIPKNLLEIPKNGFINVHASLLPKWRGAAPIQRAIMNLDGKTGISIIKLNENLDEGPIINKYEFKISENMNASELSEN

SEQ ID NO: 108655 - protein, 257 aa, Unknown
  Bacterial polypetide isolated from the Sargasso Sea
VHQIAKKNNIEIYYPSTIDNKVIEQTKILKPDLIIVVAYGIILPTSFINIPKYGCINIHVSLLPRWRGAAPIEHALLAGDDKTGISIINITSKLDAGDILMQETFLLDQNMYSDDLALNLTNIGKTAMIKILPLIFKNKIIGKKQDENKVTFANKFLNEDRKINFYKSSRDVYNHIRAHGPKPGSWFTYKGERIKIIKAKKTKESGQSSTILNKDFMIGCKDGGIIPLLIQREGKKIVNLNDFLRGFTFSVQDKLNV

SEQ ID NO: 108656 - protein, 297 aa, Unknown
  Bacterial polypetide isolated from the Sargasso Sea
GSPDFSIPSLKMLIDKNHKPICVYTQSPQKKMRGQKVLKTPVHIYSEKMDIEVRTRKLDFENEYVNFKNLKPDLVVVVAYGQIIPESYLKIPNLLFLNVHASLLPKWRGAAPIERAILNGDKETGVSIMKIEKKLDAGPYIMQSRIKIDSETNSGELKEKLSILGAKSLIQSIDLILSKEGSFIDQNDKEASYAKKIEKEESKINWQEDAEKIILKINAFSPKPGAWFYFNKLRIKIHKAKIVNLNGKPGTVLDDKLTIATKKNAIKILKLQKEGKNIIEATDFLKGNKVNKNIILN

SEQ ID NO: 108657 - protein, 173 aa, Unknown
  Bacterial polypetide isolated from the Sargasso Sea
MSKKIIFMGTPFFAVPILKSLYQNGYEISVVYTQPPQKSQRGQKINKSPIQGISETLNIDFRTPNILKDNQEEFEFLQRLNADLAIVVAYGQIIPKKFLNLTKKGFINIHGSVLPKWRGAAPIQRSIMNLDAETGISIMKIEEELDSGPISKIYRIKIDPNHNAQEISEKLSS

SEQ ID NO: 108658 - protein, 211 aa, Unknown
  Bacterial polypetide isolated from the Sargasso Sea
MNKHFLDLNNFSKDDIDRILSNSLEMKSKGKNLKILEGKFLSLVFEKSSTRTRVSFEVGMAQLGGRASFLSVNDLQMGRGEPIEDTSKVLSSMVDGIVLRTLEHKTQIKFAENSSVPIINGLSDRSHPCQLLADLLTFCEEKGSIEGKKVTWCGDFNNVCFSYAQAAELLNFELIIACPKEFCPEDTENYKNVSFTQSISKAVEASDLVST

SEQ ID NO: 108659 - protein, 164 aa, Unknown
  Bacterial polypetide isolated from the Sargasso Sea
MNKHFLDLDNFSKDDIDRILSNSLQMKSKGKNLKILEGKFLSLVFEKSSTRTRVSFEVAMAQLGGRASFLSVNDLQMGRGEPIEDTSKVLGSMVDGIVLRTLEHKTQIKFAENSSIPIINGLSDRSHPCQLLADLLTFREEKGSIEGKKVAWCGDFNNVCFSYA

SEQ ID NO: 108660 - protein, 100 aa, Unknown
  Bacterial polypetide isolated from the Sargasso Sea
MASSPFFPKAKVENNKSRLPSFLHISDYEESQIDLILERATEVKGFLRAGDRSFRPFKGRTLCMIFTKPSLRTRVSFETGFHLLGGHAIYLGPDDIGLGG

SEQ ID NO: 108661 - protein, 146 aa, Unknown
  Bacterial polypetide isolated from the Sargasso Sea
MSKHFLNLNDLTKTEILDLVKQAIDLKGSEKNSDYLRGKYLALIFEKYSTRTRVSFEVAMSQLGGTASFLSTKDLQLGRGEPLEDTAKVISSMADAIVLRTINHSTVEIFAENSSVPIINGLSDLSHPCQLLADLTTYQERKWRHR

SEQ ID NO: 108662 - protein, 109 aa, Unknown
  Bacterial polypetide isolated from the Sargasso Sea
MNKHFLDLNNFSKDDIDRILSNSIEMKSKGKSLKILEGKFLSLVFEKSSTRTRVSFEVAMAQLGGRASFLSVNDLQMGRGEPIEDTSKVLSSMVDGIVLRTLQHKTQIK

SEQ ID NO: 108663 - protein, 80 aa, Unknown
  Bacterial polypetide isolated from the Sargasso Sea
MKHFLHISDYTDTELWEILKLAKDLKSKFHQRQDFKHFKNRSLAMIFAKPSARTRVSFETGFEWMGGHALFLGPNDIGIG

SEQ ID NO: 108664 - protein, 80 aa, Unknown
  Bacterial polypetide isolated from the Sargasso Sea
MSIKHCIKVDDFSRNEILDLFQLASELKSKYRNKESYQPFKDHSIAMIFAKPSARTRVSFETGFAWMGGHAIYLAPQDIG

SEQ ID NO: 108665 - protein, 85 aa, Unknown
  Bacterial polypetide isolated from the Sargasso Sea
MAKHFLHISDYSTDQIWEILHLSKELKTKFHNKENFKPFRDRSLAMIFAKPSARTRVSFETGFEWMEGHALFLGPNGHRNRKKGS

SEQ ID NO: 108666 - protein, 262 aa, Unknown
  Bacterial polypetide isolated from the Sargasso Sea
MANNLLSINDLSKKEILELIEFANNFFNDEGSFRRESLFPDKTIANVFCEPSTRTKSSFAIAAKNLGCSVIDFNIENSSVQKGESIYETIDALNLMGVDLCVLRHPESIIRELAETLPEMVFVNAGEGSISHPTQALLDLKTIIDHKDKLDDLNIVIIGDLDHSRVTSSFVEGISNFDIGSLTFCGHPEMCTKYRDPKMGRYEADMATALQDADVVMTLRIQYERFEKELNLDLETYKSEYQLSSENLRMLKEMQLLCIQDL

SEQ ID NO: 108667 - protein, 292 aa, Unknown
  Bacterial polypetide isolated from the Sargasso Sea
MRHLLDFQDVNKNHLENLIEKTRSLEFKSENIDSLALLKFDEPSTRTRLSFAIAAEKLGIKTFESSDVISAKQKGEILKHEIETYISMGIEILVLRTKENNIDDYREFKDIGVISAGFGNKSHPTQALIDISTLFSLNKINEKLTPITYIGDVKHSRVFESGRQLLNLLGFKVGVFTDKNLLPENKNDLEIYESWDEVFESSNAIELLRVQKERLQDNEEINFDEYINNYQLTQEILGKSQSDLAVLHPMPINIGIEISKDAIDDRKIKYKDQLSHAIPSRIAAFKYVRDEI

SEQ ID NO: 108668 - protein, 72 aa, Unknown
  Bacterial polypetide isolated from the Sargasso Sea
MAVIKKFSAVKKIQKHLLGIQNLSIEEANLILSEAKNFIKLNRSASKKLDLLRGKTQINLFFEPSTRTPSSF

SEQ ID NO: 108669 - protein, 77 aa, Unknown
  Bacterial polypetide isolated from the Sargasso Sea
ERLKDNENIDMEAFKSTYQINESFIEKTKFTGSVMHPGPINIDLEISDAVATSEKSLISTQVENGLYIRAALLGLIS

SEQ ID NO: 108670 - protein, 112 aa, Unknown
  Bacterial polypetide isolated from the Sargasso Sea
MCTKYHNPKIGKYESHLESALENADVVMALRIQYERFEKELNLDLETYKSEYQLSSEKLESAKGDAIVMHPGPVNYVEITEAVYDSENSVIRQQVANGVAIRMAVLSRFLGS

SEQ ID NO: 108671 - protein, 125 aa, Unknown
  Bacterial polypetide isolated from the Sargasso Sea
MAVKKNNTAIKNSPKHLLGIQNLSILEAKSILDEAKKFIELNRSSSKKLDVLRGKTQINLFFEPSTRTQSSFDLAGKRLGADVMSMNMDNSALKKGETFIDTAMTFNAMHPDLIVIRHQDSGAPN

SEQ ID NO: 108672 - protein, 134 aa, Unknown
  Bacterial polypetide isolated from the Sargasso Sea
MNLIDIKSLNIKEIEDIVSLASQFRSDLGGFNQEPIYEDKKAALLFFEPSTRTKSSFQIALMNLGASFIDINPDTSSIVKGESVSDTIETLALMGVHLFIIRHSEPIISDLANQYPDLCFVNAGAGAESHPTQA

SEQ ID NO: 108673 - protein, 55 aa, Unknown
  Bacterial polypetide isolated from the Sargasso Sea
LEHAKSDALIMHPGPMNRGIEIDTILADDINKSVIKEQVELGVAVRMACLKIFCK

SEQ ID NO: 108674 - protein, 237 aa, Unknown
  Bacterial polypetide isolated from the Sargasso Sea
MKNIINLIVEQNSDKKRIDTFIFDKCPEISRTRIKKLILDKKLKINGKINCFPSKKVFMGDNIALEIPKPKKSSLKPFNFKLDILYEDDDLIVINKPAGISMHPGPGNYDNTIVNALMNYEKIQLSSIGDELRPGIIHRIDKDTSGLVVIAKNNLSHEIISKQFSEHSIDRIYNALIWGKLRPQSGVIETFITRSSKNRQLMDVSFMKGKKAITKYKTLKVFEGTNIPTLSLVECKL

SEQ ID NO: 108675 - protein, 74 aa, Unknown
  Bacterial polypetide isolated from the Sargasso Sea
MATNTKAIKISQKHLLGIQDLSIDDVNIILNEASKFIELNKSRNKKSDILKGKTQINLFFEPSTRTQSSFELAG

SEQ ID NO: 108676 - protein, 114 aa, Unknown
  Bacterial polypetide isolated from the Sargasso Sea
MKNIINLIVEQNSDKKRIDLYVFEKFSQLSRTRIKNLILDNRLKINGKINQSPSKKINVGDNISLEVPKPKKTSLKPFNFKLDIVYEDNDLIVINKPAGISMHPGPGNYDNTIV

SEQ ID NO: 108677 - protein, 89 aa, Unknown
  Bacterial polypetide isolated from the Sargasso Sea
MATKTKAIKISQKHLLGIQDLSINDVNLILKEAEKFIELNKSKNKKLDLLKGKTQINLFFEPSTRTQSSFELAGKRLGADVMSMNITNS

SEQ ID NO: 108678 - protein, 73 aa, Unknown
  Bacterial polypetide isolated from the Sargasso Sea
KINHGIQLQNNKLKHFLNIQSLPKAHILEILLRAEDIHNNNEISQYPDKVVASLFFEPSTRTKTTFELTSKKI

SEQ ID NO: 108679 - protein, 159 aa, Unknown
  Bacterial polypetide isolated from the Sargasso Sea
MLHILSVDDLDNDFLISLWEEALSNQGSSNANLKGKILTNLFYEPSTRTSSSFYSAMTKSGGTVIPINNVQFSSVAKGESLEDTIMTMGTMSDGIVIRHTDSGSAKKASIVSNVPIINAGDGDGEHPTQTILDGFTIYYYKNKKLSDLNITMIGDLKNG

SEQ ID NO: 108680 - protein, 91 aa, Unknown
  Bacterial polypetide isolated from the Sargasso Sea
MANVKKAIKISQKHLLGIQDLSISDVNFILTEAKQFIDLNKSKNKKLDVLRGKTQINLFFEPSTRTQSSFELAGKRLGADVMSMNLNNSAI

SEQ ID NO: 108681 - protein, 195 aa, Unknown
  Bacterial polypetide isolated from the Sargasso Sea
MKIKLPKVKAIRSSTGSKILKEAEKISLKYYSSLSLKTKIKIKRTKNIFKKIHLVETADLTKKEIEHILYESKKYISFNKKRIKKTNSLEGRTIFNLFFEDSTRTRTSFEVAAKRLGADLINVVVKDSSINKGETLLDTMTTINSMSPDVLIVRHPEEGISKKISETVEASVINAGDGSHKHPTQALLDALTIKN

SEQ ID NO: 108682 - protein, 238 aa, Unknown
  Bacterial polypetide isolated from the Sargasso Sea
MAKNLLSIKDLTKDEILDLIKFSDNFIDDEGNFRKETLFPDKVIANIFCEPSTRTKSSFAIAAGNLGCSILDFNIDNSSIQKGESIFETVDALNLMGVDLCVLRHPESVINELAECLPKMVFINAGEGSISHPTQALLDLKTIIDHKNSLNGLKIVIVGDLDHSRVTSSFVEAISNFEVDSLIFSGHPEMCTKYQSPILGIYEPDLEKALQDADVVMTLRIQHERFEKDLNLDLESYK

SEQ ID NO: 108683 - protein, 123 aa, Unknown
  Bacterial polypetide isolated from the Sargasso Sea
MDEPEVNDGLISDSKEAQLKNLLYLKDLHKDEIIQLLDQSDHFLKSNQPHEFVELLKNQSIASLFFEPSTRTSASFQLAAKRLGAETIMIDEKTSSATKGESVLDTIKNLEAMGVRGSSSALG

SEQ ID NO: 108684 - protein, 244 aa, Unknown
  Bacterial polypetide isolated from the Sargasso Sea
MANNLLSINDLSKKDILELIEFSNNFIDDEGNFRKENLFPDKVVANVFCEPSTRTKSSFAIAANNLGCSVIDFDIENSSVQKGESIFETVDALNLMGVDLCVLRHPDSVIRELAECMPKMVFINAGEGSISHPTQALLDIKTIIDHKENLDGLNIVIVGDLDHSRVTSSFVEGVSNFDLGSLTFCGHPEMCTKYQNSKIGKYESHLESALENADVVMALRIQYERFEKELNLDLETYKSEYQLS

SEQ ID NO: 108685 - protein, 118 aa, Unknown
  Bacterial polypetide isolated from the Sargasso Sea
MDDFSLQEIETVITLAEQMREVLDRRIARAPALRGFTVVNLFFEPSTRTRASFELAGKVLGADVISVSADNSSVVKGESLIDTVKTLSAMRADAIVMRHSMSGAPYLASAYTDAAIIN

SEQ ID NO: 108686 - protein, 108 aa, Unknown
  Bacterial polypetide isolated from the Sargasso Sea
MNNFSQNDIISIRDLSKDDLEQIFAKTNEIMEMPAEQRREIARGKTLGYLFFEPSTRTRLSFQSAMALIGGTSFGIADATSSSVQKGESLADTVKIMAGYTDAIVLRH

SEQ ID NO: 108687 - protein, 186 aa, Unknown
  Bacterial polypetide isolated from the Sargasso Sea
NKNLENKIITNLFYEPSTRTSSSFYSAMTRSGGTVIPINNVKFSSVTKGESLEDTIRTMACMCDAIVLRHYQIGAAKQASTVSSVPIINAGDGNGEHPTHTILDGFTIYNYFNKSINNLKITMVGDLKNGRTVKSLVKLLNRFNGNSFCFVSPKDLKFNEKLPMNSYETTDVNEVLNETDVLYVTR

SEQ ID NO: 108688 - protein, 73 aa, Unknown
  Bacterial polypetide isolated from the Sargasso Sea
MAIKTNKAVKISQKHLLGIQELSINDVNFILDEAHAFIKVNQSKNKKIDALRGKTQINLFFEPSTRTQSSFEL

SEQ ID NO: 108689 - protein, 145 aa, Unknown
  Bacterial polypetide isolated from the Sargasso Sea
MDEPEVNDGLINDSKEAQLKNLLYLKDLHKDEIIQLLDQSDHFLKSNQPHEFVELLKNQSIASLFFEPSTRTSASFQLAAKRLGAETIVIDEKTSSATKGETVLDTIKNLEAMGVRGFIIRTGDKNLFAPLIDNVGSNTSLISAG

SEQ ID NO: 108690 - protein, 112 aa, Unknown
  Bacterial polypetide isolated from the Sargasso Sea
MCTKYQNPKIGKYESHLESALENADVVMALRIQYERFEKELNLDLETYKSEYQLSSEKLESAKGDVIVMHPGPVNYVEITEAVYDSENSVIRQQVANGVAIRMAVLSRFLGS

SEQ ID NO: 108691 - protein, 156 aa, Unknown
  Bacterial polypetide isolated from the Sargasso Sea
MRHLTSLKELSKDEILELLDLADNFIDSEGSIRRDPLFPDKKVVNIFCEPSTRTKISFEIAASNLGCQIIDFDLSSSSLEKGETLKDTIDNLAKMNINLCVLRHKDSVIHELIDQTDSMVFISGGEGSISHPSQGLLDIMTVRHRKDLDNSNILIV

SEQ ID NO: 108692 - protein, 159 aa, Unknown
  Bacterial polypetide isolated from the Sargasso Sea
YIKNLKIGIIGDISHSRVALSNIFGLRTLGAKVTLCGPSTLMPLKIEELGLSVNNNIDEVIEWADAINVLRIQRERMNNALIPSVREYRRLFGITQSRIEKHNSELVIMHPGPMNRWVEIDSNVADSDQAIILDQVLNGVATRMAILYLLLSGKTKNDS

SEQ ID NO: 108693 - protein, 207 aa, Unknown
  Bacterial polypetide isolated from the Sargasso Sea
MTKNLLSINDLSKKEILDLIEFANHFIDEDGNFRKEDLFPEKIVANVFCEPSTRTKSSFAIAANNLGCSLIDFDVENSSIQKGESIFETIDALNLMGVDLCVFRHSDSVIRELAECLPKMSFINAGEGAISHPTQALLDIKTIIDHKETLDGLNIVIVGDLDHSRVTSSFVEGISNFDLGSLTFSGHPEMCNRYQGSKFGKYEPHLE

SEQ ID NO: 108694 - protein, 73 aa, Unknown
  Bacterial polypetide isolated from the Sargasso Sea
MASDTKKAVKNTSKHLLGIQDLKVSEIKHILNEAQQFIDLNRSKNKKLDILKGKTQINLFFEPSTRTQSSFEL

SEQ ID NO: 108695 - protein, 96 aa, Unknown
  Bacterial polypetide isolated from the Sargasso Sea
MNKALQDADVVMTLRIQHERFENELNLDLETYKSSYQLSSEKLEFAKGDVIVMHPGPVNYIEITEAVYDSENSVIRQQIANAVAVRMAVLSRFLGS

SEQ ID NO: 108696 - protein, 45 aa, Unknown
  Bacterial polypetide isolated from the Sargasso Sea
MHPSPMNRGVEISNEVADGKQSVILKHVENGVAIRMAVLTEILKQ

SEQ ID NO: 108697 - protein, 107 aa, Unknown
  Bacterial polypetide isolated from the Sargasso Sea
MTEELQIYPHKHLLGIEGLLPDSINYLLNLSQTFVEHLNSNNEKLDYLKNKTCINIFFENSTRTRTSFELAGKKLGADMLNISVNSSSIKKGETLIDTAMTLNAMKP

SEQ ID NO: 108698 - protein, 83 aa, Unknown
  Bacterial polypetide isolated from the Sargasso Sea
MAVVKKISAIKNSPKHLLGIQHLSILEAKKILNEAKTFIKLNRSNTKKLDTLRGKTQINLFFEPSTRTQSSFDLAGKRLGADV

SEQ ID NO: 108699 - protein, 204 aa, Unknown
  Bacterial polypetide isolated from the Sargasso Sea
LKVDGFIIRHPEDKISLKIQDLLPEEIFFINAGDGSYAHPSQALLDVFTMREKCEDLSELKVAAIGDIKHCRIIASQVELLNKLGCNDIKFYGPKDLLDNNLTPCSSEIADGCLEDRDILYIIRVKHERLKENESIDMDGFRSTYQVNESFLEKTKFKGSIMHPGPINIDLEISQDVAISEKSLILTQVENGLYTRAALLQLIT

SEQ ID NO: 108700 - protein, 132 aa, Unknown
  Bacterial polypetide isolated from the Sargasso Sea
MDEPEVNDGLINDSKEAQLKNLLYLKDLHKDEIIQLLDQSDHFLKSNQPHEFVELLKNQSIASLFFEPSTRTSASFQLAAKRLGAETIMIDEKTSSATKGESVLDTIKNLEAMGVRGFIIRTGDKNLFAPID

SEQ ID NO: 108701 - protein, 73 aa, Unknown
  Bacterial polypetide isolated from the Sargasso Sea
DLDLNIEDYSNSYQITTERIEHAKGDVIIMHPGPVNYVEISENAYQSDNSVIRHQVSNSVAIRMAVLSTFLSS

SEQ ID NO: 108702 - protein, 87 aa, Unknown
  Bacterial polypetide isolated from the Sargasso Sea
MAIKSNKAIKISQKHLLGIQDLSVSDINYILDESEAFIKLNQSKNKKIDVLRGKTQINLFFEPSTRTQSSFELAGKRLGADVMSMNM

SEQ ID NO: 108703 - protein, 281 aa, Unknown
  Bacterial polypetide isolated from the Sargasso Sea
MKGKYVQHLLSVDDMSEDFILEIWTNALKNKDTNSTSLTGKILTNLFYEPSTRTSSSFYSAMTKKGGSVIPINNVKFSSVTKGETLEDTIITMSTMSDCIVLRHPEVGSAERAAKVSPVPIINGGDGDGEHPTQTLLDGLTIYSNNNNNLDNLNITFIGDLKNGRTVKSLVKLLSRYKNNNFNFISPDNLRYPSDILPINSFESDKIEDVISKTDVLYVTRVQKERGSDHNYALTEVTLSKLNDKAIVMHPLPRVNEIPKEFDKDKRAKYFEQMRNGLWCR

SEQ ID NO: 108704 - protein, 155 aa, Unknown
  Bacterial polypetide isolated from the Sargasso Sea
MKEKCEDFSKLKVAAIGDIKHCRIIGSQMTLLNRLGCTDIQFYGPKELLDDNLSPSFSEITDGCMEDRDILYVIRVKHERLKDNENINMEAFKSTYQINESFIEKTKFTGSIMHPGPINIDLEISDAVATSEKSLISTQVENGLYIRAALLGLIS

SEQ ID NO: 108705 - protein, 181 aa, Unknown
  Bacterial polypetide isolated from the Sargasso Sea
LREDNADQRLNKIGNSLGLIGDRRNSAYKSKMEKMDALRKKFSKMVLHPGPDSERVVGISLDRESDLLSLMKRNDLALEKIQAIVTKEEIPILKQIEIEEKYAGYIKRQDLEIEKIRRHESMKIPEDIDFGKIESLSAELREKLDIHRPKTLARASRIPGMTPAALSILLVQSKKVGGLKR

SEQ ID NO: 108706 - protein, 223 aa, Unknown
  Bacterial polypetide isolated from the Sargasso Sea
MKFDEPSTRTRLSFAIAAEKLGIKTFESSDVVSAKQKGEILKHEIETYVSMGIEVLVLRTKENNIDDYREFKNISIISAGFGNKSHPTQALIDISTLYSLNKINEKRTPVTYVGDVKHSRVFESGRQLLNILGFKVGVFTDKKLLPDNKNDLEIYESWDEVFENSNAIELLRIQKERLQDNEELNFDEYINSYQLTKEVLGKSQSDLAVLHPMPINIGIEISK

SEQ ID NO: 108707 - protein, 270 aa, Unknown
  Bacterial polypetide isolated from the Sargasso Sea
GKSVTRFKEGDRVYFMAPWGAFAEEACMHEFGVMPIPDDISFELAASYQMAYGTSYHALVQRGEISNKDEILVLGASGGVGLAALDIAKAKGARVVAAVSTKEKAEICKEYGADELIIYGEGPKTKDESKAFSNELKSKSLKGGYDIIYDPIGDCYTEPAFRAIGWKGKYLVVGFAAGEIPKLPINLTLLKGASLVGVFWGTFTGLESEANQKNIAEINQLLSEGKIKPLISKEVPMENAVEAITMIGNRGVIGKVVLVINKKGPTKGPF

SEQ ID NO: 108708 - protein, 275 aa, Unknown
  Bacterial polypetide isolated from the Sargasso Sea
LSGNLPPTGWTHRHLLDLEELSAEEISLILDTAVMCKEATQGCREKIDVLSGASIVNLFFENSTRTKTSFSLAARRLGADVIDFSASTSSLSKGESFIDTAKNLEAMGVDAVVVRHRTPGTPHLLASHLDVGVINAGDGPHAHPTQGLLDIFSIRERLGDLKGLTVGLVGDIAHSRTARSNLWGLTKLGAKVILCGPPTLVSDSWQEFGVEVSHDLDAILPRCDVLNLLRIQFERQKTRPFPSVREYAHLYAMNRDRLRRAKDDLVILAPGPINR

SEQ ID NO: 108709 - protein, 130 aa, Unknown
  Bacterial polypetide isolated from the Sargasso Sea
MSHILNVDDLTTDFLSELWNLASLNKGKRNSKLKNKIITNLFYEPSTRTSSSFFSAMNLSGGSVIPINNVQFSSVSKGESLQDTILTMSTMTDAIVLRPHEEGSALKASEVSEVPIINRGDGKGEHPTQT

SEQ ID NO: 108710 - protein, 72 aa, Unknown
  Bacterial polypetide isolated from the Sargasso Sea
MATDTKKAIKNSPKHLLGIQDLKVSEIKHILNEAQQFIELNRSKNKKLDILKGKTQINLFFEPSTRTQSSFE

SEQ ID NO: 108711 - protein, 63 aa, Unknown
  Bacterial polypetide isolated from the Sargasso Sea
YYGLTPDILEHANSDALIMHPGPMNRGIEIDTILADDINKSVIKEQVELGVAVRMACLKMFCV

SEQ ID NO: 108712 - protein, 233 aa, Unknown
  Bacterial polypetide isolated from the Sargasso Sea
MNKIGAIENLNKDFVNSLFKETKKIKSEWPALEQVGKKKTVCLLFWEPSTRTKLSFEHAAKALGFNVLDFAPDQSSIVKGESFEDTIKTLLALKVDGFVIRHPEDEISKTIIKMLPDDVFYINAGDGNFAHPTQALLDVFTISENHADIQNTKITILGDVDHSRVIPSKLELLKMLECSDISFLGPKNLIAQKFAPLYTEINDNCLLERDFLYVLRVQRERFKESDSLDEASF

SEQ ID NO: 108713 - protein, 246 aa, Unknown
  Bacterial polypetide isolated from the Sargasso Sea
MAKNLLSINDLTKDEILELINFSNSFIDDEGNFRKENLFPDKIVANVFFEPSTRTKMSFAVAAGNLGCNVLDFNIDSSSIQKGESIYETIDALNLMGVDLCVLRHPDSVIRELAEHMPDMVFVNAGEGSISHPTQALLDMKTIIDHKNSFDGLKIVIIGDLDHSRVTSSFVEGISNFDIESLYFCGHPEMCTNYQNTGVGKFEPDIERALEDADVVMTLRIQYERFEKDLNLDLDSYKSAYQLSSE

SEQ ID NO: 108714 - protein, 169 aa, Unknown
  Bacterial polypetide isolated from the Sargasso Sea
DIVSLKEKFGYIKNLKIGIIGDIAHSRVALSNIYGLITLGAKVTLCGPSTLMPIKIEELGLTVNNNIDEVIEWADAINVLRIQRERMNNALIPSVREYRKLFGITQSRIEKHNSELVIMHPGPMNRWVEIDSNVADSEQAIILDQVLNGVATRMAILYLLLSGTTKKDS

SEQ ID NO: 108715 - protein, 203 aa, Unknown
  Bacterial polypetide isolated from the Sargasso Sea
MKNIINLVIEEEFHEKRIDAVIAQKNDALSRTRIKNLIINGNLSINDKIVNDPSKKIYKDDKISLTIPLPKKASLKAFKYKLNIIYNDEDLLVINKSAGISMHPGPGNYDNTIVNALMNLNDKNLSNIGDELRPGIVHRIDKDTSGLVVVAKNNKSHENLSNQFSKHTITRIYQALIWGKLRPQNGKIETLITRSSKNRQLME

SEQ ID NO: 108716 - protein, 86 aa, Unknown
  Bacterial polypetide isolated from the Sargasso Sea
MAVIKKFSAVKKIQKHLLGIQNLSIQEAKLILDEAKNFIKLNRSASKKLDLLRGKTQINLFFEPSTRTQSSFELAGKRLGADVMTM

SEQ ID NO: 108717 - protein, 236 aa, Unknown
  Bacterial polypetide isolated from the Sargasso Sea
MRHLTSLKELSKDEILELLDLADNFIDSEGSIRRDPLFPDKKVVNIFCEPSTRTKISFEIAASNLGCQIIDFDLSSSSLEKGETLKDTIDNLAKMNINLCVLRHKDSVIHELIDQTDSMVFISGGEGSISHPSQGLLDIMTVRHRKDLDNSNILIVGDLDHSRVFQSFIDGMANFDSKITLCGPKELCKDVIDSSNLNYEEDLKKALKGQDVVMALRIQHERFEDKKNLDKESYLS

SEQ ID NO: 108718 - protein, 111 aa, Unknown
  Bacterial polypetide isolated from the Sargasso Sea
EKGGEVNEVESLYDQLADADVVYMTRIQKERFPDEEEYNRVAGVYKLSATDLNGSKKGMILMHPLPRVDEIDPSVDSTEHATYFEQAFNGVPTRMALLCRGLGVNIPKKVK

SEQ ID NO: 108719 - protein, 97 aa, Unknown
  Bacterial polypetide isolated from the Sargasso Sea
MATKSNKAVKISQKHLLGIQDLSITDVNFILSEAKQFINLNRSKNKKLDTLRGKTQINLFFEPSTRTQSSFELAGKRLGADVMSMKIVNSAIKKGET

SEQ ID NO: 108720 - protein, 111 aa, Unknown
  Bacterial polypetide isolated from the Sargasso Sea
EDLGVNVNYNIDEVIEWADALNILRIQRERMSGGLLPSIREYRNLFGISSDRLSRHKKELVIMHPGPINRGIEIDSSVADSDQAIILDQVLNGVASRMAILYLLLGGKEIT

SEQ ID NO: 108721 - protein, 113 aa, Unknown
  Bacterial polypetide isolated from the Sargasso Sea
EMCTKYQNPKIGKYESNLESALENADVVMALRIQYERFEKELNLDLETYKSEYQLSSEKLESAKGDVIVMHPGPVNYVEITEAVYDSENSVIRQQVANGVAIRMAVLSRFLGS

SEQ ID NO: 108722 - protein, 111 aa, Unknown
  Bacterial polypetide isolated from the Sargasso Sea
MKNLLYLKDLHKDEIIQLLDQSDHFLKSNQPHEFVELLKNQSIASLFFEPSTRTSASFQLATKRLGAETIVIDEKTSSATKGETVLDTIKNLEAMGVRGFIIRTGDKNLLP

SEQ ID NO: 108723 - protein, 295 aa, Unknown
  Bacterial polypetide isolated from the Sargasso Sea
LAFDADRLVGAYTLWPVRLKIGDEVVFGAQSMDTMTHPGYRGQGIFTRLASASFELAASRGIEVLYGFPNPKSYPGFVGKLDWCHIGDVIHWVRPLVPSGLDIIPTFAGPLVDLFSQMLPRGGGGRFLLSSQQPDDQELWRLFEEWPFHNKGCAIFRSHDWIRWRYDPKCQMEYRWVSAFDEAGRLEACAVWGMHGSLWGGLADNRAHLTELLGTNELALRAVLAEVISEAHARRVSVLETLTNNPIVESVLRRASAYRHRRAPMIIKVLTNRALPVNILELNNWSIIGGDIDTF

SEQ ID NO: 108724 - protein, 205 aa, Unknown
  Bacterial polypetide isolated from the Sargasso Sea
PVSVQTYPITVGGGGAGGPQPQAGSSGNLSVFSTITSTAGGFGGKGAAGDGGSGGGGGRGTPRAAGTGNTPPVSPAQGTPGGTGGPPNGGDGSGGGGGATTAGSVNATCCGGAGGAGATSVITGTPVARAGGGGGGASPAPSTKGAGGTGGGGNGAGCGSPGLATAGTANTGGGGGGSSGGPGIPITQGASGGSGIVIIRYKFQN

SEQ ID NO: 108725 - protein, 319 aa, Unknown
  Bacterial polypetide isolated from the Sargasso Sea
MGRSQQTESSVKTITISRQSDGQRLDNFLIKELKGVPRSRIYRLIRRGEVRLNKKRCKPDLKLSIGDRVRIPPVRVSSSIAKAGIISPGFAKILSDSILFETEELLVLNKPAGFAVQGGTGIRVNIIDAMREMKSEWRELELAHRLDRDTSGCLLFAKKIHILRELQLQFKLKTVKKVYFAIVHGGWPDNLTLVNAPLLKNRLSSGERIVKVAKDGKPSETKFKVIERFKSATMIEARPITGRTHQIRVHCQYAGHPIVGDLKYSVDDTNNDLSNVKNLCLHAAEIEFIDSSSKKPVRVTAPLDKNLHQIIKKLNHLIQ

SEQ ID NO: 108726 - protein, 111 aa, Unknown
  Bacterial polypetide isolated from the Sargasso Sea
MLYLKDLHKDEIIQLLDQSDHFLKSNQPHEFVELLKNQSIASLFFEPSTRTSASFQLATKRLGAETIVIDEKTSSATKGETVLDTIKNLEAMGVRGFIIRTGDKNLFAPID

SEQ ID NO: 108727 - protein, 304 aa, Unknown
  Bacterial polypetide isolated from the Sargasso Sea
MSKNLINFSDLTKKDIFDLIELANNFKSEDSLDYRSENLFPDKKIVSIFCEPSTRTKLSFEIAAHNLGAKFIDFDLSSSSMNKGETLEDTMNAVKMMGVDLCILRHTESVIHDFVKDFSNMQFINAGEGSISHPTQTLIDLMTINESKAKFQDLNITIVGDLDHSRVVNSFIEAIKIVGYKSLTFCGHPDLCKNFIDTSIGNFEPELDTALQNADVVMGLRIQNERLSEKLTIGAEDYIERYQINVDSLQVADPEMILLHPGPVNFGIELSKEASELDNCKIRDQIFNGVGMRMAVLTRLFSQA

SEQ ID NO: 108728 - protein, 69 aa, Unknown
  Bacterial polypetide isolated from the Sargasso Sea
DYDKLSVAKSDALIMHPGPANRGVEIDSIVADDFSRSVIREQVEMGVAVRMACLEILSANIQRKRASEE

SEQ ID NO: 108729 - protein, 58 aa, Unknown
  Bacterial polypetide isolated from the Sargasso Sea
KLILAKKNALIMHPGPMNRGIEIDTNLADDINRSVIREQVELGVAVRMACLKIFCKKN

SEQ ID NO: 108730 - protein, 234 aa, Unknown
  Bacterial polypetide isolated from the Sargasso Sea
MANNLLSINDLSKKDILDLIEFSNNFIDDEGNFRKENLFPDKIVANVFCEPSTRTKSSFAIAANNLGCSVLDFDIENSSVQKGESIFETVDALNLMGVDLCVLRHPESVIRELAECLPKMVFINAGEGSISHPTQALLDIKTIMDHKENLDGLNIVIVGDLDHSRVTSSFVEGVSNFDLGSLTFCGHPEMCTKYQNPKIGKYESHLESALENADVVMALRIQYERFEKELNLDL

SEQ ID NO: 108731 - protein, 224 aa, Unknown
  Bacterial polypetide isolated from the Sargasso Sea
MNKGETLEDTFNAVEMMGVDLCILRHTESVIHDFVKDFANMQFVNAGEGAISHPTQTLIDLMTIHESKEGFEDLKIAIVGDLDHSRVVNSFIEAIQIVGYKSLTFCGHPDLCKNFIEIPIGNFEPELETALQDADVVMALRIQNERLSEKLTIGASDYIERYQINVDSLQVADPDMILLHPGPVNFGIELSKEVGELDNCKISNQIFNGVGMRMAVLTKLFSQA

SEQ ID NO: 108732 - protein, 142 aa, Unknown
  Bacterial polypetide isolated from the Sargasso Sea
MKHLISLQDFSQKEILELIELANKFIDEEGNIKSESIFPDKRILTLFCEPSTRTKISFEIAAKSLGCHVINFDASNSSLSKGETLQDTVDTLAQMDIDLCVLRHSDAVIEDLINHIRKPMTFVSAGEGAFSHPTQGLLDLMT

SEQ ID NO: 108733 - protein, 98 aa, Unknown
  Bacterial polypetide isolated from the Sargasso Sea
MAIIKKLKAVKKYQNHLLGIQDLSFSQITEILKQAKTFITLNKSNSKKIDILRGKTQINLFFEPSTRTQSSFELAGKRLGADVMSMNIVNSAIKKVKL

SEQ ID NO: 108734 - protein, 217 aa, Unknown
  Bacterial polypetide isolated from the Sargasso Sea
MSKHLLDFKDIEKKDIEKLIDIAGKLNPEKTDAISSISLLKFDEPSTRTRLSFSVAAYRLGIKTFESSDITSAKMKGENLKHEIETYKSMGIESLVIRTKEDNIEEYRKFEDISVISGGFGTSSHPTQAILDATTLDKFNKLDKDTPVVYIGDVKHSRVFESGRELFSLLGKKVGVFTHESFLPDDLSNIEVLNSWDEVLEATEAIELLRVQKERIK

SEQ ID NO: 108735 - protein, 292 aa, Unknown
  Bacterial polypetide isolated from the Sargasso Sea
MRHLLDFQDVNKNHLENLIEKTRSLEVKLENLGSLALLKFDEPSTRTRLSFAIAADKLGIKTFESSDVVSAKQKGEILKHEIETYVSMGIEVLVLRTKENNIDDYREFNNISVISAGFGNKSHPTQALIDISTLYSLNKINEKHTPVTYVGDVKHSRVFESGRELLNILGFKVGVFTDKKLLPDNKNDLEIYESWDEVFESSNAIELLRVQKERLQDNEELNFDEYINNYQLTQEVLGKSQSDLAVLHPMPINIGIEISKDAIEDRKIKYKDQLSHAIPSRIAAFKYVRDEI

SEQ ID NO: 108736 - protein, 117 aa, Unknown
  Bacterial polypetide isolated from the Sargasso Sea
MNSLITMNDLTNDDIHRILLDAEKLLPVAKGNFHLPLLKGKILGNLFFEPSTRTRMSFETAMKRLGGDVINLGAVASSSVVKGETLHDTIRMVDGYSDIIVLRHPRQGAAQYASDAQ

SEQ ID NO: 108737 - protein, 141 aa, Unknown
  Bacterial polypetide isolated from the Sargasso Sea
MNNFSQSDIISIRDLSKDDLEQIFAKTNEIMEMPAEKRREIARGKTLGYLFFEPSTRTRLSFQSAMALIGGTSFGIADATSSSVQKGESLADTVRIMAGYTDAIVLRHSLDGSSKFAAEVSDKPLINAGSGTEEHPTQAIQ

SEQ ID NO: 108738 - protein, 71 aa, Unknown
  Bacterial polypetide isolated from the Sargasso Sea
MATNKKAVKISKKHLLGIQDLSISDINLILDEAKSFISLNKSKNKKIDILRGKTQINLFFEPSTRTQSSFE

SEQ ID NO: 108739 - protein, 55 aa, Unknown
  Bacterial polypetide isolated from the Sargasso Sea
LEHAKADALIMHPGPMNRGIEIDTNLADDINKSVIKEQVELGVAVRMACLKIFCT

SEQ ID NO: 108740 - protein, 136 aa, Unknown
  Bacterial polypetide isolated from the Sargasso Sea
MGDIVTMDDLTNQDIVAVLDDAERLVPVARGDVYLPLLQGKVLANMFFENSTRTRMSFETAMKRLGGSVLNFTSIGTSVAKGETLYDTMQMIDGYADVAAIRHPRQGAAQYSADAVGNSYSECWRWCWKSPYSDYA

SEQ ID NO: 108741 - protein, 292 aa, Unknown
  Bacterial polypetide isolated from the Sargasso Sea
MRHLLDFQDVNKNHLENLIEESRSLKIKSKNLDTLALLKFDEPSTRTRLSFAIAAEKLGIKTFESSDVISAKQKGEMLQHELETYISMGIEILVLRTKENNINDYREFKEIGIISGGFGNKSHPTQALIDISTLYSFDKLTNTSTPVTYVGDVKHSRVFESGRQLLNLLGYKVGVFTDQNLLPDNRNDLEIYESWDEVFKNSNSIELLRVQKERMLDIEKINFDNYIKNYQLTKKILDKSQKDLIVLHPMPINIGIEISEDAIEDKKIKYIDQLSHAIPSRIAAYKYVKGEI

SEQ ID NO: 108742 - protein, 293 aa, Unknown
  Bacterial polypetide isolated from the Sargasso Sea
MSKHLLDFKDIEKKDIEKLIDVTGKLNPEKTDEISSISLLKFDEPSTRTRLSFSVAAYRLGIKTFESSDITSAKMKGENLKHEIETYKSMGIESLVIRTKEDNIDEYRKFEDISVISGGFGTSSHPTQAILDATTLDKFNKLDKDTPVVYIGDVKHSRVFESGRELFSLLGKKVGVFTHESFLPDDLSNIEVLNSWDEVLETTEAIELLRVQKERIKDLGDSYLDEYINKYQLTDEILDKASEDLITLHPMPMNVGVEISEKASLHNKFKYKDQLSFGVPSRIASYMYVMEKI

SEQ ID NO: 108743 - protein, 292 aa, Unknown
  Bacterial polypetide isolated from the Sargasso Sea
MRHLLDFQDINKNHLENLIERTRSLEVKPENLDCMALLKFDEPSTRTRLSFAVAAEKLGIKTFESSDVISAKQKGEILKHEVETYVSMGIEILVLRTKENNIDDYREFEDIAVISAGFGNKSHPTQALVDISTLYSLNKINEKRTPVTYVGDVKHSRVFESGRQLLNLLGFKVGVFTDKNLLPDNKNDLEIYESWGEVFENSNAIELLRVQKERLQDKEEINFDEYINSYQLTKDVLNKSQSDLAVLHPMPINIGIEISEDAIEDSKIKYKDQLSHAIPSRIVAFKYVRDEI

SEQ ID NO: 108744 - protein, 65 aa, Unknown
  Bacterial polypetide isolated from the Sargasso Sea
YEYYGLTPDKLSFAKEDALIMHPGPMNRGIEIDTKLADDINKSVIKEQVELGVAVRMACLKLFCE

SEQ ID NO: 108745 - protein, 296 aa, Unknown
  Bacterial polypetide isolated from the Sargasso Sea
MYINNLKGKYVQHLLSVDDMSEDFILEIWTNALKNKDTNSTSLTGKILTNLFYEPSTRTSSSFYSAMTKKGGSVIPINNVKFSSVTKGETLEDTIITMSTMSDCIVLRHPEVGSAERAAKVSPVPIINGGDGDGEHPTQTLLDGLTIYSNNNNNLDNLNVTFIGDLKNGRTVKSLVKLLSRYKNNNFNFISPDNLRYPSDILPINSFESDKIEDVISKTDVLYVTRVQKERGSDHNYALTEITLSKLNDKAIVMHPLPRVNEIPKEFDKDKRAKYFEQMRNGLWCRMALLEKIILN

SEQ ID NO: 108746 - protein, 253 aa, Unknown
  Bacterial polypetide isolated from the Sargasso Sea
MNKITSISNLNRTFVEDLFLKTKLIKKSKIIQLGGFEGKTICLLFFEKSTRTKFSFELAAKRLGFNVLDFSEEISSMGKGESLEDTLNTFVAMGVNGFVVRHPEDKISLKIAKLLPDNVFFINAGDGNHAHPTQALLDVFTIQENFQKIDQLEVAILGDSKHSRVIPSFIELLKLFNCNNLKFFGPPELLNQEHAPAFNGIKADAFSKTDVLFVLRIQKERFQGFENINMKTFIEEFQINTSVLKASNFSGLL

SEQ ID NO: 108747 - protein, 226 aa, Unknown
  Bacterial polypetide isolated from the Sargasso Sea
DNSSVQKGESFFETVDALNLMGVDLCVLRHPESVIQDLAEALPKMVFINAGEGSISHPTQALLDMKTIIDHKNSLDGLKIVIVGDLDHSRVTSSFVEGISNFSIDSLTFSGHPEMCTKYQNPQIGHYEPDLDKALDNADVVMTLRIQYERFDQELNLDLETYKNAYQLSSEKLGSAKGDVIIMHPGPVNYVEITEAVYDSENSVIREQIANGVAIRMAVLSRFLSG

SEQ ID NO: 108748 - protein, 127 aa, Unknown
  Bacterial polypetide isolated from the Sargasso Sea
SSKLGYEIHIIAPTYFLDRKDLKKINNKIIFHKNLNSLKELDILMMLRVQKERIPKGAKNMMSSFKKEFCLQNKHLLNKPYLMHPGPVNRNIEISDDVLDNYPKSLILKQVEMGVFLRMACLQYILK

SEQ ID NO: 108749 - protein, 125 aa, Unknown
  Bacterial polypetide isolated from the Sargasso Sea
LGAEVNIVAPSNLMPKEIEKFGVNTFTDMKKGLKDCDIVMMLRLQNERMTSSYLSSNREYYEYYGLTPDKLDHAKSDALIMHPGPMNRGIEIDTRLADDINKSVIKEQVELGVAVRMACLKIFCE

SEQ ID NO: 108750 - protein, 248 aa, Unknown
  Bacterial polypetide isolated from the Sargasso Sea
MLHILSVNDFTDDFLYSLWSDASKRKGKSNSSLKGKILTNLFYEPSTRTSSSFYSAMSSCGGSVIPINNVQFSSVAKGESFEDTIKTMSQMSDAIVVRHPDSGAADTAAKVSSVPIINAGDGNSEHPTQTIIDGFTIYNFFNKKLSDLRVTLVGDLKNGRTVKSLVKLLNRFKNNHFNLVSPENLKLSSELPRSFYETSDINEVLKETDILYVTRVQKERGSIHDYSLTIKQLNNLPKNSIVMHPFPR

SEQ ID NO: 108751 - protein, 99 aa, Unknown
  Bacterial polypetide isolated from the Sargasso Sea
MDDVDIIIMLRLQLERMSGSFVPSIREYFRFYGLDREKLNFAKSDALILHPGPMNRGVEIDSELADDLDRSAIFEQVRMGVAVRMACLKTFVKKNEEGN

SEQ ID NO: 108752 - protein, 108 aa, Unknown
  Bacterial polypetide isolated from the Sargasso Sea
MAIKTNKAIKISQKHLLGIQDLSVNDINYILDESEAFIKLNQSKNKKIDVLRGKTQINLFFEPSTRTQSSFELAGKRLGADVMSMNMGNSAIKKGETLIDTAMTLNAM

SEQ ID NO: 108753 - protein, 56 aa, Unknown
  Bacterial polypetide isolated from the Sargasso Sea
KLKFAKKDALLMHPGPMNRGVEIDTKLADDINVSLVKEQVELGVAVRMACLKLYCK

SEQ ID NO: 108754 - protein, 103 aa, Unknown
  Bacterial polypetide isolated from the Sargasso Sea
QGLYEPDLNKALDNADVVMALRIQHERFEQELDLDLETYKQDYQLTSEKMDNAKGDAIIMHPGPVNYIEITESIYDSEQSVIREQVKNGVAVRMAVLSRFLSC

SEQ ID NO: 108755 - protein, 151 aa, Unknown
  Bacterial polypetide isolated from the Sargasso Sea
MLKSKHLIGLEHFPVSDLNKIIDTSFKFKDILQTESRKAILLKGKTIVNMFFENSTRTKISFSLAEKRLGADSINFSASTSSVKKGETLKDTVQNIESMKIDGAVIRHGHPGSALKLTEYIDGAVINAGDGSHEHPTQAILDMVTLKEKFW

SEQ ID NO: 108756 - protein, 127 aa, Unknown
  Bacterial polypetide isolated from the Sargasso Sea
LGAQVMVCGPATLLPRHISELGVLVSNDVREALEWCDVANVLRIQLERQEMRYFPSLREYTRFFGVNKKLLDSIKKEIVIMHPGPINRGVEITSDVADSDHSIILQQVENGVAIRMAVLYLLAEKNS

SEQ ID NO: 108757 - protein, 52 aa, Unknown
  Bacterial polypetide isolated from the Sargasso Sea
AKKDALIMHPGPMNRGVEIDTKLADDINVSLVKEQVELGVAVRMACLKKYCK

SEQ ID NO: 108758 - protein, 112 aa, Unknown
  Bacterial polypetide isolated from the Sargasso Sea
LPVRVFTDMRKGLENCDIVMMLRIQKERIVGKIMPDQRSYFKKYGLDYNKLKYAKKNAFVMHPGPMNRGVEIDSKLADDITISLIQEQVAMGVAVRMACLDLIIKNRDNNVS

SEQ ID NO: 108759 - protein, 69 aa, Unknown
  Bacterial polypetide isolated from the Sargasso Sea
NFFGLDETKLSLANPNAVIMHPGPMNRGVEIASALADDTNRSLIKTQVEMGVAVRMSIIEALNHSKNKT

SEQ ID NO: 108760 - protein, 149 aa, Unknown
  Bacterial polypetide isolated from the Sargasso Sea
MAVIKKFSAVKKIQKHLLGIQNLSIQEANLILDEAKNFIKLNRSASKKLDLLRGKTQINLFFEPSTRTQSSFELAGKRLGADVMTMNVGNSSLKKGETILDTAMSLNAMHPDIIVVRHQDSGAPNLLSQKVNCTVINAGDGLREHPTQA

SEQ ID NO: 108761 - protein, 154 aa, Unknown
  Bacterial polypetide isolated from the Sargasso Sea
MFDHRHLISLEKFPKKDIQQIIDTAFNFKEVLERPIKKVPSLQGKTIVNLFFENSTRTRISFELAQKRLSADTVNFSASTSSLKKGESFKDTAQNIEAMKIDAVVMRHPSPGAPYQLKKFINAQIINAGDGTHEHPTQAILDMMSIQEKFGKIK

SEQ ID NO: 108762 - protein, 127 aa, Unknown
  Bacterial polypetide isolated from the Sargasso Sea
MAVIKKFKAVKIEQNHLLGIQDLSFSDVSNILNQAKTFITLNKSATKKLDILRGKTQINLFFEPSTRTQSSFELAGKRLGADVMSMNIVNSAIKKGETLIDTAMTLNAMHPDIIVIRHQDSGAPNLL

SEQ ID NO: 108763 - protein, 108 aa, Unknown
  Bacterial polypetide isolated from the Sargasso Sea
MLENIKIPKISQTHLHGIKDLSIEDINNILELSKIFKEHNKEKDKKIPILKGRTIINLFFEPSTRTLISFEIAAKRLGADVINMNIEGSSLRKGESLFDTAQTLGAMN

SEQ ID NO: 108764 - protein, 164 aa, Unknown
  Bacterial polypetide isolated from the Sargasso Sea
MSFTQSHLLGIEPLSPADITALLDLSEAYVDLNRSEEKHSQALTGLTQINMFFENSTRTQASFELAGKRLGADVMNMSMQASSIKKGETLIDTALTLNAMHPDLLVVRHPHSGAVDLLAQKVNCAVLNAGDGRHEHPTQALLDALTIRRAKGRLHRLNIAICGE

SEQ ID NO: 108765 - protein, 49 aa, Unknown
  Bacterial polypetide isolated from the Sargasso Sea
DALLMHPGPMNRGVEIDTKLADDINVSLVKEQVELGVAVRMACLKLYCK

SEQ ID NO: 108766 - protein, 173 aa, Unknown
  Bacterial polypetide isolated from the Sargasso Sea
MGSNIKKDIKISQKHLLGIQDLKVSDAKLILNEAQQFIDLNRSKSKKIDILKGKTQINLFFEPSTRTQSSFELAGKRLGADVMSMNITNSAIKKGETLIDTAMTLNAMHPDIIVVRHQDSGACNLLSQKVKCAVLNAGDGRREHPTQALLDALTIINRKKKIEGLKIAIWEIF

SEQ ID NO: 108767 - protein, 131 aa, Unknown
  Bacterial polypetide isolated from the Sargasso Sea
MSSKVTNISPIDPQIDDSGNLNHFLTIEGLSKTQLIKLLDASSVFIGADSDRRREQANWLIGHTVVNLFFEDSTRTRTTFEIAAKRLGAAVINLNPSRMSTRKGETVLDTVRTLEAMDTDIFVVRDSASGT

SEQ ID NO: 108768 - protein, 208 aa, Unknown
  Bacterial polypetide isolated from the Sargasso Sea
MQFAGSHILSISQFERADVERLFTVADAMRPYAHRERITRVLDGAILGSMFFEPSTRTRISFGSAFNLLGGEVRETTGFEHSAIAKGESLYDTARVLSGYSDIIVMRHPEDGSVSEFAAASRVPVINGGDGANEHPSQALLDLYTIRSELAGRQRALDGLRIAMVGDLRFGRTVHSLSKLLSLFEGLRISLVSPGALSMPEAVVETLR

SEQ ID NO: 108769 - protein, 101 aa, Unknown
  Bacterial polypetide isolated from the Sargasso Sea
IFSNMENGLKDCDIVMMLRLQNERMTSSFLSSNREYYEYYGLTPDKLKFAKDDALIMHPGPMNRGIEIDTKLADDINKSVIKEQVELGVAVRMACLKIFCE

SEQ ID NO: 108770 - protein, 137 aa, Unknown
  Bacterial polypetide isolated from the Sargasso Sea
RVARSNIYLLTMLGAEVNIVAPSNLMPKEIEKFGVNTFTDMKKGLKDCDIVMMLRLQNERMTSSYLSSNREYYEYYGLTPDKLDHAKSDALIMHPGPMNRGIEIDTRLADDINKSVIKEQVELGVAVRMACLKIFCE

SEQ ID NO: 108771 - protein, 94 aa, Unknown
  Bacterial polypetide isolated from the Sargasso Sea
IADAIIVLRLQKERMIENLLSSIDSYSLDYGLTPEKLSLNNKRIPILHPGPINRDIEISSKVVDRYPNCLINNQVANGIPIRMALLYLLQKHNK

SEQ ID NO: 108772 - protein, 69 aa, Unknown
  Bacterial polypetide isolated from the Sargasso Sea
FGITEERLARLHKELVIMHPGPMNRGVEIDDRVADSDQAIILDQVLNGVASRMSILYLLLGTKEKVDEK

SEQ ID NO: 108773 - protein, 171 aa, Unknown
  Bacterial polypetide isolated from the Sargasso Sea
MDFRGNHILSIDQFDRKGIEKLFSVADKLEPFASKEKITRVLEGAILGNMFFEPSTRTRISFGASFNLLGGNVREITEVGSSSLAKGESLADTARVLSGYSDIIVMRHPENGSVKRFADSSRVPVINAGDGSNEHPSQALLDLYTIQKELSENNKTLDGLRIALVGDLKYG

SEQ ID NO: 108774 - protein, 154 aa, Unknown
  Bacterial polypetide isolated from the Sargasso Sea
MAIKTNKAIKISQKHLLGIQDLSINDVNLILDEALEFIKVNQSKNKKIDALRGKTQINLFFEPSTRTQSSFELAGKRLGADVMSMNISNSAIKKGETLIDTAMTLNAMHPDIIVIRHQDSGACNLLSQKVNCAVLNAGDGRREHPTQALLDALT

SEQ ID NO: 108775 - protein, 139 aa, Unknown
  Bacterial polypetide isolated from the Sargasso Sea
MHLVETADLNKKEIEFILNEAQKFISFNKMKIKKNNLLEGRTIFNLFFEDSTRTRTSFEVAAKRLGADLINVAVKDSSINKGETLLDTMTTINSMNPDVLIIRHPDEGISKKISMSVDACVINAGDGSHEHPTQALLDA

SEQ ID NO: 108776 - protein, 168 aa, Unknown
  Bacterial polypetide isolated from the Sargasso Sea
MIKKANIPEITQKHLHGIKNLSIEDINKILELSNFFKLKNREKDKNYPILKGRTIINLFFEPSTRTLISFEIAAKRLGADVINMNIEGSSLRKGESLHDTAQTLGAMNPDLVVIRHGIDNASKQISEIINCPVINAGEGINEHPTQALLDAYTIVNNKRSLKNITVAI

SEQ ID NO: 108777 - protein, 125 aa, Unknown
  Bacterial polypetide isolated from the Sargasso Sea
MAIKTNKAIKISQKHLLGIQDLSVSDINYILDESEAFIKLNQSKNKKIDVLRGKTQINLFFEPSTRTQSSFELAGKRLGADVMSMNMGNSAIKKGETLIDTAMTLNAMHPDIIVIRHQDSGACNL

SEQ ID NO: 108778 - protein, 127 aa, Unknown
  Bacterial polypetide isolated from the Sargasso Sea
MANVKKAIKISQKHLLGIQDLSISDVNFILSEAKQFIDLNKSKNKKLDVLRGKTQINLFFEPSTRTQSSFELAGKRLGADVMSMNLNNSAIKKGETLIDTAMTLNAMHPDIIVVRHQDSGASKFTIS

SEQ ID NO: 108779 - protein, 108 aa, Unknown
  Bacterial polypetide isolated from the Sargasso Sea
IQKLGVNSFSDMKKGVKDCDIVMMLRLQNERMTSSFLSSNREYYEYYGLTPDKLNFAKEDALIMHPGPMNRGIEIDTKLADDINKSVIKEQVELGVAVRMACLKIFCE

SEQ ID NO: 108780 - protein, 63 aa, Unknown
  Bacterial polypetide isolated from the Sargasso Sea
ITVERLKNHNKEIVIMHPGPINRGVEIDSAVADSKRAIILDQVLNGVASRMAILYLLCGGKST

SEQ ID NO: 108781 - protein, 117 aa, Unknown
  Bacterial polypetide isolated from the Sargasso Sea
AYFIDHGVNVNYNIDEVLEWADAVNVLRIQRERMGVGLIPSDREYRALFGITEERLVRRHNELVIMHPGPMNRGVEIDDRVADSDQAIILDQVLNGVASRMSILYLLLGSKEKVENK

SEQ ID NO: 108782 - protein, 161 aa, Unknown
  Bacterial polypetide isolated from the Sargasso Sea
IRQEKGSFEGLKVVIMGDISHSRVARSLTEGLKIMNTGNVTLISPDEFKPDMANFPNTQFEENPKQGLCDADVIVTLRVQKERIESDESSLSLEEYSNKYQLSQEKLALSKPDAIVMHPGPMNRGIEISNKVADGKQSVILKQVENGVAVRMAVLSEILKQ

SEQ ID NO: 108783 - protein, 48 aa, Unknown
  Bacterial polypetide isolated from the Sargasso Sea
ALIMHPGPMNRGVEIDTKLADDINVSLVKEQVELGVAVRMACLKKYCK

SEQ ID NO: 108784 - protein, 138 aa, Unknown
  Bacterial polypetide isolated from the Sargasso Sea
IILSKLGAKINVIGPKEWLPQNINKLPVKVFTDMKKGLKNCDIVMMLRIQKERIVGKIMPNQKTYFKKYGLDYNKLKYAKNNAFVMHPGPMNRGFEIDSKLADDVTRSLIQEQVAMGVAIRMACLDILIKNRDNVIKS

SEQ ID NO: 108785 - protein, 158 aa, Unknown
  Bacterial polypetide isolated from the Sargasso Sea
LDHKNSFDGLKIVIIGDLDHSRVTSSFVEGISNFDIESLSFCGHPEMCTNYQNTDFGKFEPDIERALEDADVVMTLRIQYERFEKDLNLDLDTYKSAYQLSSEKLGFAKSDAIIMHPGPVNYVEITEAVYDSENSVIRQQIANGVAIRMAVLSRFLSR

SEQ ID NO: 108786 - protein, 63 aa, Unknown
  Bacterial polypetide isolated from the Sargasso Sea
MNKVRHFIDTQDLSKKEIFEIFRLMKMLKEARYCGAVPELLKNKTLAMIFEEPSTRTRVSFEA

SEQ ID NO: 108787 - protein, 229 aa, Unknown
  Bacterial polypetide isolated from the Sargasso Sea
MLKSKHLIGLEHFPVSDLNKIIDTSFKFKDILQTESRKAILLKGKTIVNMFFENSTRTKISFSLAEKRLGADSINFSASTSSVKKGETLKDTVQNIESMKIDGAVIRHGHPGSALKLTEYIDGAVINAGDGSHEHPTQAILDMVTLKEKFGKIKGLKVGIIGDILNSRVARSDIFALKKLGAEIVVCGPSTLLPSDAKKLGINITYNLDEVLNWCDAVIALRIQLERMH

SEQ ID NO: 108788 - protein, 75 aa, Unknown
  Bacterial polypetide isolated from the Sargasso Sea
ISLDTYYDEYGLNQSRMQLAKKDVIVMHPGPINRGVEIESSVADGPNSVILNQVSYGISVRMAIMSILFDNHHAS

SEQ ID NO: 108789 - protein, 164 aa, Unknown
  Bacterial polypetide isolated from the Sargasso Sea
MAIKTNKAIKISQKHLLGIQDLSINDVNLILNESHSFIKVNQSKNKKIDALKGKTQINLFFEPSTRTQSSFELAGKRLGADVMSMNISNSAIKKGETLIDTAMTLNAMHPDIIVIRHQDSGACNLLSQKVNCAVLNAGDGRREHPTQALLNALTIINRKEKMKD

SEQ ID NO: 108790 - protein, 75 aa, Unknown
  Bacterial polypetide isolated from the Sargasso Sea
EYYYRYGLNKEKLSHAKGDAIVMHPGPMNRGVEIDGELADDINRSVIQEQVEMGVAIRMAAMHLLARNEGSGKHG

SEQ ID NO: 108791 - protein, 241 aa, Unknown
  Bacterial polypetide isolated from the Sargasso Sea
SFEDAIRTFSSYVDVIIMRSQEPGRATQAARMMDVIKRPVPIINAGSGSDQHPTQALLDIYTLNRSFSQRGGIDGKVIGMMGDLKRGRTARSLCYLMKNYFNVRLVFIAPKIFSMRDDVKAHLKEQGTSFVETKCLSEVIQELDALYVTRMQSEWDQQGESNDVDLNQYTVDKNQLKMMKSDAIIMHPLPRGPEIDPVVDIDPRAMYWRQERNGMWMRVAVLLKIFQLEEALYELKSTLVS

SEQ ID NO: 108792 - protein, 220 aa, Unknown
  Bacterial polypetide isolated from the Sargasso Sea
MLKNKHLLGLEGYPREDIQTIIETAFNFREVLDRPIKKVPSLQGVTIVNLFFENSTRTKISFELAQKRLSADTVNFSASSSSLKKGESFKDTAQNIEAMKIDAVVMRHPTPGAPKHLTNFIDSVIINAGDGTHEHPTQAILDMMSLHEKFGKLKGLKIGIIGDIKHSRVALSNIYGLKIMGAEVTLCGPPNLIPKNIEELGVNYSNNVDQVIEWADALNS

SEQ ID NO: 108793 - protein, 129 aa, Unknown
  Bacterial polypetide isolated from the Sargasso Sea
MAVVKKNVAVKNEINHLLGIQTLSIKSAKDILNQAKEFIKLNRSGSKKLDILRGKTQINLFFEPSTRTQSSFDLAGKRLGADVMTINMGNSALKKGETLVDTAMTLNAMHPDIIVIRHQDSGAPNLLSQ

SEQ ID NO: 108794 - protein, 112 aa, Unknown
  Bacterial polypetide isolated from the Sargasso Sea
MPKEIEKFGVNTFTDMKKGLKDCDIVMMLRLQNERMTSSYLSSNREYYEYYGLTPDKLDHAKSDALIMHPGPMNRGIEIDTRLADDINKSVIKEQVELGVAVRMACLKIFCE

SEQ ID NO: 108795 - protein, 122 aa, Unknown
  Bacterial polypetide isolated from the Sargasso Sea
EVNIIAPSNLMPKDIEKLGVNTFSDMKKGLKDCDIVMMLRLQNERMSSSFLSSNREYYEYFGLTPDKLDYAKKDALIMHPGPMNRGIEIDTKLADDINKSVIKEQVELGVAVRMACLKIFCE

SEQ ID NO: 108796 - protein, 91 aa, Unknown
  Bacterial polypetide isolated from the Sargasso Sea
DCDIVMMLRLQNERMTSSFLSSNREYYEYYGLTPDKLNHAKEDALIMHPGPMNRGIEIDTKLADDINKSVIKEQVELGVAVRMACLKIFCN

SEQ ID NO: 108797 - protein, 111 aa, Unknown
  Bacterial polypetide isolated from the Sargasso Sea
CTNYQNTDVGKFEPDIERALEDADVVMTLRIQYERFEKDLNLDLDTYKSAYQLSSEKLGFAKSDAIIMHPGPVNYVEITEAVYDSENSVIRQQIANGVAIRMAVLSRFLSR

SEQ ID NO: 108798 - protein, 122 aa, Unknown
  Bacterial polypetide isolated from the Sargasso Sea
EVNIVAPSNLIPKDIEKLGVNIFSDMKKGLKECDIVMMLRLQNERMTSSFLSSNREYYEYYGLTPDKLNFAKDDALIMHPGPMNRGIEIDTNLADDINKSVIKEQVELGVAVRMACLKIFCI

SEQ ID NO: 108799 - protein, 135 aa, Unknown
  Bacterial polypetide isolated from the Sargasso Sea
MALSKKAIKISQKHLLGIQDLSISDVNIILDEAKDFISLNKSKNKKLDILRGKTQINLFFEPSTRTQSSFELAGKRLGADVMSMNITNSAIKKGETLIDTAMTLNAMHPDIIVIRHQDSGACNLLSQKVNCAVLN

SEQ ID NO: 108800 - protein, 89 aa, Unknown
  Bacterial polypetide isolated from the Sargasso Sea
IQRERMSGGLLPSIREYRNLFGISSDRLSRHKKELVIMHPGPMNRGVEIDSSVADSDQAIILDQVLNGVASRMAILYLLLGGKEITKKS

SEQ ID NO: 108801 - protein, 119 aa, Unknown
  Bacterial polypetide isolated from the Sargasso Sea
MEQNHLLGIQDLSFSQISEILKQAKTFITLNKSSSKKIDILRGKTQINLFFEPSTRTQSSFELAGKRLGADVMSMNIVNSAIKKGETLIDTAMTLNAMHPDIIVIRHQDSGAPKFIISE

SEQ ID NO: 108802 - protein, 84 aa, Unknown
  Bacterial polypetide isolated from the Sargasso Sea
MHGSFVPSTREYYEIFGLNKKNLQRAKPNALIMHPGPMNRGVEIDTEIADNLKQSVIREQVEMGVAIRMACLELLDNNLNTKTD

SEQ ID NO: 108803 - protein, 131 aa, Unknown
  Bacterial polypetide isolated from the Sargasso Sea
MLENIKIPKISQTHLHGIKDLSIEDINNILELSKIFKEHNKEKDKKIPILKGRTIINLFFEPSTRTLISFEIAAKRLGADVINMNIEGSSLRKGESLFDTAQTLGAMNPDLVIIRHGENDASKEIAKILEC

SEQ ID NO: 108804 - protein, 100 aa, Unknown
  Bacterial polypetide isolated from the Sargasso Sea
MLSFQGEHILSVNQLDRDCIERIFAVAKKMEPYAKKQKQTTVLEGAILANLFFEPSTRTRVSFGTAFNLLGGGVRETTGMQSSALAKGESLYDTARVIST

SEQ ID NO: 108805 - protein, 132 aa, Unknown
  Bacterial polypetide isolated from the Sargasso Sea
MGKENIQISKDGKLKHFLSTESLSKEILTEILDHAESFAVVSGRSIKKVPLLRGKTVINLFFEPSTRTRSTFEFAAKRLSADVMNLNIDSSATRKGESLGDTLRTLEAMNSDIFVVRHQDSGADRIYCASSI

SEQ ID NO: 108806 - protein, 109 aa, Unknown
  Bacterial polypetide isolated from the Sargasso Sea
MTYSWCAIKTAVPTEFIARQVSSNVCVINAGDGQHQHPTQALLDTFTIRRHKPDFQNLVIAIVGDIAHSRVARSDIYTFKKLGVPEIRVVGPVTLLPSEVETLGVKVYH

SEQ ID NO: 108807 - protein, 168 aa, Unknown
  Bacterial polypetide isolated from the Sargasso Sea
MAIKTNKAIKISQKHLLGIQDLSVSDINYILDESEAFIKLNQSKNKKIDVLRGKTQINLFFEPSTRTQSSFELAGKRLGADVMSMNMSNSAIKKGETLIDTAMTLNAMHPDIIVIRHQDSGACNLLSQKVNCVVLNAGDGRREHPTQALLDALTIRNRKKKIQGLKIA

SEQ ID NO: 108808 - protein, 106 aa, Unknown
  Bacterial polypetide isolated from the Sargasso Sea
MASTKAVKISKKNLLGIQDLNVSDVKHILSEAKQFIQLNRSKNKKIDILRGKTQINLFFEPSTRTQSSFELAGKRLGADVMSMNITNSAIKKGETLIDTAMTLNAM

SEQ ID NO: 108809 - protein, 103 aa, Unknown
  Bacterial polypetide isolated from the Sargasso Sea
MKHVVSISDLSKKQILSVLKRAKELVPVAKGKKKSKSLDGKILATCFFEPSTRTRLSFETAMQRLGGTCIGFADPSATSHLKGETLVDGIRMVAGYADAVLLR

SEQ ID NO: 108810 - protein, 129 aa, Unknown
  Bacterial polypetide isolated from the Sargasso Sea
MANVKKAIKISQKHLLGIQDLSISDVNFILSEAKQFIDLNKSKNKKLDVLRGKTQINLFFEPSTRTQSSFELAGKRLGADVMSMNLNNSAIKKGETLIDTAMTLNAMHPDIIVVRHQDSGASNLLSQKS

SEQ ID NO: 108811 - protein, 185 aa, Unknown
  Bacterial polypetide isolated from the Sargasso Sea
MLDDLISVDQLSPTIIDRIFAITPDMQAITQNKQKPCDYLKGCILGNLFFEASTRSRMSFSSAFMYLGGQVNSTTGVVFSSISKGESLADTARVIASYCDILVIRHPDLGSAAMAAEHANIPVINAGDGPGEHPTQALLDLYTIYKEKKSLSNLNICMVGDLKYGRTVHSLARLLALYPKITLTF

SEQ ID NO: 108812 - protein, 138 aa, Unknown
  Bacterial polypetide isolated from the Sargasso Sea
MWSETLIPDEFHNFLKTPAPNQLEDPVKSRGSITISRSLEESIKIADAIIVLRLQKERMMENLLNSIDSYSFDYGLTSEKLSLNTKEIPILHPGPINRDIEISSKIVDEYPNCLINNQVANGIPIRMALLYLLQKYKK

SEQ ID NO: 108813 - protein, 194 aa, Unknown
  Bacterial polypetide isolated from the Sargasso Sea
MDFSGSHILSIDQFNRSDIEKLFSVADSLEPYSSKIKVTRVLEGAILGSMFFEPSTRTRISFGASFNLLGGNVREITEVGSSSLAKGESLIDTAKVLSGYSDIIVMRHPDEGSVQKFAEASRVPVVNGGDGANEHPSQALLDLYTIEKELSQNNKSIDGLRIALVGDLKYGRAVHSLCKIFLYIQMLRSNSSHL

SEQ ID NO: 108814 - protein, 192 aa, Unknown
  Bacterial polypetide isolated from the Sargasso Sea
LIDDVGPDTHLISAGESSVSHPTQGLLDLLTIRQEKGSFEGLKVVIMGDISHSRVARSLTEGLKIMNTGNVTLISPEEFKPDMANFSNTQFEEDPKQGLCDADVIVTLRVQKERIESDENSLSLEEYSNEYQLSQEKLALSKPDAIVMHPGPMNRGIEISNEVADGKQSAILKQVENGVAVRMAVLSEILKQ

SEQ ID NO: 108815 - protein, 141 aa, Unknown
  Bacterial polypetide isolated from the Sargasso Sea
MLSKKHLLGLDGYPKRDIERIIKTGFKFREVLDRPIKKVPSLQGLTIANLFFENSTRTRMSFELAQRRLSADSINFSAPSSSLKKGESLKDTIQNIEAMKIDAIVMRHPHAGSPKLLTNFVNAIIINAGDGTHEHPTQAIL

SEQ ID NO: 108816 - protein, 73 aa, Unknown
  Bacterial polypetide isolated from the Sargasso Sea
TQINLFFEPSTRTQSSFELAGKRLGADVMSMNISNSAIKKGETLIDTAMTLNAMHPHIIVIRHQNSGACNLLS

SEQ ID NO: 108817 - protein, 72 aa, Unknown
  Bacterial polypetide isolated from the Sargasso Sea
QREYFNLFGLNKDKLNRVAPKALIMHPGPMNRGVEIDSAIADDVEKSLIHIQVEMGVAARMACLEAVSLGAV

SEQ ID NO: 108818 - protein, 143 aa, Unknown
  Bacterial polypetide isolated from the Sargasso Sea
MATKSKKAIKISQKHLLGIQDLSVSDVTTILKEASKFIELNKSKNKKIDILKGKTQINLFFEPSTRTQSSFELAGKRLGADVMSMNITNSAIKKGETLIDTAMTLNAMHPDIIVIRHQDSGACNLLSQKVNCAVLNAGDGRRE

SEQ ID NO: 108819 - protein, 131 aa, Unknown
  Bacterial polypetide isolated from the Sargasso Sea
MAIKTNQAIKISQKHLLGIQDLSINDVNLILDEANSFIKVNQSKNKKVDVLRGKTQINLFFEPSTRTQSSFELAGKRLGADVMSMNISNSAIKKGETLIDTAMTLNAMHPDIIVIRHQDSGACNLLSQKVN

SEQ ID NO: 108820 - protein, 161 aa, Unknown
  Bacterial polypetide isolated from the Sargasso Sea
LTIIDRKEKIQGLKIAICGDIVHSRVARSNIYLLNMLGAEVNIVAPSNLMPKDIDKLGVNSFSDMKKGLKDCDIVMMLRLQSERMTSSFLSSNREYYEYYGLTPDKLEFAKDDALIMHPGPMNRGIEIDTNLADDINKSVIKEQVELGVAVRMACLKIFCE

SEQ ID NO: 108821 - protein, 174 aa, Unknown
  Bacterial polypetide isolated from the Sargasso Sea
MANSKNAVKISKKHLLGIQDLSISDVKTILSESKNFIALNKSKNKKIDILRGKTQINLFFEPSTRTQSSFELAGKRLGADVMSMNITNSAIKKGETLIDTAMTLNAMHPDIIVVRHQDSGASNLLSQKVNCAVLNAGDGRREHPTQALLDALTIMEKKNKIEGLKIAICGDILH

SEQ ID NO: 108822 - protein, 164 aa, Unknown
  Bacterial polypetide isolated from the Sargasso Sea
MAKNLISINDLSKKEIIELIEFANNFIDEEGNFRKEDLFPEKVVANVFCEPSTRTKSSFAIAAKNLGCSLIDFDVENSSIRKGESIFETIDALNLMGVDLCVFRHSDSVIRELADCLPKMSFINAGEGAISHPTQALLDIKTIIDHKKTLDGLNIVIVGDLDHS

SEQ ID NO: 108823 - protein, 61 aa, Unknown
  Bacterial polypetide isolated from the Sargasso Sea
GLTQDKLEFAKSDSIIMHPGPMNRGIEIDTKLADDTNMSVVKEQVELGVAIRMACLKIFCE

SEQ ID NO: 108824 - protein, 86 aa, Unknown
  Bacterial polypetide isolated from the Sargasso Sea
EKSYFPNDREYSLLYGLDKKRISKLKKDILILHPGPINRGVEIKSDIVESNNSIILDQVENGVAVRMAIIYLLASKMNISKSHEIV

SEQ ID NO: 108825 - protein, 137 aa, Unknown
  Bacterial polypetide isolated from the Sargasso Sea
MATEKKVTAIKNSPKHLLGIQNLSVQEAKKILTEAKSFIKLNRSSSKKLDVLRGKTQINLFFEPSTRTQSSFDLAGKRLGADVMTMNMGNSALKKGETLIDTAMTLNAMHPDLIVIRHQDSGAPNLLSQKVNCTVIN

SEQ ID NO: 108826 - protein, 100 aa, Unknown
  Bacterial polypetide isolated from the Sargasso Sea
FTDMKKGLKDCDIVMMLRLQNERMSSSYLSSNREYYEYYGLTPDKLEHAKSDALIMHPGPMNRGIEIDTMLADDINKSVIKEQVELGVAVRMACLKIFCT

SEQ ID NO: 108827 - protein, 54 aa, Unknown
  Bacterial polypetide isolated from the Sargasso Sea
NKEIPILHPGPINRDIEISSKVVDRYPNCLINDQVSNGIPIRMALLYLLQKYNK

SEQ ID NO: 108828 - protein, 174 aa, Unknown
  Bacterial polypetide isolated from the Sargasso Sea
MATKSNKAIKISQKHLLGIQDLSINDVNIILDQAKEFIDLNRSKNKKLDTLKGKTQINLFFEPSTRTQSSFDLAGKRLGADVMSMNITNSAIKKGETLIDTAMTLNAMHPDIIVIRHQDSGACNLLSQKVNCAVLNAGDGRREHPTQALLDALTIINRKKKIEGLRIAICGDIL

SEQ ID NO: 108829 - protein, 143 aa, Unknown
  Bacterial polypetide isolated from the Sargasso Sea
MEPIIKDCIGLRFYSTEFIQSILSLAKKIKENNVTIDLKNKIVVQLFFEPSTRTRLSFEIAIQKSGATPMMIDIETSSLTKGESLFDMVKNIAAMKTDAIVVRHSSGGIPYFISQHVSIPVLNAGDGYHEHPSQGLLDIFTMQ

SEQ ID NO: 108830 - protein, 128 aa, Unknown
  Bacterial polypetide isolated from the Sargasso Sea
MSSKATNASPINPQIDDSGHLRHFLTIEGLGKTQLMKLLDAASVFIGADSDRRREQANWLIGHTVVNLFFEDSTRTRTTFEIAAKRLGAAVINLNPSRMSTRKGETVLDTVRTLEAMDTNIFVVRDSA

SEQ ID NO: 108831 - protein, 107 aa, Unknown
  Bacterial polypetide isolated from the Sargasso Sea
MKIDAVVMRHPTPGAAKHLTEFIDAIIINAGDGTHEHPTQAILDMMSLHEKFGRLKGLKIGIIGDILHSRVALSNIYGLTSMAAEVTICGPPNLIPSFLQDLNVNYN

SEQ ID NO: 108832 - protein, 131 aa, Unknown
  Bacterial polypetide isolated from the Sargasso Sea
MPGIPTTKLKDLKNCIEAQQFDAEMLKELFVVADAMAEVKPGSPESRMLQGFNMATLFYEPSTRTRLSFEGAMGKLGGGILSTESAGEYSSAAKGETLEDTIRTVEGYADIIVLRHFSAGAARRAANAADT

SEQ ID NO: 108833 - protein, 114 aa, Unknown
  Bacterial polypetide isolated from the Sargasso Sea
MPHSIERLGVKKFNDMKKGLDGCDIVMMLRLQNERMQGSFLPSAREYYEYFGLTPDKLKFAKKDALIMHPGPMNRGIEIDTNLADDINRSVIKEQVELGVAVRMACLKIFCKKI

SEQ ID NO: 108834 - protein, 59 aa, Unknown
  Bacterial polypetide isolated from the Sargasso Sea
AKKNAFVMHPGPMNRGVEIDSKLADDVTRSLIQEQVAMGVAVRMACLDLIIKNRDDFGN

SEQ ID NO: 108835 - protein, 130 aa, Unknown
  Bacterial polypetide isolated from the Sargasso Sea
MAIKTDKAIKISQKHLLGIQDLSINDVNLILDEAHTFIKVNQSKNKKIDVLRGKTQINLFFEPSTRTQSSFELAGKRLGADVMSMNISNSAIKKGETLIDTAMTLNAMHPDIIVVRHQDSGACNLLSQQS

SEQ ID NO: 108836 - protein, 94 aa, Unknown
  Bacterial polypetide isolated from the Sargasso Sea
MNELKKNKKKRFFSSPIKLSSNHLLAIEGMKKSEIQKLIERADYFANLDRHTNTKVLQGYVVLNVFFENSTRTRVSFELAARRLGAEVINISLI

SEQ ID NO: 108837 - protein, 147 aa, Unknown
  Bacterial polypetide isolated from the Sargasso Sea
SAFGADIILCGPKTLIPDEFINFLKTPAPNQIEDPVKSRGSITISRSLEESIKIADAIFVLRLQKERMMENLLSSINTYSLDFGLTPEKLSLNNKEIPILHPGPINRDIEISSKIVDLYPNCLINNQVSNGIPIRMALLYLLQKYNK

SEQ ID NO: 108838 - protein, 56 aa, Unknown
  Bacterial polypetide isolated from the Sargasso Sea
AFVMHPGPMNRGFEIDSKLADDVTRSLIQEQVAMGVAIRMACLDILIKNRDNVLKS

SEQ ID NO: 108839 - protein, 166 aa, Unknown
  Bacterial polypetide isolated from the Sargasso Sea
MAIKSNKAIKISQKHLLGIQDLSVSDINYILDESEAFIKLNQSKNKKIDVLRGKTQINLFFEPSTRTQSSFELAGKRLGADVMSMNMGNSAIKKGETLIDTAMTLNAMHPDIIVIRHQDSGACNLLSQKVNCVVLNAGDGRREHPTQALLDALTIRNRKKKIQGLK

SEQ ID NO: 108840 - protein, 89 aa, Unknown
  Bacterial polypetide isolated from the Sargasso Sea
ILRIQRERMSGGLLPSIREYRNLFGISSERLAKHKKELVIMHPGPMNRGVEIDSSVADSDQAIILDQVLNGVASRMAILYLLLGGKEIN

SEQ ID NO: 108841 - protein, 187 aa, Unknown
  Bacterial polypetide isolated from the Sargasso Sea
MDFRGAHIISVKQFEREDVEKVFEVADSMGPFAHRELITKVLEGAILGNMFFEPSTRTRVSFGCAFNLLGGHVRETTDIETSSIVKGESLYDTARVLSGYSDVIVMRHPQAGSVEEFSKASRVPVINGGDGANEHPSQALLDLYTIKKELDSKSLQIDGMSIAMVGDLKHGRTVHSLSQLLHLYKSI

SEQ ID NO: 108842 - protein, 62 aa, Unknown
  Bacterial polypetide isolated from the Sargasso Sea
LNKHEKEIIIMHPGPMNRGVEIDGSVADSNQAIILDQVLNGVASRMAILYLLCGGKANVGEN

SEQ ID NO: 108843 - protein, 277 aa, Unknown
  Bacterial polypetide isolated from the Sargasso Sea
LFDYAQNIKNSWPNLEQIGQGKTVCLLFWEPSTRTKLSFEHAAKSLGFKVLDFSPASSSIKKGETLEDTIKTLLALKVDGFIIRHPEDKISLKIEKLLPDNIFFINAGDGSYAHPSQALLDVYTMKEKCEDFSKLKVAAIGDIKHCRIIGSQMTLLNRLGCTDIQFYGPKELLDDNLSPSFSEITDGCMEDRDILYVIRVKHERLKDNENIDMEAFKSTYQINESFIEKTKFTGSVMHPGPINIDLEISDAVATSEKSLISTQVENGLYIRAALLGL

SEQ ID NO: 108844 - protein, 80 aa, Unknown
  Bacterial polypetide isolated from the Sargasso Sea
MTVESGKNKLNKLSQKNLRHFIDIDSLPKELLKDILDLAESFAVVSGQPVKKVPLLRGKTIVNLFFESSTRTRTTFEIAA

SEQ ID NO: 108845 - protein, 139 aa, Unknown
  Bacterial polypetide isolated from the Sargasso Sea
MSEDIEIPKISQKHLLGIKYLSIDDIDKILELAVFFKLRNKEKNKNYPILTGRTIINLFFEPSTRTLISFEIAAKRLGADVINMNIEGSSLRKGETLFDTAQTIGAMNPDLVVIRHSEDNSAEEISNLLDCPVVNAGEG

SEQ ID NO: 108846 - protein, 220 aa, Unknown
  Bacterial polypetide isolated from the Sargasso Sea
KGESIFETVDALNLMGVDLCVLRHPESVIRELAECLPKMVFINAGEGSISHPTQALLDIKTIMDHKENLDGLNIVIVGDLDHSRVTSSFVEGVSNFDLGSLTFCGHPEMCTKYQNPKIGKYESHLESALENADVVMALRIQYERFEKELNLDLETYKSEYQLSSEKLESAKGDAIVMHPGPVNYVEITEAVYDSENSVIRQQVANGVAIRMAVLSRFLGS

SEQ ID NO: 108847 - protein, 166 aa, Unknown
  Bacterial polypetide isolated from the Sargasso Sea
MAIKTNKAIKISQKHLLGIQDLSVNDINYILDESEAFIKLNQSKNKKIDVLRGKTQINLFFEPSTRTQSSFELAGKRLGADVMSMNMGNSAIKKGETLIDTAMTLNAMHPDIIVIRHQDSGACNLLSQKVNCVVLNAGDGRREHPTQALLDALTIRNRKKKIQGLK

SEQ ID NO: 108848 - protein, 123 aa, Unknown
  Bacterial polypetide isolated from the Sargasso Sea
AEVNIVAPSNLMPKEIEKFGVKTFTDMKMGLKNCDIVMMLRLQNERMTSSYLSSNREYYEYYGLTPDKLDHAKSDALIMHPGPMNRGIEIDTRLADDINKSVIKEQVELGVAVRMACLKIFCE

SEQ ID NO: 108849 - protein, 57 aa, Unknown
  Bacterial polypetide isolated from the Sargasso Sea
EKLKFANKNALIMHPGPMNRGVEIDTKLADDINVSLVKEQVELGVAVRMACLKLYCK

SEQ ID NO: 108850 - protein, 113 aa, Unknown
  Bacterial polypetide isolated from the Sargasso Sea
LMPKEIEKFGVNTFTDMKKGLKDCDIVMMLRLQNERMSSSYLSSNREYYEYYGLTPDKLDHAKSDALIMHPGPMNRGIEIDTRLADDINKSVIKEQVELGVAVRMACLKIFCE

SEQ ID NO: 108851 - protein, 169 aa, Unknown
  Bacterial polypetide isolated from the Sargasso Sea
MLENVKIPKISQAHLHGIKNLSIEDINNILELSKIFKEHNKEKDKKIPILKGRTIINLFFEPSTRTLISFEIAAKRLGADVINMNIEGSSLRKGESLFDTAQTLGAMNPDLVIIRHGENDASKEIAKILECPVINAGEGVNEHPTQALLDAYTIMNHNRKLNDITVSIC

SEQ ID NO: 108852 - protein, 110 aa, Unknown
  Bacterial polypetide isolated from the Sargasso Sea
KKIEKFGVNTFTDMKKGLKDCDIVMMLRLQNERMSSSYLSSNREYYEYYGLTPDKLDHAKSDALIMHPGPMNRGIEIDTRLADDINKSVIKEQVELGVAVRMACLKIFCE

SEQ ID NO: 108853 - protein, 264 aa, Unknown
  Bacterial polypetide isolated from the Sargasso Sea
MDKTEYYYNNIHLLGIQGMQKNTISSILERAKFFNNKKNNKKNSILKDHLVINLFFENSTRTKASFEIAAKLMSADILNISVSTSSIKKGETLIDTASTLNAMHPDFLILRHPNSGAAEMLSKHVQCSIINGGDGRHEHPTQALLDAAVIIDKNKSLEGLKIIICGDISNSRVARSNIYLLTTMGAEVSVVGPPTLIPKNIQNMGVKVFNNLNTSLQSADIIMILRLQSERMNGSETPSKREYYNFFGINEENIKLAKNDVFVM

SEQ ID NO: 108854 - protein, 84 aa, Unknown
  Bacterial polypetide isolated from the Sargasso Sea
LRLQNERMTSSYLSSNREYYEYYGLTTDKLEYAKPDALIMHPGPMNRGIEIDTILADDINKSVIKEQVELGVAVRMACLKIFCT

SEQ ID NO: 108855 - protein, 286 aa, Unknown
  Bacterial polypetide isolated from the Sargasso Sea
KKNFLDKVFDLTATISNDWPNVEQIGAGKTICLLFWEPSTRTKLSFEHAAKKLGFNVLDFSPEHSSVKKGESFEDTILTLLAMQVDGFIIRHPEDHISKTISSMLPENVFYINAGDGNHAHPTQAMLDVFTMNEKFNDLSNLKVTILGDVNHSRVIPSQIELLKKYSCSDINFIGPESLISKKFSPSFSEIPKDFLIDRDILFILRIQKERFKDDDALDETNFIENFQVNEEFIKNTGFNGYLMHPGPMNIDAEITRNVANGKNSLVLKQVENGLYLRTALLSLML

SEQ ID NO: 108856 - protein, 86 aa, Unknown
  Bacterial polypetide isolated from the Sargasso Sea
MMLRLQNERMTSSYLSSNREYYEYYGLTPDKLDHAKADALIMHPGPMNRGIEIDTRLADDINKSVIKEQVELGVAVRMACLKIFCE

SEQ ID NO: 108857 - protein, 128 aa, Unknown
  Bacterial polypetide isolated from the Sargasso Sea
MAIKTNKAIKISQKHLLGIQDLSINDVNLILDEAHSFIKVNQSKNKKIDVLSGKTQINLFFEPSTRTQSSFELAGKRLGADVMSMNISNSAIKKGETLIDTAMTLNAMHPDIIVIRHQDSGACNLLSQ

SEQ ID NO: 108858 - protein, 134 aa, Unknown
  Bacterial polypetide isolated from the Sargasso Sea
GARVRLIAPATLIPIGVEQLGVEVFHDMTLGLMDCDIVMMLRLQQERMHGSFFPSVREYFAFFGLDYMKLANAKADALIMHPGPMNRGVEIDAEVADDFGRSVIREQVEMGVAVRMGCLEILTENLDRTEARNI

SEQ ID NO: 108859 - protein, 116 aa, Unknown
  Bacterial polypetide isolated from the Sargasso Sea
PSNLMPKDVDKLGVNSFSDMKKGLKDCDIVMMLRLQNERMTSSFLSSNREYYEYYGLTPDKLEFAKGDALIMHPGPMNRGIEIDTKLADDINKSVIKEQVELGVAVRMACLKIFCE

SEQ ID NO: 108860 - protein, 132 aa, Unknown
  Bacterial polypetide isolated from the Sargasso Sea
NIYLLTMLGAEVNLVAPTNLMPKEIEKFGVNTFTDMKKGLKDCDIVMMLRLQNERMTSSFLSSNREYYEYYGLTPDKLDHAKPDALIMHPGPMNRGIEIDTRLADDINKSVIKEQVELGVAVRMACLKIFCE

SEQ ID NO: 108861 - protein, 337 aa, Unknown
  Bacterial polypetide isolated from the Sargasso Sea
MDFSGTHILSIDQFDRKGIEKLFSVADKLEPFASKEKITRVLEGAILGNMFFEPSTRTRISFGASFNLLGGNVREITEVGSSSLAKGESLADTAQVLSGYSDIIVMRHPENGSVKRFADSSRVPVINAGDGSNEHPSQALLDLYTIQKELSENNKTLDGLRIALVGDLKYGRAVHSLCKILSFYSNVKLNLISPRELKLPPELLNQLNESGLSLSETENLEEGISEVDIIYITRIQEERFKSKSDANKYRGLLSLNQSIYTANCEPNTVILHPLPRDSRSDANELDSDLYENPNLAIFRQADNGVVIRMAMFALVLGIEDKIEESSKLVNWNVGLDN

SEQ ID NO: 108862 - protein, 159 aa, Unknown
  Bacterial polypetide isolated from the Sargasso Sea
MAKNLISISDLSKNEILEIIKFSDSFIDDEGNFRKEDLFPDKTIANVFCEPSTRTKSSFSIAASNLGCSVLDFDVTNSSIQKGETIYETIDALHLMGVDLCVLRHSDSVIKDLAEYLPNMTFVNAGEGMLSHPTQTLLDLKTILDNKKTIDGLKIVIVG

SEQ ID NO: 108863 - protein, 93 aa, Unknown
  Bacterial polypetide isolated from the Sargasso Sea
VKDCDIVMMLRLQNERMTSSFLSSNREYYEYYGLTPDKIKYAKEDALIMHPGPMNRGIEIDTNLADDINKSVIKEQVELGVAVRMACLKIFCE

SEQ ID NO: 108864 - protein, 86 aa, Unknown
  Bacterial polypetide isolated from the Sargasso Sea
ERIVGKIMPNQKTYFKKYGLDYNKLKYAKKNAFVMHPGPMNRGVEIDSKLADDVTRSLIQEQVAMGVAVRMACLDLIIKNRDDFSK

SEQ ID NO: 108865 - protein, 155 aa, Unknown
  Bacterial polypetide isolated from the Sargasso Sea
MAAKTKAIKISQKHLLGIQDLSIIDVNLILDEASKFIELNKSKNKKLSILNGKTQINLFFEPSTRTQSSFELAGKRLGADVMSMNITNSAIKKGETLIDTAMTLNAMHPDIIVIRHQDSGACNLLSQKVNCSVLNAGDGRREHPTQALLDALTII

SEQ ID NO: 108866 - protein, 73 aa, Unknown
  Bacterial polypetide isolated from the Sargasso Sea
MQIWPHKHIHTLANFSIKDYESVFELANRFDALKNAGTKKIPALQGTLVTSLFFEASTRTKNSFELAAKRLFC

SEQ ID NO: 108867 - protein, 121 aa, Unknown
  Bacterial polypetide isolated from the Sargasso Sea
MANVKKAIKISKKHLLGIQDLSISDVNFILSEAKQFIDLNKSKNKKLDILRGKTQINLFFEPSTRTQSSFELAGKRLGADVMSMNLNNSAIKKGETLIDTAMTLNAMHPDIIVVRHQDSGA

SEQ ID NO: 108868 - protein, 296 aa, Unknown
  Bacterial polypetide isolated from the Sargasso Sea
LTSLKELSKNEILELLDLADNFIDSEGSIRRDLLFPDKKVVNIFCEPSTRTKISFEIAASNLGCQIIDFDLSSSSLEKGETLKDTIDNLSKMNINLCVLRHKDSVIHELIDKTDSMVFVSGGEGSISHPSQGLLDIMTVRHRKDLDNSNILIVGDLDHSRVFQSFIDGMANFDSKITLCGPKELCKDVIDDSNLNYEEDLNKALKGQDVVMALRIQHERFEDKKNLDKESYLSNYQINNEKLQIANDDCIVMHPGPVNQGIEISEDVYNSANSVILDQVANGVAMRMAILIKYLSQ

SEQ ID NO: 108869 - protein, 154 aa, Unknown
  Bacterial polypetide isolated from the Sargasso Sea
NSLDGLKIVIVGDLDHSRVTSSFVEGISNFEVDSLIFSGHPEMCTKYQNPDLGIYEPDLDKALQDADVVMTLRIQYERFEEDLDLDLESYKNSYQLSIEKLGCAKADAIIMHPGPVNYVEITESVYDSENSVIREQIANGVAIRMAVLSNFLSS

SEQ ID NO: 108870 - protein, 301 aa, Unknown
  Bacterial polypetide isolated from the Sargasso Sea
MANNLLSINDLSKKDLLQLIEFSNNFIDDEGNFRKENLFPDKIVANVFCEPSTRTKSSFAIAANNLGCSVIDFDIENSSVQKGESIFETVDALNLMGVDLCVLRHPDSVIRELAECLPKMVFINAGEGSISHPTQALLDIKTIIDHKENLDGLNIVIVGDLDHSRVTSSFVEGISNFDLGSLIFCGHPEMCKKYQNPKIGKYESHLESALENADVVMALRIQYERFEKELNLDLETYKSEYQLSSEKLESAKGDAIVMHPGPVNYVEITEAVYDSENSVIRQQVANGVAIRMAVLSRFLGS

SEQ ID NO: 108871 - protein, 299 aa, Unknown
  Bacterial polypetide isolated from the Sargasso Sea
MRHLTSLKELSKNEILELLDLADNFIDSEGSIRRDPLFPDKKVVNIFCEPSTRTKISFEIAASNLGCQIIDFDLSSSSLEKGETLKDTIDNLAKMNINLCVLRHKDSVIHELIDQTDSMVFVSGGEGSISHPSQGLLDIMTVRHRKDLDNSNILIVGDLDHSRVFQSFIDGMANFDSKITLCGPKELCKDVKDSSNLNYEEDLNKALKGQDVVMALRIQHERFKDKKNLDKESYLSNYQINNEKLQIANDDCIVMHPGPVNQGIEISEDVYNSANSVILDQVANGVAMRMAILIKYLSQ

SEQ ID NO: 108872 - protein, 100 aa, Unknown
  Bacterial polypetide isolated from the Sargasso Sea
FSNMKKGLKDCDIVMMLRLQNERMTSSFLSSNREYYEYYGLTPDKLDEAKNDALIMHPGPMNRGIEIDTKLADDINKSVIKEQVELGVAVRMACLKIFCE

SEQ ID NO: 108873 - protein, 183 aa, Unknown
  Bacterial polypetide isolated from the Sargasso Sea
MEFLGNHILSIDQFDKDDIVKVFSIAEKMIPYANREKKTKVLQGAILSNMFFEASTRTRISFGSAFNLLGGEVRETTGIEASSLAKGESLYDTARVLSGYSDLIVMRHPEKNSVQEFSEASRVPVINAGDGENEHPSQALLDLFTIKLELESKGKSIDGSNIALVGDLKFGRAVHSLCKALNL

SEQ ID NO: 108874 - protein, 296 aa, Unknown
  Bacterial polypetide isolated from the Sargasso Sea
MNKISTVDNLDKDLLISLFDSAQNIKNSWPNLEQIGQGKTVCLLFWEPSTRTKLSFEHAAKSLGFKVLDFSPASSSIKKGETLEDTIKTLLALKVDGFIIRHPEDKISLKIEKLLPDNIFFINAGDGSYAHPSQALLDVYTMKEKCEDFSKLKVAAIGDIKHCRIIGSQMTLLNRLGCTDIQFYGPKELLDDNLSPSFSEITDGCMEDRDILYVIRVKHERLKDNENINMEAFKSTYQINESFIEKTKFTGSIMHPGPINIDLEISDAVATSEKSLISTQVENGLYIRAALLGLIS

SEQ ID NO: 108875 - protein, 82 aa, Unknown
  Bacterial polypetide isolated from the Sargasso Sea
MQNERMTSSFLSSNREYYEYYGLTPDKLERAKSDAIIMHPGPMNRGIEIDTKLADDINKSVIKEQVELGVAVRMACLKLFCE

SEQ ID NO: 108876 - protein, 64 aa, Unknown
  Bacterial polypetide isolated from the Sargasso Sea
GLTPEKLSLNKKEIPILHPGPINRDIEISSKVVDQYPNCLINNQVANGIPIRMALLYLLQKHKK

SEQ ID NO: 108877 - protein, 65 aa, Unknown
  Bacterial polypetide isolated from the Sargasso Sea
FNEYQLSQEKLALSKPDAIVMHPGPMNRGIEISNEVADGKQSVILKQVENGVAVRMAVLSEILKQ

SEQ ID NO: 108878 - protein, 485 aa, Unknown
  Bacterial polypetide isolated from the Sargasso Sea
KGAIDAANILKPALARGELRAIGATTLNEYQKYFEKDKALERRFQKVLVEEPDIDSAISILRGIKERYESHHKVQIKDEAVIGSVMLSNRYISNRFLPDKAIDLIDEAGSKLRIEMNSKPEELDDLDRRIRQIEIEIVAIKREKDKNKLDKLNQELANLKEKRNQIFSKWSQEKELLDNIQQQKLEIENYKKKSERAERDGDYGLVAEIRYGKIKDAQEKIKNLNDELSKFQNSNSLIREVVTYDDIAEVVSKWTGIPVNKMLESDKEKLLNLENEIHKRIIGQQNPVNLVSDAIRRSRTGLQDINKPIGSFLFLGTTGVGKTEVAKALAEVLFNNENNLTRIDMSEYQESHAISRLIGSPPGYVGYDEGGQLTEAVRNKPYSVILLDEIEKAHPDAFNVLLQVLDEGRLTDNKGRVADFKNSVIIMTSNIGSDKILNAFESNSSFEVAEKKSKEAVLQELRLKVRPEFLNRIDDIVLFSPLTKK

SEQ ID NO: 108879 - protein, 255 aa, Unknown
  Bacterial polypetide isolated from the Sargasso Sea
MKQKHLLGLENFPASDIDKIIETSFSFKEILDRPIKKVPSLQGKTIVNLFFENSTRTRISFELAQKRLSADTVNFSASSSSLKKGESFKDTVQNIEAMKIDAVVMRHPSPGSSVHLTKYIKSIVINAGDGAHEHPTQAILDMMSLKEKFGKIRGLKIGIIGDIAHSRVARSNIYGLIKMGAEVMVCGSPTLIPIEIISLGVKVSYNLDEVLDWADAINVLRIQLERMNRGLFPSVREYRKLFGITDERLQKHNKE

SEQ ID NO: 108880 - protein, 186 aa, Unknown
  Bacterial polypetide isolated from the Sargasso Sea
PDTHLISAGESSVSHPTQGLLDLLTIRQEKGSFEGLKVVIMGDISHSRVARSLTEGLKIMNTGNVTLISPDEFKPDMANFSNTQFEEDPKQGLCDADVIVTLRVQKERIESDESSLSLEEYSNEYQLSQEKLALSKPDAIVMHPGPMNRGIEISNEVADGKQSVILKQVENGVAVRMAVLSEILKQ

SEQ ID NO: 108881 - protein, 300 aa, Unknown
  Bacterial polypetide isolated from the Sargasso Sea
SKDFIYDFFTETKKIKYSPETSKNFNHEKNICALFYENSTRTKLSFQKACSNINAVFHNLDIQTSSVNKGETFYNTIKTINSIGMDLIIIRHSSSGAPYFLAKNTYSSVINAGDGAHAHPTQTLSDLFTIFEISNKFEDLEVSIIGDILYSRVARSNILGLLKMGSRINIIGPRELVPEDMVNLYSTIDRSYKNKISYYEDFEKPILSSDFLIALRIQKERFDKNTDLNFDTYKTKWKIDLDVLRNLKREDVFIMHPGPVNEEVELSHELVHSENSLISKQVENGVFVRQKIMEKLLNEK

SEQ ID NO: 108882 - protein, 134 aa, Unknown
  Bacterial polypetide isolated from the Sargasso Sea
RSNIILLNMLGAEVNIMLPSNLMPKDIEKLGVNSFSDMKKGLKDCDIVMMLRLQNERMTSSFLSSNREYYEYYGLTPDKLDFAKDDALIMHPGPMNRGIEIDTNLADDINKSVIKEQVELGVAVRMACLKIFCE

SEQ ID NO: 108883 - protein, 299 aa, Unknown
  Bacterial polypetide isolated from the Sargasso Sea
MRHLTSLKELSKNEILELLDLADNFIDSEGSIRRDPLFPDKKVVNIFCEPSTRTKISFEIAASNLGCQIIDFDLSSSSLEKGETLKDTIDNLAKMNINLCVLRHKDSVIHELIDKTDSMVFVSGGEGSISHPSQGLLDIMTVRHRKDLDNSNILIVGDLDHSRVFQSFIDGMSNFDSKITLCGPKELCKDVIDDSNLNYEEDLNKALKGQDVVMALRIQHERFEDKKNLDKESYLSNYQINNDKLLIANDDCIVMHPGPVNQGIEISEDVYNSANSVILDQVANGVAMRMAILIKYLSQ

SEQ ID NO: 108884 - protein, 296 aa, Unknown
  Bacterial polypetide isolated from the Sargasso Sea
MNKISTVNDLDKKFLESLFESAQNIKKSWPNLEQIGKGKTVCLLFWEPSTRTKLSFEHAAKSLGFNVLDFSPSSSSIEKGETLEDTIKTLLALKVDGFIIRHPEDKISLQIEKLLPEDIFFINAGDGSYAHPSQALLDVYTMKDKCEDFSELKVAAIGDIKHCRIIGSQVTLLNRLGCTDIQFYGPKQLLDDNLSPSFSEIADNCMEDRDILYVIRVKHERLKANENIDMESFKSLYQINESFIKKTKFNGSIMHPGPINVDLEISNGLATSEKALISTQVENGLYIRAALLSLIS

SEQ ID NO: 108885 - protein, 134 aa, Unknown
  Bacterial polypetide isolated from the Sargasso Sea
TTMGAEIKVCGPPNLTPNFLQYMDVKYNSSLDEVIEWADALNVLRIQKERMGRGLIPSTREYRATFGITDERLKKHKKEIVIMHPGPMNRGVEIDGVIADSDQAIILDQVLNGVASRMAILYLLCGGKVNHGDD

SEQ ID NO: 108886 - protein, 162 aa, Unknown
  Bacterial polypetide isolated from the Sargasso Sea
MAINNNAIKISQKHLLGIQDLSISDVKLILDEAKKFISLNKSKNKKLDILRGKTQINLFFEPSTRTQSSFELAGKRLGADVMSMNITNSAIKKGETLIDTAMTLNAMHPDIIVVRHQDSGASNLLSQKVNCSVLNAGDGRREHPTQALLDALTIIEKKKKIE

SEQ ID NO: 108887 - protein, 129 aa, Unknown
  Bacterial polypetide isolated from the Sargasso Sea
MANHNKAIKISKKHLLGIQDLSISDVNFILSEAKQFIDLNKSKNKKLNILRGKTQINLFFEPSTRTQSSFELAGKRLGADVMSMNLNNSAIKKGETLIDTAMTLNAMHPDIIVVRHQDSGASNLLSQKV

SEQ ID NO: 108888 - protein, 54 aa, Unknown
  Bacterial polypetide isolated from the Sargasso Sea
LGFAKSDAIIMHPGPVNYVEITEAVYDSENSVIRQQIANGVAIRMAVLSRFLSR

SEQ ID NO: 108889 - protein, 299 aa, Unknown
  Bacterial polypetide isolated from the Sargasso Sea
MRHLTSLKELSKDEIVELLDLADNFIDSEGSIRRDPLFPDKKVINIFCEPSTRTKISFEIAASNLGCQIIDFDLSSSSLEKGETLKDTIDNLAKMNINLCVLRHKDSVIHELIDQTDSMVFVSGGEGSISHPSQGLLDIMTVRHRKDLDNSNILIVGDLDHSRVFQSFIDGMANFNSKITLCGPKELCKDVMESSNLNYEEDLNKALKSQDVVMALRIQHERFDDKKDLDKESYLDDYQINNEKLQIANDDCIVMHPGPVNQGIEISEDVYNSANSVILDQVANGVAMRMAILIKYLSQ

SEQ ID NO: 108890 - protein, 276 aa, Unknown
  Bacterial polypetide isolated from the Sargasso Sea
SAQNIKNSWPNLEQVGHGKTVCLLFWEPSTRTKLSFEHAAKSLGFKVLDFSPASSSIKKGETLEDTIKTLLALKVDGFIIRHPEDKISLKIEKLLPDNIFFINAGDGSYAHPSQALLDVYTMKEKCEDFSKLKVAAIGDIKHCRIIRSQMTLLNRLGCTDIQFYGPKELLDDNLSPSFSEITDGCMEDRDILYVIRVKHERLKDNENIDMEDFKSIYQINESFIEKTKFTGSVMHPGPINIDLEISDAIATSEKSLISTQVENGLYIRAALLGLIS

SEQ ID NO: 108891 - protein, 131 aa, Unknown
  Bacterial polypetide isolated from the Sargasso Sea
MAVIKKLKAVKKEQNHLLGIQDLSFSQVSEILNQAKTFITLNKSSSKKIDILRGKTQINLFFEPSTRTQSSFELAGKRLGADVMSMNIVNSAIKKGETLIDTAMTLNAMHPDIIVVRHQDSGAPKFAITKS

SEQ ID NO: 108892 - protein, 292 aa, Unknown
  Bacterial polypetide isolated from the Sargasso Sea
MSFKGEHILSVKQFDRDKIQQVFDIARSMEPYATRQKRTTVLEGAILGNLFFEPSTRTRVSFGCAFNLLGGEVRETTGMQSSALSKGESLFDTARVISSYSDVIAMRHPQAGSVAEFAEGSRVPVLNGGDGANEHPTQALLDLFTIEKELAASQQPIDGMHIAMIGDLKFGRTVHSLSKLLALYKNIQFTLIAPNELAMPDDIVSLIENAGHRVTVTDQLAGNLNADIVYQTRIQEERFPSQEEANKYRGKFRLNQDIYTKHCKSNTVIMHPLPRDSRIEANELDNDLNLNP

SEQ ID NO: 108893 - protein, 291 aa, Unknown
  Bacterial polypetide isolated from the Sargasso Sea
MGIQNLSIQEASLILDEAKNFIKLNRSASKKLDLLRGKTQINLFFEPSTRTQSSFELAGKRLGVDVMTMNVGNSSLKKGETILDTAMSLNAMHPDIIVVRHQDSGAPNLLSQKVNCTVINAGDGLREHPTQALLDALTIINRKGKIEGLKIAICGDILHSRVARSNIYLLNMLGAEVNVIAPKTLLPNSISKLGVKGFTNMKEGLASCDIVMMLRLQNERMTGSFLPSKREYYEYFGLTPDKLKLAKKDALIMHPGPMNRGVEIDTKLADDINVSLVKEQVELGVAVRMAC

SEQ ID NO: 108894 - protein, 220 aa, Unknown
  Bacterial polypetide isolated from the Sargasso Sea
AQNIEAMKIDAVVMRHPSPGAPYNLKEFIDAKIINAGDGTHEHPTQAILDMMSIQEKFGKIEGLNIAIIGDIYHSRVARSNIYGLVTMGANVTVCGPPNLIPQEISELGVNINYNIDEVVEWADAVNVLRIQRERMGVGLIPSNREYRKLFGITNERMIRRKKELVIMHPGPMNRGVEIDSEVADSDQAIILDQVLNGVASRMSILYLILGAKDGVKNED

SEQ ID NO: 108895 - protein, 192 aa, Unknown
  Bacterial polypetide isolated from the Sargasso Sea
MTSTKHVRGVDDLGKDGILEILELSNHFLEVSNRRIPKVPALRGKTVASLFFEDSTRTRLSFEKAAKRLSADVMNFSVSSSSVKKGESLRDTIETISSMGAEAIVVRHKSVGVPWMITEWTDASVVNAGDGAHEHPTQSLADCYTITRQFGSVERKRIVIVGDIKHSRVARSNVKAFSALGAKVALVAPPTL

SEQ ID NO: 108896 - protein, 175 aa, Unknown
  Bacterial polypetide isolated from the Sargasso Sea
RREHPTQALLDALPIINRRGKVKGLKIAICGDILHSRVARSNIYLMNMLGAEVNIVAPKTLLPHSIERLGVKAFTDMKKGLDNCDIVMMLRLQNERMQGSFLPSAREYYEFFGLTPDKLKMAKKNALIMHPGPMNRGVEIDTNLADDINRSVIREQVELGVAVRMACLKIFCKRN

SEQ ID NO: 108897 - protein, 195 aa, Unknown
  Bacterial polypetide isolated from the Sargasso Sea
MAIKTNKAIKISQKHLLGIQDLSINDVNLILDEAHDFIKVNQSKNKKIDALRGKTQINLFFEPSTRTQSSFELAGKRLGADVMSMNISNSAIKKGETLIDTAMTLNAMHPDIIVIRHQDSGACNLLSQKVNCAVLNAGDGRREHPTQALLDALTIINRKKKIEGLRIAICGDILHSRVARSNIYLLNMLGAEVNI

SEQ ID NO: 108898 - protein, 291 aa, Unknown
  Bacterial polypetide isolated from the Sargasso Sea
YLSRSQKILNEAKSFIELNRGSSKKLDVLRGKTQINLFFEPSTRTQSSFDLAGKRLGADVMTMNMGNSALKKGETLIDTAMTLNAMHPDIIVLRHQDSGAPNLLSQKVNCTVINAGDGRREHPTQALLDALTIINRKRNIEGLKIAICGDILHSRVARSNIYLMNMLGAEVNVIAPKTLMPTGIENLGVKAFTNMKKGLDGCDIVMMLRLQNERMQGSFLPSKREYYEFFGLTPEKLKFAKKDALLMHPGPMNRGVEIDTKLADDINVSLVKEQVELGVAIRMACLKIYCK

SEQ ID NO: 108899 - protein, 192 aa, Unknown
  Bacterial polypetide isolated from the Sargasso Sea
MANVKKAIKISQKHLLGIQDLSISDVNFILSEAKQFINLNKSKNKKLDVLRGKTQINLFFEPSTRTQSSFELAGKRLGADVMSMNLNNSAIKKGETLIDTAMTLNAMHPDIIVVRHQDSGASNLLSQKVNCAVLNAGDGRREHPTQALLDALTIIDRKEKIEGLKIAICGDIVHSRVARSNIYLLNMLGAES

SEQ ID NO: 108900 - protein, 174 aa, Unknown
  Bacterial polypetide isolated from the Sargasso Sea
GDGTNEHPTQALLDYCVIREIFKKKKIKFGICGDIKHSRVAHSNIKLLSKLGYEIHIIAPKYFLNRNDLKKINNNIIFHKNLNSLKKLDILMMLRVQKERIPKGAKNMMSSFKKEFCLQNKHLLNKPYLMHPGPVNRNIEISDDVLDNYPKSLILKQVEMGVYLRMACLQYILK

SEQ ID NO: 108901 - protein, 301 aa, Unknown
  Bacterial polypetide isolated from the Sargasso Sea
QKRTTVLDGAILGNLFFEPSTRTRVSFGTAFNLLGGEVRETTGMSSSALAKGESLYDTARVLSGYSDIIAMRHPAAGSVAEFAEGSRVPVINGGDGANEHPTQALLDLFTIKRELEYNGQGIDGLHIAMIGDLRYGRTVHSLSRLLCLFKNIRFTLISPKELAMPQPIIDAIENAGHQLTITDTLEGNMDADICYQTRIQEERFPSQEEANKYRGKFRLNQSIYTKHFQSKTVIMHPLPRDSRMEANELDNDLNLNPNLAIFRQTDNGVLVRMALFALTLGVENLLTKYERDVVWYSNKSK

SEQ ID NO: 108902 - protein, 258 aa, Unknown
  Bacterial polypetide isolated from the Sargasso Sea
MKKLFKNNSEVNKSSPVKLSSHHLLAIEGMKKTEIQKLLDRADYFANLDKHANTKYLSGYVVLNVFFENSTRTRVSFELAARRLGAEVINISLINSSIKKGESLLDTASTLNAMKPDLLIVRHPYSGAPLLFAEYLSCSIINAGDGRHEHPTQALLDALTIKRRIGNLEGLKISICGDISNSRVARSNIHLLTTMGAEVRCVAPSTLMPSSLGKLGVKCFNDMKEGIKDADVVMLLRLQNERMSGTENPSEREYFNFF

SEQ ID NO: 108903 - protein, 208 aa, Unknown
  Bacterial polypetide isolated from the Sargasso Sea
MHPDIIVIRHQDSGAPNLLSQKVNCSVINAGDGRREHPTQALLDALTIINRKGKVEGLKIAICGDILHSRVARSNIYLMTMLGAEVNVVAPKTLLPHSIERLGVKSFTNMHKGLDNCDIVMMLRLQNERMHGSYLPSAREYYEYFGLTLDKLKMAKKNALIMHPGPMNRGVEIDTNLADDINRSVIREQVELGVAVRMACLKIFCKKT

SEQ ID NO: 108904 - protein, 266 aa, Unknown
  Bacterial polypetide isolated from the Sargasso Sea
MPKTKAIRTSTGSKILNDAEKIALKYYSSVIKKTKISIKKSRNIFKKIHLVETADLTKKEIEFILDESIKFISFNKKRIKKIDLLEGRTIFNLFFEDSTRTRTSFEVAAKRLGADLINVAVKDSSINKGETLLDTMTTINSMNPDILIVRHPEEGISKKISNTVDASVINAGDGSHEHPTQALLDALTIKNKFKNFSKLRIAICGDILHSRVARSNIIILSKLGAKINVIGPKEWLPKNIKKLPVKVFTDMKKGLHNCDIIMMLRI

SEQ ID NO: 108905 - protein, 266 aa, Unknown
  Bacterial polypetide isolated from the Sargasso Sea
KNSFELAAKRLSADVQTFAPSSSSLTKGETIIDTAITYSAMGADTLVIRHSSSYITFEIAKKLDAINAKTSVLNAGDGLHSHPSQGLLDIYTLIKFFSKKTLNPEVLNSKKILIIGDVNHSRVARSNLWALSAFGADIILCGPKTLIPDEFINFLKTPAPNQTEDPVKSRGSITISRSLEESIKIADAIIVLRLQKERMMENLLSSIDSYSLDYGLTPEKLSLNNKEIPILHPGPINRDIEISSKVVDRYPNCLINNQVANGIPIR

SEQ ID NO: 108906 - protein, 262 aa, Unknown
  Bacterial polypetide isolated from the Sargasso Sea
MGDLVTMDDLSNEEIVSVLDDANRLLPVAKGALHLPLLEGKVLANMFFENSTRTRMSFEAAMKRLGGSVLNFSSVGTSVAKGETLYDTMQMIDGYADIAAIRHPRQGAAQYSADSVEIPILNAGDGAGNHPTQTMLDLFTINNSHGSLDGLNVILVGDLRYGRTVHSLSHALVRFGASLTMVSPPNLRMPKEIVSDLRSHGGEVSEAELLQNQIPDADVIYMTRIQKERFPDEDEYSKVAGIYKLTASDLSGAKKAMIVMHP

SEQ ID NO: 108907 - protein, 214 aa, Unknown
  Bacterial polypetide isolated from the Sargasso Sea
DTAMTLNAMHPDIIVVRHQDSGASNLLSQKVNCAVLNAGDGRREHPTQALLDALTIMEKKNKIEGLKIAICGDILHSRVARSNIYLLNMLGADINIVAPSNLMPKDLERFGVNTFTNMKEGVKDCDIVMMLRLQNERMTSSFLSSNREYYEYYGLTPDKLEKAKSNAIIMHPGPMNRGIEIDTKLADDINKSVIKEQVELGVAVRMACLKLFCE

SEQ ID NO: 108908 - protein, 245 aa, Unknown
  Bacterial polypetide isolated from the Sargasso Sea
RGKTQINLFFEPSTRTQSSFELAGKRLGADVMSMNMGNSAIKKGETLIDTAMTLNAMHPDIIVIRHQDSGACNLLSQKVNCVVLNAGDGRREHPTQALLDALTIRNRKKKIQGLKIAICGDILHSRVARSNIYLLTMLGAEINIVAPSNLMPKEIEKFGVNTFTDMKKGLKDCDIVMMLRLQNERMTSSYLSSNREYYEYYGLTPDKLDHAKSDALIMHPGPMNRGIEIDTRLADDINKSVIKEQ

SEQ ID NO: 108909 - protein, 141 aa, Unknown
  Bacterial polypetide isolated from the Sargasso Sea
ILHSRVARSNIYLLTMLGAEVNIIGPSNLLPKDLEKFGVNIYTDMKKGVKDCDIVMMLRLQNERMTSSYLSSNREYYEYYGLSPEKLEFAKTDALIMHPGPMNRGIEIDTMLADDINKSVIKEQVELGVAIRMACLKIFCS

SEQ ID NO: 108910 - protein, 191 aa, Unknown
  Bacterial polypetide isolated from the Sargasso Sea
MATSFKKAVKISQKNLLGIQDLSISDINVILDDAKQFISLNKSKNKKLDILRGKTQINLFFEPSTRTQSSFELAGKRLGADVMSMNIVNSAIKKGETLIDTAMTLNAMHPDIIVIRHQDSGACNLLSQKVNCAVINAGDGRREHPTQALLDALTIIDRKKKIQGLKIAICGDILHSRVARSNIYLLNMLGA

SEQ ID NO: 108911 - protein, 169 aa, Unknown
  Bacterial polypetide isolated from the Sargasso Sea
PTQALLDALTIKINKKRISGLEVAILGDVLHSRVARSNIYLLKKLGAKIRVIAPPTLLPSNIEGLGIKTFKNLEKGLEGVDIIMVLRIQKERMTGTYVPSEKEFFRFWGLDRKKLELAKKNALVMHPGPINRGIEIDSDVADDIGRSLILEQVKLGVAIRMAVIKELTS

SEQ ID NO: 108912 - protein, 280 aa, Unknown
  Bacterial polypetide isolated from the Sargasso Sea
AIRSSTGSKILKDAENIALKYYSSISSKTKIKLKRKKNIFKKIHLVETADLTKKEIEHILDESKKYISFNTRKIKKINILEGRTIFNLFFEDSTRTRTSFEVAAKRLGADLINVVVKDSSINKGETLLDTMTTINSMNPDVLIVRHPEEGISKKISETVDASVINAGDGSHEHPTQALLDALTIKNKFENFSKLKIAICGDILHSRVARSNIIILSKLGAKINVIGPKEWLPKSLRKLPVNVYTEMKKGLQNCDIVMMLRIQKERIVGKIMPNQKTYLKS

SEQ ID NO: 108913 - protein, 255 aa, Unknown
  Bacterial polypetide isolated from the Sargasso Sea
MATDTKKAIKNSPKHLLGIQDLKVSEIKHILNEAQQFIELNRSKNKKIDILKGKTQINLFFEPSTRTQSSFELAGKRLGADVMSMNIINSAIKKGETLIDTAMTLNAMHPDIIVIRHQDSGACNLLSQKVNCAVLNAGDGRREHPTQALLDALTIINRKKNIEGLKIAICGDILHSRVARSNIYLLTMLGAEVNIIGPTNLLPKDLNKFGVNIFTDMKKGVNDCDIVMMLRLQNERMTSSYLSSNREYYEYYGLS

SEQ ID NO: 108914 - protein, 294 aa, Unknown
  Bacterial polypetide isolated from the Sargasso Sea
MKSKLLKSGHIKLYKRENSNYWQLKIKLPKIKAIRISTGSKILNDAEKIALKYYSTLINKTNISIKKSKNIFKKIHLVETADLKKNEIEFILNESTKFIAFNKKRIKKLNLLEGRTIFNLFFEDSTRTRTSFEVAAKRLGADLINVVVKDSSINKGETLLDTMTTINSMNPDILIVRHPEDGISKKISNTIDASVINAGDGSHEHPTQALLDALTIKNKFKDFSKLKIAICGDILHSRVARSNIIILSKLGAKINVIGPKEWLPKNIKKLPVKVFTNMKMGLHNCDIVMMLRIQ

SEQ ID NO: 108915 - protein, 219 aa, Unknown
  Bacterial polypetide isolated from the Sargasso Sea
MNNWEHNHILDLSTFSLEDYNTVLELTTRFKDVHKSSSRKLPALQGRLICNLFFEPSTRTRSSFELAAKRLSADVQNFSVSASSLSKGETPLDTILTYISMGADILVIRHESTNVPAELANYVDINNINTSILNAGDGFHSHPSQGLLDLFTLATFFNPNEPSTNSLCNKKITIVGDILHSRVARSNLWALTACGAEVTLCGPPSLLPEEFIDFVLNPP

SEQ ID NO: 108916 - protein, 294 aa, Unknown
  Bacterial polypetide isolated from the Sargasso Sea
MANSKNAVKISKKHLLGIQDLSISDVKTILSESKNFIALNKSKNKKIDILRGKTQINLFFEPSTRTQSSFELAGKRLGADVMSMNITNSAIKKGETLIDTAMTLNAMHPDIIVVRHQDSGASNLLSQKVNCAVLNAGDGRREHPTQALLDALTIMEKKNKIEGLKIAICGDILHSRVARSNIYLLNMLGADINIVAPSNLMPKDLEKFGVNTFTNMKEGVKDCDIVMMLRLQNERMTSSFLSSNREYYEYYGLTPDKLEKAKSDAIIMHPGPMNRGIEIDTKLADDINKSVIKE

SEQ ID NO: 108917 - protein, 259 aa, Unknown
  Bacterial polypetide isolated from the Sargasso Sea
MLNHKHLLGLENFPKEGLQKIIDTAFNFREVLDRPIKKVPSLQGVTIVNLFFENSTRTRISFELAQKRLSADTVNFSASSSSLKKGESFKDTAQNIEAMKIDAVVMRHPAPGSPKHLTEFINAKVINAGDGTHEHPTQAILDMMSLQERFGKIKDLNVAIIGDIDHSRVARSNIYGLVTMGANVTICGPPNLIPDYFADLDVTVNYNIDEVLEWADAVNVLRIQRERMGVALIPSDREYRALFGITEERLARRDNELVV

SEQ ID NO: 108918 - protein, 289 aa, Unknown
  Bacterial polypetide isolated from the Sargasso Sea
DLTKADVMSIIEVANLFKKNNKEKNKNIPILNGRTIINLFFEPSTRTLISFEVAAKRLGADMINMNIEGSSLRKGETLIDTADTLNAMNPDLVIIRHGSSGSIEEISSRLKCPIISAGEGTEEHPTQALLDAYTIQDNQKKFEEITVSICGDIEHSRVARSNYHLLKKMGSKIRFVTPDYFKPKDLDSFDVEYFDNLELGIESADIVMMLRIQKERINDVNLPSIDEYFKHFGLTYKKLTNAKKDVLVMHPGPINRNIEIESSLADDLDKSVINEQVENGVAVRMACLA

SEQ ID NO: 108919 - protein, 172 aa, Unknown
  Bacterial polypetide isolated from the Sargasso Sea
MATLKKVSAIKNAPKHLLGIQNLSVQEAKSILTEAKTFIKLNRSSSKKLDLLRGKTQINLFFEPSTRTQSSFDLAGKRLGADVMTMNMSNSALKKGETLIDTAMTLNAMHPDLIVIRHQDSGAPNLLSQKVNCTVINAGDGRREHPTQALLDALTKINRKGNIEGLKIAICG

SEQ ID NO: 108920 - protein, 119 aa, Unknown
  Bacterial polypetide isolated from the Sargasso Sea
VIAPKTLMPPSINKLGVKGFTNMKEGLKSCDIVMMLRLQNERMKGSFLPSKREYYEYFGLTPDKLKLAKKDALIMHPGPMNRGVEIDTKLADDINVSLVKEQVELGVAVRMACLKLYCK

SEQ ID NO: 108921 - protein, 232 aa, Unknown
  Bacterial polypetide isolated from the Sargasso Sea
DTLKGKTQINLFFEPSTRTQSSFDLAGKRLGADVMSMNITNSAIKKGETLIDTAMTLNAMHPDIIVIRHQDSGACNLLSQKVNCAVLNAGDGRREHPTQALLDALTIINRKKKVEGLRIAICGDILHSRVARSNIYLLNMLGAEVNIVAPTNLMPKNIEKLGVNIFTDMKKGVKDCDIVMMLRLQNERMTSSFLSSNREYYEYYGLTPDKLNHAKPDALIMHPGPMNRGIEI

SEQ ID NO: 108922 - protein, 150 aa, Unknown
  Bacterial polypetide isolated from the Sargasso Sea
GLRIAICGDILHSRVARSNIYLLNMLGAEVNIVAPSNLMPKDIEKLGVNIFSDMKKGLKDCDIVMMLRLQNERMTSSFLSSNREYYEYYGLTPDKLNFAKDDALIMHPGPMNRGIEIDTNLADDINKSVIKEQVELGVAVRMACLKIFCI

SEQ ID NO: 108923 - protein, 91 aa, Unknown
  Bacterial polypetide isolated from the Sargasso Sea
GCDIVMMLRLQNERMQGSFLPSKREYYEFFGLTPEKLKYANKDALIMHPGPMNRGVEIDTKLADDINVSLVKEQVELGVAVRMACLKIYCK

SEQ ID NO: 108924 - protein, 236 aa, Unknown
  Bacterial polypetide isolated from the Sargasso Sea
MGADVMSMNITNSAIKKGETLIDTAMTLNAMHPDIIVIRHQDSGACNLLSQKVNCAVLNAGDGRREHPTQALLDALTIINRKKKIEGLKIAICGDILHSRVARSNIYLLTMLGAEVNIVAPSNLLPKDIQRFGVNTFSDMKKGVKDCDIVMMLRLQSERMTSSFLSSNREYYEYYGLSPDKLNYAKEDALIMHPGPMNRGIEIDTKLADDINKSVIKEQVELGVAVRMACLKIFCN

SEQ ID NO: 108925 - protein, 301 aa, Unknown
  Bacterial polypetide isolated from the Sargasso Sea
ADLPKKEIEHILDESKKYITFNKRKIKKINVLEGRTIFNLFFEDSTRTRTSFEVAAKRLGADLINVVVKDSSINKGETLLDTMTTINSMNPDVLIVRHPEEGISKKISETVDASVINAGDGSHEHPTQALLDALTIKNKFENFSKLKIAICGDILHSRVARSNIIILSKLGARINVIGPKEWLPKSLNKLPVNVYTEMKKGLQNCDIVMMLRIQKERIVGKIMPNQKTYFKKYGLDYNKLQYAKKNAFVMHPGPMNRGVEIDSKLADDITRSLIQEQVAMGVAVRMACLDLIIKNRDDFSN

SEQ ID NO: 108926 - protein, 222 aa, Unknown
  Bacterial polypetide isolated from the Sargasso Sea
MATKTKAIKISQKHLLGIQDLSINDVKLILDEASKFIELNKSKNKKLDILKGKTQINLFFEPSTRTQSSFELAGKRLGADVMSMNITNSAIKKGETLIDTAMTLNAMHPDIIVIRHQDSGACNLLSQKVNCSVLNAGDGRREHPTQALLDALTIINRKKKIEGLKIAICGDILHSRVARSNIYLLNMLGAEVNIVAPTNLLPTDIDKFGVNIFSDMKKGVKD

SEQ ID NO: 108927 - protein, 223 aa, Unknown
  Bacterial polypetide isolated from the Sargasso Sea
ALKKGETLIDTAMTLNAMHPDLIVIRHQDSGAPNLLSQKVNCAVINAGDGRREHPTQALLDALTIINRKGKIEGLKIAICGDILHSRVARSNIYLMNMLGAEVNVIAPKTLMPKSIERLGAKPFTNMKKGLDGCDIVMMLRLQNERMQGSFLPSKREYYEFFGLTSEKLKYANKDALIMHPGPMNRGVEIDTKLADDINVSLVKEQVELGVAVRMACLKIYCK

SEQ ID NO: 108928 - protein, 258 aa, Unknown
  Bacterial polypetide isolated from the Sargasso Sea
MTPLAAKRPLQLNDQGQLRHFLSLDGLPRELLTEILDTADSFLEVGARAVKKVPLLRGKTVCNVFFENSTRTRTTFELAAQRLSADVISLNVSTSSTSKGETLFDTLRNLEAMAADIFVVRHADSGAAHFIAEHVCPNLAIINGGDGRHAHPTQGMLDMLTIRRHKGDFENLSVAIVGDILHSRVARSNMLALKTLGCPDIRVIAPKTLLPIGLEQSYGVRVFSDANEGLKDVDVVIMLRLQRERMQGGLLPSEGEST

SEQ ID NO: 108929 - protein, 296 aa, Unknown
  Bacterial polypetide isolated from the Sargasso Sea
HKHILTLSNFSIDDYKSVFELTERFKSLNNAGTKKIPALQGNLITSIFFEDSTRTRNSFELAAKRLSADVQSFSPSSSSLNKGETLIDTALTYAAMGSDILIIRHSSSHVPLEISKKLDASNAKTSVLNAGDGLHSHPSQGLLDLYTLIKFFSPKLLNPEILNSKKILIIGDVIHSRVARSDIWALTAFGANIILCGPPTLIPDEFINFVSSSPPNQLEDPISSRGSITISRSLKESIKYADAVIVLRLQKERMIENLLSSIKSYSDNFCLTPEKLLLSKKDIPILHPGPINRGMK

SEQ ID NO: 108930 - protein, 199 aa, Unknown
  Bacterial polypetide isolated from the Sargasso Sea
MANIKKAIKISQKHLLGIQDLSISDVNFILSEAKQFINLNKSKNKKLDVLRGKTQINLFFEPSTRTQSSFELAGKRLGADVMSMNLNNSAIKKGETLIDTAMTLNAMHPDIIVVRHQDSGASNLLSQKVNCAVLNAGDGRREHPTQALLDALTIIDRKEKIEGLKIAICGDIVHSRVARSNIYLLNMLGADVNIIAPSI

SEQ ID NO: 108931 - protein, 299 aa, Unknown
  Bacterial polypetide isolated from the Sargasso Sea
MATVKKVSAIKKTPKHLLGIQNLSVQEAKSILIEAKSFIQLNRSNSKKLDLLRGKTQINLFFEPSTRTQSSFDLAGKRLGADVMTMNMSNSALKKGETLIDTAMTLNAMHPDIIVIRHQDSGAPNLLSQKVNCTVINAGDGRREHPTQALLDALTIINRKGNIEGLKIAICGDILHSRVARSNIYLMNMLGAEVNVIAPKTLMPHDIEKLGVKSFTDMKKGLGGCDIVMMLRLQNERMQGSFLPSKREYYEFFGLTPEKLKLANKDALLMHPGPMNRGVEIDTKLADDINVSLVKEQVN

SEQ ID NO: 108932 - protein, 243 aa, Unknown
  Bacterial polypetide isolated from the Sargasso Sea
EVAAKSLNADIISIAERSSSLTKGESLRDTARNIQSLGADAIVLRHSSPGSPLFLSEIVEVPVINAGDGAHEHPSQALLDIFTLREKWGSLKGKKITILGDILFSRVARSNIWGMLKLGAKITLSGPSTLVPKKMEDWGLTVSYNLESAVEDADAIMLLRIQHERQTETHFPSLKEYSKMFGLREGEFELKKNALILHPGPINRGVEIDSKMADSSQSVVLEQVSNGVYVRMAILHFCCNGKD

SEQ ID NO: 108933 - protein, 156 aa, Unknown
  Bacterial polypetide isolated from the Sargasso Sea
MQFLIQGLKIAICGDILYSRVARSNIYLLTMLGAEVNIVAPTNLMPKEIEKFGVNTFTDMKKGLKDCDIVMMLRLQNERMTSSFLSSNREYYEYYGLTPDKLDHAKSDALIMHPGPMNRGIEIDTRLADDINKSVIKEQVELGVAVRMACLKIFCE

SEQ ID NO: 108934 - protein, 259 aa, Unknown
  Bacterial polypetide isolated from the Sargasso Sea
MAVIKKFSAVKKTQEHLLGIQNLSIQEANLILDEAKNFIKLNRSASKKLDLLRGKTQINLFFEPSTRTQSSFELAGKRLGADVMTMNVGNSSLKKGETILDTAMSLNAMHPDIIVVRHQDSGAPNLLSQKVNCAVINAGDGLREHPTQALLDALTIINRKGRIEGLKIAICGDILHSRVARSNIYLLNMLGAEVNVIAPKTLMPKSINKLGVKGFTNMKEGLKSCDIVMMLRLQNERMAGSFLPSKREYYEYFGLTPDK

SEQ ID NO: 108935 - protein, 123 aa, Unknown
  Bacterial polypetide isolated from the Sargasso Sea
AEVNVIAPKTLMPNSINKLGVKGYTNMKEGLKSCDIVMMLRLQNERMAGSFLPSKREYYEYFGLTPDKLKFAKKDALIMHPGPMNRGVEIDTKLADDINVSLVKEQVELGVAVRMACLKLYCK

SEQ ID NO: 108936 - protein, 233 aa, Unknown
  Bacterial polypetide isolated from the Sargasso Sea
MPKLKAIRSSTGSKILKDAENIALKYYSSISSKTNIKLKRRKNIFKKIHLVETADLTKKEIVYILDESKKYITFNKKKIKKINVLEGRTIFNLFFEDSTRTRTSFEVAAKRLGADLINVVVKDSSINKGETLLDTMTTINSMNPDVLIVRHPEEGISKKISETVDASVINAGDGSHEHPTQALLDALTIKNKFENFAKLKIAICGDILHSRVARSNIIILSKLGAKINVIGPK

SEQ ID NO: 108937 - protein, 238 aa, Unknown
  Bacterial polypetide isolated from the Sargasso Sea
NVVVKDSSINKGETLLDTMTTINSMNPDILIVRHPEEGISKKISNTVDASVINAGDGSHEHPTQALLDALTIKNKFKDFSKLQIAICGDILHSRVARSNIIILSKLGAKINVIGPKEWLPKNIKKLPVKVFTNMMKGLNNCDIVMMLRIQKERIVGKIMPNQKIYFKKYGLDYNKLKYAKKNAFVMHPGPMNRGVEIDSDLADDITRSLIQEQVAMGVAVRMACLDLIIKNRDNLVRN

SEQ ID NO: 108938 - protein, 199 aa, Unknown
  Bacterial polypetide isolated from the Sargasso Sea
IKTQGAPNLLSQKVNCSVINAGDGRREHPTQALLDALTIINRRGKVEGLKIAICGDILHSRVARSNIYLMNMLGAEVNVVAPKTLLPHSIERLGVKSFTNMKKGLDSCDIVMMLRLQNERMQGSFLPSAREYYEFFGLTPDKLKLAKKNALIMHPGPMNRGVEIDTNLADDINRSVIREQVELGVAVRMACLKIFCKKS

SEQ ID NO: 108939 - protein, 224 aa, Unknown
  Bacterial polypetide isolated from the Sargasso Sea
TLLDTMTTINSMNPDVLIVRHPDEGISKKISETVDASVINAGDGSHEHPTQALLDALTIKNKFQNFTKLKIAICGDILHSRVARSNIIILSKLGAKINVIGPKEWLPKNLNKLPVNVYTEMKKGLQNCDIVMMLRIQKERIVGKIMPNQKTYFKKYGLDYNKLEYAKKNAFVMHPGPMNRGVEIDSKLADDVTRSLIQEQVAMGVAVRMACLDLIIKNRDDFIK

SEQ ID NO: 108940 - protein, 279 aa, Unknown
  Bacterial polypetide isolated from the Sargasso Sea
FFEASTRTKNSFELAAKRLSADVQTFAPSSSSLTKGETIIDTALTYSAMGADTLVVRHSSSYITFEIAKKLDAINAKTSVLNAGDGLHSHPSQGLLDIYTLMKFFSKKSLSPDVLNSKKILIIGDVNHSRVARSNLWALSAFGADIILCGPKTLIPDEFINFLKTPAPKQIEDPVKSRGSITISRSLEESIKIADAIIVLRLQKERMMENLLSSIDSYSLDYGLTPEKLSLNSKEIPILHPGPINRGIEITSKVVDEYPNCLINNQVANGIPIRMALLY

SEQ ID NO: 108941 - protein, 207 aa, Unknown
  Bacterial polypetide isolated from the Sargasso Sea
MSIDKLSLNNINQILNLAEKYVELNRKEEKKILRLSGKTLVNLFFENSTRTRTSFELAGKRLGADVINMSIHGSSIKKGETLLDTAMTLNAMHPDVLVVRHNESGAINLLSKKIDGVVINAGDGSHSHPTQALLDALTVRRRLKKLDGLKIAICGDIIHSRVARSNIELFNITGSQVRVIAPTTLIPKDIEKMGVEVYHSMKAGLKD

SEQ ID NO: 108942 - protein, 180 aa, Unknown
  Bacterial polypetide isolated from the Sargasso Sea
DTIRTMGCYSDIIVLRSRTSGDAHIAASVSEVPIINAGDGTGEHPTQTLLDLYTIQENFGRIKDLTITFVGDIVNGRTVHSLSKVLKNCQVNYCDTYDLDKLPKSDVYYLTRVQKERGSKGSYQLTKEHVEQMPEDCIVMHPFPRNNEIPKWFDDDPRAKYFEQMKNGLYMRMAILMSYK

SEQ ID NO: 108943 - protein, 267 aa, Unknown
  Bacterial polypetide isolated from the Sargasso Sea
ITIANLFFENSTRTKISFELAQKRLGADVINFSSSSSSVKKGESLLDTINNILAMKVDMIVLRHPNPGSSILLSKHTESCIINAGDGSHEHPTQALLDSFSIFEKIGDLKDKNILIVGDILHSRVALSNLYLLNLLGANIKISSPLSLVPKDIEKLNVSVEPDIKKALRWCDAVNVLRVQRERMIKSYFPDNREYSMLFGLDENKISSIKKDILILHPGPINRGVEITSDLVDSNNSIILEQVENGVAIRMAIMYLLASKLNFSINE

SEQ ID NO: 108944 - protein, 251 aa, Unknown
  Bacterial polypetide isolated from the Sargasso Sea
PSTRTQSSFELAGKRLGADVMSMNMGNSAIKKGETLIDTAMTLNAMHPDIIVIRHQDSGACNLLSQKVNCVVLNAGDGRREHPTQALLDALTIRNRKKKIQGLKIAICGDILHSRVARSNIYLLTMLGAEVNIVAPSNLMPKEIEKFGVNTFTDMKKGLKDCDIVMMLRLQNERMTGSYLSSNREYYEYYGLTPDKLDHAKSDALIMHPGPMNRGIEIDTRLADDINKSVIKEQVELGVAVRMACLKIFCE

SEQ ID NO: 108945 - protein, 219 aa, Unknown
  Bacterial polypetide isolated from the Sargasso Sea
TLLDTMTTINSMSPDVLIVRHPEEGISLKISKIVSACVINAGDGSHEHPTQALLDALTIKKRFGNFKKLKIAICGDILHSRVARSNIEILTKLGCKINVVGPKSLIPKDIDKVKVYSTMKEGLKNCDIVMMLRIQKERIISKHVPNEKIYFEKYGLDYNKLDYANKNAFVMHPGPMNRDVEIDSKLADDVTRSLIQEQVTMGVAIRMACLEILINNRDI

SEQ ID NO: 108946 - protein, 267 aa, Unknown
  Bacterial polypetide isolated from the Sargasso Sea
KKIHLVETADLNKKEIEFILDEAHKFISFNKMKIKKNTLLEGRTIFNLFFEDSTRTRTSFEVAAKRLGADLINVAVKDSSINKGETLLDTMTTINSMNPDVLIIRHPDEGISKKISMSVDACVINAGDGSHEHPTQALLDALTIKNRFKTFNKLQIAICGDILHSRVARSNITILSKLGAKINVIGPKEWLPKNIKKLPVTVFTDMKKGLKNCDIVMMLRIQKERIVGKIMPNQKTYFNRYGLDYNKLEYAKKNAFVMHPGPMNRGF

SEQ ID NO: 108947 - protein, 179 aa, Unknown
  Bacterial polypetide isolated from the Sargasso Sea
MHLVETADLNKNEIEFLLSEAQKFISFNKNRIKKNNLLEGRTIFNLFFEDSTRTRTSFEVAAKRLGADLINVAVKDSSINKGETLLDTMTTINSMNPDVLIIRHPDEGISKKISLSVDACVINAGDGSHEHPTQALLDALTIKNRFKNFTKLQIAICGDILHSRVARSNIIILSKLGQR

SEQ ID NO: 108948 - protein, 257 aa, Unknown
  Bacterial polypetide isolated from the Sargasso Sea
MSFEEAGKILGSDVINVSASGSSVEKGESLVNTAKTIEAMNVDAVVIRHPHSGAPYILADQFASASVVNAGDGTHAHPTQALLDLFTVLEHVDSIEGLKIAIVGDVIHSRVARSNIHGFLKLGAHVFLAGPATLLPKAMPWLRYYESEGSLSMTTNVDEALKDADVVMTLRLQNERQISGYIPSEREYIANWQINSSRIDKNCPDAWIMHPGPMNEGIEISESIANGPKSLIQKQVENGVVIRMAVLSHVCGVKHNK

SEQ ID NO: 108949 - protein, 142 aa, Unknown
  Bacterial polypetide isolated from the Sargasso Sea
MSGWHHRHILDLAAFSREDYAAVLDLAERFRSLPVTGARKLPALQGRLVATLFFEPSTRTRSSFELAAKRLSADVQSFSPSSSSLSKEESVLDTARTYVAMGADVLVVRHRSTGVPQQLAEDLESAGERTVVLNGGDGLHSH

SEQ ID NO: 108950 - protein, 177 aa, Unknown
  Bacterial polypetide isolated from the Sargasso Sea
PVMHTPTQGPARHVHHPSLQEGFSNLTVAIVGDILHSRVARSDIHALTTLGCAEVRAIGPRTLLPGGLEHMGVRVFHNMEEGLKGVDVVIMLRLQNERMSGALLPSAQEYFKAYGLTQDRLALAKPDAIVMHPGPMNRGVEIDSAVADGVQSVILNQVTFGIAVRMAVMGIVAGNND

SEQ ID NO: 108951 - protein, 144 aa, Unknown
  Bacterial polypetide isolated from the Sargasso Sea
CEDILHSRVARSNIYLLTMLGAEVNIVHPSNLMPKEIEKFGVNTFTDMKKGLKDCDIVMMLRLQNERMTSSYLSSNREYYEYYGLTPDKLDHAKSDALIMHPGPMNRGIEIDTRLADDINKSVIKEQVELGVAVRMACLKIFCE

SEQ ID NO: 108952 - protein, 245 aa, Unknown
  Bacterial polypetide isolated from the Sargasso Sea
KRLGADLINVVVKDSSINKGETLLDTMTTINSMNPDVLIVRHPEEGISKKISETVDASIINAGDGSHEHPTQALLDALTIKNKFNNFSKLKIAICGDILHSRVARSNIIILSKLGSKINVVGPKEWLPKSLRKLPVRVFTDMRKGLENCDIVMMLRIQKERIVGKIMPDQRSYFKKYGLDYNKLKYAKKNAFVMHPGPMNRGVEIESKLADDITISLIQEQVAMGVAVRMACLDLIIKNRDNNVS

SEQ ID NO: 108953 - protein, 292 aa, Unknown
  Bacterial polypetide isolated from the Sargasso Sea
MARPGISAPSTPCPPRPASLKHRFMPDIFIPDATPDLTGRALFPHKHLLSIADLKPWEIRFLLDEAEHWAQTNKGQARKHDGRLAGMTQINAFFENSTRTLLSFEIAGKRLGADVVNMAAATSSVKKGETLIDTAMTLNAMAADVIVIRHASSGAVRLIADKVDCPVLNAGDGWHQHPTQALLDALTIRRRKGGFEGLVVAICGDVLHSRVARSNMLCLAALGAQVRAVAPPTLLPPEVELLGATPFTRMDEGLDGADVVMMLRLQNERMDGAFTPSPREYHALYGLTPERL

SEQ ID NO: 108954 - protein, 191 aa, Unknown
  Bacterial polypetide isolated from the Sargasso Sea
MIKDPVNKNIVSQKDLRHFLDIENLSQSLILDILDLAESFAGVSGQPVKKVPLLRGKTIVNLFFEASTRTRTTFELAAKRLSADFLNINIDYSATKKGETLLDTLRNLEAMHCDMFIVRHPSSGAAEFISKNVSQNISVINAGDGRHAHPTQAMLDVFTIRKYFSDFKKLKIAIVGDILHSRVARSLMHAF

SEQ ID NO: 108955 - protein, 219 aa, Unknown
  Bacterial polypetide isolated from the Sargasso Sea
MAIKTNQAIKISQKHLLGIQDLSINDVNLILDEANSFIKVNQSKNKKVDVLRGKTQINLFFEPSTRTQSSFELAGKRLGADVMSMNISNSAIKKGETLIDTAMTLNAMHPDIIVIRHQDSGACNLLSQKVNCAVLNAGDGRREHPTQALLDALTIITRKKKIQGLKIAICGDILHSRVARSNIYLLSMLGAEVNIIAPTNLMPKEIEKFGVNTFTDMKK

SEQ ID NO: 108956 - protein, 196 aa, Unknown
  Bacterial polypetide isolated from the Sargasso Sea
ARHFSPQHPMPEALQGRRIVIVGDILHSRVARSNLWALTACGADVVLCGPPSLVPDDFAAFVDEPPPGLLEDLVPQRGKVSVVRRLEHALPAADAVMTLRLQKERMGQQLLTSLERYHRDFGLSHERMQLCGENVPVLHPGPVNRGVELSGSLLDDPRVSLVEEQVRNGVPTRMALLYLMAASESATEASLVSSSS

SEQ ID NO: 108957 - protein, 229 aa, Unknown
  Bacterial polypetide isolated from the Sargasso Sea
MPKLKAIRSSTGSKILKDAENIALKYYSSISSKTNIQLKRTKNIFKKIHLVETADLTKKEIEHILDESKKYITFNKRKIKKINVLEGRTIFNLFFENSTRTRTSFEVAAKRLGADLINVVVKDSSINKGETLFDTMTTINSMNPDVLIVRHPEEGISKKISETVDASVINAGDGSHEHPTQALLDALTIKNKFENFSKLKIAICGDILHSRVARSNIIILSKLGAKINV

SEQ ID NO: 108958 - protein, 62 aa, Unknown
  Bacterial polypetide isolated from the Sargasso Sea
FPVLHPGPVNRGVELSGSLLDDPRVSLVEEQVRNGVPIRMALLYLMAASESATEASLVSSSS

SEQ ID NO: 108959 - protein, 295 aa, Unknown
  Bacterial polypetide isolated from the Sargasso Sea
IQDLSISDVNFILSEAKQFIDLNKSKNKKLNVLRGKTQINLFFEPSTRTQSSFELAGKRLGADVMSMNLSNSAIKKGETLIDTAMTLNAMHPDIIVVRHQDSGASNLLSQKVNCSVLNAGDGRREHPTQALLDALTIIDRKKKIEGLKIAICGDIVHSRVARSNIYLLNMLGAEVNIIAPSNLMPKDIDKLGVNSFSDMKKGLKDCDIVMMLRLQNERMTSSFLSSNREYYEYYGLTPDKLDFAKDDALIMHPGPMNRGIEIDTNLADDINKSVIKEQVELGVAVRMACLKIFCE

SEQ ID NO: 108960 - protein, 251 aa, Unknown
  Bacterial polypetide isolated from the Sargasso Sea
MGIQNLSVQEAKDILNEAKSFIKLNRSDSKKLDILRGKTQINLFFEPSTRTQSSFDLAGKRLGADVMSMNIINSSLKKGETLIDTAMTLNAMHPDIIVIRHQDSGAPNLLAQKVNCAVINAGDGRREHPTQALLDALTIIDRKKKIEGLKIAICGDILHSRVARSNIYLMNMLGAEVNVVAPKTLMPKSIEKLGAKAFTDMKKGLDSCDIVMMLRLQNERMQGSFLPSKREYYEYFGLTPGKIKICKQKML

SEQ ID NO: 108961 - protein, 238 aa, Unknown
  Bacterial polypetide isolated from the Sargasso Sea
INVVVKDSSINKGETLLDTMTTINSMNPDVLIVRHPEEGISKKISETVDASIINAGDGSHEHPTQALLDALTIKNKFNNFSKLKIAICGDILHSRVARSNIIILSKLGSKINVVGPKEWLPKSLRKLPVRVFTDMRKGLENCDIVMMLRIQKERIVGKIMPDQKTYFKKYGLDYNKLKYAKKNAFVMHPGPMNRGVEIDSKLADDITISLIQEQVAMGVAVRMACLDLIIKNRDNNVS

SEQ ID NO: 108962 - protein, 208 aa, Unknown
  Bacterial polypetide isolated from the Sargasso Sea
NAMHPDIIVIRHQDSGACNLLSQKVNCAVLNAGDGRREHPTQALLDALTIINRKKKVEGLKIAICGDILHSRVARSNIYLLTMLGAEVNIIGPSNLLPKDLEKFGVNIFTDMKKGVKDCDIVMMLRLQNERMTSSYLSSNREYYEYYGLSPEKLEYAKKDALVMHPGPMNRGIEIDTILADDINKSVIKEQVELGVAVRMACLKIFCS

SEQ ID NO: 108963 - protein, 266 aa, Unknown
  Bacterial polypetide isolated from the Sargasso Sea
MGFKDKHLLGIEPMRPEAIVEILDLAENYVQLNRSQDKRAEALTGLTQINMFFENSTRTQASFELAGKRLGANVMNLSKEASSLKKGETLIDTALTLNAMKPDLLIVRHPQSGAVDLLAQKVNCSVLNAGDGRHEHPTQALLDALTIRRAKGRLHRLSIAICGDIAHSRVARSNIILLGKMENRVRLIGPSTLMPSEIDDLGVEVYQDMRTGLKDVDVVMMLRLQKERMDGGFIPSEREYYYRYGLNKEKLSHAKGDAIVMHPGPK

SEQ ID NO: 108964 - protein, 274 aa, Unknown
  Bacterial polypetide isolated from the Sargasso Sea
METLSVNHILGIKDLTKADIDLIFSTADEFKDVINRPIKKVPTLRDITIANLFFENSTRTKLSFELAEKRLSADVINFSSASSSVKKGETLLDTVNNILSMKVDMVVMRHPNPGAHQFLSRNIDARIVNAGDGAHEHPTQALLDSFSIRENLGEVEGKKVVIVGDILHSRVALSNIYALQKQGAEVMVCGPATLIPKFIDSLGVKVEHNLQKALDWCDVANMLRIQLERQDSKFFPSIREYTMQYGLTMEHLNNLKKEIVVMHPGPINRGVEIT

SEQ ID NO: 108965 - protein, 254 aa, Unknown
  Bacterial polypetide isolated from the Sargasso Sea
FEPSTRTQSSFELAGKRLGADVMSMNITNSAIKKGETLIDTAMTLNAMHPDIIVIRHQDSGACNLLSQKVNCAVLNAGDGRREHPTQALLDALTIIDRKNKIQGLRIAICGDILHSRVARSNIYLLNMLGAEVNIVAPSNLLPKDIVKLGVNTFSNMKKGLKDCDIVMMLRLQNERMTSSFLSSNREYYEYYGLTPDKLNEAKKDALIMHPGPMNRGIEIDTNLADDINKSVIKEQVELGVAVRMACLKIFCEK

SEQ ID NO: 108966 - protein, 264 aa, Unknown
  Bacterial polypetide isolated from the Sargasso Sea
KISQKHLLGIQNLSVSDVNFILKEAKQFISLNKSKNKKIDVLRGKTQINLFFEPSTRTQSSFELAGKRLGADVMSMNIVNSAIKKGETLIDTAMTLNAMHPDLIVIRHQDSGACNLLSQKVNCSVINAGDGRREHPTQALLDALTIIEKKEKIQGLKIAICGDILHSRVARSNIYLLTMLGAEVNIISPTNLMPEDIEKFGVNKFSNMKKGLKDCDIVMMLRLQNERMTSSFLSSNREYYEYYGLTQDKLSCAKDDALIMHPRS

SEQ ID NO: 108967 - protein, 140 aa, Unknown
  Bacterial polypetide isolated from the Sargasso Sea
LHSRVARSNIYLLNMLGAEVNIVAPTNLMPKDIEKLGVNIFSDMKKGVKDCDIVMMLRLQNERMTSSFLSSNREYYEYYGLTPDKLNYAKEDALIMHPGPMNRGIEIDTNLADDINKSVIKEQVELGVAVRMACLKIFCT

SEQ ID NO: 108968 - protein, 188 aa, Unknown
  Bacterial polypetide isolated from the Sargasso Sea
MANVKKAIKISQKHLLGIQDLSILDVNFILSEAKQFIDLNKSKNKKLDVLRGKTQINLFFEPSTRTQSSFELAGKRLGADVMSMNLNNSAIKKGETLIDTAMTLNAMHPDIIVVRHQDSGASNLLSQKVNCAVLNAGDGRREHPTQALLDALTIIDRKEKIEGLKIAICGDIVHSRVARSNIYLLNML

SEQ ID NO: 108969 - protein, 213 aa, Unknown
  Bacterial polypetide isolated from the Sargasso Sea
TAMTLNAMHPDIIIIRHQDSGSPNLLSQKVNCSVINAGDGRREHPTQALLDALTIINRKGNIEGLKIAICGDILHSRVARSNIYLMNMLGAEVNIIAPKTLMPTEIEKLGVKAFTDMKKGLDGCDIVMMLRLQNERMQGSFLPSKREYYEFFGLTPEKLKFAKKDALLMHPGPMNRGVEIDTKLADDINVSLVKEQVEFGVAVRMACLKLYCK

SEQ ID NO: 108970 - protein, 290 aa, Unknown
  Bacterial polypetide isolated from the Sargasso Sea
MAIKTNKAIKISQKHLLGIQDLSVNDINYILDESEAFIKLNQSKNKKIDVLRGKTQINLFFEPSTRTQSSFELAGKRLGADVMSMNMVNSAIKKGETLIDTAMTLNAMHPDIIVIRHQDSGACNLLSQKVNCIVLNAGDGRREHPTQALLDALTIRNRKKKIQGLKIAICGDILHSRVARSNIYLLTMLGAEVNIVAPSNLMPKEIEKFGVNTFTDMKKGLKDCDIVMMLRLQNERMTSSYLSSNREYYEYYGLTPDKLDHAKPDALIMHPGPMNRGIEIDTRLADDINK

SEQ ID NO: 108971 - protein, 238 aa, Unknown
  Bacterial polypetide isolated from the Sargasso Sea
LGADVMSMNIVNSAIKKGETLIDTAMTLNAMHPDIIVIRHQDSGAPNLLSQKVNCAVINAGDGRREHPTQALLDALTIINRKGKIEGLKIAICGDILHSRVARSNIYLMNMLGAEVNVVAPKTLLPHSIDKLGVKSFTDMKKGLDKCDIVMMLRLQNERMHGSFLPSAREYYEYFGLTPDKLKVAKKNALVMHPGPMNRGVEIDTNLADDINRSVIREQVELGVAVRMACLKIFCKKS

SEQ ID NO: 108972 - protein, 199 aa, Unknown
  Bacterial polypetide isolated from the Sargasso Sea
MKNKLSVSNLLGIKYISLEDIYSIFNAADNFKEVINRKIKKVPSLRDITIANLFFENSTRTKISFELAQKRLSADVVNFSSSGSSIKKGETLSDTVNNILSMKVDMIVMRHPSPGASVFLSKNVNSCIINAGDGCHEHPTQALLDAFTLKSKLGSFSNKNILIVGDILHSRVALSNILVFKKLGANVKVCGPLSLIPKY

SEQ ID NO: 108973 - protein, 196 aa, Unknown
  Bacterial polypetide isolated from the Sargasso Sea
MATEKKVTAIRNTPKHLLGIQNLSVLEAKEILNEAKSFIKLNRGSSKKLDVLRGKTQINLFFEPSTRTQSSFDLAGKRLGADVMTMNMGNSALKKGETLIDTAMTLNAMHPDIIVIRHQDSGAPNLLSQKVNCTVINAGDGRREHPTQALLDALTIINRKGNIEGLKIAICGDILHSRVARSNIYLMNMLGAESKC

SEQ ID NO: 108974 - protein, 190 aa, Unknown
  Bacterial polypetide isolated from the Sargasso Sea
MQIWPHKHIHTLANFSIEDYKSVFELANRFDALKNAGTKKIPALQGTLVTSLFFEASTRTKNSFELAAKRLSADVQTFAPSSSSLTKGETIIDTAITYSAMGADTLVIRHSSSYITYEIAKKLDAINSKTSILNAGDGLHSHPSQGLLDVYTLIKFYSKKTLNPDVLNSKKILIIGDVNHSRVARSNLWA

SEQ ID NO: 108975 - protein, 144 aa, Unknown
  Bacterial polypetide isolated from the Sargasso Sea
CGDILHSRVARSNIYLLNMLGAEVNIVAPSNLIPKDIDKLGVNKFTDMKKGVKDCDIVMMLRLQNERMTSSFLSSNREYYEYYGLTPDKLSFAKEDALIMHPGPMNRGIEIDTKLADDINKSVIKEQVELGVAVRMACLKLFCE

SEQ ID NO: 108976 - protein, 140 aa, Unknown
  Bacterial polypetide isolated from the Sargasso Sea
MSGWHHRHILDLAAFSREDYAAVLDLAERFRSLPVTGARKLPALQGRLVATLFFEPSTRTRSSFELAAKRLSADVQSFSPSSSSLSKGESVLDTARTYVAMGADVLVVRHRSTGVPQQLAEDLESAGERTVVLNGGDGLH

SEQ ID NO: 108977 - protein, 237 aa, Unknown
  Bacterial polypetide isolated from the Sargasso Sea
MKINHSIQIQDNKLKHFLNIKSLPKAHILEIISRAEDIHNNNKISKYSNKVVASLFFEPSTRTKTTFELASKKISADFINIDISNSSTSKGESILDMIKTIEAMSCQMFVVRHSVPGTAHYIAESVSNNISVINAGDGSNEHPTQAMLDMFTIKKHKGRFDDLKVSIVGDILHSRVAKSLIYSLNILGTREINIVGPESLIPENYSKMSVNYFSDMNKGIEDADVIIMLRLQKERMH

SEQ ID NO: 108978 - protein, 212 aa, Unknown
  Bacterial polypetide isolated from the Sargasso Sea
DGIVMRHPTPGSCQQLSEYVDSVIINAGDGTHEHPTQAMLDMMSLHEKFGSLSGLKVAIIGDILHSRVALSNIYGLNKMGAKVMLCGPPHLIPPNIEELGVLVVHDLNQVLEWADAINVLRIQRERMGIGLIPSVREYRDFFGITKKRLLSAKKEIVVMHPGPMNRGVEIDSDVAESEQAIILDQVLNGVAIRMSILYSLLGNEKELKNEEK

SEQ ID NO: 108979 - protein, 182 aa, Unknown
  Bacterial polypetide isolated from the Sargasso Sea
MGIDGMTRADLEELLELTDTFAEVGRRPIPKVPALRGRTVATVFFENSTRTRMSFDTAARRLSADTIAFSIGGSSISKGESLRDTVEVVASYGVDALVVRHPMAGTAHRVADWTNASVVNAGDGCHEHPTQALLDCYTLREHCGALDGMRIAIVGDVRHSRVARSNILAFTTLGAEVVLGHR

SEQ ID NO: 108980 - protein, 138 aa, Unknown
  Bacterial polypetide isolated from the Sargasso Sea
MLGVNEVRIIGPHTLIPNEIEKLGVHVYHEMNSGLKDVDVVVMLRLQRERMRGALLPSENEYFKRYGLTVQRLKHAKKDAIVMHPGPINRGVEIDSDVADGKHSVILQQVSHGIAIRMAIMAMVMGQINKNANKEKKK

SEQ ID NO: 108981 - protein, 188 aa, Unknown
  Bacterial polypetide isolated from the Sargasso Sea
LSQKVNCAVLNAGDGRREHPTQALLDALTIITRKKKIEGLKIAICGDILHSRVARSNIYLLNMLGAEVNIIAPTNLMPKEIEKFGVNTFTDMKKGLKDCDIVMMLRLQNERMTSSYLSSNREYYEYYGLTPDKLEHAKSDALIMHPGPMNRGIEIDTILADDINKSVIKEQVELGVAVRMACLKIFCT

SEQ ID NO: 108982 - protein, 179 aa, Unknown
  Bacterial polypetide isolated from the Sargasso Sea
NAGDGRREHPTQALLDALTIIDRKGKIEGLKIAICGDILHSRVARSNIYLMNMLGAEVNVVAPKTLMPNSIKKLGVKAFTNMKKGLDSCDIVMMLRLQDERMQGSFLPSKREYYEYFGLTPEKLKYASKDALVMHPGPMNRGVEIDTKLADNINVSLVKEQVELGVAVRMACLKIYCKK

SEQ ID NO: 108983 - protein, 213 aa, Unknown
  Bacterial polypetide isolated from the Sargasso Sea
MANQNKAIKISQKHLLGIQDLSIKDVNYILNESKQFIDLNKSKNKKLDILRGKTQINLFFEPSTRTQSSFELAGKRLGADVMSMNIGNSAIKKGETLIDTAMTLNAMHPDIIVVRHQDSGATNLLSQKVNCSVLNAGDGRREHPTQALLDALTIIDRKKKIEGLKIAICGDILHSRVARSNIYLLNMLGAEVNIVAPTNLMPRDIKKFGVGIF

SEQ ID NO: 108984 - protein, 94 aa, Unknown
  Bacterial polypetide isolated from the Sargasso Sea
LSDADVVVALRVQKERIESCENDLSLDQYSKIYQLSQDKLELCKPDAIVMHPGPMNRGVEISNEVADGKQSVILKQVENGVAIRMAVLTEILKQ

SEQ ID NO: 108985 - protein, 211 aa, Unknown
  Bacterial polypetide isolated from the Sargasso Sea
NAMRPDLLVVRHSSSGAANLLSEKVNCSVLNAGDGSHEHPTQALLDFLTIKHRKKKKEGLIIAICGDINHSRVARSNIALLSKFNNQVRLIGPSNLLSASFKEMGLETYNRMEDGVRGADVIMMLRLQKERMKVGFIPSRREYFNRFGLDNQKLSLAKSDAIVMHPGPMNRGVEIDGIIADDLNRSVIQEQVEMGVALRMAVLHLLVGRKE

SEQ ID NO: 108986 - protein, 172 aa, Unknown
  Bacterial polypetide isolated from the Sargasso Sea
LIQPRAMLDIFTIRKYFSDFTKIKVAIVGDILHSRVARSLMHALRILEVPDIRVIGPKTLLPAGIEYMGVTPYVDMDKGIKDCDVVIMLRLQNERMNSSFIPDEHEYYNLYGFSPKRLELISKKGIVMHPGPVNRGVEISSEVADGDRSVILQQVSNGIAVRMAILSLSMQP

SEQ ID NO: 108987 - protein, 289 aa, Unknown
  Bacterial polypetide isolated from the Sargasso Sea
LFQLMAKNLISISDLSKNEILEIIKFSDSFIDDEGNFRKEDLFPDKTIANVFCEPSTRTKSSFSIAASNLGCSVLDFDVSNSSIQKGETIYETIDALHLMGVDLCVLRHSDSVIKDLAEYLPNMTFVNAGEGMLSHPTQTLLDLKTIMDNKKTLDSLKIVIVGDLDHSRVTSSFLEVLKNFELEALVLSGHPAMCTKYIDNKQGVYEPDLNKALDNADVVMALRIQHERFEQELDLDLETYKQDYQLTSEKMDNAKGDAIIMHPGPVNYIEISESIYDSEQSVIRQQVK

SEQ ID NO: 108988 - protein, 221 aa, Unknown
  Bacterial polypetide isolated from the Sargasso Sea
MGAEAIVVRHKSVGVPWIITEWTDASIVNAGDGAHEHPTQSLADCYTITRQLGSVEGKRIVIVGDIKHSRVARSNVKAFSALGAKVALVAPPTLLPSSIDNWPVDVIEDFDVAIKEADVLYLLRMQLERQEESLVPSLREYTNFYGLTLDRSQKLQKSSVIMHPGPMNRGVEITGDVPDLPNALITNQVGNGVIVRMAILYHLLGSGVALSGLHSEGEEDG

SEQ ID NO: 108989 - protein, 307 aa, Unknown
  Bacterial polypetide isolated from the Sargasso Sea
MANVKKAIKISQKHLLGIQDLSISDVNFILSEAKQFIDLNKSKNKKLDVLRGKTQINLFFEPSTRTQSSFELAGKRLGADVMSMNLNNSAIKKGETLIDTAMTLNAMHPDIIVVRHQDSGASNLLSQKVNCAVLNAGDGRREHPTQALLDALTIIDRKEKIEGLKIAICGDIVHSRVARSNIYLLNMLGAEVNIIAPSNLMPKDINKLGVNSFSDMKKGLKDCDIVMMLRLQNERMTSSFLSSNREYYEYYGLTPDKLNFAKADALIMHPGPMNRGIEIDTNLADDINKSVIKEQVELGVAVRMACL

SEQ ID NO: 108990 - protein, 193 aa, Unknown
  Bacterial polypetide isolated from the Sargasso Sea
MAIKTDKAIKISQKHLLGIQELSINDVNLILDEAHSFIKVNQSKNKKIDVLRGKTQINLFFEPSTRTQSSFELAGKRLGADVMSMNISNSAIKKGETLIDTAMTLNAMHPDIIVVRHQDSGACNLLSQKVNCAVLNAGDGRREHPTQALLDALTIINRKKKIEGLKIAICGDILHSRVARSNIYLLNMLGAEV

SEQ ID NO: 108991 - protein, 245 aa, Unknown
  Bacterial polypetide isolated from the Sargasso Sea
SSFDLAGKRLGADVMTMNMGNSALKKGETLIDTAMTLNAMHPDIIVIRHQDSGAPNLLSQKVNCTVINAGDGRREHPTQALLDALTIINRKDSIEGLKIAICGDILHSRVARSNIYLMNMLGAEVNVIAPKTLMPTGIENLGVKSFTDMKKGLDGCDIVMMLRLQNERMQGSFLPSKREYYEFFGLTPEKLKFAKKDALLMHPGPMNRGVEIDTKLADDINVSLVKEQVELGVAVRMACLKLYCK

SEQ ID NO: 108992 - protein, 142 aa, Unknown
  Bacterial polypetide isolated from the Sargasso Sea
LSNIYALNLLGANIKISCPLSLIPREIESLNVSIETDIIKALKWCDAVNVLRVQKERMEKSYFPNDREYSMLYGLDTTKINDIKKDILILHPGPINRGVEITSEIVESNNSIILDQVENGVAIRMAVIYLLASKMNFSISEQ

SEQ ID NO: 108993 - protein, 140 aa, Unknown
  Bacterial polypetide isolated from the Sargasso Sea
LHSRVARSNIYLLTMLGAEVNIIGPTNLLPKDLEKFGVNIFTDMKKGVKDCDIVMMLRLQNERMTSSYLSSNREYYEYYGLSPEKLDYAKTDALVMHPGPMNRGIEIDTMLADDINKSVIKEQVELGVAVRMACLKIFCS

SEQ ID NO: 108994 - protein, 296 aa, Unknown
  Bacterial polypetide isolated from the Sargasso Sea
MAIIKKFSAVKKIEKHLLGIQNLSIQEATLILDEAKNFIKLNRSTSKKLDLLRGKTQINLFFEPSTRTQSSFELAGKRLGADVMTMNVGNSSLKKGETILDTAMSLNAMHPDIIVVRHQDSGAPNLLSQKVNCTVINAGDGLREHPTQALLDALTIINRKGKIEGLKIAICGDILHSRVARSNIYLLNMLGAEVNVIAPKTLMPTSINKLGVKGFTNMREGLKSCDIVMMLRLQNERMKGSFLPSKREYYEYFGLTPDKLKLAKKDALIMHPGPMNRGVEIDTKLADDINVSLVKE

SEQ ID NO: 108995 - protein, 194 aa, Unknown
  Bacterial polypetide isolated from the Sargasso Sea
MGIQNLSVLEAKQILKEAKEFISLNRSVSKKLDTLRGKTQINLFFEPSTRTQSSFDLAGKRLGADVMSMNMNNSALKKGETLIDTAMTLNAMHPDLIVIRHQDSGAPNLLSQKVNCAVINAGDGRREHPTQALLDALTIINRKGKIEGLKIAICGDILHSRVARSNIYLMNMLGAEVNVIAPKTLMPKSIERLG

SEQ ID NO: 108996 - protein, 155 aa, Unknown
  Bacterial polypetide isolated from the Sargasso Sea
KVQGLKIAICGDILHSRVARSNIYLMNMLGAEVNVVAPKTLLPHSVERLGVKVFNDMKKGLRDCDIVMMLRLQNERMHGSFLPSPREYYEYFGLTPDKLSAAKKDALIMHPGPMNRGVEIDTNLADDINRSVIREQVELGVAVRMACLKLFCNKK

SEQ ID NO: 108997 - protein, 133 aa, Unknown
  Bacterial polypetide isolated from the Sargasso Sea
VIRHQDSGACNLLSQKVNCVVLNAGDGRREHPTQALLDALTIRNRKKKIQGLKIAICGDILHSRVARSNIYLLTMLGAEVNIVAPSNLMPKEIEKFGVNTFTDMKKGLKDCDIVMMLRLQNERMTSSYLSSNR

SEQ ID NO: 108998 - protein, 269 aa, Unknown
  Bacterial polypetide isolated from the Sargasso Sea
MATKSNKAIKISQKHLLGIQDLSINDVNLILDESQKFIKLNQSKNKRLNVLNGKTQINLFFEPSTRTQSSFELAGKRLGADVMSMNMGNSAIKKGETLIDTAMTLNAMHPDIIVIRHQDSGACNLLSQKVNCAVLNAGDGRREHPTQALLDALTIINRKDKIQGLRIAICGDILHSRVARSNIYLLTMLGAEVNIVAPSNLMPKEIEKFGVNTFTDMKKGLKDCDIVMMLRLQNERMTSSFLSSNREYYEYYGLTPDKLDHAKPRCNYN

SEQ ID NO: 108999 - protein, 255 aa, Unknown
  Bacterial polypetide isolated from the Sargasso Sea
MAIKTNKAIKISQKHLLGIQDLSINDVNLILDEAHSFIKVNQSKNKKVDVLKGKTQINLFFEPSTRTQSSFELAGKRLGADVMSMNISNSAIKKGETLIDTAMTLNAMHPDIIVIRHQDSGACNLLSQKVNCAVLNAGDGRREHPTQALLDALTIINRKKKIEGLKIAICGDILHSRVARSNIYLLNMLGAEVNIVAPSNLMPKEIEKFGVNTFTDMKKGLKNCDIVMMLRLQNERMASSYLSSNREYYEYYGLT

SEQ ID NO: 109000 - protein, 187 aa, Unknown
  Bacterial polypetide isolated from the Sargasso Sea
MAIPTNKAIKISQKHLLGIQDLSINDVNLILDEAKDFIKVNQSKNKKIDVLKGKTQINLFFEPSTRTQSSFELAGKRLGADVMSMNISNSAIKKGETLIDTAMTLNAMHPDIIVIRHQDSGACNLLSQKVNCAVLNAGDGRREHPTQALLDALTIINRKKKIEGLKIAICGDILHSRVARSNIYLLN

SEQ ID NO: 109001 - protein, 85 aa, Unknown
  Bacterial polypetide isolated from the Sargasso Sea
TSLERYHRDFGLSHERMQLCGQNVPVLHPGPVNRGVELSGSLLDDQRFSLVEEQVRNGVPTRMALLYLMAASESATEASLMSSSS

SEQ ID NO: 109002 - protein, 68 aa, Unknown
  Bacterial polypetide isolated from the Sargasso Sea
VKAQFVLRAADLEGARHNMKVLHPLPRIDEITTDVDKTPHAWYFQQAGNGIFARQALLALVLNSELAL

SEQ ID NO: 109003 - protein, 279 aa, Unknown
  Bacterial polypetide isolated from the Sargasso Sea
KSKNKKIDILRGKTQINLFFEPSTRTQSSFELAGKRLGADVMSMNIVNSAIKKGETLIDTAMTLNAMHPDIIVIRHQDSGACNLLSQKVNCAVLNAGDGRREHPTQALLDALTIIDRKKKIGGLKIAICGDILHSRVARSNIYLLNMLGAELNIVAPSNLMPKDIEKLGINKFTNMKDGVKDCDIVMMLRLQNERMTSSFLSSNREYYEYYGLTPDKLKLAKEDALIMHPGPMNRGIEIDTKLADDINKSVIKEQVELGVAVRMACLKIFGQPMKKKIY

SEQ ID NO: 109004 - protein, 199 aa, Unknown
  Bacterial polypetide isolated from the Sargasso Sea
MATASHQTYPHRHLLGIEGLSAEQITVLLDRSEQYVDQNRRVDKKQSLLHGRTQINLFFESSTRTRTSFELAGKRLGADVINMSAETSSIRKGETLIDSAMTLNAMHPDVLVVRHPHSGAVNLLAQKVDCAVINAGDGSHEHPTQALLDALTIRRRRGHLDRLIVAICGDILHSRVARSNIQLLITMGARVRVVAHRHL

SEQ ID NO: 109005 - protein, 264 aa, Unknown
  Bacterial polypetide isolated from the Sargasso Sea
MDNFNYYFDNIHLLGIQGMNKKTIQSILERAQYFNQKKKNRKNKILKDNLVINLFFENSTRTKASFEIAAKSMSADILNISVSSSSIKKGETLIDTAATLNAMHPDFLILRHPNSGAAEMLSKHVECSIINAGDGRHEHPTQALLDAAVIKEEGINLEGLKIAICGDILNSRVARSNIYLLTTMGAQVSVIGPPTLIPKDIERMGVKVFFDLDSGLKSSDIIMILRLQNERMDGSETPSKREYYSFFGINENNLKLAKKNALVM

SEQ ID NO: 109006 - protein, 257 aa, Unknown
  Bacterial polypetide isolated from the Sargasso Sea
MKELSVNHLLGIKYINKNDIDLIFETADHFKEVINRPIKKVPSLRDITIANIFFENSTRTKLSFELAQKRLSADVISFSAAQSSVKKGETLIDTVNNILSMKVDLVVMRHSNPGAAHFLANNVNASIVNAGDGAHEHPTQALLDSYTIREKLGDVGGKKVVIVGDILHSRVALSNIYALQMQGAEVKVCGPNTLIPKYIDSLGVKVEPNLRKALEWCDVANMLRVQNERLDVNYFPSTREYAQQFGLDKDLLDSLNK

SEQ ID NO: 109007 - protein, 222 aa, Unknown
  Bacterial polypetide isolated from the Sargasso Sea
LIDTAMTLNAMQPDIIVVRHHDAGAVKLLSEKVNCGVINAGDGPHEHPTQALLDALTIIRRKKQISGLKIAICGDIMHSRVARSNIHLLNTLGAEIRVIGPATLMPKNIESLGVKVFYNMKKGLKDADIIIMLRLQLERMSGSFVPSIREYFRFYGLDREKLKYAKSDALILHPGPMNRGVEIDSELADDLDRSAIFEQVRMGVAVRMACLKSLVEINGEVK

SEQ ID NO: 109008 - protein, 227 aa, Unknown
  Bacterial polypetide isolated from the Sargasso Sea
KGESFKDTAQNIEAMKIDAVVMRHPVPGSPKHLTEFIDAKVINAGDGTHEHPTQAILDMMSLQEKFGKIKDLNVAIIGDIEHSRVARSNIYGLVTMGANVTICGPSNLIPDYFSDFGVNVNYNTDEVLEWADAVNVLRIQKERMGIGLIPSDREYRALFGITEERLARRHKELVIMHPGPMNRGVEIDDRVADSDQAIILDQVLNGVASRMSILYLLLGTKEKVNEK

SEQ ID NO: 109009 - protein, 252 aa, Unknown
  Bacterial polypetide isolated from the Sargasso Sea
RSPPKNQSSFELAGKRLGADVMSMNITNSAIKKGETLIDTAMTLNAMHPDIIVIRHQDSGACNLLSQKVNCAVLNAGDGRREHPTQALLDALTIINRKKNIEGLKIAICGDILHSRVARSNIYLLTMLGAEVNIIGPTNLLPKDLGKFGVNIYTDMKKGVKDCDIVMMLRLQNERMTSSYLSSNREYYEYYGLTPEKLEFAKTDALIMHPGPMNRGIEIDTMLADDINKSVIKEQVELGVAVRMACLKIFCS

SEQ ID NO: 109010 - protein, 229 aa, Unknown
  Bacterial polypetide isolated from the Sargasso Sea
MKVKLPKIKAIRFSTGSKIIKDAESIALKYYSSLSKKTNININRAKSVFKKIHLVETSDLTKKEIEHILNESKKYITFNKKKIKKLNILEGRTIFNLFFEDSTRTRTSFEVAAKRLGADLINVVVKDSSINKGETLFDTMTTINSMNPDVLIVRHPEEGISKRISKTVDASVINAGDGSHEHPTQALLDALTIKNKFNNFSKLKIAICGDILHSRVARSNIIILSKIRC

SEQ ID NO: 109011 - protein, 273 aa, Unknown
  Bacterial polypetide isolated from the Sargasso Sea
MTNPTDIQQENSPVYSYRHLLSIEGLSRFDIEKLLDLADEYVETNRQADKKHAILRGRTLINMFFENSTRTRTSFELAGKRLGGDVINMSVSSSSIKKGETLIDTAMTLNAMHPDVLVVRHANSGSVHLLAEKVNCSVINAGDGSHEHPTQALLDALAIRRRLGRGLEGLIVAICGDIAHSRVARSNIHLLSIMGARVRAVAPPTLIPEGLERLGVEVHHNMSSGLKDADIIMMLRLQTERMKGSYVPSIREYYELYGLNSNKLKMAKPDALI

SEQ ID NO: 109012 - protein, 270 aa, Unknown
  Bacterial polypetide isolated from the Sargasso Sea
MATKSKKAIKISQKHLLGIQDLSVSDVTTILNEASNFIELNKSKNKKIDILKGKTQINLFFEPSTRTQSSFELAGKRLGADVMSMNITNSAIKKGETLIDTAMTLNAMHPDIIVIRHQDSGACNLLSQKVNCAVLNAGDGRREHPTQALLDALTIINRRKKIEGLKIAICGDILHSRVARSNIYLLNMLGAEVNIVAPSNLMPNEIEKFGVNIFSDMKKGVKDCDIVMMLRLQNERNDSSFLSSNREYYEYYGLTPDKIQYAKEDALIMH

SEQ ID NO: 109013 - protein, 84 aa, Unknown
  Bacterial polypetide isolated from the Sargasso Sea
QHERQSSSHFPSLAEYTTMFGLNMARSQWLKPDTLILHPGPINRGVEIDSELADSPRAVILDQVKNGIAVRMAILYLCATTEND

SEQ ID NO: 109014 - protein, 168 aa, Unknown
  Bacterial polypetide isolated from the Sargasso Sea
RAKGRLHRLNIAICGDIAHSRVARSNLLLLGKMENRIRLIGPPTLMPSQISEFGVEVYHDMHAGLRDVDVVMMLRLQKERMDGGFIPSVREYFQRYGLDYKKLSHAKDDAIVMHPGPMNRGVEIDGDIADDVTRSVIQEQVEMGVAVRMAIMELLSRNYSNKQKKLLS

SEQ ID NO: 109015 - protein, 248 aa, Unknown
  Bacterial polypetide isolated from the Sargasso Sea
MTNVKKTSSIPLIVKLSSQHLLSIEGMNKSEILSILDRADYFADVEVSKIKKEMSGFVLLNVFFENSTRTRVSFELAGRRLGAEVINISVNKSSIKKGESLMDTANTLSAMKPDVLIVRHPDSGAPKLFSEYLNCSIVNAGDGRHEHPTQALLDALTIRRRLGRLEGLKISICGDIANSRVARSNIHLLTTLGVEVRCIAPPTLMPKDLEKLGVQCFDNLNDGIKNSHAIMLLRLQNERMSGTETPSE

SEQ ID NO: 109016 - protein, 202 aa, Unknown
  Bacterial polypetide isolated from the Sargasso Sea
TVQNIESMKIDGAVIRHGHPGSALKLTEYIDGAVINAGDGSHEHPTQAILDMVTLKEKFGKIKGLKVGIIGDILNSRVARSDIFALKKLGAEVVVCGPSTLLPSDAKKLGINITYNLDEVLNWCDAVIALRIQMERMHLGRIPSKREYHSEFGLTFERISKLKKDIVIMHPGPMNRGVEIDSKVADSDNAVILDQVLNGVAS

SEQ ID NO: 109017 - protein, 144 aa, Unknown
  Bacterial polypetide isolated from the Sargasso Sea
MRRILHSRVARSNIYLLNMLGAEVNVIAPKTLMPPSIDNLGVKGFTNMKEGLKSCDIVMMLRLQNERMKGSFLPSKREYYEYFGLTTDKLKLAKKDALIMHPGPMNRGVEIDTKLADDINVSLVKEQVELGVAVRMACLKLYCK

SEQ ID NO: 109018 - protein, 195 aa, Unknown
  Bacterial polypetide isolated from the Sargasso Sea
SGACNLLSQKVNCSVINAGDGRREHPTQALLDALTIIEKKKKIQGLKIAICGDILHSRVARSNIYLLTMLGAEVNIVSPTNLMPEYIEKFGVNKFSDMKKGLKDCDIVMMLRLQNERMTSSFLSSNREYYEYYGLTQDKLSCAKDDALIMHPGPMNRGIEIDTNLADDINRSVIKEQVELGVAVRMACLKIFCEK

SEQ ID NO: 109019 - protein, 109 aa, Unknown
  Bacterial polypetide isolated from the Sargasso Sea
SVNKLGVKRFTFMKEGLKSCDIVMMLRLQNERMAGSFLPSKREYYEYFGLTPDKLKFAKKDALIMHPGPMNRGVEIDTKLADDINVSLVKEQVELGVAVRMACLKLYCK

SEQ ID NO: 109020 - protein, 248 aa, Unknown
  Bacterial polypetide isolated from the Sargasso Sea
IKKITSIDDLSAKDIRSIADRAIKFKKSQKNFISKKTKNIFNLFLEPSTRTTVSFELAAKKLGHNSININFEKSSLSKGETFKDTMDTLISMKPDALIIRDRNNFSPRDIEKKNKIPVINAGDGTNEHPTQALLDYCVIKSIFKNKKIKIGICGDIKHSRVAHSNIKLLTKLGYEIHIIAPSYFLNKSEINKINNKVIYHKNLNHINKLDVLMMLRVQKERIVKGAKNLMRSFKKDFCLQEKHLTNKP

SEQ ID NO: 109021 - protein, 136 aa, Unknown
  Bacterial polypetide isolated from the Sargasso Sea
MTVESGKNKLNKLSQKNLRHFIDIDSLPKELLKDILDLAESFAVVSGQPVKKVPLLRGKTIVNLFFESSTRTRTTFEIAAKRLSADVLNLQVEHSATKKGESLLDTLRNLQAMHCDMFIVRHPSSGAAEFISKHVG

SEQ ID NO: 109022 - protein, 262 aa, Unknown
  Bacterial polypetide isolated from the Sargasso Sea
MRGKTQINLFFEPSTRTQSSFELAGKRLGADVMTMNVGNSSLKKGETILDTAMSLNAMHPDIIVVRHQDSGAPNLLSQKVNCTVINAGDGLREHPTQALLDALTIINRKGKIEGLKIAICGDILHSRVARSNIYLLNMLGAEVNVIAPKTLMPNSIHKLGVKGFTNMKEGLKSCDIVMMLRLQNERMKGSFLPSKREYYEYFGLTPDKLKLAKKDALIMHPGPMNRGVEIDTKLADDINVSLVKEQVELGVAVRMACLKLYC

SEQ ID NO: 109023 - protein, 259 aa, Unknown
  Bacterial polypetide isolated from the Sargasso Sea
TQINLFFEPSTITQSSFELAGKRLGVDVMTMNVGNSSLKKGETILDTAMSLNAMHPDIIVVRHQDSGAPNLLSQKVNCTVINAGDGLREHPTQALLDALTIINRKGKIEGLKIAICGDILHSRVARSNIYLLNMLGAEVNVIAPKTLLPNSISKLGVKGFTNMREGLASCDIVMMLRLQNERMTGSFLPSKREYYEYFGLTPDKLKLAKKDALIMHPGPMNRGVEIDTKLADDINVSLVKEQVELGVAVRMACLKLYCK

SEQ ID NO: 109024 - protein, 148 aa, Unknown
  Bacterial polypetide isolated from the Sargasso Sea
KIAICGDILHSRVARSNIIILSKLCAKINVIGPKEWLPKSLNKLPVNVYTEMKKGLQNCDIVMMLRIQKERIVGKIMPNQKTYFKKYGLDYNKLKYAKKNAFVMHPGPMNRGVEIDSKLADDVTRSLIQEQVAMGVAVRMACLYLIIK

SEQ ID NO: 109025 - protein, 190 aa, Unknown
  Bacterial polypetide isolated from the Sargasso Sea
NLLSQKVNCTVINAGDGLREHPTQALLDALTIINRKGKIEGLKIAICGDILHSRVARSNIYLLNMLGAEVNVIAPKTLMPISINKLGVKAFTNMKEGLKSCDIVMMLRLQNERMKGSFLPSKREYYEYFGLTPDKLKLAKKDALLMHPGPMNRGVEIDTKLADDINVSLVKEQVELGVAVRMACLKLYCK

SEQ ID NO: 109026 - protein, 152 aa, Unknown
  Bacterial polypetide isolated from the Sargasso Sea
ICGDILHSRVARSNIIILSKLGAKINVIGPKEWLPKSLNKLPVNVYTEMKKGLQNCDIVMMLRIQKERIVGKIMPNQKTYFKKYGLDYNKLKYAKKNAFVMHPGPMNRGVEIDSKLADDVTRSLIQEQVAMGVAVRMACLDLIIKNRDDFSK

SEQ ID NO: 109027 - protein, 153 aa, Unknown
  Bacterial polypetide isolated from the Sargasso Sea
KIQGLKIAICGDILHSRVARSNIYLLTMLGAEVNIVAPSNLMPKEIEKFGVNTFTDMKKGLKDCDIVMMLRLQNERMTSSYLSSNREYYEYYGLTPDKLDHAKSDALIMHPGPMNRGIEIDTRLADDINKSVIKEQVELGVAVRMACLKIFCE

SEQ ID NO: 109028 - protein, 206 aa, Unknown
  Bacterial polypetide isolated from the Sargasso Sea
SDILEEGISKKIAMNVDACVINAGDGSHEHPTQALLDALTIKSRFKNFSKLQIAICGDILHSRVARSNIIILSKLGAKINVIGPKEWLPKNLVKLPVKVFTDMKKGLKNCNIVMMLRIQKERIVGKIMPNQNSYFKKYGLDYNKLKYAKKNAFVMHPGPMNRGVEIDSELADDVTRSLIQEQVAMGVAIRMACLDILIRNRDNVNN

SEQ ID NO: 109029 - protein, 207 aa, Unknown
  Bacterial polypetide isolated from the Sargasso Sea
MASKHLLGIEGLNPLEINALIDRGDMFADLIQEEQAITPPLSEVLKGRTVLNLFFENSTRTRVSFELAAKNIGGSVLNINVAGSSVKKGETLLDTATTLNAMHPHILVVRHNCSGAAQLLSQHIDAAVINAGDGRHEHPTQALLDALTIKRRVGRIEGLKIAICGDIANSRVARSNIHLLSTLGAEIRLVCPATLLPDAVDAMGVEI

SEQ ID NO: 109030 - protein, 179 aa, Unknown
  Bacterial polypetide isolated from the Sargasso Sea
LNAGDGRREHPTQALLDALTIIEKKNKVEGLKIAICGDILHSRVARSNIYLLNMLGADINIVAPSNLMPKDLQKFGVNTFTNMKEGVKDCDIVMMLRLQNERMTGSFLSSNREYYEYYGLTPDKLERAKSDAIIMHPGPMNRGIEIDTKLADDINKSVIKEQVELGVAVRMACLKLFCE

SEQ ID NO: 109031 - protein, 222 aa, Unknown
  Bacterial polypetide isolated from the Sargasso Sea
DTMTTINSMNPDVLIVRHPEEGISKRISLNVDASVINAGDGSHEHPTQALLDALTIKNRFKNFSKLQIAICGDILHSRVARSNIIILSKLGAKINVIGPSEWLPKNIKKLPVTVFTDMKKGLKNCDIVMMLRIQKERIVGKIMPNQKIYFNKYGLDYNKLKYAKKNAFVMHPGPMNRGVEIDSKLADDVTRSLIQEQVAMGVAIRMACLDILIKNRDNVVKY

SEQ ID NO: 109032 - protein, 278 aa, Unknown
  Bacterial polypetide isolated from the Sargasso Sea
MLGIQDLSVNDINYILDESEAFIKLNQSKNKKIDVLRGKTQINLFFEPSTRTQSSFELAGKRLGADVMSMNTGNSAIKKGETLIDTAMTLNAMHPDIIVIRHQDSGACNLLSQKVNCVVLNAGDGRREHPTQALLDALTIRNRKKKIQGLKIAICGDILHSRVARSNIYLLTMLGAEVNIVAPSNLMPKEIEKFGVNTFTDMKKGLRDCDIVMMLRLQNERMTSSYLSSNREYYEYYGLTPDKLDHAKSDALIMHPGPMNRGIENDTRLADDINKSVI

SEQ ID NO: 109033 - protein, 196 aa, Unknown
  Bacterial polypetide isolated from the Sargasso Sea
ISRNIDIPVINAGDGLHAHPTQTLLDVYTIQKKLGTLKNKKISIIGDILHSRVARSNILGFSKLGANVYINSPKTLSLFKNKFFEGENSLVNFVDDIDHAIENADVIMPLRIQLERQEQGNIPSLREYSKYWGINEEKIKIAKNNVMIMHPGPVNEGVEISSSLVHGDKSQINLQVKHGLFIRMAIIKTILSEANK

SEQ ID NO: 109034 - protein, 271 aa, Unknown
  Bacterial polypetide isolated from the Sargasso Sea
ILDEAHTFIKVNQSKNKKIDVLRGKTQINLFFEPSTRTQSSFELAGKRLGADVMSMNISNSAIKKGETLIDTAMTLNAMHPDIIVIRHQDSGACNLLSQKVNCAVLNAGDGRREHPTQALLDALTIITRKNKIEGLKISICGDILHSRVARSNIYLLNMLGAEVNIVAPTNLMPKEIEKFRVNTFTDMKKGLKDCDIVMMLRLQNERMTSSYLSSNREYYEYYGLTPDKLEHAKPDALIMHPGPMNRGIEIDTMLADDINKSVIKEQVELG

SEQ ID NO: 109035 - protein, 206 aa, Unknown
  Bacterial polypetide isolated from the Sargasso Sea
LDIRKKELVKKISESVDASVINAGDGSHEHPTQALLDALTIKNKFENFAKLKIAICGDILHSRVARSNIIILSKLGAKINVIGPKEWLPKSLNKLPVNIYTEMKKGLQNCDIVMMLRIQKERIVGKIMPNQKTYFKKYGLDYNKLKYAKKNAFVMHPGPMNRGVEIDSKLADDVTRSLIQEQVAMGVAVRMACLDLIIKNRDDFSK

SEQ ID NO: 109036 - protein, 197 aa, Unknown
  Bacterial polypetide isolated from the Sargasso Sea
MNKLSTKHFIGLEHATINDINLIINTALTFREILDRPIKKVPSLKGSNIVNLFFENSTRTKLSFELAEKRLSADVLNFSSSSSSLNKGESLRDTVQNIQAMKIDCAVMRHPVPGSCKQLTEYLDCPIVNAGDGTHEHPTQAMLDITSIYEKFGKIKGLKIVIVGDILHSRVAMSNIFGLKTMGAEVMLCGPSHLIPK

SEQ ID NO: 109037 - protein, 239 aa, Unknown
  Bacterial polypetide isolated from the Sargasso Sea
LINVVVKDSSINKGETLLDTMTTINSMNPDVLIVRHPEEGISKKISETVDASIINAGDGSHEHPTQALLDALTIKNKFNNFSKLKIAICGDILHSRVARSNIIILSKLGSKINVVGPKEWLPKSLKKLPVRVFTDMRKGLENCDIVMMLRIQKERIVGKIMPDQRSYFKKYGLDYNKLKYAKKNAFVMHPGPMNRGVEIDSKLADDITISLIQEQVAMGVAVRMACLDLIIKNRDNNVS

SEQ ID NO: 109038 - protein, 206 aa, Unknown
  Bacterial polypetide isolated from the Sargasso Sea
MHPDIIVIRHQDSGACNLLSQKVNCVVLNAGDGRREHPTQALLDALTIRNRKKKIQGLKIAICGDILHSRVARSNIYLLTMLGAEVNIVAPSNLMPKEIEKFGVNTFTDMKKGLKDCDIVMMLRLQNERMTSSYLSSNREYYEYYGLTPDKLDHAKSDALIMHPGPMNRGIEIDTRLADDINKSVIKEQVELGVAVRMACLKIFCE

SEQ ID NO: 109039 - protein, 286 aa, Unknown
  Bacterial polypetide isolated from the Sargasso Sea
MGIQNLSIQEAKNILNEAKTFIKLNRSNSKKLDVLRGKTQINLFFEPSTRTQSSFDLAGKRLGADVMTMNVVNSSLKKGETLIDTAMTLNAMHPDIIVIRHQDSGAPNLLSQKVNCAVINAGDGRREHPTQALLDALTIIDRKGKIEGLKIGICGDILHSRVARSNIYLMNMLGAEVNVVAPKTLMPKSIEKLGAKSFTDMKKGLDSCDIVMMLRLQNERMQGSFLPSKREYYEYFGLTPEKLKYANKDALVMHPGPMNRGVEIDTKLADKISCSLVKEQVELGVA

SEQ ID NO: 109040 - protein, 193 aa, Unknown
  Bacterial polypetide isolated from the Sargasso Sea
PHYIAKEVGNKIAVINAGDGIHAHPTQAMLDMYTIRKYKGDFKNLNVSIVGDILHSRVAKSLISSLNILSVNNINIIGPKNLMPDNLKDLKVNYHSNLEEGIDNVDVIIMLRLQKERMHEALISTDDYYNDYGLTKTKIAVAKKDVIVMHPGPINRGIEIDSEVADGPNSVILDQVSAGISIRMAIMSLILKN

SEQ ID NO: 109041 - protein, 186 aa, Unknown
  Bacterial polypetide isolated from the Sargasso Sea
MAIKTNKAIKISQKHLLGIQDLSINDVNLILDEAQTFIKVNQSKNKKVDVLSGKTQINLFFEPSTRTQSSFELAGKRLGADVMSMNISNSAIKKGETLIDTAMTLNAMHPDIIVVRHQDSGACNLLSQKVNCAVLNAGDGRREHPTQALLDALTIKTRKNKIEGLKIAICGDILHSRVARSNIYLL

SEQ ID NO: 109042 - protein, 231 aa, Unknown
  Bacterial polypetide isolated from the Sargasso Sea
MAIKSNKAVKISQKHLLGIQDLSVSDINYILDESEAFIKLNQSKNKKIDVLRGKTQINLFFEPSTRTQSSFELAGKRLGADVMSMNMGNSAIKKGETLIDTAMTLNAMHPDIIVIRHQDSGACNLLSQKVNCVVLNAGDGRREHPTQALLDALTIRNRKKKIQGLKIAICGDILHSRVARSNIYLLTMLGAEVNIVAPSNLMPKEIKKFGVNTFTDMKAGPQDCDIVMMLR

SEQ ID NO: 109043 - protein, 253 aa, Unknown
  Bacterial polypetide isolated from the Sargasso Sea
MAIKTDKAIKISQKHLLGIQDLSVNDINYILDESEAFIKLNQSKNKKIDVLRGKTQINLFFEPSTRTQSSFELAGKRLGADVMSMNMGNSAIKKGETLIDTAMTLNAMHPDIIVIRHQDSGACNLLSQKVNCVVLNAGDGRREHPTQALLDALTIRNRKKKIQGLKIAICGDILHSRVARSNIYLLTMLGAEVNIVAPSNLMPKEIEKFGVNTFTDMKKGLKDCDIVMMLRLQNERMTSSYLSSNREYYEYYG

SEQ ID NO: 109044 - protein, 221 aa, Unknown
  Bacterial polypetide isolated from the Sargasso Sea
DTINNILAMKVDMIVLRHPNPGSSIFLSKHTESCIINAGDGAHEHPTQALLDSFSIFEKIGDLKGKNILIVGDILHSRVALSNLYLLNLLGANVKISSPLSLVPKDIEKLNVSVEPDIKKALRWCDAVNVLRVQRERMIKSYFPDNREYSMLFGLDENKISSIKKDILILHPGPINRGVEITSDLVDSNNSIILEQVENGVAIRMAIIYLLASKLNFSINE

SEQ ID NO: 109045 - protein, 281 aa, Unknown
  Bacterial polypetide isolated from the Sargasso Sea
RGRQFKAGDAPRVEPGHVAINMFFENSTRTMTSFQMAEHRLGMKILDFDPGHSSVTKGESLYDSVRTVDAIGAEVAVIRHSTNHYYDYLLATGMLGLSVVNGGDGSGQHPSQCMLDLMTIAEEFGHVDGLTVAISGDIVHSRVARSDAQILTRLGANVVFTGPREWMDHDVTRLGTMATLDEVIADVDVAMMLRVQHERFDAGPDFSATDYLHTFGLTDERAERMKPHAIIMHPAPVNRGCEISGHLVEAPSSRIFEQMGNGVMVRMAILDRCCTAGRQMS

SEQ ID NO: 109046 - protein, 168 aa, Unknown
  Bacterial polypetide isolated from the Sargasso Sea
TIKNKFNNFSKLKIAICGDILHSRVARSNIIILSKLGAKINVIGPKEWLPRNLNKLPVNVFTNMKKGLANCDIVMMLRIQKERIVGKIMPNQKSYFKKYGLDYNKLKYAKKNAFVMHPGPMNRGVEIDSALADDITRSLIQEQVAMGVAVRMACLDLIIKNRDNRAYN

SEQ ID NO: 109047 - protein, 176 aa, Unknown
  Bacterial polypetide isolated from the Sargasso Sea
GDGRREHPTQALLDALTIINRKQKIEGLKIAICGDILHSRVARSNIYLLNMLGAEVNIVAPTNLLPTDIEKFGVNIFSDMKKGVKDCDIVMMLRLQNERMTSSFLSSNREYYEYYGLTPDKLNYAKKDSIIMHPGPMNRGIEIDTKLADDTNMSVVKEQVELGVAIRMACLKIFCE

SEQ ID NO: 109048 - protein, 191 aa, Unknown
  Bacterial polypetide isolated from the Sargasso Sea
MASKTSKAIKISQKHLLGIQDLSVNDINIILNEAQTFISINRSKNKKIDALRGKTQINLFFEPSTRTQSSFELAGKRLGADVMSMNMGNSSIKKGETLIDTAMTLNAMHPDIIVIRHQDSGACNLLSQKVNCVVLNAGDGRREHPTQALLDALTIINRKDKIQGLKIAICGDILHSRVARSNIYLLTMLGA

SEQ ID NO: 109049 - protein, 162 aa, Unknown
  Bacterial polypetide isolated from the Sargasso Sea
MANPLYQKHIISINDLSRDDLNLVLATAAKLKANPQPELLKHKVIASCFFEASTRTRLSFETSMHRLGASVVGFSDSANTSLGKKGETLADTISVISTYVDAIVMRHPQEGAARLATEFSGKVPVLNAGDGSNQHPTQTLLDLFTIQETQGRLNNLHVAMVG

SEQ ID NO: 109050 - protein, 304 aa, Unknown
  Bacterial polypetide isolated from the Sargasso Sea
MQEQKRIPALQGTLVTSLFFEASTRTKNSFELAAKRLSADVQTFAPSSSSLTKGETIIDTAITYSAMGADTLVIRHSSSYITFEIAKKLDAINAKTSVLNAGDGLHSHPSQGLLDIYTLIKFFSQKTLNPEILNSKKILIIGDVNHSRVARSNLWALSAFGADIILCGPKTLIPDEFINFLKTPAPNQTEDPVKSRGSITISRSLEESIKIADAIIVLRLQKERMVENLLSSIDSYSLDYGLTPEKLSLNNKEIPILHPGPINRDIEISSEVVDRYPNCLINNQVANGIPIRMALLYLLQKHNK

SEQ ID NO: 109051 - protein, 261 aa, Unknown
  Bacterial polypetide isolated from the Sargasso Sea
MLSFQGENILSVNQLDRDCIERIFAVAKKMEPYAKKQKRTNVLEGAILANLFFEPSTRTRVSFGTAFNLLGGLVRETTGMQSSALAKGESLYDTARVISAYADAVAMRHPDAGSVAEFATGCDVPVINGGDGPNEHPTQALLDLLTIERELGRFNQSIDGMHIALVGDLKYGRTVHSLSKLLCHYKDVKFSMVAPDGLQMPDYILDAVDNAGHKIQVVDKMEGNLAADIVYQTRIQEERFPSQEETNKYRGGFRISQAITT

SEQ ID NO: 109052 - protein, 186 aa, Unknown
  Bacterial polypetide isolated from the Sargasso Sea
MIGLEKLSADQILQILDTAEPFKEISERRIKKVPVLRGKTIVNLFFEASTRTRVSFEFAEKRLSADTVNISTSGSSLVKGETLVDTARNLEAMRIDMVVMRHGASGAARFLAERIPSTVINAGDGWHEHPTQGLLDLLTMRDHMGHLEGLKVCIVGDILHSRVARSNIYGLRTLGAEVAVCGPRTL

SEQ ID NO: 109053 - protein, 286 aa, Unknown
  Bacterial polypetide isolated from the Sargasso Sea
MAIIKKFSAVKKIQEHLLGIQNLSIKEANLILDEAKNFIKLNRSASKKMDLLRGKTQINLFFEPSTRTQSSFELAGKRLGADVMTMNVGNSSLKKGETILDTAMTLNAMHPDIIVVRHQESGAPNLLSQKVNCAVINAGDGLREHPTQALLDALTIKNRKGKIEGLKIAICGDILHSRVARSNIYLLNMLGAEVNVIAPKTLIPDSISKLGVKSFTNMKEGLKSCDIVMMLRLQNERMSGSFLPSKREYYEYFGLTQDKLKLAKKDALIMHPGTMNRGVEIDTKLA

SEQ ID NO: 109054 - protein, 153 aa, Unknown
  Bacterial polypetide isolated from the Sargasso Sea
MTETATLSNQDIITTKDLDANDIETILDTADSFKEISTRAIKKVPTLRGRTIINLFFEPSTRTRTSFEIAGKRLSADVINISGAGSSIVKGESLIDTAKNLEAMSPDILVVRHNCSGAPSLISEFVNCPVINAGDGMHEHPTQSLLDCSPSGS

SEQ ID NO: 109055 - protein, 245 aa, Unknown
  Bacterial polypetide isolated from the Sargasso Sea
TAITYSAMGADTLVIRHSSSYITFEIAKKLDAINSKTSVLNAGDGLHSHPSQGLLDVYTLIKFFSQKILNPEVLNSKKILIIGDVNHSRVARSNLWALSAFGADIILCGPKKLISDEFINFLKNPAPNQTEDPVKSRGSITISRSLEESIKIADAIIVLRLQKERMMENLLSSIDSYSLDYGLTPEKLSLINKEIPILHPGPINRDIEISSKVVDQYPNCLINNQVSNGIPIRMAMLYLLQKHNK

SEQ ID NO: 109056 - protein, 311 aa, Unknown
  Bacterial polypetide isolated from the Sargasso Sea
YWQMKLKLPKQRAIRSSTGSKILKEAKKIALKHYSSFGISNKIKKTSKNIYKKIHLVETADLNKKEIEFILDEAKKFINFNKKRVKKSNLLEGRTVFNLFFEDSTRTRTSFEVAAKRLGADLINVAVKDSSINKGETLLDTMTTINSMNPDVLIVRHPEEGISKRISNNVDACVINAGDGSHEHPTQALLDALTIMNRFNNFSKLQIAICGDILHSRVARSNIIILSKLGAKVNVIGPKQWLPKNINKLPVEVYTDMKKGLKNCDIVMMLRIQKERIVGKIMPNQKTYFNKYGLDYNKLKYAKKNAFVMHP

SEQ ID NO: 109057 - protein, 113 aa, Unknown
  Bacterial polypetide isolated from the Sargasso Sea
RRLEHALPGADAVMTLRLQKERMGQQLLTSLERYHRDFGLSHERMQLCGQQVPVLHPGPVNRGVELTGSLLDDPRVSLVEEQVRNGVPTRMALLYLMAASESATEASLVSRSS

SEQ ID NO: 109058 - protein, 257 aa, Unknown
  Bacterial polypetide isolated from the Sargasso Sea
LQGTLVTSLFFEASTRTKNSFELAAKRLSADVQTFAPSSSSLTKGETIIDTAITYSAMGADTLVIRHSSSYITFEIAKKLDAINAKTSVLNAGDGLHSHPSQGLLDIYTLIKFFSPKKLNPEVLNSKKILIIGDVNHSRVARSNLWALSAFGADIILCGPKTLIPDEFLNFLKNPAPNQIEDPVKSRGSITISRSLDESIKIADAIIVLRLQKERMMENLLNSIDSYSFDYGLTPEKLSLNSKQIPILHPGPINRDI

SEQ ID NO: 109059 - protein, 224 aa, Unknown
  Bacterial polypetide isolated from the Sargasso Sea
MGERTVVLNGGDGLHSHPSQGLLDLLTLARHFSPQYPMPEALQGRRIVIVGDILHSRVARSNLWALTACGADVVLCGPPSLVPEDFSAFVDAPPPGLLKDPVPQRGKVSVVRRLEHALPGADAVMTLRLQKERMGQQLLTSLERYHRDFGLSHERMQLCGENVPVLHPGPVNRGVELSGTLLDDPRVSLVEEQVRNGVPTRMALLYLMAASESATEASLVSSSS

SEQ ID NO: 109060 - protein, 207 aa, Unknown
  Bacterial polypetide isolated from the Sargasso Sea
MQTWPHKHIHTLANFSIQDYKAVFELANRFDALKNSGTKKIPALQGTLVTSLFFEASTRTKNSFELAAKRLSADVQTFAPSSSSLTKGETIIDTAITYSAMGADILVIRHSSSYITFEIAKKLDAINSKTSVLNAGDGLHSHPSQGLLDIYTLIKFFSKKSLNPEVLNSKNILIIGDVNHSRVARSNLWALRAFGANIILCGPKTLI

SEQ ID NO: 109061 - protein, 141 aa, Unknown
  Bacterial polypetide isolated from the Sargasso Sea
MLDIDQLNKEDIKYIFEYAEKLETISKGSVRKIPALRGKTILNYFAEPSTRTRVSFENAGKILSADVINMSSSGSSDEKGESLFNSVQTLESIGANLLVIRHYDSGAPYFVSRNIDIPVINAGDGSHAHPTQNLIDLYTVY

SEQ ID NO: 109062 - protein, 236 aa, Unknown
  Bacterial polypetide isolated from the Sargasso Sea
NFSYSGSSISKGENLIDTINNIIAMKVDIIVLRHPSPGSALFVSKNINSCVINAGDGTHEHPSQALLDAYSLIEKLGNLKGKRIAIVGDVLHSRVALSNIFILKLLGAEIKLCAPKSLLPKHIESLGVSYSDNLTQTLKWCDAVNMLRIQNERTELNFFPSAREYSRLYGLDKEKFEKIKKDILILHPGPINRGVEITSDLADSENAIILDQVENGVAIRMAIIYLLASKLKMIDY

SEQ ID NO: 109063 - protein, 244 aa, Unknown
  Bacterial polypetide isolated from the Sargasso Sea
MASSKKAIKISQKHLLGIQDLSINDINVILEESKKFITLNKSKNKKIDILRGKTQINLFFEPSTRTQSSFELAGKRLGADVMSMNITNSAIKKGETLIDTAMTLNAMHPDIIVIRHQDSGACNLLSQKVNCAVLNAGDGRREHPTQALLDALTIIDRKKKIQGLRIAICGDILHSRVARSNIYLLNMLGAEVNIVAPSNLMPKDIDKLGVNKFTDMKKGVKDCDIVMMLRLQNERMTSSFLSSQ

SEQ ID NO: 109064 - protein, 223 aa, Unknown
  Bacterial polypetide isolated from the Sargasso Sea
MQIWPHKHIHTLANFSIQDYKSVFELAHRFDSLKNAGTKKIPALQGTLVTSLFFEASTRTKNSFELAAKRLSADVQTFAPSSSSLTKGETIIDTAITYSAMGADTLVIRHSSSYITFEISKKLDAINSKTSVLNAGDGLHSHPSQGLLDIYTLIKFFSQKTLSPDVLNSKKILIIGDVNHSRVARSNLWGLSAFGAEIILCGPKTLIPDEFINFLKNPAPNQI

SEQ ID NO: 109065 - protein, 189 aa, Unknown
  Bacterial polypetide isolated from the Sargasso Sea
MLSQKVNCAVINAGDGRREHPTQALLDALTIIEKKGKIQGLRIAICGDILHSRVARSNIYLLNMLGAEVHIVAPTNLMPKDLEKFGVNKFSDMKKGLKDCDIVMMLRLQNERMHSSFLASNREYYEYYGLTPDKLDCAKKDALIMHPGPMNRGIEIDTNLADDINKSVIQEQVELGVAVRMACLKIFCE

SEQ ID NO: 109066 - protein, 210 aa, Unknown
  Bacterial polypetide isolated from the Sargasso Sea
MAIKSNQAIKISQKHLLGIQDLSINDVNLILDEANLFIKVNQSKNKKVDVLRGKTQINLFFEPSTRTQSSFELAGKRLGADVMSMNISNSAIKKGETLIDTAMTLNAMHPDIIVIRHQDSGACNLLSQKVHCAVLNAGDGRREHPTQALLDALTIITRKKKIQGLKIAICGDILHSRVARSNIYLLSMLGAEVNIVAPTNLMPKEIENLV

SEQ ID NO: 109067 - protein, 82 aa, Unknown
  Bacterial polypetide isolated from the Sargasso Sea
MANPLYQKHIISINDLSRDDLNLVLATAAKLKANPQPELLKHKVIASCFFEASTRTRLSFETSMHRLGASVVGFSDSSNTSL

SEQ ID NO: 109068 - protein, 186 aa, Unknown
  Bacterial polypetide isolated from the Sargasso Sea
LFINAGDGKHEHPTQALLDAMTVLRRKSRLSGLTVTICGDIAHSRVARSNIFLFGKLGNSIRLVGPATLVPDCFKEFGVEVFNNMREGLKGADVVMMLRLQKERMDGGYVPSEREYFHFYGLDEEKLSQAKSDAIILHPGPMNRGVEIDSELADDLSRSAIQEQVEMGVSIRMAVIESLIARVIDK

SEQ ID NO: 109069 - protein, 300 aa, Unknown
  Bacterial polypetide isolated from the Sargasso Sea
NELSENEIISIINNANNYYHDNKITAKKKVLNNFTQINLFFENSTRTQVSFEIAGTLLGANVVNFPLNNSSQSKGETLLDLAATLNSMNPDILVIRHPYSGAVQLISEKVGCPVVNAGDGNHEHPTQALLDILTIKKRVGRIDNLKIAICGDIAHSRVARSNIFCHKKLGNEIRVIGPKTLIPKDIDKLGVQVFYNMVDGLHDIDVIMVLRLQKERMDGGYFSSEREYFHLYGLDDRKMRYAKPSAIIMHPGPMNRGIEIDGDLADNLDKSVITMQVEAGLAIRMSILELLLKKKIEMSK

SEQ ID NO: 109070 - protein, 112 aa, Unknown
  Bacterial polypetide isolated from the Sargasso Sea
MPKDIQKFGVNVYSNMKKGVKDCDIVMMLRLQNERMTSSFLSSNREYYEYYGLTPDKLEYAKKDSIIMHPGPMNRGIEIDTKLADDTNMSVVKEQVELGVAVRMACLKIFCE

SEQ ID NO: 109071 - protein, 217 aa, Unknown
  Bacterial polypetide isolated from the Sargasso Sea
TLIDTAMTLNAMHPDIIVVRHQDSGASNLLSQKVNCAVLNAGDGRREHPTQALLDALTIIDRKQKIQGLKIAICGDIVHSRVARSNIYLLNMLGAEVNIVAPSNLMPKDIQKLGVNSFSDMKKGLKDCDIVMMLRLQNERMTSSFLSSNREYYEYYGLTPDKLKYAKDDALIMHPGPMNRGIEIDTKLADDINKSVIKEQVELGVAVRMACLKIFCE

SEQ ID NO: 109072 - protein, 266 aa, Unknown
  Bacterial polypetide isolated from the Sargasso Sea
MTGNNIQLDKDGNLKHFLSIEGLSHPLLHTILDYAESFATVGKRPVKKVPLLRGKTIANLFFEPSTRTRTTFELAAKRLSADILNLNISTSATSKGEILSDTLRTLEAMHCDMFVVRHANSGAAHYISSQVAPHISVINAGDGRHEHPTQAMLDMFTIKQHKKDFAKLCVAIVGDILHSRVARSEIHALNILGVNEVRIIGPHTLIPKDIENLGVHIYHDMNDGLKDVDVVVMLRLQRERMRGALLPSEDEYFKRFGFTNKRLRHA

SEQ ID NO: 109073 - protein, 255 aa, Unknown
  Bacterial polypetide isolated from the Sargasso Sea
RTSSSFELAGKRLGGDTMNMSVASSAVKKGETLIDTAMTLNAMHPDVLIVRHADSGAVKLLSEKVNCSVINAGDGTHEHPTQALLDALTIRRRKGRIHRLTVAICGDILHSRVARSNIHLLNTMGSRIRLVAPPTLLPSDIDRFGVEVFHNIEEGIKDCDIVMMLRLQNERMQGMFVPSIREYFRYFGLTREKLAAAKPDALVMHPGPMNRGVEIDSDLADDLDRSVIREQVEMGVAVRMACLDALTRNELANAL

SEQ ID NO: 109074 - protein, 171 aa, Unknown
  Bacterial polypetide isolated from the Sargasso Sea
ALLDAYSLKEKLGDLEGKKILIVGDILHSRVALSNIYALRLLNAKIKICSPLSLLPREIESLGVSIETNIDKALAWCDAANVLRVQYERMEKSYFPNNREYSILYGIDKKKIDRLKNNILILHPGPINRGVEITSDIVESNNSIILDQVENGVAIRMAVIYLLASKIKISN

SEQ ID NO: 109075 - protein, 268 aa, Unknown
  Bacterial polypetide isolated from the Sargasso Sea
MATDTKKAIKNSTKHLLGIQDLKVSEIKHILNEAQQFIDLNRSKNKKSDILKGKTQINLFFEPSTRTQSSFELAGKRLGADVMSMNITNSAIKKGETLIDTAMTLNAMHPDIIVIRHQDSGACNLLSQKVNCAVLNAGDGRREHPTQALLDALTIINRKKSIEGLKIAICGDILHSRVARSNIYLLTMLGANVNIIGPTNLLPKDLDKFGVNIFTDMKKGVRDCDIVMMLRLQNERMSSSYLSSNREYYEYYGLSPEKLEFAKTDAIN

SEQ ID NO: 109076 - protein, 308 aa, Unknown
  Bacterial polypetide isolated from the Sargasso Sea
MALIKKFSAVKKIQKHLLGIQNLSIQEANLILDEAKNFIKLNRSASKKLDLLRGKTQINLFFEPSTRTQSSFELAGKRLGADVMTMNVGNSSLKKGETILDTAMSLNAMHPDIIVVRHQDSGAPNLLSQKVNCTVINAGDGLREHPTQALLDALTIINRKGKIQGLKIAICGDILHSRVARSNIYLLNMLGAEVNVIAPKTLMPTSINKLGVKAFTNMKEGLKSCDIVMMLRLQNERMKGSFLPSKREYYEYFGLTPDKLKLAKKDALIMHPGPMNRGVEIDTKLADDINVSLVKEQVELGVAVRMAC

SEQ ID NO: 109077 - protein, 153 aa, Unknown
  Bacterial polypetide isolated from the Sargasso Sea
MLGIQNLSIQEAKNILNEAKTFIKLNRSNSKKLDILRGKTQINLFFEPSTRTQSSFDLAGKRLGADVMTMNVVNSSLKKGETLIDTAMTLNAMHPDIIVIRHQDSGAPNLLSQKVNCAVINAGDGRREHPTQALLDALTIIDRKGKIEGLKIG

SEQ ID NO: 109078 - protein, 268 aa, Unknown
  Bacterial polypetide isolated from the Sargasso Sea
LSADVQTFAPSSSSLTKGETIIDTAITYSAMGANTLVIRHSSSYITFEISKKLDAINSETSVLNAGDGLHSHPSQGLLDIYTLLKFFSPKTLIPEVLNSKKILIIGDVNHSRVARSNLWALSAFGADIILCGPKTLIPDEFVNFLKTPAPNQIEDPVRSRGSITISRSLEEAIKIADAIIVLRLQKERMMENLLNSIDSYSVDYGLTPEKLSLNNKEIPILHPGPINRDIEISSKVVDEYPNCLINNQVANGIPIRMALLYLLQKYNK

SEQ ID NO: 109079 - protein, 183 aa, Unknown
  Bacterial polypetide isolated from the Sargasso Sea
MINNESLIKFPHYHLLGIEGLTPPDLNYLLELSEHFAEHLDKEETEKLNYLKNKICINLFFENSTRTRTSFELAGKKLGADMLNISVASSAIKKGETLIDTAMTLNAMQPDVLVVRHQDAGAVQLLSEKVNCGVINAGDGPHEHPTQALLDALTIKKRKGKISGLKVAICGDIMHSRVARSNI

SEQ ID NO: 109080 - protein, 202 aa, Unknown
  Bacterial polypetide isolated from the Sargasso Sea
SSGAAEFISKHVGENISVINAGDGRHAHPTQAMLDIFTLRQKFKSFENLKVAIVGDILHSRVARSLISALNTLEVSEVRVVAPKTLMPIGVDELGVKSYFDMDQGIKDCNAVIMLRLQNERMNSSFIPDINEYYNLYGFTPERLGKIDKEGIIMHPGPVNRGVEISSEIADSSRSLILQQVSNGIAVRMAILSLSMQKGLES

SEQ ID NO: 109081 - protein, 290 aa, Unknown
  Bacterial polypetide isolated from the Sargasso Sea
KNIFKKVHLVETADLTKKEIEYILNEAKKYILYNKKRIKNMNILEGRTIFNLFFEDSTRTRTSFEVAAKRLGADLINVAVKDSSINKGETLLDTMTTINSMNPDVLIVRHPEEGISKKISETVDASIINAGDGSHEHPTQALLDALTIKNKFNNFSKLKIAICGDILHSRVARSNIIILSKLGSKINVVGPKEWLPKNLRKLPVRVFTDMRKGLENCDIVMMLRIQKERIVGKIMPDERSYFKKYGLDYNKLKYAKKNAFVMHPGPMNRGVEIESKLADDITISLIQEQV

SEQ ID NO: 109082 - protein, 296 aa, Unknown
  Bacterial polypetide isolated from the Sargasso Sea
ALQGTLVTSLFFEASTRTKNSFELAAKRLSADVQTFAPSSSSLTKGETIIDTAITYSAMGADTLVIRHSSSYITFEIAKKLDAINSKTSVLNAGDGLHSHPSQGLLDIYTLIKFFSQKTLNPEVLNSKKILIIGDVNHSRVARSNLWALSAFGADIILCGPKTLIPDEFINFLKTPAPNQTEDPVKSRGSIIISRSLEESIKIADAIIVLRLQKERMMENLLSSIDSYSLDYGLTPEKLSLNNKEIPILHPGPINRDIEISSKVVDQYPNCLINNQVANGIPIRKALLYLLQKHNK

SEQ ID NO: 109083 - protein, 256 aa, Unknown
  Bacterial polypetide isolated from the Sargasso Sea
MAVIKKFSAVKKIQKHLLGIQNLSINEAKLILEEAKNFIKLNRSVSKKLDLLRGKTQINLFFEPSTRTQSSFELAGKRLGADVMTMNVGNSSLKKGETILDTAMSLNAMHPDIIVVRHQDSGAPNLLSQKVNCTVINAGDGLREHPTQALLDALTIINRKGKIEGLKIAICGDILHSRVARSNIYLLNMLGAEVNVIAPKTLLPNSVSKLGVKGFTNMKEGLASCDIVMMLRLQNERMTGSFLPSKREYYEYFGLT

SEQ ID NO: 109084 - protein, 182 aa, Unknown
  Bacterial polypetide isolated from the Sargasso Sea
MCSNKCWRRLREHPTQALLDALTIINRKGKIEGLKIAICGDILHSRVARSNIYLLNMLGAEINVIAPKTLMPSSINKLGVKGFTNMKKGLKSCDIVMMLRLQNERMKGSFLPSKREYYEYFGLTPDKLKFAKKDALIMHPGPMNRGVEIDTKLADDINVSLVKEQVELGVAVRMACLKLYCK

SEQ ID NO: 109085 - protein, 206 aa, Unknown
  Bacterial polypetide isolated from the Sargasso Sea
MHPDIIVVRHQDSGASNLLSQKVNCSVLNAGDGRREHPTQALLDALTIIDRKKKIEGLKIAICGDIVHSRVARSNIYLLNMLGAEVNIIGPSNLMPKDIDKLGVKTFSDMKKGIKDCDIVMMLRLQNERMTSSFLSSNREYYEYYGLTPDKLEFAKEDALIMHPGPMNRGIEIDTKLADDINKSVIKEQVELGVAVRMACLKIFCE

SEQ ID NO: 109086 - protein, 191 aa, Unknown
  Bacterial polypetide isolated from the Sargasso Sea
MATSFKKAIKISQKNLLGIQDLSISDINVILEDSKQFISLNKSKNKKLDILRGKTQINLFFEPSTRTQSSFELAGKRLGADVMSMNIVNSAIKKGETLIDTAMTLNAMHPDIIVIRHQDSGACNLLSQKVNCAVINAGDGRREHPTQALLDALTIIDRKKKIQGLKIAICGDILHSRVARSNIYLLNMLGA

SEQ ID NO: 109087 - protein, 314 aa, Unknown
  Bacterial polypetide isolated from the Sargasso Sea
MAVIKKFSAVKKIQKHLLGIQNLSIQEANLILSEAKNFIKLNRSASKKLDLLRGKTQINLFFEPSTRTHSSFELAGKRLGADVMTMNVGNSSLKKGETILDTAMSLNAMHPDIIVVRHQDSGAPNLLSQKVNCTVINAGDGLREHPTQALLDALTIINRKGKIEGLKIAICGDILHSRVARSNIYLLNMLGAEVNVIAPKTLMPTSINKLGVKGFTNMREGLKACDIVMMLRLQNERMTGSFLPSKREYYEYFGLTPDKLKLAKKDALIMHPGPMNRGVEIDTKLADDINVSLVKEQVELGVAIRMACLKLYCK

SEQ ID NO: 109088 - protein, 334 aa, Unknown
  Bacterial polypetide isolated from the Sargasso Sea
MSFKGEHILSVKQFDRDKIQQVFDIARSMEPYAKRQKRTTVLEGAILGNLFFEPSTRTRVSFGCAFNLLGGEVRETTGMQSSALSKGESLFDTARVISSYSDVIAMRHPQAGSVAEFAEGSRVPVLNGGDGANEHPTQALLDLFTIEKELAASQQPIDGMHIAMIGDLKFGRTVHSLSKLLALYKNIQFTLIAPNELAMPDDIVSLIENAGHRVTVTDQLAGHLNADIVYQTRIQEERFPSQEEANKYRGKFRLNQDIYTKHCKSNTVIMHPLPRDSRIEANELDNDLNLNPNLAIFRQADNGVLVRMALFALTLGVEQLVTKYEREVPWYSNK

SEQ ID NO: 109089 - protein, 293 aa, Unknown
  Bacterial polypetide isolated from the Sargasso Sea
HILNESKKYISFNKKKIKKINILEGRTIFNLFFEDSTRTRTSFEVAAKRLGADLINVVVKDSSINKGETLLDTMTTINSMNPDILIVRHPEEGISKKISKTVDASVINAGDGSHEHPTQALLDALTIKNKFNNFAKLKIAICGDILHSRVARSNIIILSKLGANINVIGPKEWLPKNINKLPVNVFTDMKKGLKNCDIVMMLRIQKERIVGKIMPNQKTYFKKYGLDYNKLKYAKKNAFVMHPGPMNRGVEIDSTLADDITRSLIQEQVAMGVAVRMACLDLIIKNRDIRVYN

SEQ ID NO: 109090 - protein, 313 aa, Unknown
  Bacterial polypetide isolated from the Sargasso Sea
MAIKTDKAIKISQKHLLGIQDLSINDVNLILDEAQTFIKLNQSKNKKIDALRGKTQINLFFEPSTRTQSSFELAGKRLGADVMSMNMANSAIKKGETLIDTAMTLNAMHPDIIVIRHQDSGACNLLSQKVNCAVLNAGDGRREHPTQALLDALTIINRKKKIEGLKIAICGDILHSRVARSNIYLLNMLGAEVNIVAPTNLMPKEIEKFGVSTFTDMKKGLNDCDIVMMLRLQNERMTSSYLSSNREYYEYYGLTPDKLEHAKSDALIMHPGPMNRGIEIDTMLADDINKSVIKEQVELGVAVRMACLKMFCL

SEQ ID NO: 109091 - protein, 298 aa, Unknown
  Bacterial polypetide isolated from the Sargasso Sea
MLGIQELSVNDVNIILNEAQTFISINRSKNKKIDVLSGKTQINLFFEPSTRTQSSFELAGKRLGADVMSMNMGNSAIKKGETLIDTAMTLNAMHPDIIVIRHQDSGACNLLSQKVNCVVLNAGDGRREHPTQALLDALTIINRKDKIQGLKIAICGDILHSRVARSNIYLLTMLGAEVNIVAPTNLMPKEVEKFGVNTFTDMKKGLKDCDIVMMLRLQNERMTSSFLSSNREYYEYYGLTPDKLDHAKPDALIMHPGPMNRGIEIDTRLADDINKSVIKEQVELGVAVRMACLKIFCE

SEQ ID NO: 109092 - protein, 330 aa, Unknown
  Bacterial polypetide isolated from the Sargasso Sea
IHTLANFSIEDYESVFELANRFDALKNAGTKKIPALQGTLVTSLFFEASTRTKNSFELAAKRLSADVQTFAPSSSSLTKGETIIDTAITYSAMGADTLVIRHSSSYITFEIAKKLDAINAKTSVLNAGDGLHSHPSQGLLDIYTLIKFFSKKTLNPEVLNSKKILIIGDVNHSRVARSNLWALSAFGADIILCGPKTLIPDEFINFLKPPAPNQTKDPVKSRGSITISRSLEESIKIADAIIVLRLQKERMMENLLSSIDSYSLDYGLTPEKLSLNKKEIPILHPGPINRDIEISSEVVDQYPNCLINNQVANGIPIRMALLYLLQKHNK

SEQ ID NO: 109093 - protein, 174 aa, Unknown
  Bacterial polypetide isolated from the Sargasso Sea
GRREHPTQALLDALTIRNRKKKIQGLKIAICGDILHSRVARSNIYLLTMLGAEVNIVAPSNLMPKEIEKFGVNTFTDMKKGLKDCDIVMMLRLQNERMTSSYLSSNREYYEYYGLTPDKLDHAKSDALIMHPGPMNRGIEIDTRLADDINKSVIKEQVELGVAVRMACLKIFCE

SEQ ID NO: 109094 - protein, 314 aa, Unknown
  Bacterial polypetide isolated from the Sargasso Sea
MAVIKKTSAIKNSPKHLLGIQNLSILEAQKILNEAKAFIKLNRSNTKKLDTLRGKTQINLFFEPSTRTQSSFDLAGKRLGADVMTMNMSNSALKKGETLIDTAMTLNAMHPDLIVVRHQDSGAPNLLSQKVNCAVINAGDGRREHPTQALLDALTIINRKGKIEGLKIAICGDIKHSRVARSNIYLMNMLGAEVNVIAPKTLMPDSIEQLGVKAFTSMKKGLESCDIVMMLRLQNERMKGSFLPSKREYYEYFGLTPEKLKFASKDALVMHPGPMNRGVEIDTKLADDINVSLVKEQVELGVAVRMACLKLYCK

SEQ ID NO: 109095 - protein, 313 aa, Unknown
  Bacterial polypetide isolated from the Sargasso Sea
MATKSNKAIKISQKHLLGIQDLSINDVNIILNQAKEFIDLNRSKNKKLDTLKGKTQINLFFEPSTRTQSSFDLAGKRLGADVMSMNITNSAIKKGETLIDTAMTLNAMHPDIIVIRHQDSGACNLLSQKVNCAVLNAGDGRREHPTQALLDALTIINRKKKIEGLRIAICGDILHSRVARSNIYLLNMLGAEVNIVAPSNLMPKDIEKFGVNIFSDMKKGVKDCDIVMMLRLQNERMTSSFLSSNREYYEYYGLSPDKLNYAKDDALIMHPGPMNRGIEIDTKLADDINKSVIKEQVELGVAVRMACLKIFCA

SEQ ID NO: 109096 - protein, 256 aa, Unknown
  Bacterial polypetide isolated from the Sargasso Sea
NLFFEPSTRTQSSFDLAGKRLGADVMSMNIVNSAIKKGETLIDTAMTLNAMHPDIIVIRHQDSGACNLLSQKVNCAVLNAGDGRREHPTQALLDALTIINRKKKIEGLRIAICGDIVHSRVARSNIYLLNMLGAEVNIVAPSNLMPKDIEKLGVNIFSDMKKGLKDCDIVMMLRLQNERMTSSFLSSNREYYEYYGLTPDKLNYAKDDALIMHPGPMNRGIEIDTNLADDINKSVIKEQVELGVAVRMACLKIFCI

SEQ ID NO: 109097 - protein, 200 aa, Unknown
  Bacterial polypetide isolated from the Sargasso Sea
MAVKKNITAIKNTPKHLLGIQNLSILEAKSILDEAKKFIKLNRSNSKKLDILRGKTQINLFFEPSTRTQSSFDLAGKRLGADVMSMNMDNSALKKGETLIDTAMTLNAMHPDLIVIRHQDSGAPNLLSQKVNCAVINAGDGRREHPTQALLDALTIINRIGKIEGLKIAICGDILHSRVARSNIYLMNMLGAEVNVIAPK

SEQ ID NO: 109098 - protein, 300 aa, Unknown
  Bacterial polypetide isolated from the Sargasso Sea
MSIEGMPKTEIVSLLERADYFADIEISKIEKTLNGYVILNVFFENSTRTRVSFELAGRRLGAEVINISVNMSSIKKGESLLDTANTLSAMRPDVLIVRHPDSGAPKLFSEYLDCSIVNAGDGRHEHPTQALLDALTIKRRLGRIEGLKIAICGDISNSRVARSNIHLLTTLGAQVRCIAPPTLMPKDLSNLGVDCFDNLEEGIKNTNVVMLLRLQNERMSGTETPSKREYFHYYGLDNKKLVLADTKAVIMHPGPMNRGVEIASNLADDENRSLIKMQVEMGVAIRMAAIESLHNKKYAR

SEQ ID NO: 109099 - protein, 313 aa, Unknown
  Bacterial polypetide isolated from the Sargasso Sea
MRKLSVDHLHGIKFLNKADVDLIFDTALNFKEVINRPIKKVPTLRDITIANLFFENSTRTKVSFELAQKRLGADVINFSSSSSSVKKGESLIDTVNNILAMKVDMIVLRHPNPGSSILLSKHTESCIINAGDGSHEHPTQALLDSFSIFEKIGDLKDKNILIVGDILHSRVALSNLYLLNLLGANVKISCPLSLVPKDIEKLNVSVEPDIQKALRWCDAVNVLRVQRERMIKSYFPDNREYSMLFGLDENKISSIKKDILILHPGPINRGVEITSNLVESNNSIILEQVENGVAIRMAIMYLLASKLNFSINE

SEQ ID NO: 109100 - protein, 298 aa, Unknown
  Bacterial polypetide isolated from the Sargasso Sea
MLGIQDLSINDVNFILEEAHTFIKINQSKNKKIDVLRGKTQINLFFEPSTRTQSSFELAGKRLGADVMSMNISNSAIKKGETLIDTAMTLNAMHPDIIVVRHQDSGACNLLSQKVNCAVLNAGDGRREHPTQALLDALTIITRKNKIEGLKIAICGDILHSRVARSNIYLLNMLGAEVNIVAPTNLMPKEIEKFGVNTFTDMKKGLKDCDIVMMLRLQNERMTSSYLSSNREYYEYFGLTPDKLEHAKSDALIMHPGPMNRGIEIDTILADDINKSVIKEQVELGVAVRMACLKIFCR

SEQ ID NO: 109101 - protein, 307 aa, Unknown
  Bacterial polypetide isolated from the Sargasso Sea
MTKKKHLLGIEHLSSQEINKILDLAEDYARLNRSRSVSKKPMAGMTQINMFFENSTRTQASFEIAGKRLGADVMTIDVKSSSISKGETLLDTAMTLNAMNPDLIVVRHPNSGAVQLLAEKVNCVVINAGDGRHEHPTQALLDALTIKTKKGRFHRLIVAICGDINHSRVARSNIFLLGKMQNRIRLIGPSTLLPETFSDLGVETSCNMAEGLQDADVIMMLRLQKERMGDGLIPSEREYFHRYGLDQKKLLHAKDDAIVMHPGPMNRGVEIDGMIADDITRSVIQQQVEMGVAVRMAAIELLIDQKL

SEQ ID NO: 109102 - protein, 312 aa, Unknown
  Bacterial polypetide isolated from the Sargasso Sea
MKINHSIQIQDNKLKHFLNIKSLPKAHILEIISRAEDIHNNNKISKYSNKVVASLFFEPSTRTKTTFELASKKISADFINIDISNSSTSKGESILDMIKTIEAMSCQMFVVRHSVPGTAHYIAESVSNNISVINAGDGSNEHPTQAMLDMFTIKKHKGRFDDLKVSIVGDILHSRVAKSLIYSLNILGTREINIVGPESLIPENYSKMSVNYFSDMNKGIEDADVIIMLRLQKERMHDALISMDSYYDDYGLNKNRLEYAKSDVIVMHPGPINRGIEIESSVADGPNSVILNQVSYGISVRMAIMSMLFDNN

SEQ ID NO: 109103 - protein, 297 aa, Unknown
  Bacterial polypetide isolated from the Sargasso Sea
MGIQDLSINDVKNILNEASKFIDLNRSRNKKLDTLKGKTQINLFFEPSTRTQSSFDLAGKRLGADVMSMNITNSAIKKGETLIDTAMTLNAMHPDIIVIRHQDSGACNLLSQKVNCAVINAGDGRREHPTQALLDALTIMNRKKNIEGLKIAICGDILHSRVARSNIYLLNMLGAEVNIIAPSNLMPKKIEKLGANIFTDMKKGVKDCDIVMMLRLQNERMTSSFLSSNREYYEYYGLTPDKLNQAKDDALIMHPGPMNRGIEIDTNLADDINKSVIKEQVELGVAVRMACLKIFCN

SEQ ID NO: 109104 - protein, 311 aa, Unknown
  Bacterial polypetide isolated from the Sargasso Sea
MLKQKHLLGLEDYPAKDIQTIIDTAFNFREVLDRPIKKVPSLQGVTIVNLFFENSTRTRISFELAQKRLSADTVNFSASSSSLKKGESFKDTAQNIEAMKIDAVVMRHPTPGAPKHLTQFIDAIIINAGDGTHEHPTQAILDMMSLYEKFGRLDGLKIGIIGDISHSRVALSNIYGLTIMGAEIKVCGPPNLIPNFLQDMDVKYNSSLDEVIEWADALNVLRIQKERMGRGLIPSTREYRATFGITDERLKKHKKEIVIMHPGPMNRGVEIDGVIADSDQAIILDQVLNGVASRMAILYLLCGGKVKHGDD

SEQ ID NO: 109105 - protein, 314 aa, Unknown
  Bacterial polypetide isolated from the Sargasso Sea
MATEKKVSAIKNTPKHLLGIQNLSILEAKEILTEAKSFIKLNRGSSKKLDVLRGKTQINLFFEPSTRTQSSFDLAGKRLGADVMTMNMGNSALKKGETLIDTAMTLNAMHPDIIVIRHQDSGAPNLLSQKVNCAVINAGDGRREHPTQALLDALTIINRKGKIEGLKIAICGDILHSRVARSNIYLMNMLGAEVNVIAPKTLMPKGIDSLGVKSFTDMKKGLDECDIVMMLRLQNERMQGSFLPSKREYYEFFGLTPEKLKFAKKDALLMHPGPMNRGVEIDTKLADDINVSLVKEQVELGVAVRMACLKLYCK

SEQ ID NO: 109106 - protein, 314 aa, Unknown
  Bacterial polypetide isolated from the Sargasso Sea
MAINSNKAIKISKKHLLGIQDLTVSDVNLILSESKKFISVNKSKNKKVDILKGKTQINLFFEPSTRTQSSFELAGKRLGADVMSMNITNSAIKKGETLIDTAMTLNAMHPDIIVVRHQDSGACNLLSQKVNCAVLNAGDGRREHPTQALLDALTIIDRKNKIQGLRIAICGDILHSRVARSNIYLLNMLGAEINIVAPSNLLPKDINKLGVNTFSDMKKGLKDCDIVMMLRLQNERMTSSFLSSNREYYEYYGLTPDKLEEAKNDALIMHPGPMNRGIEIDTRLADDINKSVIKEQVELGVAVRMACLKIFCEK

SEQ ID NO: 109107 - protein, 301 aa, Unknown
  Bacterial polypetide isolated from the Sargasso Sea
MANNLLSINDLLKKDILELIEFSNNFIDDEGNFRKENLFPDKIVANVFCEPSTRTKSSFAIAANNLGCSVIDFDIENSSVQKGESIFETVDALNLMGVDLCVLRHPESVIRELAECLPKMVFINAGEGSISHPTQALLDIKTIIDHKENLDGLNIVIVGDLDHSRVTSSFVEGVSNFDLGSLIFCGHPEMCTKYQNPKIGKYEFHLETALENADVVMALRIQFERFEKELNLDLETYKSEYQLSSEKLESAKGDAIIMHPGPVNYVEITEAVYDSENSVIRQQVANGVAIRMAVLSRFLGS

SEQ ID NO: 109108 - protein, 312 aa, Unknown
  Bacterial polypetide isolated from the Sargasso Sea
MLENIKIPKISQTHLHGIKNLSIEDINNILELSKIFKEHNKEKDKKIPILKGRTIINLFFEPSTRTLISFEIAAKRLGADVINMNIEGSSLRKGESLFDTAQTLGAMNPDLVIIRHGENDASKEIAKILECPVINAGEGVNEHPTQALLDAYTIMNHNRKLNDITVSICGDLEHSRVARSNYYLLNKMKSKVRFVFPDYFKPKDLDKYDVETFTNLEEGIKDADIVMMLRIQNERIKDLNLPSADDYFRSFGLTYEKLKLAKPEVLVLHPGPINRGVEIENELADDVNKSVITEQVENGVAVRMACLSIMVK

SEQ ID NO: 109109 - protein, 299 aa, Unknown
  Bacterial polypetide isolated from the Sargasso Sea
MLGIQDLSINDVKTILDEASKFIELNRSKNKKLDTLKGKTQINLFFEPSTRTQSSFDLAGKRLGADVMSMNITNSAIKKGETLIDTAMTLNAMHPDIIVIRHQDSGACNLLSQKVNCAVLNAGDGRREHPTQALLDALTIINRKKTIEGLKIAICGDILHSRVARSNIYLLNMLGAEVNIVAPSNLMPKDIERLGVNIFSDMKKGVKDCDIVMMLRLQNERMTSSFLSSNREYYEYYGLTPDKLEKAKKDAIIMHPGPMNRGIEIDTKLADDINKSVIKEQVELGVAVRMACLKIFCEK

SEQ ID NO: 109110 - protein, 341 aa, Unknown
  Bacterial polypetide isolated from the Sargasso Sea
MNTATQASQDSADGATERFRYGFLKGNPQLTKNGELKHLLSIEGLPKAIVNHILDTADQFVSVTDREVKKVPLLRGKSVFNLFFENSTRTRTTFEIAATRLSADVLNLNINASSTSKGESLLDTINNLSAMHADMFVVRHASSGAPYLIAQHCAPHVHVINAGDGRHAHPTQGLLDMYTIRHYKKDFTNLRVAIVGDILHSRVARSDIHALTTLGVPEVRAIGPRTLLPGGLEQMGVRVFHNLDEGLKDVDVIIMLRLQNERMSGALLPSAQEYFKSWGLTPERLALAKPDAIVMHPGPMNRGVEIDSQVADGPQSVILNQVTFGIAVRMAVMGIVAGNHD

SEQ ID NO: 109111 - protein, 298 aa, Unknown
  Bacterial polypetide isolated from the Sargasso Sea
MLGIQDLSVSDINIILDEAQTFIKVNRSKNKKIDVLRGKTQINLFFEPSTRTQSSFELAGKRLGADVMSMNMGNSAIKKGETLIDTAMTLNAMHPDIIVIRHQDSGACNLLSQKVNCVVLNAGDGRREHPTQALLDALTIINRKDKIQGLKIAICGDILHSRVARSNIYLLTMLGAEVNIVAPTNLMPKEIEKFGVNTFTDMKKGLKDCDIVMMLRLQNERMTSSFLSSNREYYEYYGLTPDKLDHAKSDALIMHPGPMNRGIEIDTRLADDINKSVIKEQVELGVAVRMACLKIFCE

SEQ ID NO: 109112 - protein, 318 aa, Unknown
  Bacterial polypetide isolated from the Sargasso Sea
MNINTDIQFENDKLVHFLNIEGLDPKHIHQIIDRANEYSQAEKKKFYDLEGKTVASLFFEPSTRTKTTFELASKKLSADFINIDIANSSTLKGESIIDMIKTLQAMSCDMFVVRHSIAGTPHFIAKEVGNKIAVLNAGDGAHAHPTQALLDMFTIKKYKGDFEGLKVAIVGDILHSRVARSLISCLNILHVTDVRVIGPSVLMPQDLESMKIKYSENLEDGIDNCDVVIMLRLQKERMHEALISEVDYYNTYGLTNKKLKASKKDVIVMHPGPINRGIEIDSEVADGEHSVILDQVSSGISVRMAIMSIIIDNRKNEK

SEQ ID NO: 109113 - protein, 312 aa, Unknown
  Bacterial polypetide isolated from the Sargasso Sea
MVEKANIPEISQKHLHGIKNLSIEDINKILKLSNFFKLKNKEKDKHYPILKGRTIINLFFEPSTRTLISFEIAAKRLGADVINMNIEGSSLRKGESLRDTAQTLGAMNPDLVVIRHGIDNASKQIAEIINCPVINAGEGINEHPTQALLDAYTIVNNKRSLKNITVAICGDLEHSRVARSNYYLLKKMESNVRFVYPEFFKPKDLNKYDVETYTNLAEGITGTDIVMMLRIQNERITDTNLPSKESYFEEFGLTYEKLKLAKPDALVLHPGPINRNVEIEDRLADDLDKSVINEQVENGVAVRMACLSIMVK

SEQ ID NO: 109114 - protein, 306 aa, Unknown
  Bacterial polypetide isolated from the Sargasso Sea
MTNPLYKKHVISISDLTRPDMELVVATAQRLKAEPDTRLLKDKLVASCFFEASTRTRLSFETAVQRLGGNIIGFADGGNTSAKKGETLADSIKIIGSYTDAVVMRHPKEGAARLASEFSRVPVINGGDGSNQHPTQTLLDLFSIHETQGKLDGLNVAFVGDLKYGRTVHSLAQALSLFNCRFFFISPEALAMPDYICEELEEKGIQFSVHETMEEVMPELDILYMTRVQKERFDETEYKHMAAKFVLEVATLEGAKPTMKILHPLPRVDEIDVAVDKTPHAYYFQQAENGVYARQALLALVLNETV

SEQ ID NO: 109115 - protein, 343 aa, Unknown
  Bacterial polypetide isolated from the Sargasso Sea
MTTDTTGRTGNPAAAASPDRFRYGFLKGNPQLTKNGELKHLLSIEGLPRSIVNHILDTAEQFVSVTDREVKKVPLLRGKSVFNLFFENSTRTRTTFEIAATRLSADVLNLNINASSTSKGESLLDTINNLSAMHADLFVVRHASSGAPYLIAEHCAPHVHVINAGDGRHAHPTQGLLDMYTIRHYKRDFTKLRVAIVGDILHSRVARSDIHALTTLGVPEVRAIGPRTLLPGGLEQMGVKVFHNLDEGLKGVDVIIMLRLQNERMSGALLPSAQEYFKTWGLTPERLALAAPDAIVMHPGPMNRGVEIDSQVADGPQSVILNQVTFGIAVRMAVMGIVAGNSD

SEQ ID NO: 109116 - protein, 298 aa, Unknown
  Bacterial polypetide isolated from the Sargasso Sea
MLGIQDLSVNDVNIILNEASKFIELNKSKNKKLDILKGKTQINLFFEPSTRTQSSFELAGKRLGADVMSMNITNSAIKKGETLIDTAMTLNAMHPDIIVIRHQDSGACNLLSQKVNCAVLNAGDGRREHPTQALLDALTIINRRKKIEGLKIAICGDILHSRVARSNIYLLNMLGAEVNIVAPTNLMPNEIERFGVNIYSDMKKGVKDCDIVMMLRLQNERMTSSFLSSNREYYEYYGLTPDKIKFAKEDALIMHPGPMNRGIEIDTNLADDINKSVIKEQVELGVAVRMACLKIFCE

SEQ ID NO: 109117 - protein, 314 aa, Unknown
  Bacterial polypetide isolated from the Sargasso Sea
MATEKKVTAIKNTPKHLLGIQNLSVLEAKEILTEAKSFIKLNRGSSKKLDVLRGKTQINLFFEPSTRTQSSFDLAGKRLGADVMTMNMGNSALKKGETLIDTAMTLNAMHPDIIVIRHQDSGAPNLLSQKVNCTVINAGDGRREHPTQALLDALTIINRKGNIEGLKIAICGDILHSRVARSNIYLMNMLGAEVNVIAPKTLMPNGIDNLGVKSFTDMKKGLDGCDIVMMLRLQNERMQGSFLPSKREYYEFFGLTPEKLKFAKKDALLMHPGPMNRGVEIDTKLADDINVSLVKEQVELGVAVRMACLKLYCK

SEQ ID NO: 109118 - protein, 301 aa, Unknown
  Bacterial polypetide isolated from the Sargasso Sea
MAKDLLSINDLTKDEILELINFSGSFIDDEGNFRKENLFPDKIVANVFFEPSTRTKMSFAVAAGNLGCNVLDFNIDSSSVQKGESIFETIDALNLMGVDLCVLRHPDSVIRELAEHMPDMVFVNAGEGSISHPTQALLDMKTILDHKNSFDGLKIVIIGDLDHSRVTSSFVEGISNFDIESLSFCGHPEMCTNYQNTDVGKFEPDIERALEDADVVMTLRIQYERFEKDLNLDLDTYKSAYQLSSEKLGFAKSDAIIMHPGPVNYVEITEAVYDSENSVIRQQIANGVAIRMAVLSRFLSR

SEQ ID NO: 109119 - protein, 304 aa, Unknown
  Bacterial polypetide isolated from the Sargasso Sea
MKNLLYLNQLSKDEINQILDLSDHYLNSNEQHEFENLLKNQSIASLFFEPSTRTSASFQVAAKKLGAETILIDENKSSATKGETVLDTIRNLEAMGVRAFIIRTGDINLFGPLIDDVGPDTHLISAGESSVSHPTQGLLDLLTIRQEKGSFEGLKVVIMGDISHSRVARSLTEGLKIMNTGNVTLISPDEFKPDMANFPNTQFEEDPKQGLCDADVIVTLRVQKERIESDESSLSLEEYSNEYQLSQEKLALSKPDAIVMHPGPMNRGIEISNEVADGKQSVILKQVENGVAVRMAVLSEILKQ

SEQ ID NO: 109120 - protein, 258 aa, Unknown
  Bacterial polypetide isolated from the Sargasso Sea
FLSLVLVLKQLFELASKRLGADFINIDIANSSTSKGESVLDMIKTLEAMQCSMFIVRHNTSGIPHYIAKEVGEKISVINAGDGTNAHPTQAMLDMYTIKKYKGPFEDLNIAIVGDILHSRVAKSLIASLNILKVKSINIIGPEILMPKNIDQLNVTYFNDLEKGIHETDVIIMLRLQKERMHEALISTDDYYKKYGLTKDKIKKAKQDVIVMHPGPINRGIEIDSDVADGPNSVILDQVSAGISIRMAVMSLILKNKK

SEQ ID NO: 109121 - protein, 214 aa, Unknown
  Bacterial polypetide isolated from the Sargasso Sea
VLVVRHADSGSVHLLAEKVNCSVINAGDGSHEHPTQALLDALAIRRRLGRGLEGLVVAICGDIAHSRVARSNIHLLSIMGARVRAVAPPTLIPEGLERLGVEIHNDMSSGLSDADIIMMLRLQTERMRGSYVPSIREYYELYGLNADKLKMAKPDALIMHPGPMNRGVEIDSELADDIDRSLIREQVEMGVAVRMACLQALVDTQTIPWAKNQS

SEQ ID NO: 109122 - protein, 312 aa, Unknown
  Bacterial polypetide isolated from the Sargasso Sea
MATKTKAVKISQKHLLGIQDLSINDVKLILDEASKFIELNKSKNKKLDILKGKTQINLFFEPSTRTQSSFELAGKRLGADVMSMNITNSAIKKGETLIDTAMTLNAMHPDIIVIRHQDSGACNLLSQKVNCSVLNAGDGRREHPTQALLDALTIINRKKKIEGLKIAICGDILHSRVARSNIYLLNMLGAEVNIVTPTNLLPTDIEKFGVNIYSDMKKGVKDCDIVMMLRLQNERMNSSFLSSNREYYEYYGLTPDKLNHAKKDCIIMHPGPMNRGIEIDTKLADDTNMSVVKEQVELGVAIRMACLKIFCE

SEQ ID NO: 109123 - protein, 304 aa, Unknown
  Bacterial polypetide isolated from the Sargasso Sea
MQEQKSYRALQGTLVTSLFFEASTRTKNSFELAAKRLSADVQTFAPSSSSLTKGETIIDTAITYSAMGADTLVIRHSSSYITFEIAKKLDAINSKTSVLNAGDGLHSHPSQGLLDMYTLIKFFSKKTLNPEVLNSKKILIIGDVNHSRVARSNLWALSAFGADIILCGPKTLISDEFIHFLKTPAPNQTEDPVKSRGSLTISRSLEESIKIADAIVVLRLQKERMIENLLSSIDSYSLDYGLTLEKLSLNNKGIPILHPGPINRDIEISSQVVDRYPNCLINNQVANGIPIRMALLYLLQKHNK

SEQ ID NO: 109124 - protein, 315 aa, Unknown
  Bacterial polypetide isolated from the Sargasso Sea
MKINHDIQLSDGKLKHFLNINNLPKSIIEDIINRAEEFHDNSKITKYTGKVVASLFFEPSTRTKTTFELATKKISSDFINIDIANSSTSKGESIIDMIKTIEAMKCNMFVVRHSVPGTAHFIAESVSSDIAVINAGDGSNEHPTQAMLDMFTIKKHKGSFEDLKISIVGDILHSRVAKSLIFALNTLGAKQINIVGPKKLIPDNYTKMNVKYFEDMSEGISYSDVIIMLRLQKERMHDALISLDTYYDEYGLNQSRMQLAKKDVIVMHPGPINRGVEIESSVADGPNSVILNQVSYGISVRMAIMSILFDNHHAS

SEQ ID NO: 109125 - protein, 313 aa, Unknown
  Bacterial polypetide isolated from the Sargasso Sea
MASTSKKAVKISQKHLLGIQDLSISDINYILSEAKEFILLNKSKNKKLDILRGKTQINLFFEPSTRTQSSFELAGKRLGADVMSMNIVNSAIKKGETLIDTAMTLNAMHPDIIVIRHQDSGACNLLSQKVNCAVLNAGDGRREHPTQALLDALTIIDRKEKIQGLKIAICGDILHSRVARSNIYLLNMLGAEVNIVAPSNLLPKDIDRLGVNTFSDMKEGLKDCDIVMMLRLQNERMTSSFLSSNREYYEYYGLTPDKLNHAKEDALIMHPGPMNRGIEIDTKLADDINKSVIKEQVELGVAVRMACLKIFCE

SEQ ID NO: 109126 - protein, 155 aa, Unknown
  Bacterial polypetide isolated from the Sargasso Sea
KEKIEGLKIAICGDILHSRVARSNIYLLNMLGAEVNVIAPKTLMPKSIKKLGVKGFTNMKEGLKSCDIVMMLRLQNERMAGSFLPSKREYYEYFGLTPDKLKFAKKDALLMHPGPMNRGVEIDTKLADDINVSLVKEQVELGVAIRMACLKLYCK

SEQ ID NO: 109127 - protein, 298 aa, Unknown
  Bacterial polypetide isolated from the Sargasso Sea
MLGIQNLSIKEINLIISEAKNFIRLNRSASKKLDLLRGKTQINLFFEPSTRTQSSFELAGKRLGADVMTMNVGNSSLKKGETILDTAMTLNAMHPDIIVVRHQDSGAPNLLSQKVNCAVINAGDGLREHPTQALLDALTIINRKGKIEGLKIAICGDILHSRVARSNIYLMNMLGAEVNVISPKTLMPVSIEKLGAKAFTDMKKGLDGCDIVMMLRLQNERMQGSFLPSKREYYEFFGLSPEKLKFAKKDALIMHPGPMNRGVEIDTKLADDINVSLVKEQVELGVAVRMACLKLYCK

SEQ ID NO: 109128 - protein, 309 aa, Unknown
  Bacterial polypetide isolated from the Sargasso Sea
MLKSKHLIGLEHFPVSDLNKIIDTSFKFKDILQTESRKAILLKGKTIVNMFFENSTRTKISFSLAEKRLGADSINFSASTSSVKKGETLKDTVQNIESMKIDGAVIRHSHPGSALKLTEYIDGAVINAGDGSHEHPTQAILDMVTLKEKFGKIKGLKVGIVGDILNSRVARSNIFALKKLGAKVVVCGPSTLLPSDAKKLGINITYNLNEVLNWCDAVIALRIQLERMHLGRIPSKREYHSEFGLTFERISKLKKDIVIMHPGPMNRGVEIDSRVADSDNAVILDQVLNGVASRMSILYLLLGEGNIKL

SEQ ID NO: 109129 - protein, 163 aa, Unknown
  Bacterial polypetide isolated from the Sargasso Sea
DALTIINRKKNIEGLKIAICGDILHSRVARSNIYLLTMLGAEVNIIGPTNLLPKDLEKFGVNIFTNMKKGVKDCDIVMMLRLQNERMTSSYLSSNREYYEYYGLTPEKLEFAKNDALIMHPGPMNRGIEIDTMLADDINKSVIKEQVELGVAVRMACLKIFCS

SEQ ID NO: 109130 - protein, 119 aa, Unknown
  Bacterial polypetide isolated from the Sargasso Sea
MAMPQYILDMLNEKGIAWSLHGTIEEVMAEVDILYMTRVQKERLDPSEYANVKAQFVLRASDLNGARANMKVLHPLPRIDEITTDVDKTPHAWYFQQAGNGIFARQALLALVLNSELAL

SEQ ID NO: 109131 - protein, 304 aa, Unknown
  Bacterial polypetide isolated from the Sargasso Sea
MKNLLYLNQLSKDEINQILDLSDHYLNSNEQHEFEDLLKNQSIASLFFEPSTRTSASFQVAAKKLGAETILIDENKSSATKGETVLDTIRNLEAMGVRGFIIRTGDTNLFGPLIDDVGPHTHLISAGESSVSHPTQGLLDLLTIRQEKGSFEGLKVVIMGDISHSRVARSLTEGLKIMNTGNVTLISPEEFKPDMANFPNTQFEEDPKQGLCDADVIVTLRVQKERIESDESSLSLEEYSNEYQLSQEKLALSKPDAIVMHPGPMNRGIEISNEVADGKQSVILKQVENGVAVRMAVLSEILKQ

SEQ ID NO: 109132 - protein, 313 aa, Unknown
  Bacterial polypetide isolated from the Sargasso Sea
MATKSKKAIKISQKHLLGIQDLSVSDVTTILNEASKFIELNKSKNKKIDILKGKTQINLFFEPSTRTQSSFELAGKRLGADVMSMNITNSAIKKGETLIDTAMTLNAMHPDIIVIRHQDSGACNLLSQKVNCAVLNAGDGRREHPTQALLDALTIINRRKKIEGLKIAICGDILHSRVARSNIYLLNMLGAEVNIVAPTNLMPNEIEKFGVNIFSDMKKGVKDCDIVMMLRLQNERMTSSFLSSNREYYEYYGLTPDKIQYAKEDALIMHPGPMNRGIEIDTNLADDINKSVIKEQVELGVAVRMACLKIFCE

SEQ ID NO: 109133 - protein, 296 aa, Unknown
  Bacterial polypetide isolated from the Sargasso Sea
GIQDLSINDVNLILDEANSFIKVNQSKNKKVDVLRGKTQINLFFEPSTRTQSSFELAGKRLGADVMSMNISNSAIKKGETLIDTAMTLNAMHPDIIVIRHQDSGACNLLSQKVNCAVLNAGDGRREHPTQALLDALTIITRKKKIQGLKIAICGDILHSRVARSNIYLLSMLGAEVNIIAPTNLMPKEIEKFGVNTFTDMKKGLKDCDIVMMLRLQNERMTSSYLSSNREYYEYYGLTPDKLEHAKSDALIMHPGPMNRGIEIDTMLADDINKSVIKEQVELGVAVRMACLKIFCT

SEQ ID NO: 109134 - protein, 257 aa, Unknown
  Bacterial polypetide isolated from the Sargasso Sea
MLGIQNLSIQEANLILDEAKNFIKLNRSASKKLDLLRGKTQINLFFEPSTRTQSSFELAGKRLGADVMTMNVVNSSLKKGETILDTAMSLNAMHPDIIVVRHQDSGAPNLLSQKVNCTVINAGDGLREHPTQALLDALTIINRKGKIEGLKIAICGDILHSRVARSNIYLLNMLGAEVNIVAPKTLMPASINKLGVKGFTNMKEGLKSCDIVMMLRLQNERMKGSFLPSKREYYEYFGLTPDKLKLAKKDALIMHPG

SEQ ID NO: 109135 - protein, 219 aa, Unknown
  Bacterial polypetide isolated from the Sargasso Sea
TLIDTAMTLNAMHPDIIVIRHQDSGAPNLLSQKVNCAVINAGDGRREHPTQALLDALTIINRKGKVEGLKIAICGDILHSRVARSNIYLMNMLGAEVNVVAPKTLLPHSIERLGVKAFTNMKKGLESCDIVMMLRLQNERMHGSFLPSAREYYEYFGLTPDKLNKAKKDALIMHPGPMNRGVEIDTNLADDINRSVIREQVELGVAVRMACLKIFCKRN

SEQ ID NO: 109136 - protein, 288 aa, Unknown
  Bacterial polypetide isolated from the Sargasso Sea
NRYFILVQRHTSDRKQKSYSSQGKTVVNMFFENSTRTKISFSLAEKRLGADSINFSASTSSVKKGETLKDTVQNIESMKIDGAVIRHGHPGSALKLTEYIDGAVINAGDGSHEHPTQAILDMVTLKEKFGKIKGLKVGIIGDILNSRVARSDIFALKKLGAEVVVCGPSTLLPSDAKKLGINITYNLDEVLNWCDAVIALRIQLERMHLGRIPSKREYHSEFGLTFERISKLKKDIVIMHPGPMNRGVEIDSKVADSDNAVILDQVLNGVASRMSILYLLLGEGDIEI

SEQ ID NO: 109137 - protein, 309 aa, Unknown
  Bacterial polypetide isolated from the Sargasso Sea
MLKSKHLIGLEHFPVSDLNKIIDTSFKFKDILQTESRKAILLKGKTIVNMFFENSTRTKISFSLAEKRLGADSINFSASTSSVKKGETLKDTVQNIESMKIDGAVIRHGHPGSALKLTEYIDGAVINAGDGSHEHPTQAILDMVTLKEKFGKIKGLKVGIIGDILNSRVARSDIFALKKLGAEVVVCGPSTLLPSDAKKLGINITYNLDEVLNWCDAVIALRIQLERMHLGRIPSKREYHSEFGLTFERISKLKKDIVIMHPGPMNRGVEIDSKVADSDNAVILDQVLNGVASRMSILYLLLGGGNMEL

SEQ ID NO: 109138 - protein, 189 aa, Unknown
  Bacterial polypetide isolated from the Sargasso Sea
LLSQKVNCSVLNAGDGRREHPTQALLDALTIINRKKKIEGLKIAICGDILHSRVARSNIYLLNMLGAEVNIVAPSNLMPKDIDKLGVNIFYDMKKGVKDCDIVMMLRLQNERMTSSFLSSNREYYEYYGLSPDKLNYAKDDALIMHPGPMNRGIEIDTKLADDINKSVIKEQVELGVAVRMACLKIFCT

SEQ ID NO: 109139 - protein, 202 aa, Unknown
  Bacterial polypetide isolated from the Sargasso Sea
MSDFTGNHILSVNQFDREAIEKVFSVANSMQPYAKRQKRTTVLDGAILGNLFFEPSTRTRVSFGTAFNLLGGEVRETTGMSSSALAKGESLYDTARVLSGYSDIIAMRHPAAGSVAEFAEGSRVPVINGGDGANEHPTQALLDLFTIKRELEYNGHGIDGLHIAMIGDLRYGRTVHSLSRLLCLFKNIRFTLISPKGAGHGL

SEQ ID NO: 109140 - protein, 311 aa, Unknown
  Bacterial polypetide isolated from the Sargasso Sea
MASTKAIKISKKHLLGIQDLNISDVKFILTEAKQFIQLNRSKNKKIDILRGKTQINLFFEPSTRTQSSFELAGKRLGADVMSMNITNSAIKKGETLIDTAMTLNAMHPDIIVIRHQDSGACNLLSQKVNCAVINAGDGRREHPTQALLDALTILDRKKKIEGLKIAICGDILHSRVARSNIYLLNMLGADVNIIAPTNLMPKDINKLGVNIFSNMKDGLKECDIVMMLRLQNERMTSSFLSSNREYYEYYGLTPDKLEYAKKDALIMHPGPMNRGIEIDTKLADDINKSVIKEQVELGVAVRMACLKIFCE

SEQ ID NO: 109141 - protein, 236 aa, Unknown
  Bacterial polypetide isolated from the Sargasso Sea
MATAKKVSAIKNTPKHLLGIQNLSVLEAKEILTEAKSFIKLNRGSSKKLDILRGKTQINLFFEPSTRTQSSFDLAGKRLGADVMTMNMGNSALKKGETLIDTAMTLNAMHPDIIVIRHQDSGAPNLLSQKVNCTVINAGDGRREHPTQALLDALTIINRKDNIEGLKIAICGDILHSRVARSNIYLMNMLGAEVNVIAPKTLMPTGIDNLGVKSFTDMKKGLDGCDIVMMLRLQNE

SEQ ID NO: 109142 - protein, 295 aa, Unknown
  Bacterial polypetide isolated from the Sargasso Sea
IQDLSIKDVNIILDEASKFIELNKSKNKKLDILKGKTQINLFFEPSTRTQSSFELAGKRLGADVMSMNITNSAIKKGETLIDTAMTLNAMHPDIIVIRHQDSGACNLLSQKVNCAVLNAGDGRREHPTQALLDALTIINRKKKIEGLKVAICGDILHSRVARSNIYLLNMLGAEVNVVAPTNLLPTDIDKFGVNVFSDMRKGVKDCDIVMMLRLQNERMTSSFLSSNREYYEYYGLTPDKLNHAKKDSLIMHPGPMNRGIEIDTKLADDTNMSVVKEQVELGVAIRMACLKIFCE

SEQ ID NO: 109143 - protein, 305 aa, Unknown
  Bacterial polypetide isolated from the Sargasso Sea
MKNFSQNDIISIRDLSKDNLEEIYSKTNEIIEMKAEERREIARGKTLGYLFFEPSTRTRLSFQSAMALLGGTSFGIADATSSSVQKGESLADTVRIMSGYTDAIVLRHSLDGSSKFAAEVSSKPIINAGSGTEEHPTQAIQDLYTIKKELGKIDGKNIGIVGDLKYGRTVYSLLYGLSNYDVNVHLISPESLKIRSDSTYNLKENLSYTESENLDEYIEDLDVLYVTRIQKERFPDEEEYVKVKGSYVIGQDVVNKMKDDSILLHPLPRIDEISTDVDSSKQAKYFQQAEYGKFTRAAILSLLLQ

SEQ ID NO: 109144 - protein, 297 aa, Unknown
  Bacterial polypetide isolated from the Sargasso Sea
MGIQNLSVQEAKQILKEAKEFINLNRSPSKKLDTLRGKTQINLFFEPSTRTQSSFDLAGKRLGADVMTMNMNNSALKKGETLIDTAMTLNAMHPDLIVIRHQDSGAPNLLSQKVNCAVINAGDGRREHPTQALLDALTIINRKGKIEGLKIAICGDILHSRVARSNVYLMNMLGAEVNVIAPKTLMPKSIERLGVKSFTNMKKGLEGCDIVMMLRLQNERMQGSFLPSKREYYEFFGLTPEKLKYANKDALIMHPGPMNRGVEIDTKLADDINVSLVKEQVELGVAVRMACLKIYCK

SEQ ID NO: 109145 - protein, 192 aa, Unknown
  Bacterial polypetide isolated from the Sargasso Sea
MIDNVGSNTSLISAGEASISHPTQGLLDLLTIRQQKSSFDDLKVVIMGDISHSRVARSLTEGLNILNAANITLISPEEFKPNMANFPNTDFEKDPNKGLSDADVVVALRVQKERIESCENDLSLDQYSKIYQLSQDKLELCKPDAIVMHPGPMNRGVEISNEVADGKQSVILKQVENGVAIRMAVLTEILKQ

SEQ ID NO: 109146 - protein, 134 aa, Unknown
  Bacterial polypetide isolated from the Sargasso Sea
RSNIYLMNMLGAEVNVIAPKTLMPKSIERLGVKSFTNMKKGLDGCDIVMMLRLQNERMQGSFLPSKREYYEYFGLTPEKLKFANKNALIMHPGPMNRGVEIDTKLADDINVSLVKEQVELGVAVRMACLKLYCK

SEQ ID NO: 109147 - protein, 431 aa, Unknown
  Bacterial polypetide isolated from the Sargasso Sea
MTVPQQAFLRDAMRRLNMTREAFASRIGVSRRALDTWLLPDDSQESRGMPEIVERFVSEIVERSVPEGGGYTQSVDNQGLAKQFFFEGKPQLLSVDQFSRESVEALFRVADVMQPIARRHKISRVLEGAVLGNLFFEASTRTRVSFGAAFCRLGGSVCDTTGFTFSSMAKGESIYDTSRVMAGYVDALVIRHPEKGSVAEFARATNLPVINGGDGPGEHPSQALLDLYTIQREFSRLGKIVDGAHIALVGDLKYGRTVHSLVKLLALYRGLKFTLVSPPTLEMPAYIVDQIATNGHVIEQTTDLAAGLRGADVVYATRIQKERFTDESFEGYTPDFQINQALVDSVCKPDTLIMHPLPRDSRPGANDLSVDLNRDPRLAIFRQTDNGIPVRMAIFAVLLGVENLVQHSMRDATWRPPAYLGPEDAVFHGVD

SEQ ID NO: 109148 - protein, 235 aa, Unknown
  Bacterial polypetide isolated from the Sargasso Sea
ADVMSMNISNSAIKKGETLIDTAMTLNAMHPDIIVIRHQDSGACNLLSQKVNCAVLNAGDGRREHPTQALLDALTIITRKNKIEGLRIAICGDILHSRVARSNIYLLNMLGAEVNIIAPTNLMPKEIEKFGVNKFTDMKKGLKDCDIVMMLRLQNERMTSSYLSSNREYYEYYGLTPDKLEHAKSDALIMHPGPMNRGIEIDTILADDINKSVIKEQVELGVAVRMACLKIFCTK

SEQ ID NO: 109149 - protein, 314 aa, Unknown
  Bacterial polypetide isolated from the Sargasso Sea
MAIVKKFSAIKKIQKHLLGIQNLSIQEANLILDEAKNFIKLNRSASKKLDLLRGKTQINLFFEPSTRTQSSFELAGKRLGADVMTMNVGNSSLKKGETILDTAMSLNAMHPDIIVVRHQDSGAPNLLSQKVNCTVINAGDGLREHPTQALLDALTIINRKGKIEGLKIAICGDILHSRVARSNIYLLNMLGAEVNVIAPKTLLPNSISKLGVKGFTNMKEGLASCDIVMMLRLQNERMTGSFLPSKREYYEYFGLTPDKLKLAKKDALIMHPGPMNRGVEIDTKLADDINVSLVKEQVELGVAVRMACLKLYCK

SEQ ID NO: 109150 - protein, 257 aa, Unknown
  Bacterial polypetide isolated from the Sargasso Sea
INLFFEPSTRTQSSFELAGKRLGADVMSMNLNNSAIKKGETLIDTAMTLNAMHPDIIVVRHQDSGASNLLSQKVNCSVLNAGDGRREHPTQALLDALTIIDRKEKIEGLKIAICGDIVHSRVARSNIYLLNMLGAEVNIIAPSNLMPRDIEKLGVNIFSDMKKGIKDCDIVMMLRLQNERMTSSFLSSNREYYEYYGLTPDKLNFAKDDALIMHPGPMNRGIEIDTNLADDINKSVIKEQVELGVAVRMACLKIFCE

SEQ ID NO: 109151 - protein, 210 aa, Unknown
  Bacterial polypetide isolated from the Sargasso Sea
TLNAMHPDIIVIRHQDSGACNLLSQKVNCAVLNAGDGRREHPTQALLDALTIIDRKDKVQGLRIAICGDILHSRVARSNIYLLNMLGAEVNIVAPSNLMPKDIEKLGVNTFSDMKKGLKDCDIVMMLRLQNERMSNSFLSSNREYYEYFGLTPDKLDYAKKDALIMHPGPMNRGIEIDTKLADDINKSVIKEQVELGVAVRMACLKIFCE

SEQ ID NO: 109152 - protein, 258 aa, Unknown
  Bacterial polypetide isolated from the Sargasso Sea
VANVFFEPSTRTKMSFAVAAGNLGCNVLDFNIDSSSIQKGESIIETIDALNLMGVDLCVLRHPDSVIRELAEHMPDMVFINAGEGSIAHPTQALLDMKTIIDHKNSFDGLKIVIIGDLDHSRVTSSFVEGISNFDIESLSFCGHPEMCTNYQNTDVGKFEPDIERALEDADVVMTLRIQYERFKKDLNLDLDTYKSAYQLSSEKLGFAKSDAIIMHPGPVNYVEITEAVYDSENSVIRQQIANGVAIRMAVLSRFLSR

SEQ ID NO: 109153 - protein, 354 aa, Unknown
  Bacterial polypetide isolated from the Sargasso Sea
MPKLKAIRSSTGSKILKDAEKIALKYYSSISSKINIKLKRSKNIFKKIHLVETADLTKKEIEHILDESKKYITFNKRKIKKINVLEGRTIFNLFFEDSTRTRTSFEVAAKRLGADLINVVVKDSSINKGETLLDTMTTINSMNPDVLIVRHPEEGISKKISETVDASVINAGDGSHEHPTQALLDALTIKNKFENFAKLKIAICGDILHSRVARSNITILSKLGAKINVIGPKEWLPKSLNKLPVNVYTEMKKGLQNCDIVMMLRIQKERIVGKIMPNQKTYFKKYGLDYNKLKYAKKNAFVMHPGPMNRGVEIDSKLADDVTRSLIQEQVAMGVAVRMACLDLIIKNRDDFSK

SEQ ID NO: 109154 - protein, 291 aa, Unknown
  Bacterial polypetide isolated from the Sargasso Sea
IIDTGYRFKEVLERPIKKVPSLQGKTIVNLFFENSTRTRISFELAQKRLSADTVNFSASTSSLKKGETFKDTVQNIEAMKIDAVVMRHPTPGSPLHLTKYIDAIIINAGDGTHEHPTQAILDMMSLHEKFGYLKGLKVAIVGDISHSRVALSNIYGLQIMGAEVTLCGPPTLIPTHAEDLGVKVNYNLDEVIEWADAINVLRIQRERMQGGLLPSIREYRTLFGITKERLENHKKEVVILHPGPMNRGVEIDSVVADSDQAIILDQVLNGVASRMAILYLLLGGKQEKEPK

SEQ ID NO: 109155 - protein, 191 aa, Unknown
  Bacterial polypetide isolated from the Sargasso Sea
INLLSQKVNCAVLNAGDGRREHPTQALLDALTIIDRKEKIEGLKIAICGDIVHSRVARSNIYLLNMLGAEVNIIAPSNLMPKDIDKLGVNRFSDMKKGLKDCDIVMMLRLQNERMTSSFLSSNREYYEYYGLTPDKLKFAKDDALIMHPGPMNRGIEIDTNLADDINKSVIKEQVELGVAVRMACLKIFCE

SEQ ID NO: 109156 - protein, 273 aa, Unknown
  Bacterial polypetide isolated from the Sargasso Sea
MANVKKAIKISQKHLLGIQDLSISDVNFILSEAKQFISLNKSKNKKLDVLRGKTQINLFFEPSTRTQSSFELAGKRLGADVMSMNLNNSAIKKGETLIDTAMTLNAMHPDIIVVRHQDSGASNLLSQKVNCAVLNAGDGRREHPTQALLDALTIIDRKEKIEGLKIAICGDIVHSRVARSNIYLLNMLGAEVNIIAPSNLMPKDIDKLGVNRFSDMKKGLKDCDIVMMLRLQNERMTSSFLSSNREYYEYYGLTPDKLDYAKDDALIMHPGPM

SEQ ID NO: 109157 - protein, 310 aa, Unknown
  Bacterial polypetide isolated from the Sargasso Sea
MKNTHLLGLKDYPREDIQTIIDTGFRFKEILDRPIKKVPSLQGKTIVNLFFENSTRTRISFELAQKRLSADTVNFSASTSSLKKGETFKDTVQNIEAMKIDAVVMRHPTPGSPLHLTKYIDAIVINAGDGTHEHPTQAILDMMSLHEKFGYLEGLKVGILGDISHSRVALSNIYGLQTMGAEVTLCGPSTLVPPFAEELGVKVNYNVDEVIEWADAINVLRIQRERMKGGLLPSIREYRNLFGITKDRLSKHKKEIVIMHPGPMNRGVEIDSVIADSDQAIILDQVLNGVASRMAILYLLLGGKPEEESS

SEQ ID NO: 109158 - protein, 305 aa, Unknown
  Bacterial polypetide isolated from the Sargasso Sea
MNNFSQNDIISIRDLSKDDLEQVFAKTNEIMEMPAEQRREIARGKTLGYLFFEPSTRTRLSFQSAMALIGGTSFGIADATSSSVQKGESLADTVRIMAGYTDAIVLRHSLDGSSKFAAEVSDKPLINAGSGTEEHPTQAIQDLYTIQKELGKIDGKNIGIVGDLKYGRTVYSLLYGLSNYDVKVHLISPESLKVRSDSIYNLKENLSFTESENLDEYIEDLDVLYVTRIQKERFPDEEEYVKVKGSYVIGQDVVNKMKDDAILLHPLPRIDEISTDVDSTKQAKYFQQAEYGKFTRAAILSMLLQ

SEQ ID NO: 109159 - protein, 182 aa, Unknown
  Bacterial polypetide isolated from the Sargasso Sea
MLENIKIPKISQTHLHGIKNLSIEDINNILELSKIFKEHNKEKDKKIPILKGRTIINLFFEPSTRTLISFEIAAKRLGADVINMNIEGSSLRKGESLFDTAQTLGAMNPDLVIIRHGENDASKEIAKILECPVINAGEGVNEHPTQALLDAYTIMNHNRKLNDITVSICGDLEHSRVARSNY

SEQ ID NO: 109160 - protein, 280 aa, Unknown
  Bacterial polypetide isolated from the Sargasso Sea
FSNNFIDDEGNFRKENLFPEKIVANVFCEPSTRTKSSFAIAAGNLGCSVVDFNIDNSSVQKGESIFETVDALNLMGVDLCVLRHPKSVIRELAESLPKMVFINAGEGAISHPTQALLDIKTIIDHKNSLDGLKIVIVGDLDHSRVTSSFVEGISNFDVDSLIFSGHPEMCSKYQNPEIGKYEPDFEKALQDADVVMTLRIQYERFEKDLDLDLETYKNSYQLSTSKLGCAKADAIIMHPGPVNYVEITEAVYDSENSVIRQQIANGVAIRMAVLSRFLSS

SEQ ID NO: 109161 - protein, 192 aa, Unknown
  Bacterial polypetide isolated from the Sargasso Sea
ACNLLSQKVNCAVLNAGDGRREHPTQALLDALTIINRRKKIEGLKIAICGDILHSRVARSNIYLLNMLGADVNIVAPTNLMPNEIEKFGVSIFSDMKKGVKDCDIVMMLRLQNERMTSSFLSSNREYYEYYGLTPDKIKFAKEDALIMHPGPMNRGIEIDTNLADDINKSVIKEQVELGVAVRMACLKIFCE

SEQ ID NO: 109162 - protein, 233 aa, Unknown
  Bacterial polypetide isolated from the Sargasso Sea
SSSSSVKKGESLTDTVNNILAMKVDMIVLRHPNPGSPLLLSKHTNSCIINAGDGAHEHPTQALLDCFSLTENLGDLKGKNILIVGDILHSRVALSNIYALKLLGANIKLSCPLSLIPREIESLDVSIETDILKALKWCDAANVLRVQKERMEKSYFPNNREYSMLFGLDTNKIDNIKKDILILHPGPINRGVEITSEIVESNNSIILDQVENGVAIRMAIIYLLASKMNFSIN

SEQ ID NO: 109163 - protein, 312 aa, Unknown
  Bacterial polypetide isolated from the Sargasso Sea
MATKTKAIKISQKHLLGIQDLSINDVNLILKEAEKFIELNKSKNKKLDLLKGKTQINLFFEPSTRTQSSFELAGKRLGADVMSMNITNSAIKKGETLIDTAMTLNAMHPDIIVIRHQDSGACNLLSQKVNCAVLNAGDGRREHPTQALLDALTILNRKKKIQGLKVAICGDILHSRVARSNIYLLNMLGAEVNIVAPSNLLPKDIEKFGVNIFSNMKKGVKDCDIVMMLRLQNERMSSSFLSSNREYYEYYGLTQDKLEYAKSDSIIMHPGPMNRGIEIDTKLADDTNMSVVKEQVELGVAIRMACLKIFCE

SEQ ID NO: 109164 - protein, 293 aa, Unknown
  Bacterial polypetide isolated from the Sargasso Sea
FEPSTRTRSSFELAARRLSADVQSFSPASSALAKGESLLDTARTYVAMGADVLVVRHRCAGVPAELARDLEAASCRTAVLNAGDGLHSHPSQALLDLFTLARHFNPEAPTLEALAGKRIVIVGDVLHSRVARSNLWSLTACGVDVVLCGPASLLPDAFAQFTEAPPPGQVKDLVLQRGSLRIERDLDQALEGADAVMTLRLQQERMKEQLITSLEAYQRRYGLSHSRLERCGKPVPVLHPGPVNRGVELSGELLDDPSRSLVEEQVRNGIPVRMALLYLMAASEPASSAAGLS

SEQ ID NO: 109165 - protein, 339 aa, Unknown
  Bacterial polypetide isolated from the Sargasso Sea
MNQFEGSHILSVNQLDLDSIQTIFNVAHRMMPYALREKRTKVLEGAILGNLFFEPSTRTRVSFGCAFNLLGGHVRETTGMASSSLSKGESLYDTARVLSTYSDVIAMRHPDSYSVKEFAEGSRVPVINGGDGSNEHPTQALLDLFTIQKELGHAGRGIDGMHIAMVGDLKFGRTVHSLSRLLCMYKNISFTLISPAELAMPDYVISDIENAGHSIKITDQLEGHLDKADILYLTRIQEERFPSQEEANKYRGKFRLNRSIYTQHCKSNTVIMHPLPRDSRAQANELDNDLNSHPNLAIFRQADNGLLIRMALFALTLGVDSQLEKYECPVNWYSRKADR

SEQ ID NO: 109166 - protein, 155 aa, Unknown
  Bacterial polypetide isolated from the Sargasso Sea
MAIKSNKAVKISQEHLLGIQDLSITDVNLILNEAKQFIELNKSKKKKLDILRGKTQINLFFEPSTRTQSSFELAGKRLGADVMSMNIVNSAIKKGETLIDTAMTLNAMHPDLIVIRHQDSGACNLLSQKVNCSVINAGDGRREHPTQALLDALTI

SEQ ID NO: 109167 - protein, 318 aa, Unknown
  Bacterial polypetide isolated from the Sargasso Sea
MDQIKINEFSHKHILSIEDLSPLDINLILDRAEKYANQNKLQNKKISKLKGRTLINLFFESSTRTRTSFELAGKRLGADVINMSIEGSAIKKGETLVDTAMTLNAMHPDLMVVRHNESGAVNLLAKKVNSSVINAGDGCHSHPTQALLDALTIRRNLKKLDGLNVAICGDVMHSRVARSNIQLLNIMGSKVRIVAPSTLIPDSIDKMGVDIYHNMTDGLKNCDIVMMLRLQNERMHGSFVPSTREYYEIFGLNKTSLQKAKPNALIMHPGPMNRGVEIDTEIADNLKQSVIREQVEMGVAIRMACLELLDKSINKKTN

SEQ ID NO: 109168 - protein, 189 aa, Unknown
  Bacterial polypetide isolated from the Sargasso Sea
MNAGDGAGNHPTQTMLDLFTIRQAHGTLEGLNVVLVGDLRYGRTVHSLSHALVRFGAKLTLVSPSTLKMPVEIVSDLREHGSEITETESLEDQIAGADVIYVTRIQKERFPDEDEYAKVAGIYKIEASDLSGAKKGMIIMHPLPRVDEIGPDVDSTEFARYFEQAFNGVPTRMALLCRSLGIDVPKKVK

SEQ ID NO: 109169 - protein, 338 aa, Unknown
  Bacterial polypetide isolated from the Sargasso Sea
MQIWPHKHIHTLANFSIKDYESVFELANRFDALKNAGTKKIPALQGTLVTSLFFEASTRTKNSFELAAKRLSADVQTFAPSSSSLTKGETIIDTAITYSAMGADTLVIRHSSSYITFEIAKKLDAINAKTSVLNAGDGLHSHPSQGLLDIYTLIKFFSQKTLNPEVLNSKKILIIGDVNHSRVARSNLWALSAFGADIILCGPKTLIPDEFINFLKTPAPNQTEDPVKSRGSITISRSLEESIKIADAIIVLRLQKERMMENLLSSIDSYSLDYGLTPEKLSLNNKEIPILHPGPINRDIEISSSVVDRYPNCLINNQVANGIPIRMALLYLLQKHNK

SEQ ID NO: 109170 - protein, 292 aa, Unknown
  Bacterial polypetide isolated from the Sargasso Sea
LSINDVNLILDEAHTFIKVNQSKNKKINVLRGKTQINLFFEPSTRTQSSFELAGKRLGADVMSMNISNSAIKKGETLIDTAMTLNAMHPDIIVIRHQDSGACNLLSQKVNCAVLNAGDGRREHPTQALLDALTIITRKNKIEGLKIAICGDILHSRVARSNIYLLNMLGAEVNIIAPTNLMPKEIEKFGVNTFTDMKKGLKDCDIVMMLRLQNERMTSSYLSSNREYYEYYGLTPDKLEHAKSDALIMHPGPMNRGIEIDTILADDINKSVIKEQVELGVAVRMACLKIFCT

SEQ ID NO: 109171 - protein, 298 aa, Unknown
  Bacterial polypetide isolated from the Sargasso Sea
MLGIQDLSVNDVNTILNEASKFIELNKSKNKKIDILKGKTQINLFFEPSTRTQSSFELAGKRLGADVMSMNITNSAIKKGETLIDTAMTLNAMHPDIIVIRHQDSGACNLLSQKVNCAVLNAGDGRREHPTQALLDALTIKNRRKKIEGLKIAICGDILHSRVARSNIYLLNMLGAEVNIVAPTNLMPKEIEKFGVNIFSDMKKGVKDCDIVMMLRLQNERMTSSFLSSNREYYQYYGLTPDKIQYAKEDALIMHPGPMNRGIEIDTNLADDINKSVIKEQVELGVAVRMACLKIFCE

SEQ ID NO: 109172 - protein, 157 aa, Unknown
  Bacterial polypetide isolated from the Sargasso Sea
MAVIKKFSAVKKIQKHLLGIQNLSIQEANQILDEAKNFIKLNRSASKKLDLLRGKTQINLFFEPSTRTQSSFELAGKRLGADVMTMNVSNSSLKKGETILDTAMTLNAMHPDIIVVRHQDSGAPNLLSQKVNCTVINAGDGLREHPTQALLDALTII

SEQ ID NO: 109173 - protein, 339 aa, Unknown; identical to SEQ ID NO: 109165
  Bacterial polypetide isolated from the Sargasso Sea

SEQ ID NO: 109174 - protein, 315 aa, Unknown
  Bacterial polypetide isolated from the Sargasso Sea
MDNFNYYFDNIHLLGIQGMNKKSIQSILERAQYFNQKKKNRKNKILKDNLVINLFFENSTRTKASFEIAAKSMSADILNISVSSSSIKKGETLIDTAATLNAMHPDFLILRHPNSGAAEMLSKHVECSIINAGDGRHEHPTQALLDAAVIKEEGINLEGLKIAICGDILNSRVARSNIYLLTTMGAQVSVIGPPTLIPKDIERMGVKVFFDLNSGLKSSDIIMILRLQNERMDGSETPSKREYYSFFGINENNLKLAKKNALVMHPGPMNRGVEIASLLADNNEISLVKKQVEMGVSVRIACLEMLKLSRNKLLK

SEQ ID NO: 109175 - protein, 97 aa, Unknown
  Bacterial polypetide isolated from the Sargasso Sea
MNEGLKSCDIVMMLRLQNERMTGSYLPSKREYYEYFGLTPDKLKLAKKDALIMHPGPMNRGVEIDTKLADDINVSLVKEQVELGVAVRMACLKLYCK

SEQ ID NO: 109176 - protein, 279 aa, Unknown
  Bacterial polypetide isolated from the Sargasso Sea
MAKNLLSIKDLSKDEILDLIKFSNNFIDDQANFRKEDLFPDKTVANIFCEPSTRTKSSFAIAAGNLGCSVIDFDIDNSSIQKGESIFETVDALNLMGVDLCVLRHPKSVIQDLAEALPKMVFINAGEGSISHPTQALLDMKTIMDHKNSLDGLKIVIVGDLDHSRVTSSFIEGISNFSIDSLTFSGHPEMCTKYQNPNIGNYEPDLNKALIDADVVMTLRIQYERFDEELNLDLETYKNAYQLSSEKLENAKGDAIIMHPGPVNYVEITESVYDSENSV

SEQ ID NO: 109177 - protein, 312 aa, Unknown
  Bacterial polypetide isolated from the Sargasso Sea
MSCDIKIPEISQKHLLGIKYLSIEDINKVLELGNFFKLKNKEKNKNYPILTGRTVINLFFEPSTRTLISFEIAAKRLGADVVNMNIQGSSLRKGETLFDTAQTIGAMNPDLVIIRHNEDNSAEKISNLLNCPVINAGEGVNEHPTQALLDAFTILSHKKTLKDLTVSICGDLEHSRVARSNYYLLTKMGSSVRFVYPKYFEPSDLNKYKVETFNDLNKGIKDSDIVMMLRIQNERILDTELPSTKDYFLKYGLTSERLKNAKEDVLVMHPGPINRDVEIESSLADDVNKSVINEQVENGVAIRMACLAILLK

SEQ ID NO: 109178 - protein, 298 aa, Unknown
  Bacterial polypetide isolated from the Sargasso Sea
MLGIQDLSINDVNLILDEAHAFIKVNQSKNKKIDVLRGKTQINLFFEPSTRTQSSFELAGKRLGADVMSMNISNSAIKKGETLIDTAMTLNAMHPDIIVVRHQDSGACNLLSQKVNCAVLNAGDGRREHPTQALLDALTIITRKNKIEGLKIAICGDILHSRVARSNIYLLNMLGAEVNIIAPTNLMPKEIEKFGVNTFTDMKKGLKDCDIVMMLRLQNERMTSSYLSSNREYYEYYGLTPDKLEHAKSEALIMHPGPMNRGIEIDTILADDINKSVIKEQVELGVAVRMACLKIFCT

SEQ ID NO: 109179 - protein, 301 aa, Unknown
  Bacterial polypetide isolated from the Sargasso Sea
MAKNLLSINDLSKKEILDLIEFANNFFNEEGDFRRESLFPDKTIANVFCEPSTRTKSSFAIAAKNLGCSVIDFNIESSSVQKGESIYETIDALNLMGVDLCVLRHPESIIRELAETLPKMVFINAGEGSISHPTQALLDLKTIIDHKDTLDGLNIVIIGDLDHSRVTSSFVEGISNFEIGSLTFCGHPEMCSKYIDPNIGRYEADMAKALQDADVVMTLRIQYERFEKELNLDLETYKSEYQLSSEKLENAKGDAIIMHPGPVNYIEITEAVYDSENSVIRQQIANGVAVRMAVLSRFLGS

SEQ ID NO: 109180 - protein, 215 aa, Unknown
  Bacterial polypetide isolated from the Sargasso Sea
NDTAMTLNAMHPDIIVIRHQDSGACNLLSQKVNCVVLNAGDGRREHPTQALLDALTIRNRKKKIEGLKIAICGDILHSRVARSNIYLLTMLGAEVNIVAPTNLMPKEIEKFGVNTFTDMKKGLKDCDIVMMLRLQNERMTSSYLSSNREYYEYYGLTPDKLDHAKSDALIMHPGPMNRGIEIDTRLADDINKSVIKEQVELGVAVRMACLKIFCE

SEQ ID NO: 109181 - protein, 430 aa, Unknown
  Bacterial polypetide isolated from the Sargasso Sea
MSVPQQAFLRDAMRRMNMTREAFASRIGVSRRALDTWLLPDDSQESRAMPEIVERFVSEIVVHGEPGEKHTQSVDSQSLASQMLFEGKPQLLSVDQFSRDSVEALFRVADIMQPIARRRKISRVLEGAVLGNLFFEASTRTRVSFGAAFCRLGGSVCDTTGFTFSSMAKGESIYDTSRVMSGYVDALVIRHPEQGSVAEFARATNVPVINGGDGPGEHPSQALLDLYTIQREFSRLGKIVDGAHIALVGDLKYGRTVHSLVKLLALYRGIKFTLISPPMLEMPSYIIEQISRNDHVIEQTHDLTAGLRGADVVYATRIQKERFTDESFEGYTPDFQINQALMDSVCGADTLIMHPLPRDSRPGANDLSVDLNHDPRLAIFRQTDNGIPVRMAIFAVLLGVEKLVQHSMRDAAWRPPAYLGPDDAVFHGID

SEQ ID NO: 109182 - protein, 248 aa, Unknown
  Bacterial polypetide isolated from the Sargasso Sea
MRGWHHRHILDLAAFSREDYAAVLDLAERFRSLPVTGARKLPALQGRLVATLFFEPSTRTRSSFELAAKRLSADVQSFSPSSSSLSKGESVLDTARTYVAMGADVLVVRHRSTGVPQQLAEDLESAGERTVVLNGGDGLHSHPSQGLLDLHTLARHFAPQHPMPEALQGRRIVIVGDILHSRVARSNLWALTACGADVVLCGPPSLVPDAFREFVEAPPPGSLRIRFHSGDRCGWSGVWSVPCPARMR

SEQ ID NO: 109183 - protein, 100 aa, Unknown
  Bacterial polypetide isolated from the Sargasso Sea
MTLRLQKERMTQQLLTGLERYHRDFGLSHERLSLCGQPVPVLHPGPVNRGVEMTGALLDDPSICLVEEQVRNGVPIRMALLYLMAAAESAAESTLVSISS

SEQ ID NO: 109184 - protein, 242 aa, Unknown
  Bacterial polypetide isolated from the Sargasso Sea
ELAGKRLGADVMSMNMGNSAIKKGETLIDTAMTLNAMHPDIIVIRHQDSGACNLLSQKVNCVVLNAGDGRREHPTQALLDALTIRNRKKKIQGLKIAICGDILHSRVARSNIYLLTMLGAEVNIVAPSNLMPKEIEKFGVNTFTDMKKGLKDCDIVMMLRLQNERMTSSYLSSNREYYEYYGLTPDKLDHAKSDALIMHPGPMNRGIEIDTRLADDINKSVIKEQVELGVAVRMACLKIFCE

SEQ ID NO: 109185 - protein, 312 aa, Unknown
  Bacterial polypetide isolated from the Sargasso Sea
MATKSKAIKITQKHLLGIQDLSISDINLILEEASSFINLNKSKNKKLDILKGKTQINLFFEPSTRTQSSFELAGKRLGADVMSMNITNSAIKKGETLIDTAMTLNAMHPDIIVIRHQDSGACNLLSQKVNCAVLNAGDGRREHPTQALLDALTIINRKKKIQGLKIAICGDIQHSRVARSNIYLLNMLGAEVNIVAPSNLMPKEIEKFGVNMFSDMKKGVKDCDIVMMLRLQNERMTSSFLSSNREYYEYYGLTPDKLRYAKEDCIIMHPGPMNRGIEIDTKLADDTNMSVVKEQVELGVAIRMACLKIFCE

SEQ ID NO: 109186 - protein, 219 aa, Unknown
  Bacterial polypetide isolated from the Sargasso Sea
MADEAANLGFYHTHLLGIEGLSRAEISSLLDKSEEYVEQNRKADKKVDLLRGRTIINLFFENSTRTRTSFELAGKRLSADVINMAMGNSSIKKGETLIDTAMTLNAMHPDILVVRHGESGATQLLAEKVNCSVINAGDGSHEHPTQALLDALTIRRRLKKLEGLVIAICGDIAHSRVARSNIHLLGTMGAEVRVVAPPTLLPPAVEQLGVTVFHDMKKG

SEQ ID NO: 109187 - protein, 311 aa, Unknown
  Bacterial polypetide isolated from the Sargasso Sea
VNNLLGIKYIKKQDIDLIFDTADHFKEVLNRPIKKVPSLRDITIANLFFENSTRTKLSFELAEKRLSADIINFSGSSSSIKKGETLIDTVNNILAMKVDMIVIRHPNPGAALLLSKNVDSCIVNAGDGTNEHPTQALLDAYSLKERLGDLDGKKILIVGDILHSRVALSNIYALRLLNAKIKICSPLSLIPREIESLGVSIETDLDKALSWCDAVNVLRVQHERMEKSYFPNNREYSLLYGLDNKRISKLKRDILILHPGPINRGVEIKSDIVESNNSIILDQVENGVAIRMAIIFLLASKMNISKSHETV

SEQ ID NO: 109188 - protein, 176 aa, Unknown
  Bacterial polypetide isolated from the Sargasso Sea
PTQALLDALTIKNKFKNFSKLKIAICGDILHSRVARSNIIILSKLGAKINVIGPKEWLPKSLNKLPVNVYTEMKNGLQSCDIVMMLRIQKERIVGKIMPNQKTYFKKYGLDYNKLKYAKKNAFVMHPGPMNRGVEIDSKLADDVTRSLIQEQVAMGVAVRMACLDLIIKNRDDFSK

SEQ ID NO: 109189 - protein, 270 aa, Unknown
  Bacterial polypetide isolated from the Sargasso Sea
MNSKLLKSGHIKLYKRENSKYWQMKVKLPKLKAIRSSTGSKILKDAEKIALKYYSSISSKTNIKLKRSKNIFKKIHLVETADLTKKEIEHILDESKKYITFNKRKIKKINVLEGRTIFNLFFEDSTRTRTSFEVAAKRLGADLINVVVKDSSINKGETLLDTMTTINSMNPDVLIVRHPEEGISKKISETVDASVINAGDGSHEHPTQALLDALTIKNKFENFSKLKIAICGDILHSRVARSNIIILSKLGAKINVIGPKEWLPKSLNKL

SEQ ID NO: 109190 - protein, 381 aa, Unknown
  Bacterial polypetide isolated from the Sargasso Sea
MNSKILKSGHIKLYKRENSQFWQMKLKLPKLKSIRSSTGSKILKEAEKIALNHYSSLSKKTKIKVRRTKNIFKKIHLVETADLTKKEIEHILNEAKKYILFNKKKIKHMNILEGRTIFNLFFEDSTRTRTSFEVAAKRLGADLINVVVKDSSINKGETLLDTMTTINSMNPDVLIVRHPEEGISKKISETVDASIINAGDGSHEHPTQALLDALTIKNKFNNFSKLKIAICGDILHSRVARSNIIILSKLGSKINVVGPKEWLPKSLRKLPVKVFTDMKKGLENCDIVMMLRIQKERIVGKIMPDQRSYFKKYGLDYNKLKYAKKNAFVMHPGPMNRGVEIDSKLADDITISLIQEQVAMGVAVRMACLDLIIKNRDNNVS

SEQ ID NO: 109191 - protein, 152 aa, Unknown
  Bacterial polypetide isolated from the Sargasso Sea
ICWVGDANNNVINSLIEASVKFSLKLKIACPKKYEPNKNLLNWVKKHKGKVKIFNDIKKAAEKSDVIFTDKVISMNDKVNRLRKLKDFKNFQINSKVMNFAKSDAIFLHCLPRGPEVSDKVFFGKQSKVWQQALNRIYVQKSILLYCFGKLR

SEQ ID NO: 109192 - protein, 237 aa, Unknown
  Bacterial polypetide isolated from the Sargasso Sea
MSKERLYIFDTTLRDGAQTQGVDFSLEDKEKIALALDNLGVDYIEAGWPGANPTDTEFFQKKYDFKNSKLTSFGMTKRSGRSAENDTGLSALMNSNTSAVCLVGKSWDFHVDVALGITNEENLDNISESTKHFVKAKKEFMFDAEHFFDGYKANPKYALSCIKAAYDQGARWVILCDTNGGTLPHEVTQIVSDVTKVVPGKNLGIHAHNDTGNAVANSLAAVLSGVRQIQGTINGIG

SEQ ID NO: 109193 - protein, 362 aa, Unknown
  Bacterial polypetide isolated from the Sargasso Sea
ILKIAEGLKSLYERNCSTKVFQSGLAVSLFRDHSTRTRFSYASAANLLGLTVQDLDEGKSQIAHGETVRETANMISFLTEAIGIRDDMYLGAGNAYMQEIAESLDLGRADGVLHQRPVVVNLQCDMDHPTQSMADLQHLVQTYGSLENLKGKKIAMTWAYSPSYGKPLSVPQGIISLMTRFGMEVTLAHPEGYDLVPECMKNAAEFASTSGGSFSVSNSMEEAFADADIVYPKSWAPYKVMETRTELLRNKDHKGLEDLEQKCLAQNAKFTGWECTESLMKTTRDGKALYMHCLPADISSVSCEKGEVEASVFDRYRTPTYIQAGYKPYIIAAMIFAAKFDNPAALFQDLIQRDLKRVHTIS

SEQ ID NO: 109194 - protein, 309 aa, Unknown
  Bacterial polypetide isolated from the Sargasso Sea
MKHFINLKDIPAKDLRKIITDAKNRKSLRKKLSTLEVDKGAPLKGKLLIQMFEKSSLRTRLSFYLAIKQLGGGTMTLRSNELHLGQGGESIADTAKILSTYGDGFMLRTDSNKKIEKFEKHLSIPVINGLSPSSHPTQVLSDVFTVEEIKKKPISNLNICWIGDSNNVLNSLIAASVKFSFKLHIGCPKKFEPGKEVRSWVKKNNKKIYIFNEVKKAVSGADVIFSDKVISLNDKVNKKKKIRAFKNFKIDKKLMSYAKKNCIFLHCLPRGDEVSDDVFLGKKSHVWQQALNRVHVQKSILLYCFGKLR

SEQ ID NO: 109195 - protein, 175 aa, Unknown
  Bacterial polypetide isolated from the Sargasso Sea
MSKEQLYIFDTTLRDGAQTQGVDFSIEDKEKIASALDNLGVDYIEAGWPGANPTDTEFFQKKHNFKNSKLTCFGMTKRSGRSAENDTGLSALMNSNTPAVCLVGKSWDFHVDVALGITNEENLENISESAKHFVKAKKEFMFDAEHFFDGYKANPKYAISCVKAAYDQGARWIVL

SEQ ID NO: 109196 - protein, 209 aa, Unknown
  Bacterial polypetide isolated from the Sargasso Sea
YDDGFMLRTDSDKKIENFEKYLSIPVINGLSPSSHPTQVLSDVFTVEEIMKKPISKLNICWIGDSNNVLDSLIAASVKFSFKLYIGCPKKFEPGKEVRAWVKKNNKQIYIYNDAKKAVSNADVIFSDKVISLNDKVNKKKKIKAFKNFKIDKKLISYAKKSCIFLHCLPRGDEVSDDVFLGKKSHVWQQALNRVHVQKSILLYCFGKLR

SEQ ID NO: 109197 - protein, 209 aa, Unknown
  Bacterial polypetide isolated from the Sargasso Sea
NFKKWKNKKVLEIGFGIGTDAIEFLKNGAKYNGIELSDKSHEITKKRIKIFNFKAETLIFDEAENLSKHFSKKNNLDLIYSFGVLHHSSSLQKCLREIYKIMSPKTELKVMLYAKNSYKYMMMKKKLLRYEAQKNVPVIDFYDHEDIKKLFSKFKLKEVRQDFIFPYKITPYKKNKYVKVEHFKYMSKNIFNTFRENLGEHLLITARIK

SEQ ID NO: 109198 - protein, 210 aa, Unknown
  Bacterial polypetide isolated from the Sargasso Sea
MKKSFRHFLNLHEISKKDIDLILKYSHRLKKNNKTKQLKEKKILAIIFEKPSTRTKISFDVGMKLLNGDVVTLDHSDSQLGRGESLEDTMKVLSSYVDIIAYRGSDESKLYKLSEISTVPIINGLTDISHPCQIIADIMTLQEKFRSLNNLNLSWIGDGNNVCNSWIHASKHFGFNLKISCPPGNFPENKILKTLNSGKVELFKTRLKLH

SEQ ID NO: 109199 - protein, 248 aa, Unknown
  Bacterial polypetide isolated from the Sargasso Sea
KLLFSYQTLGGGTLTLRSNELHLGQGGESIADTAKILSTYGDGFMLRTDSDKKVENFEKYLTIPVINGLSPSSHPTQVLSDVFTVEEIMKKPISNLNICWIGDSNNVLDSLIAASVKFSFKLSIGCPKKFEPGKEVRAWVKKNNKQIYIYNDAKKAVSGADVIFSDKVISLNDKVNKKKKIKAFKNFKIDKKLMSYTKKSCIFLHCLPRGDEVSDDVFLGKKSHVWQQALNRVHVQKSILLYCFGKLR

SEQ ID NO: 109200 - protein, 181 aa, Unknown
  Bacterial polypetide isolated from the Sargasso Sea
MKHFINLKDISSKDLRKIIADAKNRKRLRKKLSTLEVDKGSPLKGKILIQMFEKPSSRTRISFYLAIKQLGGGTLTLRSNELHLGQGGESITDTAKVLSTYGDGFMLRTDSEKKMEDFKKYLSIPIINGLSPLSHPTQVLSDIFTVEEIKRKPISKLNICWIGDSNNVLNSLIAASVEIFF

SEQ ID NO: 109201 - protein, 251 aa, Unknown
  Bacterial polypetide isolated from the Sargasso Sea
MKHFIDIADFNSTQLDAIIKKGKALKKNPKQFSKNCNNKTLGMIFQKESTRTRVSFNVGFKKLGGHCLELDADSIGFGKRENYEDIIRALSQYIDILMIRNDNHKIIRNLSSLNVLPIINGLSDYSHPCQILSDLLTITEKLGDIKKQKICWVGDYNNVLRSLIELQAIYKFNLNVVMPKEILRKNASLLVQNKKLMITNIINEGVRYADCVMTDTWISMGEKSTKKKYFKNYQVNNEVMKNSSKNAIFMH

SEQ ID NO: 109202 - protein, 71 aa, Unknown
  Bacterial polypetide isolated from the Sargasso Sea
MIKPNKLANNNFLSSLDISTDEVVHILEVAKSLKNKNLNIELKDKVLGLIFDKSSTRTRVSFQVAMSRLGG

SEQ ID NO: 109203 - protein, 215 aa, Unknown
  Bacterial polypetide isolated from the Sargasso Sea
KLKGKKIAMTWAYSPSYGKPLSVPQGIISLMTRFGMEVTLAHPEGYDLVPECMKNASEFASTSGGSFSVSNSMEEAFADADIVYPKSWAPYKVMETRTALLRNKDHKGLEDLEQKCLAQNAKFTGWECTEALMKTTRDGKALYMHCLPADISSVSCEKGEVEASVFDRYRTPTYIQAGYKPYIIAAMIFAAKFDNPAALFQDLVQRDLKRVHNIS

SEQ ID NO: 109204 - protein, 166 aa, Unknown
  Bacterial polypetide isolated from the Sargasso Sea
GERIVRSNKWEGWHPTQMLGFHISNKKVGIVGMGNIGQAIARRCHFGFGMQVGYFSRSPKNLDYPVDRYGSLTELASNSDILVISVPGGSATHHLINKDIFSAMQPHSYFVNIARGDVVKEIDLIEALRLNQIAGAGLDVYENEPKVPKDLISMENVVLLPHLGTA

SEQ ID NO: 109205 - protein, 176 aa, Unknown
  Bacterial polypetide isolated from the Sargasso Sea
HPTQILSDVFTIEEIKKKPISKLQICWIGDGNNNVINSLIEASIKFSFKLNIGCPKKYEPKKTLLIWAKKNKGKIKIFNFSKKAAIGSDVIFTDKVISMNEKVNKLKKLKDFKNFKVNSKLMKCAKKDAIFLHCLPRGNEVSNEVFLGKQSRVWQQALNRVYVQKSIILYCLNKLR

SEQ ID NO: 109206 - protein, 217 aa, Unknown
  Bacterial polypetide isolated from the Sargasso Sea
MINQAYIYDSIRTPRGKRKNGALNEITPTDLLSKLMIGLSEKHNLDTSQIDDVIIGCVMPVGDQGANLGKTAAQYAGWDIDVPGMQISRCCGSGLEAVNIAAMKVRSGWEELIVAGGIESMSRVPMGSDLGSMAFEPKVSLNNNYVPQGIGADLIASIDGYARNDLDELALQSHKRAFDAQKKKKFKSMIPIFDQNGILLIDKDEHIRQDCSLQDLS

SEQ ID NO: 109207 - protein, 63 aa, Unknown
  Bacterial polypetide isolated from the Sargasso Sea
MHWVCQRFTSRNTKIGEEVFQKFGLDGLEVTEDVFESDKSVVFDQAENRLHTIKAILVATLGS

SEQ ID NO: 109208 - protein, 156 aa, Unknown
  Bacterial polypetide isolated from the Sargasso Sea
MNNFINISDLSKNELRAIIDGAKKRKSERGKKPNSQPDSDQPIQGKTMIMFFAKPSTRTRISFDLAVKQLGGSSIILNQDEIHYGKGDETIKDTAKVLSQYGDILMIRTDSHKDINEFKKYLEIPIINGLTNLSHPCQIMADILTFEESKGDIEGK

SEQ ID NO: 109209 - protein, 282 aa, Unknown
  Bacterial polypetide isolated from the Sargasso Sea
LRKKLSTLEVDKGAPLKGKLLIQMFEKSSLRTRLSFYLAIKQLGGGTMTLRSDELHLGQGGESIADTAKILSTYGDGFMLRTDSNKKIEKFQKHLSIPVINGLSPSSHPTQVLSDVFTVEEIKKKPISSLNICWIGDSNNVLDSLVAASVKFSFKLNIGCPKKFEPGKEVRSWVKKNNKKIYIYNDAKKAVSGADVIFSDKVISLNDKVNKKKKILAFKNFKIDKKLMSYAKKNCIFLHCLPRGEEVSDDVFLGKKSHVWQQALNRVHVQKSILLYCFGKLR

SEQ ID NO: 109210 - protein, 177 aa, Unknown
  Bacterial polypetide isolated from the Sargasso Sea
DQSHPCQVMSDILTFEENNGNIEGKTISWIGDGNNNMSNSFIEAAVKFKFNLKIGCPKKYSPSDKILKWASKNKSKIFVTKDPREAAKDADCIMTDKWVSMNDKVNKKAKKKSLKDYQVNKKLFKLAKTDCIFMHCLPVGRGEEVADDIIDGNKSVVWQQAYNRVHAQKSIINWCLN

SEQ ID NO: 109211 - protein, 276 aa, Unknown
  Bacterial polypetide isolated from the Sargasso Sea
MKRDFISILDWTSEEIRNNLNYAFELKQQTKKGSCPKLLSGKTYGMFFHKPSLRTRLSFEVGIVQLGGTAINLSEQDFKIGKRESVSDIARVMSRYVDGILIRTFSHQLVMDLSKYSTVPVINMLTDFNHPCQVMSDMLTIKEKLGRIDNVRIAYVGDSNNVTNSWLNMASRVHLDLRIATAPETEPDVKLVSKIRESGISNILVTQSAKEAVQDVDIIYTDVWASMGEKNKIDERERILKDFQVNSRLLEYARNDVLVFHCLPAERGKEITNEVI

SEQ ID NO: 109212 - protein, 178 aa, Unknown
  Bacterial polypetide isolated from the Sargasso Sea
MNKNIRHFLRVSDLSYYEIQKLFERSTVLKKQVEEQVFEQKLHNRTLILLFEKHSTRTRLSFEVGMQQLGGNSIVLQMRDTQIDRGETIEDAARVISRMCDIIMLRTFEHSKIEAFAKNSTAPIINGLTNEHHPCQVLSDIFTFQEQRGNILGKTISWIGDINNMCASWIEAYKYLWI

SEQ ID NO: 109213 - protein, 240 aa, Unknown
  Bacterial polypetide isolated from the Sargasso Sea
LGGGTITLRSNELHLGQGGESLEDTAKILSTYGDGFMLRTDSDHKVDNFKKYLSIPVINGLSPSSHPTQVLSDIFTVEEIKNKSISKLNIAWIGDCNNVLNSLIAASVKFSFKLSIGCPKKYEPKKFILDWVKTNKKKIHIFNNVKKAATNADVIFSDKVISLNDKVNKTKKLQQFKKFRIDQKVMSFAKKDCIFLHCLPRGSEVDEKVFSSSKSKVWLQALNRVHVQKSILLYCFGKLR

SEQ ID NO: 109214 - protein, 102 aa, Unknown
  Bacterial polypetide isolated from the Sargasso Sea
KLTITSQPLEAVTGADCVMTDKWISMNDKVNKTSKKKILKPYQVNKKLMSKANSDAIFMHCLPVGRGEEVTNEVIDGKQSVVWRQALNRVHAQKSIIKWCLD

SEQ ID NO: 109215 - protein, 148 aa, Unknown
  Bacterial polypetide isolated from the Sargasso Sea
APSPFYLRQASMDDFEFAEALTRNNMGGYYRRHHLVWRGDLFLGSWRESENFILEVDGEPIGVLRITQEGDSLHIRDVQIAEGHRRLGAGTYLLDISHQWARERGLRELQLRVFVDNPAARLYQRKGYKLTGPRLAQLGAIRHLARRV

SEQ ID NO: 109216 - protein, 220 aa, Unknown
  Bacterial polypetide isolated from the Sargasso Sea
MSKERLYIFDTTLRDGAQTQGVDFSLEDKEKIALALDNLGVDYIEAGWPGANPTDTEFFQKKHDFKNSRLTSFGMTKRSGRSAENDIGLSALMNSNTSAVCLVGKSWDFHVEVALGITNDENLDNISESAKHFVKAKKEFMFDAEHFFDGYKANRKYALSCIKAAYDQGARWVILCDTNGGTLPHEVAQIVGEVTKVVPGKNLGIHAHNDTGNAVANSLA

SEQ ID NO: 109217 - protein, 257 aa, Unknown
  Bacterial polypetide isolated from the Sargasso Sea
MKHFINLKDIPSKDLRKIIVDAKQRKKQRKKLNTLEPDRGSPLRGKMLVQMFEKASSRTRISFYLAIKQLGGGTLTLRSNELHLGQGGETIADTAKILSKYGDGFMLRTDDDRKIEDFQKHLTIPIINGLSPSSHPTQVLSDIFTIEEIKKKPISKLKICWIGDSNNVLDSLIAASVKFSFRLSIGCPKKFAPGKIVKNWVRKNKKRIFIYHDPKKAAMDADVIFSDKVISLNDKVNKKRKIQQFQKFKIKKEIFKY

SEQ ID NO: 109218 - protein, 44 aa, Unknown
  Bacterial polypetide isolated from the Sargasso Sea
MAIKQLGGGTLTLRSNELHLGQGGESITDTAKVLSTYGDGFMLR

SEQ ID NO: 109219 - protein, 190 aa, Unknown
  Bacterial polypetide isolated from the Sargasso Sea
MSKERLYIFDTTLRDGAQTQGVDFSIEDKEKIASALDNLGVDYIEAGWPGANPTDTEFFQKKHNFMNSKLTCFGMTKRSGRSAENDTGLSALMNSNTSAVCLVGKSWDFHVDVALGITNEENLENITESTKHFVKAKKEFMFDAEHFFDGYKANPKYALSCIKAAYDQGARWVVLCDTNGGTLPHEVSKI

SEQ ID NO: 109220 - protein, 244 aa, Unknown
  Bacterial polypetide isolated from the Sargasso Sea
AIKQLGGGTLTLRSNELHLGQGRESIADTAKILSTYGDGFMLRTDSDKKVENFKKYLSIPVINGLSPSSHPTQVLSDVFTVEEIMKKSISNLNICWIGDSNNVLDSLIAASVKFSFRLSIGCPKKFEPGKEVRAWVKKNNKKINIYNDAKKAVSNADVIFSDKVFSLNDKVNKKKKIQAFKNFKIDKKLMSYAKKSCIFLHCLPRGDEVSDDVFLGKKSHVWQQALNRVHVQKSILLYCFRKLR

SEQ ID NO: 109221 - protein, 65 aa, Unknown
  Bacterial polypetide isolated from the Sargasso Sea
MTDKGVSMNDKVNKVTKKKTLKPYQVNKKLMSKANSEAVFMHCLPVGRGEEVTNEVIDGKQSVVW

SEQ ID NO: 109222 - protein, 160 aa, Unknown
  Bacterial polypetide isolated from the Sargasso Sea
KKKPISKLKICWIGDSNHVLDSLIAASVKFSFRLSIGCPKKFAPDKKVKDWVIKNKKKIFIHHDPKKAALDADVIFSDKVISLNDKVNKKRKKQHFQKFKIKKEIFNYTKKNCIFLHCLPRGDEVDEDVFLGKNSYVWQQALNRVHVQKSILLYCFGKLR

SEQ ID NO: 109223 - protein, 89 aa, Unknown
  Bacterial polypetide isolated from the Sargasso Sea
MTKRIRHFLNINELSTKEMLLIIQKGHFLKKNYGRKFLKEKKILAMIFEKPSTRTRISFEVGMKKLNGDVVVLDQHYSQLGRGESCRIP

SEQ ID NO: 109224 - protein, 275 aa, Unknown
  Bacterial polypetide isolated from the Sargasso Sea
KKILITTGGSGGHTIPATILFDHLKKNFEVFLETDKRGASFIDSNKYKYKVFSSVKLDSFFTIPINLFKIIILFVNSIIYLKKNNFNIIISTGGYMSIPTCFAAKILGLDIFLLEPNMAIGRSNRFFLNFTKKIFCYSTNLKYFPKKYEKKITVIPSLLRKEVYEIKKNKEKEYKKFKILIIGGSQGAMIFEKKIIPLIIQLSKKLNISVYHQIKFDEKKYKEISETYQKNNINFELFNFKHNILKYISESDLVITRAGASTLAELVYLNIPFVA

SEQ ID NO: 109225 - protein, 199 aa, Unknown
  Bacterial polypetide isolated from the Sargasso Sea
MSKERLYIFDTTLRDGAQTQGVDFSIEDKEKIASALDNLGVDYIEGGWPGANPTDTEFFQKKHNFKNSKLTSFGMTKRSGRSAENDTGLSALMNSNTSAVCLVGKSWDFHVDVALGITNEENLNNISESTKHFVKAKKEFMFDAEHFFDGYKANSKYALSCIKAAYDQGARWVVLCDTNGGTLPHEVSKIVSEVSKVVP

SEQ ID NO: 109226 - protein, 213 aa, Unknown
  Bacterial polypetide isolated from the Sargasso Sea
ILSTYGDGFMLRTDSDKKVENFEKYLSIPVINGLSPSSHPTQVLSDVFTVEEIMKKPISNLNICWIGDTNNVLDSLIAASVKFSFKLNIGCPKKFEPGKEVKAWVKKYNKQIYIYNDPKKAVLNADVIFSDKVISLNDKVNKKKKIKAFKNFKIDKKLMSYAKKSCIFLHCLPRGDEVSDDVFLGKKSHVWQQALNRVHVQKSILLYCFGKLR

SEQ ID NO: 109227 - protein, 198 aa, Unknown
  Bacterial polypetide isolated from the Sargasso Sea
GKPLSVPQGIISLMTRFGMEVTLAHPEGYDLVPECIKNASEFASTSGGSFSVSNSMEEAFEDADIVYPKSWAPYKVMETRTELLRNKDHKGLEDLEQKCLAQNAKFTGWECTEALMKTTRDGKALYMHCLPADISTVSCEKGEVEASVFDRYRTPTYIQAGYKPYIIAAMIFAAKFDDPAALFQDLIQRDLKRVHTIS

SEQ ID NO: 109228 - protein, 73 aa, Unknown
  Bacterial polypetide isolated from the Sargasso Sea
VNKTSKKKILKPYQVNKKLMSKANSDAIFMHCLPVGRGEEVTNEVIDGKQSVVWRQALNRVHAQKSIIKWCLD

SEQ ID NO: 109229 - protein, 104 aa, Unknown
  Bacterial polypetide isolated from the Sargasso Sea
KVKLIITSKPLEAATGADCVMTDKWISMNDKVNKISKKKTLKPYQVNKKLMSKANSDAVFMHCLPVGRGEEVTNEVIDGKQSVVWRQALNRVHAQKSIIKWCID

SEQ ID NO: 109230 - protein, 278 aa, Unknown
  Bacterial polypetide isolated from the Sargasso Sea
DWDAYKKELQARQDPTVNSLGMIFEKLQRDPKRVIFAEGEQPEIIRVAALWRDNGYGTPILVGKEEKVLATMKGANINPNGIEIYNAAICDENSKYVDHIYQKLQREGVLYSDCNRMVKTDRNVFASAMLECGKADGMVTGLTRGYRKSLTDVKQVIQNKEDHVLMGVSMVISKGRTIFISDSACSEISSSERLAQTAIQTANKVRDLGYEPRVAFISFSNFGSALKTESTRIKEAVKILDEREVNFEYDGEMSADVALNADKLTKYPFCRLSEPANI

SEQ ID NO: 109231 - protein, 236 aa, Unknown
  Bacterial polypetide isolated from the Sargasso Sea
MKHFINLKDIPAKDLRKIITDAKKRKKQRKKLNNLEVDKGSPLRGKLLVQMFEKSSLRTRLSFYLAIKQLGGSTLTLRPDELHLSKGGESIQDTAKVLSNFGNAFMLRTSNDEKLEEFKKYLSIPIINGLSPSSHPTQILSDIFTVEEIKKKPISKLNITWIGDSNNVLNSLIAASIKFSFKLNIGCPTKYQPSKIIMKYIKSNNNKIRILHDPKKAAKGADVIFSDKVISMNDKG

SEQ ID NO: 109232 - protein, 165 aa, Unknown
  Bacterial polypetide isolated from the Sargasso Sea
MVEEIKKKPISKLKICWIGDSNNVLDSLIAASVKFSFRLSIGCPKKFAPSKKVKDWVTKNKKKIFVYHDPKKAALDADVIFSDKVISLNDKVNKKRKKQQFQKFKIKKEIFNYSKKNCIFLHCLPRGDEVEEDVFLGKNSHVWQQAFNRVHVQKSILLYCFGKLR

SEQ ID NO: 109233 - protein, 96 aa, Unknown
  Bacterial polypetide isolated from the Sargasso Sea
MVKNFIDINYFNKKQLDEIIILAKKIKKNPKKFSSFCKDKTLGMIFEKQSLRTRLSFNIGMQKLGGRVLELNSNDIGFDNKREKPEDILNVLSQVY

SEQ ID NO: 109234 - protein, 189 aa, Unknown
  Bacterial polypetide isolated from the Sargasso Sea
MKHFINLKDIPSKDLRKIIVDAKQRKKQRKKLNTLEPDKGSPLKGKMLVQMFEKASSRTRISFYLAIKQLGGGTLTLRSNELHLGQGGETIADTAKILSKYADGFMLRTDDDKKIEDFQKYLTIPIINGLSPSSHPTQVLSDIFTVEEIKKKPISKLKICWIGDSNNVLDSLIAASVKFSFRLSMDVQK

SEQ ID NO: 109235 - protein, 88 aa, Unknown
  Bacterial polypetide isolated from the Sargasso Sea
MNNFINISDLSKIELRSIIDGAKQRKSKRGDKPHSLPDTEQPLQGKTMIMIFEKTSTRTRISFDLAVRQLGGSSIILNQDEIHYGKGD

SEQ ID NO: 109236 - protein, 211 aa, Unknown
  Bacterial polypetide isolated from the Sargasso Sea
STYCDGFMLRTDSDHKVDSFKKYLSIPVINGLSPSSHPTQVLSDIFTVEEIKKKLISKLNITWIGDCNNVLNSLIAASVKFSFKLSIGCPKKYEPKKLILNWVKKNNKKIHIFNDPKKAALNADVIFSDKVISINDKVDKKKKLKNFSKFKINKKLMSYAKKDCIFLHCLPRGTEVEDKVFRSNQSKVWLQALNRVHVQKSILLYCFGKLR

SEQ ID NO: 109237 - protein, 198 aa, Unknown
  Bacterial polypetide isolated from the Sargasso Sea
MTKNLDLNGLQSIAHNYDLFYIDLWGVIHNGINLHEQAIAVLKELLKNNKMVVLLTNAPRPNETVRNFLQKMGMDKELREHVFTSGEAALNYLKKSFKSKKFFHIGPPRDFDLFNLFEKNKSADIIESEYLLCTGLFDNHDKDLIYYKSLLEKHINKKMICTNPDLIVDRGNVRELCAGSVAMIFEKMGGEVIYFGKP

SEQ ID NO: 109238 - protein, 91 aa, Unknown
  Bacterial polypetide isolated from the Sargasso Sea
MLKPIKLASKNFLSSLDTSCEEFLHILELAKNFKNKDLNIKLKEKVLGLIFDKSSTRTRVSFQVAMSRLGGTTVDLNPTTSQMGGESRLEI

SEQ ID NO: 109239 - protein, 36 aa, Unknown
  Bacterial polypetide isolated from the Sargasso Sea
GQEVTSQVMEDNRSKIWQQAENRLHAQKALLSYLLS

SEQ ID NO: 109240 - protein, 258 aa, Unknown
  Bacterial polypetide isolated from the Sargasso Sea
SFEVAMKELGGHAIYIDWLTSNFVLSGIEYETEYLSRNVSSIMARMMHHDDLLKIISSSNVPVINGCDERFHPCQALTDLFTISEIFQTNLKDARVVYVGVQNNVSNSLVIICDKLGVSLTLATPEIEDEDESLDEDVQKILAESASINHTADVRSAVKDGDFIYTDTWIDMQYFNNPSLASEKNAKIEKMIPFQVNKSLLQDVNCKIMHDMPIHEGYEITGEMVRDPRSIIFQQAENRLHAQKGLLWWLYEQAELIQ

SEQ ID NO: 109241 - protein, 273 aa, Unknown
  Bacterial polypetide isolated from the Sargasso Sea
GASFIDSKKYKYKVFSSVKLDSFFSIPINLFKIIILFVNSIIYLKKNNFNIIISTGGYMSIPTCFAAKILGLDIFLLEPNMTIGRSNRFFLNFTKKIFCYSANLKYFPKKYEKKIIVIPSLLRKEVYEIKDNKEKKYKKFKILIIGGSQGAMIFEKKLIPLITQLSKKLNISVYHQIKFDEKKYKEISEIYQKNNINFELFNFKHNILKYISESDLVITRAGASTLAELVYLNVPFVAVPFPQSKDNHQLENANYYKNKNCCWVFEEKNFFKE

SEQ ID NO: 109242 - protein, 282 aa, Unknown
  Bacterial polypetide isolated from the Sargasso Sea
KRKKLNTLEPDKGSPLKGKMLIQMFEKASSRTRISFYLAIKQLGGGTLTLRPNELHLGQGGETIADTAKILSTYGDGFMLRTDDDKKIEDFQKYLTIPIINGLSPSSHPTQVLSDIFTVEEIKKKPISKLKICWIGDSNNVLDSLIAASVKFSFRLSIGCPKKFAPGKKVKDWVSKNKKKIFIYHDPKKAAMDADVIFSDKVISLNDKVNKKRKKQQFQKFKIKKEIFEYTKKNCIFLHCLPRGDEVEESVFLGKNSHVWLQALNRVHVQKSILLYCFGKLR

SEQ ID NO: 109243 - protein, 74 aa, Unknown
  Bacterial polypetide isolated from the Sargasso Sea
MKNFINISDCSSVELRAIIEEAKKRKQNRSGLNKSAPDEDKPFEGKSMAMIFEKPSTRTRMSFDIAVKQLGGSS

SEQ ID NO: 109244 - protein, 271 aa, Unknown
  Bacterial polypetide isolated from the Sargasso Sea
LGGEVRETTEVKASSLAKGESLYDTARVLSGYSDIIVMRHPESGSVAEFAEASRVPVINGGDGPNEHPSQALLDLYTMRTEISDQGKSLDGMSIALVGDLRYGRAVHSLCKLLSLYSNTVLHLISPSELALPEQIRALLIDRGHTCKVFDDIEIGISGVDIVYVTRTQEERFPTQADADKYKGLFRLNQQIYTQNCAPNTVIMHPLPRDSRSEAQELDQDLNDNPNLAIFRQTDNGILIRMALFALVLGVEREVGNYAQPVTWFNAKRDNP

SEQ ID NO: 109245 - protein, 227 aa, Unknown
  Bacterial polypetide isolated from the Sargasso Sea
MSALNNDDWISSTYRNHGHAIAKNCELKEITSEIFGRSTGICKGKGGSMHISDFDKGMLGSFGIVAAGPPVVLGAALQEKINKGSKNSVTFFGDGAIHNGAFHEAAGLAKLWDIPMLFVCENNGYAEATATDWHLNTKNLSDISRAYDMISYRGDGNNVFEVHEITKNALIESKEKNTPIFIEFKNYRFSGQYEGDTQLYQPLEEINEAKKNDPIKVAIEKANDYNF

SEQ ID NO: 109246 - protein, 215 aa, Unknown
  Bacterial polypetide isolated from the Sargasso Sea
TAKVLSEYVDIVMLRTASHDNLEEFGKYLEIPIINGLSDQSHPCQIISDILTFEEIKGNIENKTISWLGDGNNNMSNSLIEAAGKFKFKLKIGCPKKYSPGKKILKWAKKNNVKLTISENPVEAVKDSDCVMTDKWISMNDKVNKKFKKKNLKKYQVNKKLMKYAKSDAIFMHCLPVGRGEEVTNEVIDGKQSVVWKQALNRVHAQKSIINWCLD

SEQ ID NO: 109247 - protein, 229 aa, Unknown
  Bacterial polypetide isolated from the Sargasso Sea
MSFFNKGGESLSDTAKIISSFGNAFMLRTDSEQKLNILKKHMTIPVINGLSPKSHPTQVLSDVFTIEEIKKKSISKLQICWIGDSNNVLNSLVEASVKFSFKLNIGCPKNYEPNKELLSWVKKNNGKVKIFHDSKKAAKGSDVIFTDKVISMNDKVNKFRKIKNFKKFKVTSAVMKCAKKDVIFLHCLPRGPEVSNDVFLGKQSKVFQQALNRIYVQKSILLYCFEKLR

SEQ ID NO: 109248 - protein, 192 aa, Unknown
  Bacterial polypetide isolated from the Sargasso Sea
MSKERLYIFDTTLRDGAQTQGVDFSIEDKEKIASALDNLGVDYIEAGWPGANPTDTEFFQKKHNFKNSKLTCFGMTKRSGRSAENDTGLSALMNSNTPAVCLVGKSWDFHVDVALGITNEENLENISESAKHFVKAKKEFMFDAEHFFDGYKANPKYALSCVKAAYDQGARWIVLCDTNGGTLPNEVSKNSN

SEQ ID NO: 109249 - protein, 200 aa, Unknown
  Bacterial polypetide isolated from the Sargasso Sea
DDDKKIDDFQKHLTIPIINGLSPSSHPTQVLSDIFTVEEIKKKPISKLKICWIGDSNNVLDSLIAASVKFSFRLSIGCPKNFAPGKKVKDWVSKNKKKIFIYHDPQKAALDADVIFSDKVISLNDKVNKKRKKQQFKKFKIKKEIFNYAKKNCIFLHCLPRGDEVEEDVFLGKNSHVWQQALNRVHVQKSILLYCFGKLR

SEQ ID NO: 109250 - protein, 237 aa, Unknown
  Bacterial polypetide isolated from the Sargasso Sea
MSKERLYIFDTTLRDGAQTQGVDFSLEDKEKIALALDNLGVDYIEAGWPGANPTDTEFFQKKHNFKNSKLTSFGMTKRSGRSAENDTGLSALMNSNTSAVCLVGKSWDFHVDVALGITNEENLDNISESAKHFVKAKKEFMFDAEHFFDGYKANPKYALSCIKAAYDQGARWVILCDTNGGTLPHEVTQIVSEVTKVVPGKNLGIHAHNDTGNAVANSLAAVFSWCSTNSRYNKWIR

SEQ ID NO: 109251 - protein, 87 aa, Unknown
  Bacterial polypetide isolated from the Sargasso Sea
MNNFINISDISKKELRSIIDNSKKRKSERGDKPHSQTDNDQPLKGKTMIMIFEKTSTRTRISFDLAVKQLGGSSIILNQDEIHYGKR

SEQ ID NO: 109252 - protein, 244 aa, Unknown
  Bacterial polypetide isolated from the Sargasso Sea
VVNLQCDMDHPTQSMADLQHLVQTYGSLENLKGKKIAMTWAYSPSYGKPLSVPQGIISLMTRFGMEVTLAHPEGYDLVPECMKKASEFASTSGGSFSVSNSMEEAFTDADIVYPKSWAPYKVMETRTELLRNKDHKGLEDLEQKCLAQNAKFTGWECTESLMKTTRDGKALYMHCLPADISSVSCEKGEVEASVFDRYRTPTYIQAGYKPYIIAAMIFAAKFDNPAALFQDLILRDLKRVHTIS

SEQ ID NO: 109253 - protein, 213 aa, Unknown
  Bacterial polypetide isolated from the Sargasso Sea
ILSTYGDGFMLRTDSDKKINEFSKYLKIPVINGLSPSSHPTQVLSDVFTAEEIKKKPISKLNICWIGDSNNVLNSLIAASVKFSFKLNIGCPKNYTPKKFVLDWVTKSKKKIYIFNDPKKAVKNADVIFSDKVISLNDNVNVKKKIKDFKKFYINKNLLKYAKKNAIFLHCLPRGNEVSDEVFLGKQSHVWQQALNRVHVQKSILLYCFGKLR

SEQ ID NO: 109254 - protein, 301 aa, Unknown
  Bacterial polypetide isolated from the Sargasso Sea
MNHFINLKDIPAKDLRKIIIDAKKRKSLRKKLNTLEVDQGAPLKGKLLIQMFEKSSLRTRLSFYLAIKQLGGGTLTLRSNELHLGQGGESIADTAKILSTYGDGFMLRTDSDKKVENFEKYLSIPVINGLSPSSHPTQVLSDVFTVEEIIKKPISKLNICWIGDSNNVLDSLIAASVKFSFKLSIGCPKKFQPGKEVIAWVKKNNKKIYIYNDVKKAVSGADVIFSDKVISLNDKVNKKKKIQAFKKFKINKKLMSYAKKNCIFLHCLPRGDEVSDDVFLGKKSHVWQQALNRVHVQKRYF

SEQ ID NO: 109255 - protein, 189 aa, Unknown
  Bacterial polypetide isolated from the Sargasso Sea
SIDDTAKILSTYGDGFMLRTDSDKKVENFEKYLSIPVINGLSPSSHPTQVLSDVFTVEEIMRKPISKLNICWIGDSNNVLDSLIAASVKFSFKLSIGCPKKFEPGKEVRSWVKKNNKQIYIYNDAKKAVSGADVIFSDKVISLNDKVNKKKKIQAFKNFKIDQKLMSFAKKSCIFLHCLPRGDEVSNDV

SEQ ID NO: 109256 - protein, 82 aa, Unknown
  Bacterial polypetide isolated from the Sargasso Sea
MNNFLDISHLSKKSLNVIIDDARDIKNRRKGFPNGALDKPAFLQNCVVGLIFEKPSTRTRVSFDVGVRQMGGTSMILSRNDL

SEQ ID NO: 109257 - protein, 240 aa, Unknown
  Bacterial polypetide isolated from the Sargasso Sea
MGGGTLTLRSNELHLGRGGESIADTAKILSTYGDGFMLRTDSDKKVENFRKYLSIPVINGLSPSSHPTQVLSDVFTVEEIKKKPISKLNICWIGDSNNVLDSLIAASVKFSFKLSIGCPKKFEPGTKVRNWVKKNKKKIFIYNDPKKAVSNADVIFSDKVISLNDKVNKKKKIAQFKKFKINKKLIGHAKKDCIFLHCLPRSNEVTDEIFLGKRSHVWQQALNRVHVQKSILLYCFGKLR

SEQ ID NO: 109258 - protein, 172 aa, Unknown
  Bacterial polypetide isolated from the Sargasso Sea
RTAENAWWSLAPHDISVILRLMGGLPESVTCHGGSFVTEGVNDLANAQLQFSAGRQARIAVSWLHPVKERKLFVIGSERSAIFDDTANSLTLFDQQVNVNKGVPELNDQGANSVVLPVDEPLQRECQHFLECVQTRATPLTNGSSGAAVVRVLEAGQRSLQQGGKEIKIDEH

SEQ ID NO: 109259 - protein, 173 aa, Unknown
  Bacterial polypetide isolated from the Sargasso Sea
QVLSDVFTIEEIKARPISKLQVCWIGDGNNNVINSLIEASVKFSFKLNIGCPKKYEPKKSLLIWAKKNKSRIKIFNESKKAANGADVIFTDKVISINDKVNRVKKLKDFKNFRVDSKVMKSAKKDAIFLHCLPRGTEVSNDVFLSKKSKVWQQALNRVHVQKSILLYCFNKLR

SEQ ID NO: 109260 - protein, 152 aa, Unknown
  Bacterial polypetide isolated from the Sargasso Sea
GGRFSVSNSMEEAFADADIVYPKSWAPYRVMETRTELLRNKDHKGLEDLEQKCLAQNAKFTGWECTESLMKTTRDGKALYMHCLPADISSVSCEKGEVEASVFDRYRTPTYIQAGYKPYIIAAMIFAAKFDNPAALFQDLIKRDLKRVHTIS

SEQ ID NO: 109261 - protein, 53 aa, Unknown
  Bacterial polypetide isolated from the Sargasso Sea
MCGIVTHNRTHKDVGIDCDLHCLPAQPCAAASLISSMVATFCVLPASRPTKLA

SEQ ID NO: 109262 - protein, 96 aa, Unknown
  Bacterial polypetide isolated from the Sargasso Sea
KPEDAVKDSDCIMTDKWVSMNDKVNKKLKKKSLKNFQVNKKLMKHAKSDAIFMHCLPVGRGEEVTDEVIDGKQSVVWRQALNRIHIQKSIIIWCLN

SEQ ID NO: 109263 - protein, 122 aa, Unknown
  Bacterial polypetide isolated from the Sargasso Sea
CPKKYSPNKSILKLAKKERIKLTITSKPLEAVDGADCVMTDKWISMNDKVNKASKKKILKPYQVNKKLMSKANSDAIFMHCLPVGRGEEVTNEVIDGKQSVVWRQALNRVHAQKSIIKWCLD

SEQ ID NO: 109264 - protein, 133 aa, Unknown
  Bacterial polypetide isolated from the Sargasso Sea
AGNLILNLIFGCPKKYSPNKSILKLAKKEKVKLTITSKPIEAVTGADCVMTDKWVSMNDKVNKVSKKKTLKPYQVNKKLMSKANSDAIFMHCLPVGRGEEVTNEVIDGNQSVVWRQALNRVHAQKSIIKWCID

SEQ ID NO: 109265 - protein, 185 aa, Unknown
  Bacterial polypetide isolated from the Sargasso Sea
RLEDLNIKVPINNNGSFLDIHITQGTSFGSNHTTTNLAIKAIMKNINNIDFNSCSLDLGSGSGILSILLSKIGFNSVHSCEIDDFARKESLINLKKNLIQDKVKFVDFPSNLKTKYSLIVSNISGEYLEKNFGYIVSKLMERGIFIISGLNKSKKESFTNLASIENIKILDVLVSGSWMAMIFEK

SEQ ID NO: 109266 - protein, 276 aa, Unknown
  Bacterial polypetide isolated from the Sargasso Sea
MIEKEKINWIYKKIFTIRFFEERIKKIAKEKTVPGYLHTCIGSEAICVGVMAALNQDDWISSTYRNHGHAIAKGCELNEITSEIYGRKTGICKGRGGSMHISDFSKGMLGSFGIVAAGPPVVLGAALQEKINKSNKTCVSFFGDGAIHNGAFHEAAGLAKLWDIPMIFVCENNGYAEATATDWHLNTKELSDITKAYDMLSYIGDGNNVFEVYDISKKAINEAKQKNTPIFLEFKNYRFSGQYEGDTQLYQPQEEIDKAKQNDPIKLAKENSSNMV

SEQ ID NO: 109267 - protein, 188 aa, Unknown
  Bacterial polypetide isolated from the Sargasso Sea
HLDIPIINGLSDKSHPCQIMSDILTYEESNGSITGKTVSWLGDGDNNMSNSLIEAAGKFKFNLKIGCPKKYTPGKKILGWAKKNKVNLLITQKPDEAVKNSDCVMTDKWVSMNDKVNKKTKKKVLKPFQVNKKLMKKANSNAIFMHCLPVGRGEEVTDEIIDGKQSVVWRQALNRVHAQKSIIKWCLD

SEQ ID NO: 109268 - protein, 292 aa, Unknown
  Bacterial polypetide isolated from the Sargasso Sea
AKNIKLTKTKNKILILKDQFPSNVYPWMELVRNNMGIIEKIDSCNENSITEKLIDRINEQVIAVAIPNIRWTDGYVLDLERISIACKNYDVKLILDLTQSAGAMEIDLGKIKPDFAIIANYKWMLGPYSTGFMYVSDNFIEGIPLEETWIGRKNSEDFSKLTVYQSEYNFDSIRFDMGQRANFTLMPGVMASLEQLHDWGIKNIENTLYENNKIICKGLNELGFDILEENKRAPHFISAKLPCLDGNLVIKKLKMNNIFISERSGYLRITPHLWNNEQDFLKLLECLKLIIN

SEQ ID NO: 109269 - protein, 309 aa, Unknown
  Bacterial polypetide isolated from the Sargasso Sea
MKHFINLKDIPSKDLKKIIIDAKGRKKLRKKLSTLEVDKGAPLKGKLLIQMFEKSSLRTRLSFYLAIKQLGGGTLTLRSNELHLGQGGESIADTAKILSTYGDGFMLRTDSDKKVENFRKYLSIPVINGLSPSSHPTQVLSDVFTVEEIKKKPISKLNICWIGDSNNVLDSLIAASVKFSFKLSIGCPKKFEPGTKVRNWVKKNKKKIFIYNEPKKAVSNADVIFSDKVISLNDKVNKKKKLAQFKKFKIDKKLMGHAKKNCIFLHCLPRGNEVTDDIFLGKKSHVWQQALNRVHVQKSILLYCFGKLR

SEQ ID NO: 109270 - protein, 488 aa, Unknown
  Bacterial polypetide isolated from the Sargasso Sea
MNIIEPGIRNLALAKDILLTPYGLDESLLTRTIADIFTHRVDYADLYFQATRSEAWSLEEGIVKSGSFSIDQGVGVRAVAGDRTAFAYSDDLSPEAIAQAAAATKAIAAAGGGRQKIKAASSLKGISGRDLYLPSDPLASLDATAKVKLLERIEQMARGRDPRITQVMAGLAGEYDVVLVARSDGALAADIRPLVRVSVTVIAEQNGRREIGSGGGGGRFDYGYFTDDVLSRYVDDAVHAALVNLDARPAPAGAMTVVLGPGWPGVLLHEAIGHGLEGDFNRKGSSAFAGRIGERVAAKGVTVVDDGTLPNRRGSLNIDDEGNPTQCTTLIEDGILKGYIQDTLNARLMKMPVTGNARRESYAALPMPRMTNTYMLNGDKDPQEIIASVKNGLYAVNFGGGQVDITNGKFVFSASEAYMIENGKITYPVKGATLIGSGPESLKDVSMIGNDMSLDSGVGVCGKEGQSVPVGVGQPTLRIDRMTVGGTA

SEQ ID NO: 109271 - protein, 369 aa, Unknown
  Bacterial polypetide isolated from the Sargasso Sea
WGMGMQEATVIKWLKNEGDKVKKGDPVVEVESSKVNAEVEATADGIILKIKENEGEVVKVGGVLAFIGKEGETIEDEQELKPEPAQTNKLRAEKDNKNIKVQITPIARKLAKDLKMNLEEIIGTGPNGRITEEDIKNHKASDDGNASDNQISGIRKIISLRMTQSSQIPAVTLTTKVDVTECVKFQSNLLSDWRKEKIRPTFQDIIAKAVSKSLSEFNIFNSHFVDNQIKTFNEINLGIAYALKEGLVVPVIKKSQEKSLLEIAKEIREFNSKEKRGFSQEDISGSTFSITSLNSTIVDSFNPLINPPEVGILGIGRISEEAQSISDNLTTRKICFLNLTFDHRAVDGFPAAKFLESIVNNIQSPQSLV

SEQ ID NO: 109272 - protein, 166 aa, Unknown
  Bacterial polypetide isolated from the Sargasso Sea
DKRFLLYSQTFSLSGSYGSSSNDLEDLTNEDFSVWNKGLNVFMPVFNAGKLIANKRLAKSNREIAMLDFVNALLTAYKEIESGFESDLTSNQALEIINENIILSENIYNTTFDGFMKGSSSFEDAINANNALYDNLDLKARLEKVRIEQRINLILALGGGFNITND

SEQ ID NO: 109273 - protein, 83 aa, Unknown
  Bacterial polypetide isolated from the Sargasso Sea
MIKPIKLDTNNFLSSLDLSSKEVIDIIELAEKFKNKKLNIKFQEKVLGLIFDKSSTRTRVSFQVAMSKLGGTTIDLLPKYLAN

SEQ ID NO: 109274 - protein, 395 aa, Unknown
  Bacterial polypetide isolated from the Sargasso Sea
MDRLIEELKPLQSGLYGKDFLLTWERTEPELKAILKIAEGLKSLYESNCSTKVFQSGLAVSLFRDHSTRTRFSYASAANLLGLTVQDLDEGKSQIAHGETVRETANMISFLTEAIGIRDDMYLGAGNAYMQEVAESLDLGRADGVLHQRPVVVNLQCDMDHPTQSMADLLHLVQTYGSLENLKGKKIAMTWAYSPSYGKPLSVPQGIIGLMTRFGMEVTLAHPEGYDLVPECMKNAAEFASTSGGSFSVSNSMEEAFADADIVYPKSWAPYKVMETRTELLRNKDHKGLEDLEQKCLAQNAKFTGWECTESLMKTTRDGKALYMHCLPADISSVSCEKGEVEASVFDRYRTPTYIQAGYKPYIIAAMIFAAKFDNPAALFQDLIQRDLKRVHTIS

SEQ ID NO: 109275 - protein, 259 aa, Unknown
  Bacterial polypetide isolated from the Sargasso Sea
MFEKSSLRTRLSFYLAIKQLGGGTITLRSNELHLGQGGESIADTAKILSTYGDGFMLRTDDDNKLENFKKYLSIPVINGLSPSSHPTQVLSDIFTVEEIKKKSISNLNICWIGDSNNVLNSLIAASVKLSFDLRIGCPKKFQPNLDIINWVKKNRRKIYIYNDPIKAAHNADVIFSDKVISLNDKVNKNKKLKEFKNFKINKKLFSHAKKDCIFLHCLPRGNEVTDEIFLGKRSYVWQQALNRVHIQKSILLYCFGKLR

SEQ ID NO: 109276 - protein, 325 aa, Unknown
  Bacterial polypetide isolated from the Sargasso Sea
MIEKEKINWIYKKIFTIRFFEERIKKIAKEKTVPGYLHTCIGSEAICVGVMAALNQDDWISSTYRNHGHAIAKGCELNEITSEIYGRKTGICKGRGGSMHISDFSKGMLGSFGIVAAGPAVVLGAALQEKINKSNKTCVSFFGDGAIHNGAFHEAAGLAKLWNIPMIFVCENNGYAEATATDWHLNTKELSDITKAYDMLSYIGDGNNVFEVYDLTKKAISEAKQKNTPIFLEFKNYRFSGQYEGDTQLYQPQEEIDKAKQNDPIKLAKENSSKYGLNKNDLEKIINEVKKEVDKAFDFADTQPWPQPEDALEEVYVNYPVEIKT

SEQ ID NO: 109277 - protein, 26 aa, Unknown
  Bacterial polypetide isolated from the Sargasso Sea
MYFDQAENRMHAQNAIMVYLNEVKNS

SEQ ID NO: 109278 - protein, 198 aa, Unknown
  Bacterial polypetide isolated from the Sargasso Sea
MKHFINLKDIPSKDLRKIIVDAKQRKKQRKKLNILEPDKGSPLKGKMLVQMFEKASSRTRISFYLAIKQLGGGTLTLRSNELHLGQGGETIADTAKILSTYGDGFMLRTDDDKKIDDFQKHLTIPIINGLSPSSHPTQVLSDIFTVEEIKKKPISKLKICWIGDSNNVLDSLIAASVKFSFRLSIGCPKKFAPGKKVK

SEQ ID NO: 109279 - protein, 355 aa, Unknown
  Bacterial polypetide isolated from the Sargasso Sea
MKSIYESNRSTKVFQSGLAVSLFRDHSTRTRFSYASAANLLGLTVQDLDEGKSQIAHGETVRETANMISFLTEAIGIRDDMYLGAGNAYMQEVAESLDLGRADGVLHQRPVVVNLQCDMDHPTQSMADLQHLVQTYGSLENLKGKKIAMTWAYSPSYGKPLSVPQGIISLMTRFGMEVTLAHPEGYDLVPECMKNASEFASTSGGSFSVSNSMEEAFADADIVYPKSWAPYKVMETRTELLRNKDHKGLEDLEQKCLAQNAKFTGWECTESLMKTTRDGKALYMHCLPADISSVSCEKGEVEASVFDRYRTPTYIQAGYKPFIIAAMIFAAKFDNPASLFQDLVQRDLKRVHTIS

SEQ ID NO: 109280 - protein, 297 aa, Unknown
  Bacterial polypetide isolated from the Sargasso Sea
MKHFINLKDIKTKDLRNIILDAKKRKNYRRKLNTLEVDKGSPLKGKLLIQMFEKSSLRTRLSFYLAIKQLGGGTITLRSNELHLGQGGESIADTAKILSTYGDGFMLRTDDDNKLENFKKYLSIPVINGLSPSSHPTQVLSDIFTVEEIKKKSISNLNICWIGDSNNVLNSLIAASVKLSFNLRIGCPKKFQPNLDVINWVKKNKGKIYIYNDPIKAANNADVIFSDKVISLNDKVNKKKKLKEFKNFKINKKLFSYAKKDCIFLHCLPRGNEVSDEIFLGKRSYVWQQASNRVHVQ

SEQ ID NO: 109281 - protein, 142 aa, Unknown
  Bacterial polypetide isolated from the Sargasso Sea
MTNEAYIFDSIRSPRGKRKNGSLNEITPTDLLSKLMLALSIKHDFDSSQIDDVVIGCVMPVNDQGANIGKNAAQYAGWDVDVPGMQINRFCGSGLEAINIAAMKINSGWENVIVSGGVESMSRVPIGADGGSMIFESKVSLN

SEQ ID NO: 109282 - protein, 127 aa, Unknown
  Bacterial polypetide isolated from the Sargasso Sea
MKNFINISDLSKNDLRAIIDGAKKRKSERGKIPNSQPDVDLPIKGKTMIMLFGKPSTRTRISFDLAVKQLGGSSIILNQDEIHYGKGDETIKDTAKVLSQYADILMIRTDSHNDVDEFQKHLDIPII

SEQ ID NO: 109283 - protein, 144 aa, Unknown
  Bacterial polypetide isolated from the Sargasso Sea
MKQDLLTFADWTPEAMQKLLQLAVEIKQAPASYSNVLAGKSIVALFEKPSLRTRVSFDIGINKLGGHMVYLDAQSGKLAGREDAVDTAANLACWADAIVARVFSHETLETFSKAANVPVVNALCDKYHPCQGLADYLTMFERFG

SEQ ID NO: 109284 - protein, 157 aa, Unknown
  Bacterial polypetide isolated from the Sargasso Sea
FASTSGGSFSVSNSMEEAFADADIVYPKSWAPYKVMETRTELLRNKDHKGLEDLEQKCLAQNAKFTGWECTESLMKTTRDGKALYMHCLPADISSVSCEKGEVEASVFDRYRTPTYIQAGYKPYIIAAMIFAAKFDNPAALFQDLVQRDLKRVHTIS

SEQ ID NO: 109285 - protein, 191 aa, Unknown
  Bacterial polypetide isolated from the Sargasso Sea
MSKEKLYIFDTTLRDGAQTQGVDFSIDDKEKISASLDALGVDYIEGGWPGANPTDTEFFNKDQGFKNAKLTAFGMTKKSEHSAENDPMLASLINSKSSSVCLFGKSWDFQVDVALGITNEQNLENISESAKHIVSSGKEFMFDAEHCFDGYKANPEYTLSCLKAAYDQGARWIVLCDTNGGTLPHEVSKIV

SEQ ID NO: 109286 - protein, 225 aa, Unknown
  Bacterial polypetide isolated from the Sargasso Sea
MISPGCRSTSAASRTSEGKKIAMTWAYSPSYGKPLSVPQGIIGLMTRFGMDVTLAHPEGYDLIPDVIEVAKENAKASGGSFRQVTSMEEAFKDADIVYPKSWAPYQVMEQRTELLRANDHAGLKELEQHCLAQNAKHKDWHCTEEMMALTKGGEALYMHCLPADISGVSCKEGEVSEGVFEKYRIATYKEASWKPYIIAAMIVARKFSAPGAALEGLIKEAQKRV

SEQ ID NO: 109287 - protein, 238 aa, Unknown
  Bacterial polypetide isolated from the Sargasso Sea
MLSDKNLHQNNISLQLFGHDDLFHNFVKLYKNKNLPKVNLVSGEKGIGKFTLFFHLIIYIFSKEYKQKYNLDFKLIDENNLILNKIKSHTFQNYFYFSNEDKNKLSIEKVREVKRKLYSSTLDDKPRFIIFDDVEFINNNVANSLLKMIEEPSNNNYFILINNKKAKLIDTLKSRSIETKIFLNFDQKDLILKNLLKNQNISDHFVFDYLHLTTPAMLLKYYNILTEINAILIPPFLM

SEQ ID NO: 109288 - protein, 216 aa, Unknown
  Bacterial polypetide isolated from the Sargasso Sea
TAKILSTYGDGFMLRTNSDKKVENFEKYLSIPVINGLSPSSHPTQVLSDVFTVEEIMKKPISNLNICWIGDSNNVLDSLIAASVKFSFKLSIGCPKKFEPGKGVRDWVKKNNKKIYIYNDAKKAVSNADVIFSDKVISLNDKVNKKKKIKAFENFKIGKKLMSYAKKNCIFLHCLPRGDEVSDDVFLGKKSHVWQQALNRVHVQKSILLYCFGKLR

SEQ ID NO: 109289 - protein, 303 aa, Unknown
  Bacterial polypetide isolated from the Sargasso Sea
MTGLISLCLTFFAQAEYSRTYLDSHPLKMASVGELDIAYRIVEPGPDKPKVVVIMGLGGSNVTWGDALISGLANGGYEILLLDNRDTGDSTRFDEWGQPVLWWEFLKYQLGFSVNAPYTLDDMGADIAGLMDVVGYDKAHIIGASMGGMIAQIVAAQYPEKTRGLVSIMSTTNAPHLPPPTDEAENRLRNLATGEAEADREQAIRDRGFYPESMQRHLMAIFKTGDRSDEVATIAAPTLVLHGADDGLVPPEHGRHTASLIPDSRFLLVEGMAHDMPEDIIPLLVDEMTDHMDAVDASALATR

SEQ ID NO: 109290 - protein, 57 aa, Unknown
  Bacterial polypetide isolated from the Sargasso Sea
MKNFINISDYSSVELRAIIEEAKKRKQNRSGLNKSAPDNDKPFEGKSMAMIFEKTFY

SEQ ID NO: 109291 - protein, 215 aa, Unknown
  Bacterial polypetide isolated from the Sargasso Sea
MSSYVDGIIARVNSHASLTEMATFSAVPIINALSDVEHPCQAVADLLTISEYKSISPETKLAFVGDGNNVSRSLSLMCASVGISFSIATPKKYELDQDTVNLAADMAARSGATMTYCNDPIEAVYQADIVYTDAWTSMGQEKESEQRIIDFQGFTVNEELLTNANPEVIFMHDMPVHYGEEVPKNMLSSSQSVAYKQAFNRLPAQQAILEYIYKG

SEQ ID NO: 109292 - protein, 87 aa, Unknown
  Bacterial polypetide isolated from the Sargasso Sea
NSADSVMTDVFNSMNDTENKESVLNKFQVNEELMSSTNKNTVFMHCLPAKIGSEVTKGVIKGPKSIVLKQAENRLIAQRGILKWLKT

SEQ ID NO: 109293 - protein, 90 aa, Unknown
  Bacterial polypetide isolated from the Sargasso Sea
VIYTDVRASMGQKEEAETREKIFSNFQVNSKMMNMTNKETLLMHCLPAERGREVTDAVIESSNSIVFDQAENRMHAQNAIMVKLMKESNS

SEQ ID NO: 109294 - protein, 72 aa, Unknown
  Bacterial polypetide isolated from the Sargasso Sea
KNNKTKYFKNFTVNKKIISKAPKNVIFMHCLPAKRGQEVTSDVLDGKNSVVLMQAKNRMYIQQAILIYVLKK

SEQ ID NO: 109295 - protein, 61 aa, Unknown
  Bacterial polypetide isolated from the Sargasso Sea
VNSRLLEYTGNNALVFHCLPAERDKEITDEVIEGPQSVVFDQAENRLHAQKAILAQLDKWH

SEQ ID NO: 109296 - protein, 83 aa, Unknown
  Bacterial polypetide isolated from the Sargasso Sea
TWLSMNDDENERSKKIQILNKYQVNSDLFAKAPIDAIFLHCLPAHRGQEVTDAVIDSDRSYVYQQAENRLHVQKAILKHCIPY

SEQ ID NO: 109297 - protein, 159 aa, Unknown
  Bacterial polypetide isolated from the Sargasso Sea
MKNFINISDHSSSDLRAIIDEAKTRKLSRKGFNKSAPDDDKPFEGKSMAMIFEKPSTRTRMSFDIAAKQLGGSSIILNPDGIHYGKGDETLKDTAKVLTEYVDIVMLRTSSHKNLEEFGKHLDIPIINGLSDKSHPCQIMSDILTYEESNGSITGKTVS

SEQ ID NO: 109298 - protein, 224 aa, Unknown
  Bacterial polypetide isolated from the Sargasso Sea
MGFDNKREKAEDVLNVLGQYIDCIMIRNNNHKQLVKLSKENILPIINGLTEYSHPCQILGDFLTLQENFKSLKNVNIVWIGDYNNVLRSLIHLQNIYNFKLNVVVPNQIFKNYEKEFKQYKNKNLNHFIDPILGTKNSNCIMTDVWISMGEKNQDKVKYFKKFTVNNRIMSNASSNAIFMHCLPAKREQEVTSDVLDSKNSVVLKQAKNRMYIQQAILIYVLKK

SEQ ID NO: 109299 - protein, 160 aa, Unknown
  Bacterial polypetide isolated from the Sargasso Sea
NKNVSKLKLCWIGDASNNMMNSLIEACIKFSISLNIASPKDYQPNKALISWIKKKKGKVKIFNKKELAVKNCDVVMTDKIISLNDRVNKKKKLKSFKNFKVDIKTMSFAKKDAIFLHCLPRGGEVTDEVFLGRQSKVWHQALNRVNVQKSILLYCFDKLR

SEQ ID NO: 109300 - protein, 92 aa, Unknown
  Bacterial polypetide isolated from the Sargasso Sea
AIKNKNVVITDTWNSMGDGSVNKENSLMPYQVNKNLIKKAKKDAVFMHCLPAHRGHEVTSEVIDSKQSLIFEGAENRLHVQRSIIWWCLNNG

SEQ ID NO: 109301 - protein, 274 aa, Unknown
  Bacterial polypetide isolated from the Sargasso Sea
MKNFIDISDLSSKALRAIIEEAKSRKIKRKSLNKSAPDEDKPFEGKSMAMIFEKPSTRTRMSFDIAVKQLGGSSIILNPDGIHYGKGDETLKDTARVLTEYVDIVMLRTSSHKNLVEFGKHLEIPIINGLSDQSHPCQIMSDIMTFEETKGLITGKVVSWLGDGNNNMSNSLIEAAGKFGFQLKIGCPKKYMPNKKILNWAKKNKVNLLITKKPEEAVKDSDCVMTDKWVSMNDKVNKKLKKKNLKDYQVNKKLMKKAKSDAIFMHCLPVGRGE

SEQ ID NO: 109302 - protein, 58 aa, Unknown
  Bacterial polypetide isolated from the Sargasso Sea
DSNLLDKADNDAIILHCLPAYRSKEITDEVIESKKSRIFEQAENRMHIQQALLSCLLS

SEQ ID NO: 109303 - protein, 257 aa, Unknown
  Bacterial polypetide isolated from the Sargasso Sea
GLLFLKQSMRTRSSFIVGMQKMGGSVIELDPKTIGFGLRETENDILKVLSQYIDCLMIRNNDHKQILFLSSLNYLPIINGLSEYSHPCQILSDLLTLEECLGNIKKKLICWVGDYNNVLRSLIHLQHIYLFKLNVVLPKEIIKKNHKNLNKNKNNNLIITNNIKDGVSRTNCIMTDAWVSMGEKNPHKKKYFKNYQINNDIMKFSNKDCIFMHCLPAHREEEVTSEVIDSTKSVVWRQAKNRMYVQQAILKNIIKRK

SEQ ID NO: 109304 - protein, 226 aa, Unknown
  Bacterial polypetide isolated from the Sargasso Sea
HYGKGDETLKDTAKVLTEYVDIVMLRTSLHKNLEEFGKYLEIPIINGLSDKSHPCQIMSDVFTFEEIKGSITGKTIAWVGDGNNNMSNSLIEAAAKLNFNLKIGCPSKYSPNREILNWAKKNKVNLTVTKKPEEAVKDSDCVMTDKWVSMNDKVNKKLKKNSLKNFQVNKKLMKFAKPDAIFMHCLPVGRGEEVTDEVIDGKQSVVWRQALNRVHIQKSIITWCLN

SEQ ID NO: 109305 - protein, 179 aa, Unknown
  Bacterial polypetide isolated from the Sargasso Sea
GLTDLSHPCQIMSDIMTFEELKGPIKNKKIAWLGDGNNIVHSLIEASVQFNFKLAIACPEKYKPNKKIIKWAKKKKANILITNDPTKAATSADCVMTDKWISMGDKVNKKKKKKKLKSYQVNSKIMKLAKPDAIFMHCLPANRGEEVSDEVIDGKQSAVWLEALNRIHVQKSIIQWCLK

SEQ ID NO: 109306 - protein, 296 aa, Unknown
  Bacterial polypetide isolated from the Sargasso Sea
FIFNMKSLLNISDLNQNDFDNILQLADDLNNKTEQILTNKNIGLIFEKNSTRTRLSFQVGINQLGGNYIDVRFEELNLNRFESYEDTFEVMSCYLDYLVFRTTDHKKLDLAHKFFKKPIINALSDLSHPCQAISDLYTLKENFGSINNLNIVWMGDMNNVLLSLLEAISFTKNTKVDVFTDEAIYSHNKDSFNLNKNINFHFNINEEIIAKANCIMTDVFTSMNDKEDKENLLSKFQVNENIMSLTDKKSVFMHCLPAKIGSEVSEGVIKGEKSIVLAQARNRLVAQKGILKWLST

SEQ ID NO: 109307 - protein, 212 aa, Unknown
  Bacterial polypetide isolated from the Sargasso Sea
VLSEYVDIVMLRTSSHKNLEEFGKHLDIPIINGLSDLSHPCQIMSDILTYEESNGSIEGKTISWIGDGNNNMSNSLIEAAGKFNFKLNIGCPKKYSPNKSILKLAKKEKVKLTITSKPLEAATGADCVMTDKWVSMNDKVNKISKKKTLKPYQVNKKLMSKANSDAVFMHCLPVGRGEEVTNEVIDGNQSVVWRQALNRVHAQKSIIKWCID

SEQ ID NO: 109308 - protein, 101 aa, Unknown
  Bacterial polypetide isolated from the Sargasso Sea
ENINFHFDINEEIISKANCIMTDVFTSMNDKEDKEKILSKFQVNDKIMSMTDEKSVFMHCLPAKIGSEVTENVIKGKKSIVLTQAKNRLVAQKGILKWLST

SEQ ID NO: 109309 - protein, 264 aa, Unknown
  Bacterial polypetide isolated from the Sargasso Sea
KGSPLKGKILIQMFEKPSSRTRISFYLAIKQLGGGTLTLRSNELHLGQGGESITDTAKVLSTYGDGFMLRTDSEKKMEDFKKYLSIPIINGLSPLSHPTQVLSDIFTVEEIKKKPISKLNICWIGDSNNVLNSLIAASVKFSFKLSIGCPKKFEPGKEVKNWVKKNNKKIYIYNDPKKAVSGADVIFSDKVISLNDKVNKKKKIYAFKNFKINKKLVRLAKKDYIFLHCLPRENEVSEDVFLSKNSYVRQQALNRVHVQKKYFI

SEQ ID NO: 109310 - protein, 199 aa, Unknown
  Bacterial polypetide isolated from the Sargasso Sea
SSHKNLEEFGKHLDIPIINGLSDIGHPCQIMSDILTYEESNGTIEGKTVAWLGDGNNNMSNSLIEAAGKFKFNLKIACPKKYSPNKKILSWAKKNKVKLSVTTKPQDAVKNSDCVMTDKWVSMNDKVNKKAKKKILKPFQVNKKLMSKANSDAIFMHCLPVGRGEEVTDDVIDGKQSVVWRQALNRVHAQKSIIKWCLD

SEQ ID NO: 109311 - protein, 61 aa, Unknown
  Bacterial polypetide isolated from the Sargasso Sea
TVNKKIMSNASSNAIFMHCLPAKREKEVTSDVLDGKNSVVLNQAKNRMYIQQAILIYVLKK

SEQ ID NO: 109312 - protein, 260 aa, Unknown
  Bacterial polypetide isolated from the Sargasso Sea
MKQDLLTFADWTPDAMKNLLQLAVEIKQAPASYSNVLAGKSIVALFEKPSLRTRVSFDIGINKLGGHMVYLDVQSGKLAGREDAVDTAANLACWADAIVARVFSHSTLETFSKAANVPVINALCDKYHPCQGLADYLTMFERFGKTEGLTMAYVGDGNNVTHSLLIVGALLGCNQVVVTPEGHEAAPEIVAQAKAIAEKTGVSIVESTELSAANGADVIYADTWLSMGDETPLEVIKEKFMPYQVNEALMEATGASYVMH

SEQ ID NO: 109313 - protein, 121 aa, Unknown
  Bacterial polypetide isolated from the Sargasso Sea
PKKYEPDKKIVKLAKKNNCKLLITEDPFKAAKDADCIMTDKWISMGDKGDKNKKKKALKKYQVNKKLMKVAKSDAIFMHCLPANREEEVTSEVMDGKQSVVWLQAFNRIHAQKSIIEWCMK

SEQ ID NO: 109314 - protein, 125 aa, Unknown
  Bacterial polypetide isolated from the Sargasso Sea
MAPSVAAALTALNRRDYLSSADCSAEETRGLIDLAVQLKRGERRIDLGNRVLGLIFTKASTRTRVSFQVAIARLGGQTVDLNPSLTQLGRGEPLQDTARVLSRYCDVLAIRTFTQQELVDYAHWA

SEQ ID NO: 109315 - protein, 166 aa, Unknown
  Bacterial polypetide isolated from the Sargasso Sea
MLANFIDIADHDSKDLKKVLLLAHQMKSRLISPTPLLGKMVAMIFEKSSTRTRISFEVGVKQLGGTPIVLNSSDMQLSRGETIADTAKVMSRYVDAVIIRALFHQTILDFSKNADIPVINGLSNLSHPCQIMSDIMTIEENFDSVEELTISWFGDSNNYSKVGLMQ

SEQ ID NO: 109316 - protein, 104 aa, Unknown
  Bacterial polypetide isolated from the Sargasso Sea
MKNFINISDLTSTELRSIIDEAKSRKLSRQNFKKSEPDKDKPFEGKSMAMIFEKPSTRTRMSFDIATKQLGGSTITLNPDGIHYGKGDETLKDTAKVLSEYVDM

SEQ ID NO: 109317 - protein, 43 aa, Unknown
  Bacterial polypetide isolated from the Sargasso Sea
HCLPAYRSKEITDEVINSSKSRIFDQAENRMHAQQALLACLLS

SEQ ID NO: 109318 - protein, 107 aa, Unknown
  Bacterial polypetide isolated from the Sargasso Sea
KKTMGSISITKNPLEASNNADCVITDKWISMGDKINKNKKKNALKPYQVNKKIMKSAKKDSIFMHCLPANRGEEVTNDVMDGKQSAVWLEALNRIHAQKSIIEWCLK

SEQ ID NO: 109319 - protein, 122 aa, Unknown
  Bacterial polypetide isolated from the Sargasso Sea
MIKPIKLANNHFLSSLDVSSEECIHILEVAKKFKNDNFNIELKNKVLGLIFDKSSTRTRVSFQVAMSRLGGTTIDLNPTTSQIGRGEPIKDTARVLSRYCDVIAIRTFDHSDLEEYAKWSTK

SEQ ID NO: 109320 - protein, 215 aa, Unknown
  Bacterial polypetide isolated from the Sargasso Sea
MNKRDFKSLIDINTQEFLKIIQRAITFKELDKLNKTPRPFLNKTLAMIFKKNSTRTRVSFETAMYKLGGHAIFLSEDSSQLKRGEDISDTARVISGMVDLIMMRTNIHDEIKTLAKFSSVPVINGLCNLFHPCQLLADMQTVAEIKGNDFSKMTIAWIGDGNNMCNSYINASKLLNFKLKISTPNGYEPDSYTLEKFGNNVELCDIPGTAAHMLT

SEQ ID NO: 109321 - protein, 251 aa, Unknown
  Bacterial polypetide isolated from the Sargasso Sea
MKNFINISDLSKNDLRSIIDGAKKRKSERGKIPNSQPDVDLPIKGKTMIMLFGKPSTRTRISFDLAVKQLGGSSIILNQDEIHYGKGDETIKDTAKVLSQYADILMIRTDSHNDVDEFQKHLDIPIINGLTDLSHPCQIMADILTFEESKGDINGKTIAWLGDGNNVANSFIEAATKFKFEFKIACPKKYQPNKKIVSEAKKNNCKLLITEDPFEAVEGADCVMTDKWISMSDKGDKKKKKKILKKFQVNK

SEQ ID NO: 109322 - protein, 263 aa, Unknown
  Bacterial polypetide isolated from the Sargasso Sea
MLVQMFEKASSRTRISFYLAIKQLGGGTLTLRSNELHLGQGGETIADTAKILSTYADGFMLRTDDDKKIDDFQKHLTIPIINGLSPSSHPTQVLSDIFTVEEIKKKPISKLKICWIGDSNNVLDSLIAASVKFSFRLSIGCPKKFAPGKKVKDWVSKNKKKIFIYHDPKKAALDADVIFSDKVISLNDKVNKKRKKQHFQKFKIKKEIFNYTKKNCIFLHCLPRGDEVEEEVFLGKNSHVWQQALNRVHVQKSILLYCFGKLR

SEQ ID NO: 109323 - protein, 208 aa, Unknown
  Bacterial polypetide isolated from the Sargasso Sea
SQYIDCLMIRNNDHKKILDYASLNYIPIINGLSDFSHPCQVLGDFLTLKEKIGNINDIKVCWIGDYNNVLRSLIQIQKLYSFKLNIVLPKEIIRINNKSITKIANKNLKITYIIDEGIKDINCIMTDAWLSMGEKDIKKKKYFKKYQINKKLLSNAGKNTLFMHCLPATRGEEVTSEVLDGTQSIVWEQAKNRIFAQQAILKYMIKKK

SEQ ID NO: 109324 - protein, 154 aa, Unknown
  Bacterial polypetide isolated from the Sargasso Sea
MEYLSKNFINLHELKKAELIEILSSAEQLKADRNSQRNLLDGKSLILLFDKPSTRTRISFELAISELGGSCIYLDMKTTQLGRGETIKDTAKVLSRYVDGIIIRNANHQDLIEFSNHSAISIINALTNESHPCQIMADLMTLKECFGTIDGLKV

SEQ ID NO: 109325 - protein, 102 aa, Unknown
  Bacterial polypetide isolated from the Sargasso Sea
TFKVTNDPYFAVTGANVLYTDVWSSMGEENLQDKKDNDFTGFTINSDLVSKAEDNAIILHCLPAYRSKEITDEVIDSESSRIFEQAENRMHVQQALLSCLLS

SEQ ID NO: 109326 - protein, 196 aa, Unknown
  Bacterial polypetide isolated from the Sargasso Sea
MPNFIDIKDLSKSQLNQIIENAKNWKSKQAPNFLKDKNIIMIFEKPSLRTRVSFEVGVKQLGGAVTVLNSSEFAMGERESIYDTVKVLERYIDMIVIRSFDHSLIEEFSKISNVPVINALTDHSHPCQVVSDLLTIKEKLGKINQKKISWFGDCNNVTQSWIEAAVIFDIELFIATPKGIKPNAKTMDWIKKNNDK

SEQ ID NO: 109327 - protein, 67 aa, Unknown
  Bacterial polypetide isolated from the Sargasso Sea
KRNYFKNYQVNSKVMEMASRKAIFMHCLPAYRNQEVSSELLDSNKSVVWQQAQNRMYVQQAIILDLL

SEQ ID NO: 109328 - protein, 73 aa, Unknown
  Bacterial polypetide isolated from the Sargasso Sea
KNKNKIKYFKNFTVNSEIINSASKKVIFMHCLPAKRGFEVTSDVLDGKNSVVLQQAKNRMYVQQAILIYVLKK

SEQ ID NO: 109329 - protein, 262 aa, Unknown
  Bacterial polypetide isolated from the Sargasso Sea
MPNFIDLKDLTKDQLIHLISLSLKWKKTNCAKFMTDKNVVLIFEKPSLRTRISFEVGINQLGGKSYLLNEKEMQLGERETVEDTARVLERYADMVIIRCFGHDQLIKYANISNVPVINALTDFSHPCQVVADLVTIKEHLNDFANKKVSWFGDCNNVLQSWIEASVLLNFELKIACPEGVKPDEKIISWALERNNNIIITHNPQEAAEGANCIITDTWRSMGDKNPFPEEKFLPFQVNKKILELADKNAIFMHCLPAYRNKE

SEQ ID NO: 109330 - protein, 190 aa, Unknown
  Bacterial polypetide isolated from the Sargasso Sea
LKLASQNVIPVINGLTNYSHPCQILGDFLTIQEKFKTLKNYKITWIGDYNNVLVSLLHLQNIYFFNLNIVIPSKILKLNQKKINQYANKNLKLFTDPVLGSTNSNCIMTDVWLSMGEKDKNKIKYFKNFTVNKKIINNAAKNVIFMHCLPAKRGSEVTSEILDGKHSVVLEQAKNRMFIQQSILMYVLKK

SEQ ID NO: 109331 - protein, 111 aa, Unknown
  Bacterial polypetide isolated from the Sargasso Sea
LNWAKKNKVNLTITKKPEDAVKDSDCVMTDKWVSMNDKVNKKAKKKTLKPYQVNKKLMKIAKSDAIFMHCLPVGRGEEVTDEVIDGKQSVVWRQALNRVHAQKSIIKWCLD

SEQ ID NO: 109332 - protein, 89 aa, Unknown
  Bacterial polypetide isolated from the Sargasso Sea
HNDAAKDCDCIITDTGFSMGEDDNDQKRKIPEPYKVDSNKISMASSDAIFVHCLPAHRGEEVDADVIDGVNSVVWDEAENRVHAQKSII

SEQ ID NO: 109333 - protein, 281 aa, Unknown
  Bacterial polypetide isolated from the Sargasso Sea
CFTNKKSKTTLQNHLNGKNLVLFFEKKSTRTRLSFDIAIKQLGGSTTILNKEDIHLGNDKESVSDTIKTFGLYADGLILRVNDHKTIMSASKLSHLPVLNALSNLSHPCQCLAGLMTLLEERGSLEKLNIVWMGPITNVANSWIEAFKKELGFSLNIFCPEAWFEKYKEKMQKYDISTDLDDIVHHHINEQILTHADAVMTDTWKSMGENTKNQDYDLIKEFRVTEEVMKMAKSDSIFMHCLPANRNEEVEASVIDGNNSRVWQEASNRLFVQKEILKALF

SEQ ID NO: 109334 - protein, 79 aa, Unknown
  Bacterial polypetide isolated from the Sargasso Sea
MDNIRHFLDIDCLDHNILKDIISQATELKASKPKNFPSALGKTLALIFEKPSTRTRVSFEVGMLELGGNVVILNDKKTQ

SEQ ID NO: 109335 - protein, 200 aa, Unknown
  Bacterial polypetide isolated from the Sargasso Sea
TTSHKNLEEFGKHLDIPIINGLSDVSHPCQIMSDILTYEESNGSIEGKIVCWIGDGNNNMSNSLIEAAGKFNFQLRIGCPKKYSPNKNILKLAKKDKVKLTVTAKPLEAITGADCVMTDKWISMNDKVNKNLKKKTLKPYQVNEKLMSKANSDAIFMHCLPVGRGEEVTNEVIDGKQSVVWRQALNRVHAQKSIIKWCLD

SEQ ID NO: 109336 - protein, 253 aa, Unknown
  Bacterial polypetide isolated from the Sargasso Sea
MINSLLNISDLTRDQIIKILDFNSTNNSLSNKNIGLLFEKNSTRTRVSFNVGINQLGGNCIDIRYEELNISRDESFEDTFRALNCYLDGLIFRTTDHNRLIEAKKYFKKPIINALSDISHPCQILSDLFTLKSHFKKLDLNLLWMGDMNNVCYSLVEAASLINELKLTICSPTNIINKKNWSLSSNVNIVKSKSELDLSKFNCVMTDVFVSMNDDNIEGKVDLLKPFSVDSNLMSKVDKHAVFMHCLPAKVGL

SEQ ID NO: 109337 - protein, 68 aa, Unknown
  Bacterial polypetide isolated from the Sargasso Sea
KKLFFKKYQLNSQIMSYANKNSVFMHCLPAHRNEEVTNELIDGPQSIVWQQAKNRIYVQQSIINYILK

SEQ ID NO: 109338 - protein, 108 aa, Unknown
  Bacterial polypetide isolated from the Sargasso Sea
DLAIKQLGGSSTILNPDGIHYGKGDESLKDTARVLSEYADILMIRTSSHKSLEEFSKYSKIPVINGLSDQSHPCQVMSDILTFEENNGNIEGKTISWIGDGNNNMSNS

SEQ ID NO: 109339 - protein, 156 aa, Unknown
  Bacterial polypetide isolated from the Sargasso Sea
MSKLTQLLCLAELDQTQLSDLLELALQIKQKPEQYSTALKGKSIALLFEKPSLRTRVSFDVGINKLGGHSVYLDQQNGAMGVRESVEDFGSNLACWCDAIVARVYSQKTLVQLSQSSKKPVINALSDLYHPCQALADLLTLKEHYGDLSKVHLAFV

SEQ ID NO: 109340 - protein, 231 aa, Unknown
  Bacterial polypetide isolated from the Sargasso Sea
KKRKSERGKIPNSQPDVDLPIKGKTMIMLFGKPSTRTRISFDLAVKQLGGSSIILNQDEIHYGKGDETIKDTAKVLSQYADILMIRTDSHNDVDEFQKHLDIPIINGLTDLSHPCQIMADILTFEEAKGDINGKTIAWLGDGNNVSNSFIEAATKFKFELKIACPKKYQPNKKIVSEAKKNNCKLLITEDPFEAAEGADCVMTDKWISMSDKGDKKKKKKILKKFQVNKKL

SEQ ID NO: 109341 - protein, 130 aa, Unknown
  Bacterial polypetide isolated from the Sargasso Sea
EIFKFKLNVITPSKILKKNKNIFSNKKFNYVDFNANIEKGLKNVDCIMTDVWISMGEKNIKNKKTMLRRFQVNEKIMKKAKKNAIFMHCLPAHRNEEVTNNVIDGHQSVVWKQAQNRMYVQQSILNYLIK

SEQ ID NO: 109342 - protein, 84 aa, Unknown
  Bacterial polypetide isolated from the Sargasso Sea
MTDKWISMNDKVNKVSKKKILKPYQVNNKLMSKANSDSIFMHCLPVGRGEEVTDDVIDGNQSVVWRQALNRVHAQKSIIKWCLD

SEQ ID NO: 109343 - protein, 226 aa, Unknown
  Bacterial polypetide isolated from the Sargasso Sea
MKNFINISDLSKNELRSIIDGAKKRKSERGKKANSQPDADQPIQGKTMIMFFAKPSTRTRISFDLAVKQLGGSSIILNEDEIHYGKGDETIKDTAKVLSQYADILMIRTDSHKDINEFKKYLDIPIINGLTNLSHPCQIMADILTFEESKGDIEGKIIAWLGDGNNVANSFIEAATKFKFELRIACPKKYQPDKKIVATAKKNNCKLLITEDPYKAAKDADCVMTG

SEQ ID NO: 109344 - protein, 50 aa, Unknown
  Bacterial polypetide isolated from the Sargasso Sea
KPDAIFMHCLPASREEEVTSDVMDGKQSVVWLQAFNRIHAQKSIIEWCVK

SEQ ID NO: 109345 - protein, 48 aa, Unknown
  Bacterial polypetide isolated from the Sargasso Sea
IFLHCLPAHREEEVTSEVIDGPSSRVWQQAHNRLYTSMALIEFLLLTD

SEQ ID NO: 109346 - protein, 198 aa, Unknown
  Bacterial polypetide isolated from the Sargasso Sea
STLETYAEAANVPVINALCDKYHPCQGLADYLTMFERFGKTTGLTMTYIGDGNNVTHSLLIVGALLGCNQVVITPKGHEADASIVAHAKALAEKTGATIVESNELEAANGTDVIYTDTWLSMGDDTPLETIKATFMPYQVNEALMEASGASCVMHCQPAHRDLEITGSLIDSDKSLLMQQAENRMHGQNAILTQLLSA

SEQ ID NO: 109347 - protein, 188 aa, Unknown
  Bacterial polypetide isolated from the Sargasso Sea
YSKIPVINGLSDKSHPCQVMSDILTFEENCGSIEGKTISWIGDGNNNMSNSFIEAAVKFKFNLKIGCPKKYSPNNKILKWASNNKSKIFVTKDPREAAKDADCIMTDKWVSMNDKVNKKAKKKSLKDYQVNKKLFKLAKTKCIFMHCLPVGRGEEVTDDIIDGKKSVVWQQAYNRIHAQKSIINWCLN

SEQ ID NO: 109348 - protein, 101 aa, Unknown
  Bacterial polypetide isolated from the Sargasso Sea
AKLTLSQHVSAAAGADAIYTDTWLSMGAKADPKLVENLFAPYQINTAVMQRLAVKHFMHCLPAHRGHEVTSEVLDSDNSLVLQQAENRMHAQNAVLVSLFS

SEQ ID NO: 109349 - protein, 236 aa, Unknown
  Bacterial polypetide isolated from the Sargasso Sea
MKKHFIDLNNFNKKQLDDIIKIAKKIKKNPSKYSSILKNKSLGMIFEKQSLRTRLSFAVGMQKLGGYSLELNSKNIGLDNTREDPKDILSVLSQYIDCLMIRNNNHKQLVELSKLNLIPIINGLTEFSHPCQILGDYLTIQEKIKNTKKIQVTWIGDFNNVLISLLHIQNIYLFKLNVVLPSKILKSNIKNLYKYKNKNLNLLSDPLAGVKNSNCIMTDVWLSMGDKNKSKIKYFK

SEQ ID NO: 109350 - protein, 70 aa, Unknown
  Bacterial polypetide isolated from the Sargasso Sea
NKIKYFKNFTVTKEIIDIASKDSIFMHCLPAKRGQEVTSEILDGKNSVVLKQAKNRMYIQQAILLYVLKK

SEQ ID NO: 109351 - protein, 200 aa, Unknown
  Bacterial polypetide isolated from the Sargasso Sea
TFSHKNLEEFSKYSKIPVINGLSDQSHPCQVMSDILTFEENHGNIEGKTISWIGDGNNNMSNSFIEAAVKFKFNLKIGCPNKYSPNNKILRWASKNKTKIFVTKDPREAAKDSDCIMTDKWVSMNDKVNKKAKKKSLEDYQVNKKLLKLAKTECIFMHCLPVGRGEEVTDEIIDGEKSVVWQQANNRVHAQKSIINWCLN

SEQ ID NO: 109352 - protein, 112 aa, Unknown
  Bacterial polypetide isolated from the Sargasso Sea
MKIKTKNLLTLAELTPKEFLRLIDHSIKLKKELKKGGNKPLLKNKTLTMIFQKPSTRTRVSFETGMYQLGGHAINLSSNDTQLSRGESVEDTAKTLSRYTDCIMARVYDHSL

SEQ ID NO: 109353 - protein, 200 aa, Unknown
  Bacterial polypetide isolated from the Sargasso Sea
MIRNNDHNEINKLSQLNIIPIINGLTDYSHPCQILGDFLTIQEKFKNYKNLQITWIGDFNNVLISLLHLQNIYLFNLNLVIPTKILNKNKKILIKLQNKKLKIYSDPVKGSKNSKCIMTDVWMSMGDTNKEKVKYFKNFTINKKIIDNAAKDVIFMHCLPAKRGKEVTSEVLDGRNSVVLEQAKNRMFIQQAILIYVFKK

SEQ ID NO: 109354 - protein, 265 aa, Unknown
  Bacterial polypetide isolated from the Sargasso Sea
MKNFINISDHSSSDLRAIIDEAKTRKLSRKGFNKSAPDDDKPFEGKSMAMIFEKPSTRTRMSFDIAAKQLGGSSIILNPDGIHYGKGDETLKDTAKVLTEYVDIVMLRTSSHKNLEEFGKHLDIPIINGLSDKSHPCQIMSDILTYEESNGSITGKTVSWLGDGDNNMSNSLIEAAGKFKFNLKIGCPKKYSPGKKILGWAKKNKVNLLITQKPDEAVKNSDCVMTDKWVSMNDKVNKKTKKKVLKPFQVNKKLMKKANSNAIFM

SEQ ID NO: 109355 - protein, 82 aa, Unknown
  Bacterial polypetide isolated from the Sargasso Sea
MRGSDSKIDLLAIDDLSDRLSEIIDWAIRIKNDEEALYDFKPLDGMTIGSIYEKPSTRTRVSFEVGVSRLGGQPLTLLAGDI

SEQ ID NO: 109356 - protein, 49 aa, Unknown
  Bacterial polypetide isolated from the Sargasso Sea
FLHCLPAHRGEEVTGEVIDGLKSRVWDQSENRMHAARGLLAWLLSEGQK

SEQ ID NO: 109357 - protein, 229 aa, Unknown
  Bacterial polypetide isolated from the Sargasso Sea
MSKVRHFRSLLDINKKEFLRIIDRAIQLKKEASEGIINNSLTNKTMAMIFKKNSTRTRVAFETAMNTMGGHAIFLSSDSTQISRGEDLSDTAKVLSGMVDIIMVRTHAHEEIEELANNSSVPVINGLTEKFHPCQLLADMQTYFEEKGSIEGKRVAWVGDGCNMCNSYINAAKILNFQLKIATPSGYEPDQTTLDLASDNVELCDLPGKAVENCDLVTTDVWSSMGDEA

SEQ ID NO: 109358 - protein, 70 aa, Unknown
  Bacterial polypetide isolated from the Sargasso Sea
NKKKYFKNYTVDKKIISNAQNNVIFMHCLPAKRGQEVTSEVLDGKNSVVLMQAKNRMYIQQAILIYVLKN

SEQ ID NO: 109359 - protein, 71 aa, Unknown
  Bacterial polypetide isolated from the Sargasso Sea
NNKTKYFKNFTVNKKIMSNASKNAIFMHCLPAKRGKEVTSDVLDGKNSVVLKQAKNRMYIQQAILIYVLKK

SEQ ID NO: 109360 - protein, 52 aa, Unknown
  Bacterial polypetide isolated from the Sargasso Sea
MTDEKSVFMHCLPAKIGSEVTKDVIKGKKSIVLTQAKNRLVAQKGILKWLSI

SEQ ID NO: 109361 - protein, 261 aa, Unknown
  Bacterial polypetide isolated from the Sargasso Sea
FKWFEKSSTRTRLIFYLAIKQLGGSALTLRPDELHLAKGETLADTAKILSTYGNAFMLRTDSDKKMEEFKKYIRIPIINGLSPSAHPTQVLSDIFTIEEIKKKPISKLNICWIGDGNNNVINSLIAASVKFSFSLNIGCPKKYKPNTRILRWVKMNKKRVNIFVDPKDAAKNVDVIFTDKVISMNDKGNKIKKLKDFKNYQVNSRIMSLAKKNAIFLHCLPRGKEVTDSVFLGSQSKVWQQAINRVYVQKSILLYCFNKLR

SEQ ID NO: 109362 - protein, 48 aa, Unknown
  Bacterial polypetide isolated from the Sargasso Sea
DAIFMHCLPASREEEVTSEVMDGKKSVVWLQAFNRIHAQKSIIEWCIK

SEQ ID NO: 109363 - protein, 75 aa, Unknown
  Bacterial polypetide isolated from the Sargasso Sea
DKGNKKKKKKILKKYQVNKKLMKAAKSDAIFMHCLPASREEEVTSEVMDGKQSVVWLQAFNRIHAQKSIIEWCIK

SEQ ID NO: 109364 - protein, 155 aa, Unknown
  Bacterial polypetide isolated from the Sargasso Sea
DGFNNVTHSLMTGTTKLGLDIAVASPYGDQYMPSEEITNLCRSYANDSGGSVFVTNSAEDAVKGADVIYTDSWMSYHIPEDQKKDRIELFMPYQVNKDLLSLAKPDAIFMNCLPATRGCEQTADVIDGPQSIVFDQAENRLHAQKAVMLSLVNTT

SEQ ID NO: 109365 - protein, 97 aa, Unknown
  Bacterial polypetide isolated from the Sargasso Sea
NDPLEATNLADCIMTDKWISMGDKANKKKKKKLLKPYRVDKKIMKSAKQDAIFMHCLPANRGEEVTDEVIDSKQSAVWLETLNRIHVQKSIIQWCLR

SEQ ID NO: 109366 - protein, 57 aa, Unknown
  Bacterial polypetide isolated from the Sargasso Sea
KIMSNAANNVIFMHCLPAKREQEVTSEVLDGKNSVVLMQAKNRMYIQQAILIYVLKK

SEQ ID NO: 109367 - protein, 36 aa, Unknown
  Bacterial polypetide isolated from the Sargasso Sea
QEVTADVIDVPKSVVWDEAENRLHVQKACLVHLLGV

SEQ ID NO: 109368 - protein, 57 aa, Unknown
  Bacterial polypetide isolated from the Sargasso Sea
DNYMFMHCLPAERGREVTDEVIDSSNSVVFEQAENRLHTQNAIMVTLSDKLSPWNRF

SEQ ID NO: 109369 - protein, 95 aa, Unknown
  Bacterial polypetide isolated from the Sargasso Sea
PYKAVKDADCIMTDKWISMGDKGDKNKKKKSLKKYQVNKKIMKAAKSDAIFMHCLPASREEEVTSEVMDGKQSVVWLQAFNRIHAQKSIIEWCIK

SEQ ID NO: 109370 - protein, 107 aa, Unknown
  Bacterial polypetide isolated from the Sargasso Sea
MKHFINISDLSKSDLRSIMDGAKKRKSERGKKPHSLPDIDLPLQGKTMIMIFEKTSTRTRISFDLAVKQLGGSSIILNQDEIHYGKGDETIKDTAKVLSQYADILMI

SEQ ID NO: 109371 - protein, 224 aa, Unknown
  Bacterial polypetide isolated from the Sargasso Sea
MIKHFIDLDNFTKTELRNILRFANKIKKNQKKYSNILNNKSLGLLFEKESTRTRVSFNIGMKKLGGNVIELDSKKIGFGKRESISDVLQALSQYIDVLMIRNNSHTELVKCASYNKISIINGLSNYSHPCQVLSDIFTISEKLGKIENKQITWLGDFNNVLTSFIQAAEIFNFKLNILMPKKIMNMAKKKLDNKKLVYSNFYYNFDKALKNSDCVMTDTWISMG

SEQ ID NO: 109372 - protein, 127 aa, Unknown
  Bacterial polypetide isolated from the Sargasso Sea
MKNFINIADINEQDLRKIIDHAKSQKKKRSNINKSATDPEKPLIDKTLIMLFEKTSTRTRLSFELAIKQLGGHLLVLDSKESHYGSGDESVYDTAKVLSQYGDIVMMRTHKHKHLLEFSKHLDIPNN

SEQ ID NO: 109373 - protein, 91 aa, Unknown
  Bacterial polypetide isolated from the Sargasso Sea
SADTDVIYTDVWASMGQESEEDERKRKFEGYQVNESLLENSNAIFMHDLPAHHGEEITEGLVDHKKSIVFDQAENRIWGQVGLIKYLMNLK

SEQ ID NO: 109374 - protein, 144 aa, Unknown
  Bacterial polypetide isolated from the Sargasso Sea
MDFRGAHIISVKQFEREDVEKVFEVADSMGPFAHRELITKVLEGAILGNMFFEPSTRTRVSFGCAFNLLGGHVRETTDIETSSIVKGESLYDTARVLSGYSDVIVMRHPQAGSVEEFSKASRVPVINGGDGANEHPSQALLDLY

SEQ ID NO: 109375 - protein, 105 aa, Unknown
  Bacterial polypetide isolated from the Sargasso Sea
MKHLLSIKELTQQQLLDLITLAKTIKANPAEYRHALDGKSVVMLFEKPSLRTRVSFDIGINKLGGHCLYLDQQNGALGKRESVADFASNLSCWADAIVARTFSHT

SEQ ID NO: 109376 - protein, 258 aa, Unknown
  Bacterial polypetide isolated from the Sargasso Sea
SFITGISKMGGHCIELNANSIGFGKRESHEDVIRALSQYIDILMIRNDDHNIIKHLSSLNVLPIINGLSDYSHPCQILSDLLTLYEKLGNIKKQKICWVGDYNNVLRSLIELQCIYNFKLDVVLPREILRKYNSKITKNKNLNVTNIVHEGVKNANCVMTDAWVSMGESNSKKKYFKNYQVNKDVMKNANKEAIFMHCLPAHRNEEVSSELLDSKQSVVWEQAQNRMFVQQAIILIYYEKLFLLFSILSYFHANLLKH

SEQ ID NO: 109377 - protein, 275 aa, Unknown
  Bacterial polypetide isolated from the Sargasso Sea
YEILDILRRAEQIKASPKEYHSLLSKKSMAMLFQKTSTRTRVSFEVAMTELGGHAIYIDWMSSNFVLSSIDYEAEYLSRNVSCIMARLLRHEDLQAIIAASHAPVINGCDEKFHPCQALTDLLTVKENIRGNLNSTHIVYVGVQNNVSNSLAIICDKLGVSLTLATPEPEDTYESKDADVQGLISSSTYINHTTDVERAVENANFVYTDTWVDMQHFNNPDLNDKKTRIMEKMLPYQINESLLDGVDCKIMHDMPIHDGYEITNAMVRDPRSIIF

SEQ ID NO: 109378 - protein, 174 aa, Unknown
  Bacterial polypetide isolated from the Sargasso Sea
MKNFINIGDINKQDLRKIIEHAKSQKKKRFNINKSAIDPEKSLIDKTLIMLFQKASTRTKLSFELAMKQLGGQLLVLDPKESHYGSGDESIYDTAKVLSQYGDIVMMRTHKHKHLLEFSKHLDIPIINGLTNLSHPCQIMSDIMTFEELKGSITKKKIAWLGDGNNVVYSLIEA

SEQ ID NO: 109379 - protein, 149 aa, Unknown
  Bacterial polypetide isolated from the Sargasso Sea
MESKHFLTLLDIPKEEIKKLIHRAIELKKMTKENIVYTPLQNKTLALLFDKSSTRTRVSFEVGMTHFGGNTLFLSPRDTQLGRGEPIEDTAKVISSMVDCVVIRTHDHEDVVKFSSKSSVPVINGLTELVHPCQLLADVMTYVEINGDI

SEQ ID NO: 109380 - protein, 58 aa, Unknown
  Bacterial polypetide isolated from the Sargasso Sea
KLLGFARTDVLFMHCLPADKGQEVSQDIFEDKRCVTLREAENRMHVQKSILRWCLGLY

SEQ ID NO: 109381 - protein, 233 aa, Unknown
  Bacterial polypetide isolated from the Sargasso Sea
NVVELISKDIGFDNKREEKKDILNILAQFIDCLMIRNNNHKLLIELSNQKVLPIINGLTEYSHPCQILGDFLTIHEIFKTYKKLQITWIGDYNNVLISLLHLQNIYLFNLNVVVPEKILKKNKSKIIKYKNDKIKLLSDPLIGAKNSNCIMTDVWISMGDKDKNKTNHFKNFTVNRKIINLATKDAIFMHCLPAKRGKEVTSEVLDGKNSVILQQAKNRMYIQQAILLYVFKK

SEQ ID NO: 109382 - protein, 277 aa, Unknown
  Bacterial polypetide isolated from the Sargasso Sea
MQRAILVKNFIDIKDFTAEEINALLNSAIENKNQNLSSEEILSGKNLILFFEKNSTRTRLSFDLAVKQLGGLSIILNGPDIHLSSGKESLSDTIKTFSLYSDGIVMRVNNHQTILDTIEVSSVPIINGLSNLSHPCQCMAGLMTIIEEKGSLENLNITWFGPITNVAHSWIEAHSKNLGFKFSIFSPDRSRDLYLSKITKYKENLNLESIIHNQIDDEILSAADVIMTDTWQSMGEQTDEQVIRELHDFRVTKSLMNMAKQDCIFMHCLPANRGSRS

SEQ ID NO: 109383 - protein, 298 aa, Unknown
  Bacterial polypetide isolated from the Sargasso Sea
MKHFIDINSFKKKEIDEIISLAQKIKKNQKKYSSSCKDKTLGLIFEKQSLRTRLSFNVGMQKLGGSVLELQSKDIGFDNKREKAEDVLNVLSQYIDCVMIRNNNHKQIVNLSKENILPIINGLTEYSHPCQILGDFLTLQEHLKSIKNANIAWIGDYNNVLRSLIHLQNIYNFKLNLIIPKEIFKNYKKEFQQSKNKNLNHFFDPILGTKNSNCIMTDVWVSMGEKNNNKKKYFKNYTVDKKIISNAKNNVIFMHCLPAKRGQEVTSEVLDGKNSVILMQAKNRMYVQQAILIYVLKK

SEQ ID NO: 109384 - protein, 311 aa, Unknown
  Bacterial polypetide isolated from the Sargasso Sea
MKNFIDIKELSKSELTSLLDNALQNKNSNKTLQNHLNGKNLVLFFEKKSTRTRLSFDIAIKQLGGSTTILNKEDIHLGNDKESVSDTIKTFGLYADGLILRVNDHKTIMSASKLSHLPVINALSNLSHPCQCLAGLMTLLEERGSLEKLNIVWMGPITNVANSWVEAFKKELGFSLNIFCPEAWFEKYKEKMQEYDISTDLDDIVHHHINDQILAQADAVMTDTWKSMGENTKNQDYDLIKEFRVTDKVMKMAKSDSIFMHCLPANRNEEVEASVIDGNNSRVWQEASNRLFVQKRNFKSNILIILPKGRR

SEQ ID NO: 109385 - protein, 265 aa, Unknown
  Bacterial polypetide isolated from the Sargasso Sea
RKNIDTNVEKPSLRTRISFYLAIKQLGGGTLTLRSNELHLGQGGESISDTAKVLSTYGDGFMLRTDSEKKMEDFKKYLSIPIINGLSPLSHPTQVLSDIFTVEEIKKKPISKLNICWIGDSNNVLNSLIAASVKFSFKLSIGCPKKFEPGKEVRNWVKKNNKKIYIYNDPKKAVSGADVIFSDKVISLNDKVNKKKKIHAFKNFKLDKKLTRLAKKNFIFLHCLPRGNEVSEDVFLSKNSHVWQQALNRVHVQKSILLYCFGKLR

SEQ ID NO: 109386 - protein, 337 aa, Unknown
  Bacterial polypetide isolated from the Sargasso Sea
MDFSGSHILSIDQFNRSDVEKLFNIADSLEPYSSKDKVTRVLEGAILGNMFFEPSTRTRISFGASFNLLGGNVREITEVGSSSLAKGESLVDTAKVLSGYSDIIVMRHPEEGSVKKFAEASRVPVINGGDGSNEHPSQALLDLYTIQKELSQNKKTIDGLRIALVGDLKFGRAVHSLCKILSLYSEVTINLISPKELKLPDNLTKQLAKSNIKIIETENLEEGISEVDIIYITRIQEERFKNKKDAKRYKGLLKLNQSIYTANCEPNTVIMHPLPRDSRSDANELDSDLYANPNLAIFRQADNGVVVRMALFALVLGVEDQIDKSSKPVNWKIKRDL

SEQ ID NO: 109387 - protein, 297 aa, Unknown
  Bacterial polypetide isolated from the Sargasso Sea
MKHFIDIENFKKTEIDKIISIAKKIKQNPKKYSLSCKNKTLGLIFEKQSLRTRLSFNVGMQKLGGYVLELQSKDIGFDNKREKAEDVLNVLSQYIDCLMIRNNNHKQIVNLSKKNILPIINGLTEYSHPCQILGDFLTLQEKFKNYKNLSIAWIGDYNNVLRSLIHLQNIYNFKLNIIIPNQIFKYYKNEFLKCKNKNMKYFDDPFEGVKKSNCIMTDVWVSMGEKNNKTKYFKNFTVNKKIMSNASNNAIFMHCLPAKRGKEVTSDVLDGKNSVVLQQAKNRMFIQQAILIYVLKK

SEQ ID NO: 109388 - protein, 174 aa, Unknown
  Bacterial polypetide isolated from the Sargasso Sea
MKHFINLKDIPSKDLRKIITDAKKRKSSRKKLNTLEVDKGAPLKGKILIQMFEKPSSRTRISFYLAIKQLGGGTLTLRSNELHLGQGGESISDTAKVLSTYGDGFMLRTDSDKKIEDFKKYLSIPVINGLSPSSHPTQVLSDVYTVEEITKKPISKLNICWIGDSNNVLDSLIA

SEQ ID NO: 109389 - protein, 297 aa, Unknown
  Bacterial polypetide isolated from the Sargasso Sea
MKHFIDINSFKKKEIDEIISLAKKIKKNPKKYSSSCKDKTLGLIFEKQSLRTRLSFNVGMQKLGGSVLELQSKDIGFDNKREKAEDVLNVLNQYIDCLMIRNDNHKQIVNLSKENILPIINGLTEYSHPCQILGDFLTLQENFKNYKNLIIVWIGDYNNVLRSLIHLQNIYNFKLNIVVPQQIFKHHKNEFLKFKNKNLKHLVDPIEGAKKSNCIMTDVWVSMGEKNNKIKYFKNFTVNKKIMSNASNNAIFMHCLPAKRGKEVTSDVLDGKNSVVLTQAKNRMYIQQAILIYVLKK

SEQ ID NO: 109390 - protein, 193 aa, Unknown
  Bacterial polypetide isolated from the Sargasso Sea
FKKYSKIPIINGLSPSSHPTQVLSDIFTIQEIKKKSVSKLKLCWIGDASNNMMNSLIEVCIKFSISLNIACPKDYQPNKALISLIKNMKGKINIFNKKELAVKNCDVVMTDKIISLNDRVNKKKKLKSFKNFKVDAKTMSFAKKDAIFLHCLPRGSEVTDEVFLSKKSKVWEQALNRVYVQKSILLYCFDKLR

SEQ ID NO: 109391 - protein, 103 aa, Unknown
  Bacterial polypetide isolated from the Sargasso Sea
KQNNKNLIFTNIIFEGVKSADCVMTDTWVSMGEKSTKKRYFKNYQVNIDIMKNASKEAIFMHCLPAHRNEEVSSDLLDSNKSVVWDQAQNRMFVQQAIILDLL

SEQ ID NO: 109392 - protein, 309 aa, Unknown
  Bacterial polypetide isolated from the Sargasso Sea
MKHFINLKDIPSKDLRKIIVDAKQRKKQRKKLNILEPDKGSPLKGKMLVQMFEKASSRTRISFYLAIKQLGGGTLTLRSNELHLGQGGETIADTAKILSTYGDGFMLRTDDDKKIDDFQKHLTIPIINGLSPSSHPTQVLSDIFTVEEIKKKPISKLKICWIGDSNNVLDSLIAASVKFSFTLNIGCPKKFAPSKKVKDWVSKNKKKIFIYHNPKKAALDADVIFSDKVISLNDKVNKKRKKQQFKKFKIKKEIFNYAKKNCIFLHCLPRGDEVEDEVFLGKNSHVWQQALNRVHVQKSILLYCFGKLR

SEQ ID NO: 109393 - protein, 69 aa, Unknown
  Bacterial polypetide isolated from the Sargasso Sea
NQDYDLIKEFRVTEKVMKKAKSDSIFMHCLPANRNEEVEASVIDANNSRVWHEASNRLFVQKEILKIIF

SEQ ID NO: 109394 - protein, 31 aa, Unknown
  Bacterial polypetide isolated from the Sargasso Sea
GPQSVVWDEAENRLHVQKALMEYLLLGKLNH

SEQ ID NO: 109395 - protein, 145 aa, Unknown
  Bacterial polypetide isolated from the Sargasso Sea
MTETKKDFIDLTQFNKDELIFLIEDGINKKNMSSKNGMASVDEDACAKNKILATIFEKPSTRTRFSFETAMYQLGGKTIYANMSDMQLGRGETIDDTAKVISRYVDIAMLRTNKHSTLENFAKYASIPVINGLTDKSHPCQVLAD

SEQ ID NO: 109396 - protein, 251 aa, Unknown
  Bacterial polypetide isolated from the Sargasso Sea
MKKVRHFKTLLDINKNEFLSIIERAVELKKLQTNNEYPDTLRKKIMAMIFKKNSTRTRISLESSMSKLGGHAIYLSSDSSQLSRGESLADTAKVLSGMVDIIAIRTHSHEEVLELSANSTVPVINALTTKFHPCQLLADMQTLYEEKGQISGKKVAWVGDGCNMCNSYINASKILGFHLNIATPHGFEPDEETLKNASDTAELCDLPGKAVEGCDLVTTDVWSSMGDEHDYDKRKVLFKGYQINQNLMDKA

SEQ ID NO: 109397 - protein, 130 aa, Unknown
  Bacterial polypetide isolated from the Sargasso Sea
NIYLFKLNVVIPEKIIKLNQKELKKYNNKKLKLLSDPIIGSKKSKCIMTDVWISMGDKNKNKVKYFKNFTVDKKIINSASKDVIFMHCLPAKRGQEVTSEVLDGKKSVVLHQAKNRMFIQQAILIYVLKK

SEQ ID NO: 109398 - protein, 302 aa, Unknown
  Bacterial polypetide isolated from the Sargasso Sea
MNNFISIYDLDHNLVQSFIENAVETKNSKSNDDFNFANGKILASIFEKPSTRTRLSFDVAMRKLGGQCIIIDQNKLHLGNNKESITDTAKTLSQYVDIVMYRAQSHESLQKLASFSTVPIINGLSDFSHPCQAMADLLTIYEKRSGFEGIKVNWIGPITNVARSWIEIANLNLGIKLKIFSNDYSINEYHKKCEVYKLKPDLDNMEVHNNLKKLDSADVVITDTWESMGETVNEKIIKDFSSYTVNQEMMRIFGDECIFMHCLPANRGQEVTPEVIDGPQSVVWDEAQNRLHIQKEIIKWCL

SEQ ID NO: 109399 - protein, 288 aa, Unknown
  Bacterial polypetide isolated from the Sargasso Sea
MKHFINLKDIPSRDLRKIIVDAKQRKKQRKNLNTLEPDKGSPLKGKMLVQMFEKASSRTRISFYLAIKQLGGGTLTLRSNELHLGQGGETIADTAKILSTYGDGFMLRTDDDKKIEDFQKHLTIPIINGLSPSSHPTQVLSDIFTVEEIKKKPISKLKICWIGDSNNVLDSLIAASVKFSFTLSIGCPKKFAPGKKVKNWVRKNKKKIFIYYDPKKAAMDADVIFSDKVISLNDKVNKKRKKQHFQKFKIKKEIFKYTKKNCIFLHCLPRGDEVEDSVFLGKNSHVWQ

SEQ ID NO: 109400 - protein, 290 aa, Unknown
  Bacterial polypetide isolated from the Sargasso Sea
NFKKKEIDEIILLAKKIKKNPKKFSSFCKDKTLGLIFEKQSLRTRLSFNVGMQKLGGSVLELQSKDIGFDNKREKAEDVLNVLNQYIDCLMIRNNNHKQIVNLSKENILPIINGLTEYSHPCQILGDFLTLQEKFKNYKNISIAWIGDYNNVLRSLIQLQNIYNFKLNLIIPKGIFKNYKKEFQQYKNKNLNHFFDPILGTKNSNCIMTDVWVSMGENNKNKKKYFKNYTVDKKIISNASNNVIFMHCLPAKRGQEVTSEVLDGKNSVVLMQAKNRMYIQQAILIYVLKK

SEQ ID NO: 109401 - protein, 311 aa, Unknown
  Bacterial polypetide isolated from the Sargasso Sea
MKHFINLKDIPYNDLRKILNDSKKRKKKRKNYNSLDLDRDKPLTGKLLIQMFEKSSLRTRLSFYLAMRQLGGGVHNLRKDELHLGQGGETIKDTAKIISIHGDIFMLRTDSEKKLLEFKNSLEIPLINGLSPDSHPAQVLSDIFTIEEIKKKKISNLKICWVGDANNVLNSLIEASIKFSFKLNIASPKNYHPSKKFIQLINRNRKLINIFADPNKAIVNADVVMTDKFVSLNDKVDQKKKKKNFKGFQVNKGLTKSAKKNFIFLHCLPANRGEEVSSEIIDGANSAVWKQAENRFHVQKSILLYCFKKLR

SEQ ID NO: 109402 - protein, 141 aa, Unknown
  Bacterial polypetide isolated from the Sargasso Sea
MPHFLDIKDLKKNQLKRIIENAYNWKLKNPKMFLDKKNIIMIFEKPSLRTRVSFEIGIKQLGGSVTVLNSNELILGQRESVFDTIKVLERYVDMIIIRSFDHNVLREISKISNVPVINALTDHSHPCQVVSDLLTIKEKLG

SEQ ID NO: 109403 - protein, 106 aa, Unknown
  Bacterial polypetide isolated from the Sargasso Sea
MKNFINISDHSSNDLRAIIDEAKSRKLKRKGFNKSAPDEDKPFDGKSLAMIFEKPSTRTRMSFDIAVKQLGGSSITLNPDGIHYGKGDKSLKDTAKVLTEYVDIVM

SEQ ID NO: 109404 - protein, 303 aa, Unknown
  Bacterial polypetide isolated from the Sargasso Sea
MQHLLKDSDLSKTQIEALIALGKAVKADPKKYGQALAGKSVVTLFEKPSLRTRVTFDIGIARLGGHSVYLDQQNGALGKRESVKDFAANLSRWCDAIVARVFDHQTLVELAEHGTVPVVNSLCNLYHPCQGLADFMTISEHYADLSKVKLAYLGDGNNVSHSLLLLGATLGTDVTLVCPKGHGPDTQVFLQAQALAAQSGATIHISDDVAAIEGFDVAYTDTWVSMGDNTPMEQVKDIFMPYQINQALLDRTGIQHVLHCQPAHRELEITSQVMDGPGSLIMDEAENRMHIQNAVLLTLLGHK

SEQ ID NO: 109405 - protein, 184 aa, Unknown
  Bacterial polypetide isolated from the Sargasso Sea
MKNFINISDLSKNELRSIIDGAKKRKLERGKKPNSEPDIDQPIKGKTMIMLFAKPSTRTRISFDLAVKQLGGSSIILNHDEIHYGKGDETIKDTAKVLSQYADILMIRTDAHKDIDEFKKFLEIPIINGLTNLNHPCQIMSDILTFEESKGDIEGKTIAWLGDGNNVANSFIEAATKFQFELKI

SEQ ID NO: 109406 - protein, 101 aa, Unknown
  Bacterial polypetide isolated from the Sargasso Sea
KIIFFENPLDAANMCDCIMTDVWFSMGEKKSNYKKNLFKNFQVNDKLMNCAKSKAIFMHCLPANRNQEVTDSVIDGKKSVVWNQTLNRMFVQQSILYFLMK

SEQ ID NO: 109407 - protein, 45 aa, Unknown
  Bacterial polypetide isolated from the Sargasso Sea
MHCLPAHRGEEITAELMDAPDSVIWQEAENRLHAQKALMELLLSA

SEQ ID NO: 109408 - protein, 128 aa, Unknown
  Bacterial polypetide isolated from the Sargasso Sea
AAEILDFELRIGCPNKFLPSHLKENKNLKIFDNPNEAASGASLISTDVWVSMGDEEEIDERTKAFSKFQVTTELLDEADENVIFLHCLPAIRGQEVTSEVMEDERSKVWQQAENRLHAQKALLISLLG

SEQ ID NO: 109409 - protein, 217 aa, Unknown
  Bacterial polypetide isolated from the Sargasso Sea
RSILDSAKVLERYVDMIIIRSFDHKILKKFTSFIKIPVINALTNFSHPCQVIGDLLTIKEHLKVLKGKKVSWFGDFNNVTQSWIEAAVLLGIDFYIACPSDVGPNKQTLEWIKNNRGNIVITQDVNLVAQNADCVMTDTWISMGDKKNKSTDKFLPFQVNTSIMNIAKSNALFMHCLPAYRGYEVIDEVINGKNSIIYDQAENRLHAQKSIINHCLT

SEQ ID NO: 109410 - protein, 188 aa, Unknown
  Bacterial polypetide isolated from the Sargasso Sea
MAEYSSVPVINVLTDSSHPCQLMADVMTFEEHRGPIKGKTVAWSGDGNNMASSWIHAATKFDFKLNIACPIECRPNHELLDWANKQKKHVDLFHDPRAAVENADCVVTDTWVSMGTDTKNQHNLLAPFQVNKKLMEAASPEAVFLHCLPAHRGEEVTAEVIDGSQSLVWDEAENRLHAQKAVLVWCMT

SEQ ID NO: 109411 - protein, 149 aa, Unknown
  Bacterial polypetide isolated from the Sargasso Sea
KITWMGDKNNVCNSWIEAASLLNFELTISCPREYFVDCQLSKNLIYVEDPMTACTNADLIITDVWTSMGYEDEKKERTDIFQNWRVTQEKMSLASPNALFMHCLPAHRGEEVDSEVIDGPQSVVWDEAENRLHTQKALMSFLLLGEQNL

SEQ ID NO: 109412 - protein, 138 aa, Unknown
  Bacterial polypetide isolated from the Sargasso Sea
LCGALFGVEVRIVCPKGYEPSSSVINKAYKIYKNKKLLKITNDLQSAVLGANVLYTDVWSSMGEENQKEDKDKIFKGFTVDSYLLSKADKNAIILHCLPAYRSKEITDEVIESKNSRIFDQAENRMHVQQALLSCLLS

SEQ ID NO: 109413 - protein, 179 aa, Unknown
  Bacterial polypetide isolated from the Sargasso Sea
MTKKPHNVDILTLDELESKEINNIIDLAIDLKKELKKGKEKPLLQNKTLAMIFEKPSTRTRVSFETGMFQLGGHALTLSPNDLQLSRGESIADTARTLSRYVNVVMARVYDHKSLETFARNSSIPVINGLSDSYHPCQILADLMTIKEHKKNLKKIKIAWIGDGNNVCNSLILGCAKLK

SEQ ID NO: 109414 - protein, 246 aa, Unknown
  Bacterial polypetide isolated from the Sargasso Sea
MLNPIKLENKNFLSSLDISREEFFHILEIAKNFKNKDLNIELKDKVLGLIFDKSSTRTRVSFQVAMSRLAGTTVDLNPTTSQIGRGEPIRDTARVLSRYCDVLAIRTFKQSDLEEYAKWSSKPVINALTDVEHPCQALADYMTIKDEFDDFKNVVLTFIGDGNNVANSLILYGALLGVEVRIACPKGYEPNSLIIKKAYEIYNNKNLLKITNDPNEAALGANVLYTDVWSSMGEEKQKEHKDKFFN

SEQ ID NO: 109415 - protein, 266 aa, Unknown
  Bacterial polypetide isolated from the Sargasso Sea
KEMLLIIKQGHFLKKNYGKKFLEEKKILAMIFEKPSTRTRVAFEVGMKKLNGDVVILDQHESQLGRGESLQDTIKVLGRYVDIILYRGSDEKILYEISELSDVPIINGLTNNSHPCQIVADIMTLEEKFKDINKLKISWIGDGNNVCNSWIEAVNHYDFKLNISCPEGCFPSKKTLKESKSSHINLFDKPSEAVKNADVVITDTWESMGIKKDKQKLKKFEKFRVDSELMLRTNKNSFFLHCLPAHRGCEVTDEVIDGKNSLVWEK

SEQ ID NO: 109416 - protein, 181 aa, Unknown
  Bacterial polypetide isolated from the Sargasso Sea
INGLTNLSHPCQIMADILTFEESKGDIEGKTIAWLGDGNNVANSFIEAATKFNFEIKIACPKKYQPDKKIVETAKKNNCKLLITEDPYKAAKNADCIMTDKWISMSDKGDKKKKKKILKKYQVNKKIMNVAKPDSIFMHCLPASREEEVTSEVMDGKNSVVWLQAFNRIHAQKSIIEWCMK

SEQ ID NO: 109417 - protein, 242 aa, Unknown
  Bacterial polypetide isolated from the Sargasso Sea
AGHVLGMIFEKNSTRTRVFFDIGMRQLGGSALILDSGTSQLGRGESIADTARVLSRMVDAIMIRTDDHAKAEELAHYAHVPVINGLTDRSHPCQIVADLLTVVEQGKALPGLELAWLGDGNNVLHSVLEAAGLFKFNVRVGVPSGYEPEAEFVEMARQGGARVTLTHDAAEAARGADIIVTDTWVSMGQDHAHNKIAAMAPFQVNKQLMELAKSDARFLHCLPAHVGDEVTEEVFESAQSVV

SEQ ID NO: 109418 - protein, 192 aa, Unknown
  Bacterial polypetide isolated from the Sargasso Sea
KHATVPVVNGLTDYNHPCQILTDMFTIWEQKKDNLSDLKIVYVGDGNNIVNSWIRLASVLPFEFTCVCPEGYEPDAGTISYANSKNISSINILHDPIQGVKDADVIYTDVWASMGQKEEVDERVKIFSPLQVNNDLIQHAKNDYMFMHCLPAERGREVTDQVIDSQNSIVFEQAENRLHTQNAIMVTLANKV

SEQ ID NO: 109419 - protein, 242 aa, Unknown
  Bacterial polypetide isolated from the Sargasso Sea
RTRVSFEVAMNQLGGKASFLSIADLQLGRGEPLEDTARVIGSMADGVVLRTQKHETQQTFASFSSAATINGLSNLSHPCQVLTDLLTYFEENGSIEGEKVCWSGDFNNVCYSYAEAADIFNFELHVACPKEFQPDTKALPNVTFTESLNEAVEGSSLVTTDVWVSMGDENEKEKREQLFSSYQIKPSVMDKASNKAIFLHCLPAVRGQEISEDLLEDKRSKVWTQAENRLHAQKALLVELLK

SEQ ID NO: 109420 - protein, 220 aa, Unknown
  Bacterial polypetide isolated from the Sargasso Sea
MLNMKNFLNISDTSIQDLKGILEQAKTMKTARIGLPKGACDEGRPLSQHIVALVFEKPSTRTRTSFDVGVRQLGGKPILLSGTEMQLGQGETISDTARVLSRYVDLIMLRTFESQTLYEMAKYSTVPVINGLTNESHPCQIMADIMTFEEKRGSIKGKKVVWFGDGNNVFNSFLQAAKKFDFSLIFSGPKELDPSKNLTENTNNLGINFEIDRDPMFCNQ

SEQ ID NO: 109421 - protein, 155 aa, Unknown
  Bacterial polypetide isolated from the Sargasso Sea
MIKPNKLANNNFLSSLDISAEEAFQILELARNFKNKKININLKNRVLGLIFDKASTRTRVSFQVAMSRLGGTTIDLNPTTSQIRRGEPIKDTARVLSRYCDVIAIRTFKHSDLQEYAKWSTRPVINALTDLEHPCQALADFFTIKEEFTDFKDLV

SEQ ID NO: 109422 - protein, 238 aa, Unknown
  Bacterial polypetide isolated from the Sargasso Sea
NKSQADNDKPLDGKSMIMIFEKPSTRTRVSFDIAVKQLGGYSTILNPDGIHYGKGDESIEDTAKVLSEYADVIMIRTSSHKNLEEFGEHLSIPLINGLSDQSHPCQVISDILTFEELKGDIKGKTLSWIGDGANNMSYSFIEAAVKFQFNLKIGCPKKYSPNKKIINWALKKNTRIEVSTNPKDAVKGSDCVMTDKWVSMNDKGDKKKKKKILKDYQVNKKLLSQAKSDTIFMHCLPV

SEQ ID NO: 109423 - protein, 257 aa, Unknown
  Bacterial polypetide isolated from the Sargasso Sea
MKNFINISDCSSVELRAIIEEAKKRKQNRSGLNKSAPDEDKPFEGKSMAMIFEKPSTRTRMSFDIAVKQLGGSSIILNPDGIHYGKGDETLKDTAKVLSEYVDIIMLRTSSHKNLEEFGKHLDIPIINGLSDVSHPCQIMSDILTYEESNGSIEGKTVSWIGDGNNNMSNSLIEAAGKFNFKLNIGCPKKYSPNKSILKLAKKEKVKLTITSKPLEAATGADCVMTDKWISMNDKVNKISKKKTLKPYQVNKKLMSK

SEQ ID NO: 109424 - protein, 252 aa, Unknown
  Bacterial polypetide isolated from the Sargasso Sea
KEKPLLQNKTLAMIFEKPSTRTRVSFETGMFQLGGHALTLSPNDLQLSRGESIADTAKTLSRYVNVIMARVYDHKLLENLARNSSIPVINGLSDSYHPCQILADFMTIKEHKKNLKKIKIAWIGDGNNVCNSLILGCAKLKIQLSVAVPDGYEPEFDIVKIGKDAEVLEISDNPEAAVKDADVVMTDTFVSIHNTNSDRVKKFLPKFQVNQSLMNKAKKDAIFMHCLPAKRDQEVTSDVIDGSQSVVWDEAE

SEQ ID NO: 109425 - protein, 254 aa, Unknown
  Bacterial polypetide isolated from the Sargasso Sea
MLNPIKLASKNFLSSLDISCEEFLHILEIAKNFKNKDLDIKLKEKVLGLIFDKSSTRTRVSFQVAMSRLGGTTVDLNPHTSQIGRGEPIRDTARVLSRYCDVLAIRTFKQTDLEEYAKWSSKPVINALTDLEHPCQALADFMTIKEEFLDFKDLVLTFIGDGNNVANSLILSGALLGVEVRIACPKGYEPNSLLIDKAYEIYENKNLLKITNDPNSAVLGANVLYTDVWSSMGEENQKEEKDKSFNGFTLDSNL

SEQ ID NO: 109426 - protein, 280 aa, Unknown
  Bacterial polypetide isolated from the Sargasso Sea
RKNLNKSAPDKDKPFEGKSMAMIFEKPSTRTRMSFDIAVKQLGGSSIILNPDGIHYGKGDESLKDTAKVLTEYVDIVMLRTSSHKNLEEFGKYLDIPIINGLSDKSHPCQIMSDIMTFEETKGLITGKVVSWLGDGNNNMSNSLIEAAGKFGFQLKIGCPKKYMPNKKILNWAKKNKVNLLITTKPEEAVKDSDCIMTDKWVSMNDNVNKKLKKKKLKNYQVNKKLMQKAKSDAIFMHCLPVGRGEEVTNDVIDGKQSVVWRQALNRVHAQKGIINWCLN

SEQ ID NO: 109427 - protein, 273 aa, Unknown
  Bacterial polypetide isolated from the Sargasso Sea
MKNFINISDLSNSDLRSIIDGAKQRKLERGKKPNSQPDEDLPIKGKTMIMFFSKPSTRTRISFDLAVKQLGGSSIILNQDEIHYGKGDETIKDTAKVLSQYGDILMIRTDSHKDINEFKKYLDIPIINGLTNLSHPCQIMSDILTFEELKGNVEGKTIAWLGDGNNVANSFIEAATKFKFELKIACPKKYQPDKKIVEFAKKNNCKLLITEDPHKAAKGADCIMTDKWISMGDKGDKKKKKKILKKYQVNKKIMKIAKSDAIFMHCLPRSREE

SEQ ID NO: 109428 - protein, 45 aa, Unknown
  Bacterial polypetide isolated from the Sargasso Sea
CLPAERGREVTDSVMESKNSIVFDEAENRMHAQNAVMVYLSNKKI

SEQ ID NO: 109429 - protein, 215 aa, Unknown
  Bacterial polypetide isolated from the Sargasso Sea
DSARVLSRYVDAIIIRCFSHQQLLDLASHATVPVINGLTERSHPCQIMADLQTMIDCHGPLEGQSVTWFGDGNNVLVSWIEAAALFKFELRIACPDGYSPPAELLAWARAQGGEITMHGDPVEAARNSQTLVTDVWISMGDEEGTRMQDFAPYQVNVDLMKVAAGDAVFMHCLPAIRGQEVAAEVIDGPQSVVFDEAENRLHAQKAVLAWCFAGN

SEQ ID NO: 109430 - protein, 247 aa, Unknown
  Bacterial polypetide isolated from the Sargasso Sea
FQVAMTRLGGTTIDLNPTTSQIGRGEPIRDTARVLSRYCDVIAIRTFDHLDLEEYAKWSTKPVINALTDLEHPCQALADFLTIKEEFLDFKDVVLTFIGDGNNVANSLILCGALLGVEVRIACPKGYEPNSLVIKKAYEIYKNKNLLKITNDPYTSALGANVLYTDVWSSMGEENQKEEKDKDFFGFTIDQNLVRNADKDAIILHCLPAYRSKEITDDVIESKQSRIFEQAENRMHAQQALLSCLLS

SEQ ID NO: 109431 - protein, 149 aa, Unknown
  Bacterial polypetide isolated from the Sargasso Sea
GDGNNIVHSWLQLASLFPMQFVCCSPLGFEPDDKTIRMVTDSGVSTFEISHHPKSAVKDADVVYTDVWASMGQKDEEDSRASIFSNYQVNSSLLTEAKKDFLFMHCLPAERGKEVTDEVIESSNSIVFDQAENRMHVQNAIMVFLSKNS

SEQ ID NO: 109432 - protein, 242 aa, Unknown
  Bacterial polypetide isolated from the Sargasso Sea
MSVRHCIKVDDFSSNEILDLFQLAAELKSKYRNKESYQPFKDHSMAMIFAKPSARTRVSFETGFAWMGGHAIYLAPQDIGLGTRESASDLAQLFSRYNDMIMARVFSHSDMLDFEEHASVPVINGLTDYNHPCQILTDMFSIWEQKKDNFQNLKIVYVGDGNNIVNSWIRLASIIPFEFTCVCPEGYEPDAQTIEYANSKNISTINISHDPIEGVKDADVVYTDVWASMGQKEEIDERIKIF

SEQ ID NO: 109433 - protein, 77 aa, Unknown
  Bacterial polypetide isolated from the Sargasso Sea
MAFNMHNRHLLSLMHHSTRELRYLLDLSRDLKRAKYTGTEQQHLTRKNIALIFEKTSTRTRCAFEVAAYDQGANVTY

SEQ ID NO: 109434 - protein, 143 aa, Unknown
  Bacterial polypetide isolated from the Sargasso Sea
VLTSLMQAAEIFNFKLNILMPKKIMEMAKKKLDNKKLVYSNFCYDFDHALKDSDCVMTDTWISMGEKKSQSKLKLLKKFQVNDVIMKKAKKEAIFMHCLPAHRNEEVTDSVIDSKKSLVWEQAKNRMYVQQSILCYLFNDVRK

SEQ ID NO: 109435 - protein, 115 aa, Unknown
  Bacterial polypetide isolated from the Sargasso Sea
DMSIDAGLSKITITNDPFDSIQNSDVIYTDVWASMGQKDEAEIREKVFKPFQVNKSIMSEAGKNAVFMHCLPAERDREVTDEVMEAEYSIVFEQAENRLHIQNAIMATLLNQTIV

SEQ ID NO: 109436 - protein, 153 aa, Unknown
  Bacterial polypetide isolated from the Sargasso Sea
LAFIGDGNNVANSLILSGALLGVEVRIACPKGYEPNPLVVRKANEINGDKNLLKITNDPYSAVSGANVLYTDVWSSMGEENEMENKDKDFNGFSINNNLVRHADKEAIILHCLPAYRSKEITDEVIESKQSRIFEQAENRLHAQQALLACLFS

SEQ ID NO: 109437 - protein, 191 aa, Unknown
  Bacterial polypetide isolated from the Sargasso Sea
MASASSSLASKLSPLSKSNFLSSSDLNSDQILSLFELAKQLKTGNRRIDLGNRVLGLIFKKASTRTRVSFQVAMARLGGQTVDLNPQITQLGRGEPIKDTARVLSRYCDALAIRTFSQQELEEYAEWSTIPIINALTDLEHPCQSLADYLTIQEKFGELKGINLSYIGDGNNVANSLMICGAMLGVNVKIC

SEQ ID NO: 109438 - protein, 161 aa, Unknown
  Bacterial polypetide isolated from the Sargasso Sea
MTFEENIGIINNKVVSWCGDFNNVCRSWVQASSILNFDLHIACPKQLINKDEMNKINKIKSIKIFDSAENACKNSDCVMTDTWFSMGQITSEKKRNLLKPFQINNKILSIAKKKSIFMHCLPAHRGEEVEKNILEHPKSVVWDEAENRLHTQKAILNWCLK

SEQ ID NO: 109439 - protein, 83 aa, Unknown
  Bacterial polypetide isolated from the Sargasso Sea
MGQEEEQTEREQAFRGFCVDEALMAKADPAAIVLHCLPAHRGEEISESVLEGNSSRIFDQAENRLHAQQALLAALLGAKGIED

SEQ ID NO: 109440 - protein, 264 aa, Unknown
  Bacterial polypetide isolated from the Sargasso Sea
KTYGMFFHKLSLRTRLSFEVGIVQLGGSAVNLSEQDFKIGERESVSDVARVMSRYVDGILIRTFSHQMVLDLAKHATVPVINMLTDFNHPCQVMSDMLTVKEKLGRIDNVRIAFVGDSNNVTNSWLNMAARIPLDLRIATAPETEPDMKLVSKIRETGISNIQVTNSAKKALEDVEIIYTDVWASMGEKNKIAEREKALKDFQVNSRLLQYSGNDALVFHCLPAERDKEITNEVIEGPQSVVFDQAENRLHAQKAILVQLDKWN

SEQ ID NO: 109441 - protein, 212 aa, Unknown
  Bacterial polypetide isolated from the Sargasso Sea
TARVLSRYVDGIMIRTFGEDKIREMAEYSSVPVINGLTDSSHPCQLMADVMTFEEHRGPIKGKTVAWSGDGNNMASSWIHAATKFDFKLNIACPIECRPNHELLDWANKQKKHVNLFHDPRAAVENADCVVTDTWVSMGTDAKNQHNLLAPFQVNKKLMEAASPEAVFLHCLPAHRGEEVTAEVIDGSQSLVWDEAENRLHAQKAVLLWCMT

SEQ ID NO: 109442 - protein, 239 aa, Unknown
  Bacterial polypetide isolated from the Sargasso Sea
MAMIFAKPSARTRVSFETGFAWMGGHAIYLAPQDIGLGTRESAGDLAQLFSRYNDMIMARVYSHNDMLEFEKHATVPVVNGLTDYNHPCQILTDMFTIWEQKKDNLSDLKIVYVGDGNNIVNSWIRLASVLPFEFTCVCPEGYEPDTGTISYANSKNISSINILHDPIQGVKDADVIYTDVWASMGQKEEVDERVKIFSPLQVNNDLIQHAKNDYMFMHCLPAERGREVTDQVIDSQNS

SEQ ID NO: 109443 - protein, 168 aa, Unknown
  Bacterial polypetide isolated from the Sargasso Sea
IADIMTLQENFKSIDDLNICWVGDGNNVCNSWIHSCLHFDFNFHVSCPDGNFPKNKILKKVNSPKIKLFEDPYQAVKGADVIVTDTWVSMGMKKDPERIKKFKKFQINKDLMSYTNKNTYFLHCLPAHRGYEVTDEIIDGKNSLVWSEAENRLYAHQAILLWCLNKIS

SEQ ID NO: 109444 - protein, 247 aa, Unknown
  Bacterial polypetide isolated from the Sargasso Sea
MSKLKRLGKNFLSSTDLTREESLHILDLAEKFKSKQLTLEFKDKVLGLIFDKSSTRTRVSFQVAMSRLGGSTIDLNPNTSQIGRGEPIKDTARVMSRYCDALAIRTFKHNVLEDYAKWSTKPVINALTDLEHPCQALADFLTIKEEFKDFKDVVLSFIGDGNNVANSLILCGALLGVEVRVACPKGYEPNSEVIKKANEINDNNDFLKITNDPQLAAKGANVLYTDVWSSMGEEDEKDEKEKVFLGF

SEQ ID NO: 109445 - protein, 129 aa, Unknown
  Bacterial polypetide isolated from the Sargasso Sea
LLNFELNIACPEGVKPDAKTISWALKRNNSISITHNPQEAAEGANCIITDTWRSMGDQSPLPKDQFIPFQVNKKIMELADKNAIFMHCLPAYRNKEVSSEVLEGSQSVVFDEAENRLHAQKAIMQFCLK

SEQ ID NO: 109446 - protein, 54 aa, Unknown
  Bacterial polypetide isolated from the Sargasso Sea
NEHTKVGREMKMAYGLKGLEVTEEVFESTHSIVFDEAENRMHTIKAVMVATLGD

SEQ ID NO: 109447 - protein, 55 aa, Unknown
  Bacterial polypetide isolated from the Sargasso Sea
ETKVGKQIAEQYPHLKNGIEVTEEVFESPWNIAFEQAENRMHTIKAILVATLADI

SEQ ID NO: 109448 - protein, 171 aa, Unknown
  Bacterial polypetide isolated from the Sargasso Sea
MNHFINIADLSKSDLRTIINVGKKRKSERGQKSHSQPDTDQPLQGKTMVMIFEKTSTRTRISFDLAVKQLGGSSIILNRDEIHYGKGDETIKDTAKVLSQYADIIMIRTDSHKNVDEFKKHLDIPVINGLTNEGHPCQVMSDILTFEELKGNIKDRTIAWIGDGNNVSNSF

SEQ ID NO: 109449 - protein, 270 aa, Unknown
  Bacterial polypetide isolated from the Sargasso Sea
MKNFINIADINKQDLRNIIDHAKSQKKKRSNINKSAIDPEKPLADKILIMIFEKASTRTRLSFELAMKQLGGKLLVLDSKESHYGSGDESIYDTAKVLSQYGDIVMMRTHKHEHLLNFSKHLDIPIINGLTNLSHPCQIMSDIMTFEELKGSITNKKIAWIGDGNNIVYSLIEAAAKFNFELSIACPKKFSPDKKIFRWAKKNKAKISITKDPFEATNLADCVMTDKWISMGDKTNKKKKKKLLKPYQVNKKIMKSAKADAIFMHCLPAS

SEQ ID NO: 109450 - protein, 140 aa, Unknown
  Bacterial polypetide isolated from the Sargasso Sea
MAVTWLHAAMKFNFELSLACPAELSIPRIEVQKATAAGIKLTETQDPLEAVAGADCVVTDTWVSMGDKPGGRRQKLLEPYRVNEMIMGQASSDVIFMHCLPAHRGEEVTSEVLEGIQSVVWDEAENRLHAQKGILVWCLG

SEQ ID NO: 109451 - protein, 254 aa, Unknown
  Bacterial polypetide isolated from the Sargasso Sea
MKNFINISDCSSVELRAIIEEAKKRKQNRSGLNKSAPDEDKPFEGKSMAMIFEKPSTRTRMSFDIAVKQLGGSSIILNPDGIHYGKGEETLKDTAKVLSEYVDIVMLRTSSHKNLEEFGKHLDIPIINGLSNASHPCQIMSDILTYEESNGSIEGKTVSWIGDGNNNMSNSLIEAAGKFNFKLNIGCPKKYSPNKSILKLAKKEKVKLTITSKPLEAATGADCVMTDKWVSMNDKVNKVSKKKTLKPYQVNKKL

SEQ ID NO: 109452 - protein, 175 aa, Unknown
  Bacterial polypetide isolated from the Sargasso Sea
IVENSDKMNGHVAWVGDGNNVLHDLVLGCATLGYDIVFATPQGFEPDESVISRALEIAKKTGSKIEGVNDPKEAVEGAGAIYTDVFVSMGEEHMDGKMGSFDGFQVNEELVSGADDDYIFMHCLPAHRGEEVTDGVMDSPNSVVFDQAENRMWAQMSILTLLCNEVAWQTYWELR

SEQ ID NO: 109453 - protein, 271 aa, Unknown
  Bacterial polypetide isolated from the Sargasso Sea
NFKNKDLNIKLKEKVLGLIFYKSSTRTRVSFQVAMTRLGGTTVDLNPTTSQIGRGEPIRDTARVLSRYCDVLAIRTFKQTDLEEYAKWSSKPVINALTDLEHPCQALADFMTIKEEFLDFKDVVLTFIGDGNNVANSLILCGALLGVEVRIACPKGFEPNSLLIDKAYEIYKNKNLLKITNDPNTAVLGANVLYTDVWSSMGEENQKDEKEKVFNGFTIDSDLVSKADKDAIILHCLPAYRSKEITDEIFESHKSRIFDQAENRLHAQQAL

SEQ ID NO: 109454 - protein, 191 aa, Unknown
  Bacterial polypetide isolated from the Sargasso Sea
KELKNKDLDIQLQNKVLGLIFNKSSTRTRVSFQVAMSRLGGTTIDLNPTTSQIGRGELIKDTARVLSRYCDIVAIRTFNQCDLEEYAKWSAIPVINALTDLEHPCQALADYLTIKEEFLDFKNVILTFIGDGNNVANSLILCGALLGVEVRIACPKGYEPNSTVIKKALEIYKDKNLLKITNDPHNAVLGA

SEQ ID NO: 109455 - protein, 160 aa, Unknown
  Bacterial polypetide isolated from the Sargasso Sea
MITPRNFLGLDAFHAQELRGIIDCAKDLKKDQTFSANVLAGKTLAMIFEKPSTRTRISFDIAMSQLGGRVVSLSTKELQLGRGETLADTARVLSRYVDAIVMRTDSHQSLLEFANASSVPVINGLTNLTHPCQLLADVMTFEEHLGSIRNKVVAWLGDGN

SEQ ID NO: 109456 - protein, 274 aa, Unknown
  Bacterial polypetide isolated from the Sargasso Sea
GVKDLDSPMNGKVLALLFQKPSTRTRVSFDIAMRQLGGETLVLNSEDMQIDRGESFADTARVLSKYVDIIMIRSTTHEVLVEVSNYSTVPIINGLTDRSHPCQVLSDIFTFIELRDSIKGKNFVWFGDSNNVARSWVEASVIFGFNFTLASPKEFSLNPELVKWANQNGGNVRLVYDPLEAILDADCVMTDVWVSMGDEINQNITSAERRKILSPYRVTTKLMNLARSDSLFMHCLPAHRGEEVDSEVIDGSKSVVWLEAENRLHIQKSIILNC

SEQ ID NO: 109457 - protein, 140 aa, Unknown
  Bacterial polypetide isolated from the Sargasso Sea
VVFATPQGFEPDESVISRALEIAKKTGSKIEGVNDPKEAVEGAGAIYTDVFVSMGEEHMGGKMGSFDGFQVNEELVSDADDDYIFMHCLPAHRGEEVTDGVMDSPNSVVFDQAENRMWAQMSILTLLCNEVAWQTYWELR

SEQ ID NO: 109458 - protein, 215 aa, Unknown
  Bacterial polypetide isolated from the Sargasso Sea
RVLSRYCDVLAIRTFNQDDLEEYAKWSSKPVINALTDLEHPCQALADFMTIKEEFKDFKNVVLTFIGDGNNVANSLILCGALLGVEVRIACPKGYEPNSWVIKKANEINMNKNLLTITNDPITAVQGANVLYTDVWSSMGEENQKEEKDKDFLGFTIDHNLVRNANKDAIVLHCLPAYRDKEITDEVIESKRSRIFEQAENRMHAQQAMLSCLLS

SEQ ID NO: 109459 - protein, 124 aa, Unknown
  Bacterial polypetide isolated from the Sargasso Sea
MIKPKKLDKKNFLSSLDISGEETLNLLDIAKKFKKNELKIELKDKVLGLIFDKASTRTRVSFQVAMARLGGTSIDLNPTTSQIGRGEPIKDTARVLSRYCDVIAIRTFKQSVLEEYANWSSKPV

SEQ ID NO: 109460 - protein, 293 aa, Unknown
  Bacterial polypetide isolated from the Sargasso Sea
MNKHFLDLNNFSKDDIYRILNNSLEMKSKGKNIKILEGKFLSLVFEKSSTRTRVSFEVGMAQLGGRASFLSVNDLQMGRGEPIEDTSKVLSSMVDGIVLRTLEHKTQIKFAENSSVPIINGLSDRSHPCQLLADLLTFREEKGSIEGKKVAWCGDFNNVCFSYAQAAELLNFELSIACPKEFYPEDMKNYKNVSFTQSISKAVEGCDLVSTDVWVSMGDEREADKRQKLFSDYQVNQEILDQAKSDVVFLHCLPAVRGQEISHNLLEDPRSYVWKQAENRLHAQKGLLGELLN

SEQ ID NO: 109461 - protein, 90 aa, Unknown
  Bacterial polypetide isolated from the Sargasso Sea
ADVIYTDVWASMGQKEEVDERVKIFSPLQVNHDLIQHAKNDYMFMHCLPAERGREVTDQVIDSQNSIVFEQAENRLHTQNAIMATLANKV

SEQ ID NO: 109462 - protein, 240 aa, Unknown
  Bacterial polypetide isolated from the Sargasso Sea
MAYNLKNRNFLTLRDFTPQEIAFLLKLAADLKTAKYAGTEVPTLKGKEIALIFEKDSTRTRVGFEVAAHDQGATVTYLGPSGNHMGHKETVKDTARVLGRVYDAIEYRGFGQEVVLTLAEWSGVPVYNGLTDEFHPTQILADFLTMQEHSDKPLREIAYCFLGDAGNNMGDSLLIGGAKMGMDVRLCAPESLWPTVEIRKEAEEIAAATGARIMLTQDVDEAVKGADFLYTDVWVSMGEA

SEQ ID NO: 109463 - protein, 280 aa, Unknown
  Bacterial polypetide isolated from the Sargasso Sea
MSRSLISISDFNNIDLESILESTSLFKNNKVSSKHEGKCIGLLFEKFSTRTRLSFEVAISRLGAYPIYINKSDTQISRGESIEETAKMFSLYLDALVYRTSRHKDLEDFNKFSDIPVINALSDLEHPTQIISDIFSILDTHPDCESIKDLKDLKIVYIGDGNNIANSLTLAADIMKLNLTICTPLGYEPKDKKYWIDNPKKALADADVVYTDVWTSMGSEGEELKRIKDFENYQINSESIRLANKDYSFMHCLPAHIGEEVTKDIIESSNSIVYQQAENK

SEQ ID NO: 109464 - protein, 155 aa, Unknown
  Bacterial polypetide isolated from the Sargasso Sea
GSIKGKTVAWSGDGNNMASSWIHAATKFDFKLNIACPRECRPDEKLLDWANKEKNHVNLFYDPKAAVENADCVVTDTWVSMGNDDSNRHNLLAPFQVNKKLMGNASPEAVFLHCLPAHRGEEVTSEVLDGPKSLVWDEAENRLHAQKAILLWCMT

SEQ ID NO: 109465 - protein, 282 aa, Unknown
  Bacterial polypetide isolated from the Sargasso Sea
MKKQRRENKIDSGLNKSAPDEDKPFEGKSMAMIFEKPSTRTRMSFDIAVKQLGGSSIILNPDGIHYGKGEETLKDTAKVLSEYVDIVMLRTSSHKNLEEFGKHLNIPIINGLSDVSHPCQIMSDILTYEESNGSIEGKTVSWIGDGNNNMSNSLIEAAGKFNFKLNIGCPKKYSPNKSILKFAKKEKVKLTITSKPLEAATGADCIMTDKWVSMNDKVNKVSKKKTLKPYQVNKKLMSKANSDAVFMHCLPVGRGEEVTNEVIDGNQSVVWRQALNRVHAQK

SEQ ID NO: 109466 - protein, 261 aa, Unknown
  Bacterial polypetide isolated from the Sargasso Sea
DYKPFHNKSLAMIFAKPSARTRVSFETGFEWMGGHALFLGPNDIGIGKREAIKDISRLFSRYNDIIMARLFDHEHIIELAEYSTIPVINGLTDYNHPCQIMTDIFTVWEHLGELDKPKIVYMGDGNNIVHSWLHLAMRIPMDFVCCCPEDYTPDQTTLNNAVDSKISDIEISHIPNKAIKNADVVYTDVWASMGQKKEALHREKVFSDFQVNERLMTSSGKETLFMHCLPAERNREVTDGVIEAEYSIVFGQAENRMHIQK

SEQ ID NO: 109467 - protein, 309 aa, Unknown
  Bacterial polypetide isolated from the Sargasso Sea
MSEANKRNLMAIDDLGDELGDIIDWAIAFKHGGEFSRDFKPLDGMSIGSIYEKPSTRTRVSFEVGVSRLGGQPLTLLSNDIQLGKSESIADTAAVLSRFLDGITYRCFEHGHAEELAQHATVPVINALSDLHHPCQAAADLMTIIEHGDSVNGHIAWVGDGNNVFHDLLLAAVCLGMDVKYATPVGFEPDESIMQRASEIASRTGSNISGTNNPVEAVSGAGVIYTDIFVSMGEEHMEGKFEAFDGFQVNEDLVAHADPNYLFMHCLPAHRGEEVTDGVIDSVNSVVLDQAENRMWAQMSLLTLLCNED

SEQ ID NO: 109468 - protein, 246 aa, Unknown
  Bacterial polypetide isolated from the Sargasso Sea
FDIAIKQLGGSSIILNPDGIHYGKGEETLKDTAKVLSEYVDIVMLRTSSHKNLEEFGKHLNIPIINGLSNLSHPCQIMSDILTFEESNGSIEGKTVSWIGDGNNNMSNSLIEAAGKFNFKLNIGCPKKYSPNKSILKLAKKEKVKLKITSKPLEAATGADCVMTDKWVSMNDKVNKVSKKKTLKPYQVNKKLMSKANSDAVFMHCLPVGRGEEVTNEVIDGNQSVVWRQALNRVHAQKSIIKWCID

SEQ ID NO: 109469 - protein, 241 aa, Unknown
  Bacterial polypetide isolated from the Sargasso Sea
CWRHPLGTSETIADTAAVLSRYMDCITYRCFGHGDVAELAKHSTVPVINALSDMHHPCQAAADMMTIVENSDKMNGHVAWVGDGNNVLHDLVLGCATLGYDIVFATPQGFEPDDSVISRGLEIAKKTGSKIEGVNDPKEAVAGAGAIYTDVFVSMGEEHLDGKMGSFDGFQVNEELVSNADEDYIFMHCLPAHRGEEVTDGVMDSSNSVVFDQAENRMWAQMSILTLLCNEVAWQTYWELR

SEQ ID NO: 109470 - protein, 145 aa, Unknown
  Bacterial polypetide isolated from the Sargasso Sea
GDGNNVCNSLILGCAKLKIQLSVAIPDGYEPEFDVIKIGKEAEILEVSDNPETAVQDADVVMTDTFVSIHNTNSDRVKKFLPKFQVNQSLMNKAKKDAIFMHCLPAKRDQEVTSDVIDGSQSVVWDEAENRLHVQKALLVHLLGV

SEQ ID NO: 109471 - protein, 254 aa, Unknown
  Bacterial polypetide isolated from the Sargasso Sea
MLFEKSSTRTRVSFESSMIEGGGGAIFLTNRDSQMGRGESIADTSRVISRMVDIVMIRTHSHETVETFSKYSEVPVINGLTKAFHPCQVLADLVTYLEFKGNIENKKVTWIGDGNNMCNSYMEAAQIMDFQLEIACPEGFEPTGIDANNCKLAKNPYDAAEGADLVVTDVWASMGDESEKKDREKAFIEFQVNQRLMDRAKPDALFMHCLPAYRGLEVSEEVLEGVNSVVWHEAENRLHSQKALIEFLLNSSKR

SEQ ID NO: 109472 - protein, 257 aa, Unknown
  Bacterial polypetide isolated from the Sargasso Sea
MKNFINISDCSSVELRAIIEEAKKRKQNRSGLNKSAPDEDKPFEGKSMAMIFEKPSTRTRMSFDIAVKQLGGSSIILNPDGIHYGKGDETLKDTAKVLSEYVDIVMLRTSSHKNLEEFGKHLDIPIINGLSDVSHPCQIMSDILTYEESNGSIEGKTISWIGDGNNNMSNSLIEAAGKFNFKLNIGCPKKYSPNKKILKLAKKEKVKLTITSKPLEAVTGADCVMTDKWVSMNDKVNKVSKKKTLKPFQVNKKLMSK

SEQ ID NO: 109473 - protein, 87 aa, Unknown
  Bacterial polypetide isolated from the Sargasso Sea
DVVMTDTFVSIHNTSSDRVKKFLPKFQVNQALMNKAKKDAIFMHCLPAKRDQEVTSDVIDGSQSVVWDEAENRLHVQKALLVHLLGV

SEQ ID NO: 109474 - protein, 252 aa, Unknown
  Bacterial polypetide isolated from the Sargasso Sea
MIFQKDSTRTRVSFTVGFQKLGGHSIELNPESIGFGKRENYKDIIRTLSQFIDILMIRNDDHKIIRDLSYLNALPIINGLSDFSHPCQILSDLLTINEKLGNIKNQRICWVGDYNNVLRSLIELQSLYRFKLNLVMPREILNKNKSKILKKNNKNLMITNIINEGVKNADCVMTDAWVSMGEKSTKKKYFKNYQVNSDIMKNTSKESIFMHCLPAHRNEEVSSDLLDSDKSVVWEQAQNRMFVQQAIILDLL

SEQ ID NO: 109475 - protein, 272 aa, Unknown
  Bacterial polypetide isolated from the Sargasso Sea
MKNFINIADIEKKDLRKIIDHAKSQKEKRSNLNKSAIDPEAYLTDKILIMIFEKSSTRTRISFELAMKQLGGQLVVLNPKESHYGSGNESVHDTAKVLSQYGDIVMMRTTRHEHFLEFSKHLDIPIINGLTNLSHPCQIMSDIMTFEELKGPITNKKIAWLGDGNNVVYSLIEASAQFNFELAIACPKQLTPNKKILNWAKNKKAKILITNDPKKAVSLADCVMTDKWISMGDKVNKKKKKILLKPYRVNNKIMKLAKNDAIFMHCLPASRG

SEQ ID NO: 109476 - protein, 167 aa, Unknown
  Bacterial polypetide isolated from the Sargasso Sea
SDILTFEELKGDIEGKTIAWLGDGNNVANSFIEAATKFEFELKIACPKKYQPDKKIVEIAKKNNCKLLITEDPHKAARDADCVMTDKWISMGDKGDKKKKKKVLKKYQVNRKIMKSAKSDAIFMHCLPASREEEVTSEVMDGKQSVVWLQAFNRIHAQKSIIEWCIK

SEQ ID NO: 109477 - protein, 285 aa, Unknown
  Bacterial polypetide isolated from the Sargasso Sea
KSQKKKRSNINKSAADPEKSLVDKTLIMFFEKASTRTRLSFELAMKQLGGQLLVLDSKESHYGSGNESIYDTAKVLSQYGDIVMMRTNKHKHLLEFSKHLDIPIINGLTNLSHPCQIMSDIMTFEELKGSITNKKIAWLGDGNNIVYSLIEAATKFNFELSIACPKKFEPDKKIVKWAKKNNAKILITKDPLEATDLADCVMTDKWISMGDMGNKKKKKKLLKPYQVNKKIMKSAKKNAIFMHCLPANRGEEVTDEVMDGKQSAVWLETLNRIHVQKSIIRWCLK

SEQ ID NO: 109478 - protein, 291 aa, Unknown
  Bacterial polypetide isolated from the Sargasso Sea
LDIKNLTADQIIKIIDIAHKWKTDKVPLFLNDKNVMMIFEKPSLRTRVSFEVCIKQLGGNVSVLNASEFALGERESVFDTAKVLERYVDMIIVRSFDHSILTEFSSLINVPVINALTDFSHPCQVVADLLTIKEHFKSFKNKKISWFGDYNNVTQSWIEASVLLGIDFYIACPKGASPNKKTLEWIKNNNGNIVISEDTNLVAKGADCILTDTWISMGDNKNKSVKEFFPFQVNKEIMEMAKDNAMFLHCLPAHRGKEVTKEVIDGASSFIYDQAENRLHAQKSIINYCLC

SEQ ID NO: 109479 - protein, 136 aa, Unknown
  Bacterial polypetide isolated from the Sargasso Sea
LILGCAKLKIKLAIAVPNGYEPDFDVMKIGKEAEILEVSDEPETAVQDADVIMTDTFVSIHNKNSDRIKKFLPKFQVNQSLMNKAKKDVIFMHCLPAKRDQEVTADVIDGPKSVVWDEAENRLHVQKALLVHLLGV

SEQ ID NO: 109480 - protein, 160 aa, Unknown
  Bacterial polypetide isolated from the Sargasso Sea
MLNPSKLAKKNFLSSLDMTAEEVIHVIELANYFKSKNLKIKFEDKVLGLIFDKSSTRTRVSFQVAMSRLGGTTIDLNPSTSQIGRGEPIKDTARVLSRYCDVLAIRTFNQSDLEEYAKWSSKPVINALTDLEHPCQALADFMTIKKEFIDFKNIVLTFME

SEQ ID NO: 109481 - protein, 210 aa, Unknown
  Bacterial polypetide isolated from the Sargasso Sea
MSQYGDIVMMRTHKHKHFLEFSNNLEIPIINGLTNLSHPCQIMSDIMTFEELKGSITNKKIAWLGDGNNVVYSLIEASVQFNFELSIACPKKLEPNQKIVKWAKNKKAKLLITKDPFEAVNSADCVMTDKWISMGEEVNEKKKKKILKTYQVNKKIMKLAKNDAIFLHCLPASRGEEVTDEVMDGKQSAVWLEALNRIHVQKSIIEWCLK

SEQ ID NO: 109482 - protein, 138 aa, Unknown
  Bacterial polypetide isolated from the Sargasso Sea
MNKKPHNVDILTLDELESKEINNIIDLAIDLKKELKKGKEKPLLQNKTLAMIFEKPSTRTRVSFETGMFQLGGHALTLSPNDLQLSRGESIADTARTLSRYVNVVMARVYDHKSLETFARNSSIPVINGLSDSYHPCQ

SEQ ID NO: 109483 - protein, 141 aa, Unknown
  Bacterial polypetide isolated from the Sargasso Sea
MKKIKHFLDLDQIDAKDLRSIIDLSKSYKQGITSAQDTFKEKTLGLIFEKPSTRTRVSFEIAMYQLGGNVTILEHEKTHLGRGEAISDTAKVLARYLDIIVYRTSSAEKLYELSKHSSIPVINGLNDETHPCQLIADIMTF

SEQ ID NO: 109484 - protein, 141 aa, Unknown
  Bacterial polypetide isolated from the Sargasso Sea
MLKPNKLVKKNFLSSLDISTEELIHILDVAKNFKNKDLKVELNNKVLGLIFDKSSTRTRVSFQVAMSRLGGTTIDLNPATAQIGRGEPIKDTARVLSRYCDAIAIRTFNHSDLEEYAEWSTKPVINALTDLEQPCQAIADF

SEQ ID NO: 109485 - protein, 93 aa, Unknown
  Bacterial polypetide isolated from the Sargasso Sea
VIDADVIYTDVWASMGQKDEAQSREKVFEDFQVNSSMLNATGKNTLFMHCLPAERGREVTDEVMESSNSIVFDQAENRMHAQNAIMLMLANKS

SEQ ID NO: 109486 - protein, 249 aa, Unknown
  Bacterial polypetide isolated from the Sargasso Sea
MAAELSALKGLDFLSSADFNGAQTKALLTLAADIKSGRCNPRLDGKVLGLIFSKASTRTRVSFTVAMARLGGQTIDLNPSVSQVGRGEPIKDTARVLSRYLNAVAIRTFAQSDLQAYADAASIPIINALTDLEHPCQALADYLTMQEAFGSLKGLTMTYVGDGNNVAHSLLIAGALLGVNVRIGCPAGFYPLEEVVDQARELAGGRCEISISEDPTEAVRGAHAVYTDVWASMGQEEEQSTRVQAFRGF

SEQ ID NO: 109487 - protein, 302 aa, Unknown
  Bacterial polypetide isolated from the Sargasso Sea
HFLHISDYSESELWEILNLAKYLKQKFHNREDYKPFHNKSLAMIFAKPSARTRVSFETGFEWMGGHALFLGPDDIGIGKREAIKDISRLFSRYNDVIMARLFDHEHIIELAEYSSIPVINGLTDYNHPCQIMADIFTVWEHLGEIDKPKIVYMGDGNNIVHSWLHLAMRIPMNFVCCCPEDYTPDQTTLNNAVDSKISNIEISHDPNESIKNADVVYTDVWASMGQKEEALHREKVFSNFQVNEELMASSGKETLFMHCLPAERDREVTDGVMEAEYSIVFDQAENRMHIQNAIMVYLSENN

SEQ ID NO: 109488 - protein, 137 aa, Unknown
  Bacterial polypetide isolated from the Sargasso Sea
CGALLGVEVRVACPKGYEPNSEVIKKAKEINNNDDLLKITNNPQLAAKDANILYTDVWSSMGEEKEQAEKEKAFLSFSVDENLLSLASDNAIVLHCLPAYRSKEITEEVIESKRSRIFDQAENRLHVQQALLAKMFT

SEQ ID NO: 109489 - protein, 262 aa, Unknown
  Bacterial polypetide isolated from the Sargasso Sea
MLKPYNLSKTNFLSSSDISTEEIIHILEIAKNFKNNELNIEFKNKVLGLVFDKSSTRTRVSFQVAMSRLGGTTIDLNPMTSQIGRGEPIKDTARVLSRYCDVIAIRTFDHSDLEEYAKWCTKPVINALTDLEHPCQALADFLTIQEEFLDFKDVVLTFVGDGNNVANSLILCGALLGVEVRIACPKGYEPNSLVIKKAYEIYKKKDLLTITNDPNTAVLGANVLYTDVWSSMGEENKKAEKDKFFNGFTIDSDLVSKAEKDA

SEQ ID NO: 109490 - protein, 129 aa, Unknown
  Bacterial polypetide isolated from the Sargasso Sea
AAQIIGFELRICSPKDYSVDNNLVSGFPNITTDLDPNDAAKDCDCIITDTWFSMGEDDNDQKRKILEPYKVDSNKISMASSDAIFLHCLPAHRGEEVDADVIDGVNSVVWDEAENRVHAQKSIIRWCLS

SEQ ID NO: 109491 - protein, 253 aa, Unknown
  Bacterial polypetide isolated from the Sargasso Sea
SARTRVSFETGYYRLGGHALYLGPNDIGIGKRESVADVARVLSRFNDMIMARLFDHNHILELAEHATVPVVNGLTDHNHPCQIMADAFTIIEHLGSIENKSIAYVGDGNNIVHSWLYLSMMIPIQFTVVCPEEYKPDMELVEKARKVNLSQINISHDPHNGVKGADVIYTDVWASMGQKEEADKRRRIFEPFQVNDSMIKATGQKTLFMHCLPAERGVEVTDSVCEAEYSIIFDQAENRMHAQNAIMLYLTGN

SEQ ID NO: 109492 - protein, 246 aa, Unknown
  Bacterial polypetide isolated from the Sargasso Sea
MLKPNKLANNNFLSSLDLSTDEVFHILKLASNFKNKEININLNNKVLGLIFDKSSTRTRVSFQVAMTRLGGTTIDLNPTTSQIGRGEPIKDTARVLSRYCDVIAIRTFDHSDLEEYAKWSTKPVINALTDLEHPCQALADFLTIYEEFLDFKDVVLTFIGDGNNVANSLILCGALLGIEVRIACPKGYEPNSLVINKAYEIYKNKNLLKISNDPNTAVLGANVLYTDVWSSMGEENQKEEKDKAFN

SEQ ID NO: 109493 - protein, 268 aa, Unknown
  Bacterial polypetide isolated from the Sargasso Sea
IERKSQKQKEKTLVGSKLGLIFEKPSTRTRISFESGILNLGGNAIFMSSSDLQLSRGEPVSDTAKVASSMLDVIALRVDKHETLDMFAANSSVPVINALSDLSHPCQILADLMTFKENSVNELEKVCWIGDGNNVCNSYIEASKILDFEFSIYCPKEYSPNHSFLDYAKENSSFANSREEAAKGADIITTDVWVSMGDEKTKERAFEGYFVDTELIENTGKKSIFLHCLPAHRGQEITFELMEHPSSKVLQQAENRMHVQEALIGNLL

SEQ ID NO: 109494 - protein, 170 aa, Unknown
  Bacterial polypetide isolated from the Sargasso Sea
MSILADLMTIKEHKKNLKKVKIAWIGDGNNVCNSLIIGCAKLKIKLAIAVPNGYEPDFDVMKIGKEAGILEVSDEPETAVQDADVIMTDTFVSIHNTNSDRIKKFLPKFQVNHSLMNKAKKDVIFMHCLPAKRDQEVTADVIDGPKSVVWDEAENRLHVQKALLVHLLGV

SEQ ID NO: 109495 - protein, 276 aa, Unknown
  Bacterial polypetide isolated from the Sargasso Sea
FKNKHLSFELKDKVLGLIFDKSSTRTRVSFQVAMSRLGGITVDLNPNTSQIGRGEPIRDTARVLSRYCDVLAIRTFKQSDLEEYAKWSSKPVINALTDIEHPCQALADYMTIKEEFDDFKNVVLTFIGDGNNVANSLILCGALLGVEVRIACPKGYEPNSVVIKKAYEIYKNKDLLKITNDPNSAVIGANVLYTDVWSSMGEENQKEKKDKLFNGFTIDNDLVSKAEKDAIVLHCLPAYRSKEITEEVFESKKNRIFDQAENRLHAQQALLSCLVQ

SEQ ID NO: 109496 - protein, 71 aa, Unknown
  Bacterial polypetide isolated from the Sargasso Sea
EREQAFAGFCVDEALMEAADTEAIVLHCLPAHRGEEISPGVMESSASRIFDQAENRLHAQQALLAALMGGL

SEQ ID NO: 109497 - protein, 174 aa, Unknown
  Bacterial polypetide isolated from the Sargasso Sea
MRHFLDIRDHSADTLQAMLDHAAELKSALKAGRDGPKPLAGKSVAMIFEKPSTRTRVSFEVGINQLGGAPLMMLAQDMQIGRGETIEDTARVLSRYVDAITIRCFSHDMLLTLAKNATVPVVNALTERSHPCQIMADLQTMIERHGPLDGQIVTWIGDGNNVAASWIEAAARFN

SEQ ID NO: 109498 - protein, 238 aa, Unknown
  Bacterial polypetide isolated from the Sargasso Sea
GTTVDLNPTTSQIGRGELIRDTARVLGRYCDVLAIRTFKQSDLEEYAKWSSKPVINALTDLEHPCQALSDYMTIKEEFTDFKNVVLTFIGDGNNVANSLILCGALLGVEVRIACPKGYEPNNLVINKAKKIYKNKNLLKITNDPITAVRGANVLYTDVWSSMGEENQKDEKDKDFNGYTINKNLVSNADKEAIILHCLPAYRGKEITDEVIESEKSRIFEQAENRMHAQQALLSCILQ

SEQ ID NO: 109499 - protein, 247 aa, Unknown
  Bacterial polypetide isolated from the Sargasso Sea
MSIKHCIKVDDFKGNEILDLFQLASELKFKYRNKESYQPFKDHSMAMIFAKPSARTRVSFETGYAWMGGHAIYLAPQDIGLGTRESAGDLAQLFSRYNDMIMARVYSHNDMLEFEKHASVPVINGLTDYNHPCQILTDMFTIWEQKKDNLSDLKIVYVGDGNNIVNSWIRLASVLPFEFTCVCPEGYEPDADTISFANSKNLSTINISHDPVNGVKDADVIYTDVWASMGQKEEVDERVKIFSPMQV

SEQ ID NO: 109500 - protein, 121 aa, Unknown
  Bacterial polypetide isolated from the Sargasso Sea
ACPEGYDPDPALLAACGQYARVDRDPASAAEGAHLLVTDVWASMGQESEQAAREAVLAPYQLNRTLLDRASSGALYMHCLPAHRGEEITAELMDAPDSVIWQEAENRLHAQKALMELLLNA

SEQ ID NO: 109501 - protein, 240 aa, Unknown
  Bacterial polypetide isolated from the Sargasso Sea
MNKRDFKSLIDINTQEFKRIIQKAIEYKELDKKHSIPRTYVNRTLAMIFKKNSTRTRVSFETAMYKLGGHAIFLSENSTQLNRGEDISDTAKVLSGMVDLIMMRTNAHEEIKTIAENSSVPVINGLCNLFHPCQLLADMQTIAETKGNDFSKLTIAWIGDGNNMCNSYINASKLLNFRLKISVPNGYEPDKYTLDKFGENVELCEIPGSAVDGADVVTTDVWASMGDEHENEERKKVFKS

SEQ ID NO: 109502 - protein, 133 aa, Unknown
  Bacterial polypetide isolated from the Sargasso Sea
MSVDLRGRHFLKLLDFTPEEVAYLLDLSAELKRSKQSGTEERTLTGKNIALIFEKGSTRTRCAFEVAALDQGAHSVYLGPTGTQIGIKETMKDTARVLGRMFDGIEYRGFGQVQVEELAEFAGVPVWNGLTNE

SEQ ID NO: 109503 - protein, 161 aa, Unknown
  Bacterial polypetide isolated from the Sargasso Sea
GSLDNLKICYMGDGNNIVHSWLQLASRLPMDLVCCGPEGFEPDLDTVKMVEDSGLSSFQLSHDPISAVRDADVIYTDVWASMGQKEEATEREKVFAPYQVNKDLIKNTGKDTLFMHCLPAERGREVTDEVMESKNSIVFDQAENRMHAQNAIMVYLTNNLS

SEQ ID NO: 109504 - protein, 180 aa, Unknown
  Bacterial polypetide isolated from the Sargasso Sea
MKNFINIADINKQDLRKIIEHAKSQKKKRSNINKSAIDPEKPLIDKTLIMLFEKASTRTRLSFELAIKQLGGHLLVLDSKESHYGSGDESVYDTAKVLSQYGDIVMMRTHKHKHLLEFSKHLDIPIINGLTNLSHPCQIMSDIMTFEELKGSITNKKIAWLGDGNNIVYSLIEAAVKFNF

SEQ ID NO: 109505 - protein, 301 aa, Unknown
  Bacterial polypetide isolated from the Sargasso Sea
NISDLSSEELRSIIDEAKKRKLNRKDFNKSACDLDKPFEGKSMIMIFEKPSTRTRISFDIAIKQLGGSSIILNPEGIHYGKGNESIKDTSKVLSEYADIIMIRTSNHKNLEEFALHSGVPIINGLSEQSHPCQIMSDILTFEELKGDIKGKTIAWLGDGNNNMSNSLIEAASKFSFKLNIGCPKKYSPNKKILKWAHENHTNLEISKDPKDAIKDADCVMTDKWISMNDKVNKKAKKKILEKYQVNKKLMKYAKNNSIFMHCLPVGRGEEVTDEIIDGNQSVVWTQALNRVHAQKSIITWC

SEQ ID NO: 109506 - protein, 70 aa, Unknown
  Bacterial polypetide isolated from the Sargasso Sea
RVKKFLPKFQVNQALMNKAKKDAIFMHCLPAKRDQEVTSDVIDGSQSVVWDEAENRLHVQKALLVHLLGV

SEQ ID NO: 109507 - protein, 216 aa, Unknown
  Bacterial polypetide isolated from the Sargasso Sea
MSRYVDGILIRTFSHQMVLDLAKHATVPVINMLTDFNHPCQVMSDMLTVKEKLGRIDNVRIAFVGDSNNVTNSWLNMAARLPLDLRIATAPETEPDMKLVSKIRETGISTIQVTNSAKKALKDAEIIYTDVWASMGEKNKITEREKALKNFQVNSKLLQYTGNDALVFHCLPAERDKEITDEVIEGPQSVVFDQAENRLHAQKAILVQLDKWNLLK

SEQ ID NO: 109508 - protein, 180 aa, Unknown
  Bacterial polypetide isolated from the Sargasso Sea
TDLEHPCQALADFMTIKEEFLDFKDVVLTFIGDGNNVANSLILCGALLGVEVRIACPKGYEPNSLLIDKAYGIYENKNLLKITNDPNTAVLGANVLYTDVWSSMGEENQKDEKEKVFNGFTIDSDLVSKADEDAIILHCLPAYRSKEITDEIFESQKSRIFDQAENRLHAQQALLSCILQ

SEQ ID NO: 109509 - protein, 196 aa, Unknown
  Bacterial polypetide isolated from the Sargasso Sea
IVLRTKKHETQETFASFSSCPTINGLSELSHPCQVLADLLTYYEENGSIEGEKVCWSGDFNNVCYSYAEAANIFNFELHVACPKEFQPKNKDFINVTFTESLDQAIDGSSLVTTDVWVSMGDEKEKELREKVFQDYQISPVVMDKAKDNAIFLHCLPAIRGQEISADLFEDERSKVWIQAENRLHTQKALLVELLS

SEQ ID NO: 109510 - protein, 215 aa, Unknown
  Bacterial polypetide isolated from the Sargasso Sea
TARVLSRYCDVIAIRTFNHSDLEEYAKWSTKPIINALTDQEHPCQALADFLTIKEEFADFKNVVLTFIGDGNNVANSLIICGALLGIEVRIACPKGYEPNSVIIKKAKNIYKQNKLQITNDPISAVNGSNVLYTDVWSSMGEESKKADKDKNFEGFTINKQLLSKANKDAIVLHCLPAYRGKEISDEIIESKKSRIFEQAENRMHAQQALLACLI

SEQ ID NO: 109511 - protein, 239 aa, Unknown
  Bacterial polypetide isolated from the Sargasso Sea
MKNFINISDCSSEELREIIEEAKKRKQNRTGLNKSAPDEDKPFEGKSMAMIFEKPSTRTRMSFDIAIKQLGGSSIILNPDGIHYGKGNETLKDTAKVLTEYVDIVMLRTSSHKNLEEFGKHLDIPVINGLSDLGHPCQIMSDILTFEESNGQITGKNISWIGDGNNNMSNSLIEAAGKFKFNLKIGCPKKYSPNKTILNWAKKNSVNLTITSKPIDAVKGADCVMTDKWVSMNDKVNAK

SEQ ID NO: 109512 - protein, 281 aa, Unknown
  Bacterial polypetide isolated from the Sargasso Sea
KREGQNKSSIDIDKPLYGKSMIMIFEKPSTRTRISFDLAIKQLGGSSMILNPDGIHYGKGDESLKDTARVLSEYADILMIRTSSHKNLEEFSKYSKIPVINGLSDQSHPCQVMSDILTFEENNGNIEGKTISWIGDGNNNMSNSFIEAAVKFKFNLKIGCPKKYSPSGKILKWASKNKSKIFVTKDPREAAKDADCIMTDKWVSMNDKVNKKAKKKSLKDYQVNKKLFKLAKTDCIFMHCLPVGRGEEVADDIIDGNKSVVWQQAYNRVHAQKSIINWCLN

SEQ ID NO: 109513 - protein, 295 aa, Unknown
  Bacterial polypetide isolated from the Sargasso Sea
DLRAIIDEAKARKLKRQNLNKSAPDEDKPFEGKSMAMIFEKPSTRTRMSFDIAIKQLGGSSIILNPDGIHYGKGDETLKDTAKVLTEYVDIVMLRTSSHKNLEEFGKHLDIPIINGLSDIGHPCQIMSDILTYEESNGTIEGKTVAWLGDGNNNMSNSLIEAAGKFNFNLRIACPKKYSPNKKVLSWAKKNKANLIVTTKPEEAVKNSDCVMTDKWVSMNDKVNKKAKKKILKPFQVNKKLMSKANTGAIFMHCLPVGRGEEVTDEVIDGKQSVVWRQALNRVHAQKSIIKWCLD

SEQ ID NO: 109514 - protein, 178 aa, Unknown
  Bacterial polypetide isolated from the Sargasso Sea
SHPTQILSDVFTIEEIKKKSIKNLNICWIGDGNNVLNSLIEASTKFSFNLSIGSPKKYETNKTLLNWAKKNMAKIKIYNDPKKAILNSDIVFADKFISMNDKINKKKKIKDFKNFQVNSKLMSLAKKNAIFLHCLPASRGYEVSSDVIDGKQSKVWQQALNRVHVQKSIILYCLEKLR

SEQ ID NO: 109515 - protein, 112 aa, Unknown
  Bacterial polypetide isolated from the Sargasso Sea
MIANKQASILRFQAQNVNRITPMRHFLDLRDFSTDTLQSLLDEGLRMKVTQKSGDGHELPLAGKTVAMIFEKPSTRTRVSFEVGITQLGGTPLVLSTNDLQSGRGESIEDTA

SEQ ID NO: 109516 - protein, 79 aa, Unknown
  Bacterial polypetide isolated from the Sargasso Sea
MGQEAEQAQREQAFAGFCVDQALMEQAAADAIVLHCLPAHRGEEISAEVMEGTASRIFDQAENRLHAQQALLAVLMGGL

SEQ ID NO: 109517 - protein, 219 aa, Unknown
  Bacterial polypetide isolated from the Sargasso Sea
MKNFINISDHSSNDLRTIIDEAKARKLKRKGLNKSAPDEDKPFEGKSMAMIFEKPSTRTRMSFDIAVKQLGGSSIILNPDGIHYGKGEETLKDTAKVLTEYVDIVMLRTSSHENLEEFGKYLNIPIINGLSDVGHPCQIISDIFTYEESNGSIEGKTVAWLGDGNNNMSNSLIEAAGKFEFNLRIACPKKFSPNKKILSWAKKNKVSLTVTMKPEEAIK

SEQ ID NO: 109518 - protein, 184 aa, Unknown
  Bacterial polypetide isolated from the Sargasso Sea
MRNLIDINMLNDGIARKLLQTAKFYKSSGRGLLEGAPLLGRTLAMIFEKPSTRTRISFEVAMTELGGSAIYLDAKSMQMGRGETIADTAKVLGRYLDGIMIRASKHETLLEMAKHSKIPVINGLTDISHPCQILADIMTFEEKLGDIENKTISWVGDGNNMANSWIHASKIFNFKLRLACPSVR

SEQ ID NO: 109519 - protein, 285 aa, Unknown
  Bacterial polypetide isolated from the Sargasso Sea
MNKHFLDLNNFSKDDIDRILSNSLEMKSKEKNLKILDGKFLSLVFEKSSTRTRVSFEVAMAQLGGRASFLSVNDLQMGRGEPIEDTSKVLSSMVDGIVLRTLEHNTQVKFAENSSVPIINGLSDRSHPCQLLSDLLTFREEKGSIEGKKVAWCGDFNNVCFSYAQAAELLNFELTIACPKEFYPEDMKNYKNVSFTQSISKAVEACDLVSTDVWVSMGDEREADKRQKLFSDYQVNQEILDQAKSDVIFLHCLPAIRGQEISHNLLEDPRSYVWKQAENRLHAQK

SEQ ID NO: 109520 - protein, 256 aa, Unknown
  Bacterial polypetide isolated from the Sargasso Sea
MIFEKPSTRTRVSFEVGMKKINGDVVVLDQNDTQLARGESLNDTIKVLSRYVDIIMYRGSDQKKLYEIAEFSDVPIINGLTNQSHPCQIIADLMTLEENFKSLKELKLCWVGDGNNVCNSWIQACLHYDFNLHISCPKNFFPQKNNISKINKDKVVFFDNPDKAVLGADVLITDTWESMGMMKKKNVIQKFKKFQINHGLLKKTKKQTKVLHCLPAHRGQEITDDVIDGKDSLVWDEAENRLYAHQAILLWCLRQI

SEQ ID NO: 109521 - protein, 154 aa, Unknown
  Bacterial polypetide isolated from the Sargasso Sea
AWCGDGNNVASTWVQASAQFGFSLNIASPSEFSVDNSIVNWANSNGGNVLKTTDPVVAVTGSDCVLTDVWVSMSDEKKNLSLNKNKQELMGPYRVTQELMSKASEDALFMHCLPAHRGEEVDAEVIEGEQSVVWSEVENRLHVQKSILVWCCKD

SEQ ID NO: 109522 - protein, 281 aa, Unknown
  Bacterial polypetide isolated from the Sargasso Sea
MKNFINISDCSSSELRAIIEEAKKRKQNRFGLNKSAPDKDKPFEGKSMAMIFEKPSTRTRMSFDIAIKQLGGSSIILNPDGIHYGKGDETLKDTAKVLSEYVDIVMLRTSSHKNLEEFGKYLDIPIINGLSDVSHPCQIMSDILTYEESNGSIEGKTVSWIGDGNNNMSNSLIEAAGKLNFKLKIGCPKKYSPDKNILKLAKKEKVKLTITTKPLEAATGADCVMTDKWISMNDKVNKILKKKTLKPYQVNEKLMSKANSDAIFMHCLPVGRGEEVTNEVI

SEQ ID NO: 109523 - protein, 100 aa, Unknown
  Bacterial polypetide isolated from the Sargasso Sea
SIIKDPISAVRGVDLVVTDVWASMGQESEHERRANAFKGFQITSELMSYANKGAVFMHCLPAHRGEEVSSDVIDAVDSIVWDEAENRMHSQKALLEFLLA

SEQ ID NO: 109524 - protein, 220 aa, Unknown
  Bacterial polypetide isolated from the Sargasso Sea
GERETVEDTARVIERYADMVIIRCFGHDQLMKYANISNVPVINALTDFSHPCQVVADLITIKEHLKDYKNIKVSWFGDCNNVLQSWIEASVLLNFELNIACPEGVKPDGEIISWALERNNKISITHNPHKAAEGANCIITDTWRSMGDQNPFPEDQFMPFQVNKKIMELADKNAIFMHCLPAYRNKEVSSEVLEGTQSVIFDEAENRLHAQKAIMHFCIT

SEQ ID NO: 109525 - protein, 118 aa, Unknown
  Bacterial polypetide isolated from the Sargasso Sea
TDAVDDATQGVDFIYTDVWVSMGEPKEKWAERIELLKPYQVTKQVMAQTGNPHTKFMHCLPAFHNAETELGAEIASQFDITAMEVTEEVFESPASIVFDQAENRLHTIKAVLVATLGN

SEQ ID NO: 109526 - protein, 168 aa, Unknown
  Bacterial polypetide isolated from the Sargasso Sea
MNGHVAWVGDGNNVLHDLVLGCATLGYDIVFATPQGFEPDESVISRALEIAKKTGSKIEGVNDPKEAVEGAGAIYTDVFVSMGEEHMDGKMGSFDGFQVNEELVSDADDDYIFMHCLPAHRGEEVTDGVMDSPNSVVFDQAENRMWAQMSILTLLCNEVAWQTYWELR

SEQ ID NO: 109527 - protein, 180 aa, Unknown
  Bacterial polypetide isolated from the Sargasso Sea
MRGSDSKIDLLAIDDLSDRLSEIIDWAIRIKNDEEALYDFKPLDGMTIGSIYEKPSTRTRVSFEVGVSRLGGQPLTLLAGDIQLGTSETIADTAAVLSRYMDCITYRCFGHGDVAELAKHSTVPVINALSDMHHPCQAAADMMTIVENSDKMNGHVAWVGDGNNVLHDLVLGCATLGYDI

SEQ ID NO: 109528 - protein, 240 aa, Unknown
  Bacterial polypetide isolated from the Sargasso Sea
MKNFINISDCSSVELRAIIEEAKKRKQNRSGLNKSAPDEDKPFEGKSMAMIFEKPSTRTRMSFDIAVKQLGGSSIILNPDGIHYGKGEETLKDTAKVLSEYVDIVMLRTSSHKNLEEFGKHLDIPIINGLSNASHPCQIMSDILTYEESNGSIEGKTVSWIGDGNNNMSNSLIEAAGKFNFKLNIGCPKKYSPNKSILKLAKKEKVKLTITSKPLEAATGADCVMTDKWVSMNDKVNKVS

SEQ ID NO: 109529 - protein, 223 aa, Unknown
  Bacterial polypetide isolated from the Sargasso Sea
MRSFTDIKDLSKSDIEAILFRTRQEKKIIAEKGILNIEKILLGKTVALIFEKPSTRTRVSFEVGISQLGGHSSILQASDIQLSRGESISDTARVLSKYVDLIIVRCFDHQMMIDFAKNSSVPVINGLTDQSHPCQVMADLLTIEEKKGSLQNQNILWIGDGNNVSRSWVEASTLTNLQITLCTPRELSLPIKFIENSIAKGANITIDYEPASAIHNKDVIVTD

SEQ ID NO: 109530 - protein, 284 aa, Unknown
  Bacterial polypetide isolated from the Sargasso Sea
MKNFLNIADHPSSLLRNIIEEAKERKLKREGQNKSSIDKDKALDGKSMIMIFEKPSTRTRISFDLAIKQLGGSSMILNPDGIHYGKGDESLKDTARVLSEYADILMIRTSSHKNLDEFSKYSTIPVINGLSDQSHPCQVMSDILTFEENNGNIEGKTISWIGDGNNNMSNSFIEAAVKFRFNLKIGCPKKYSPNNKILRWASKNNTKIFVTKDPREAAKDADCIMTDKWVSMNDKVNKKAKKKSLKDYQVNKKLFKLAKTECIFMHCLPVGRGEEVTDDIIDGK

SEQ ID NO: 109531 - protein, 174 aa, Unknown
  Bacterial polypetide isolated from the Sargasso Sea
AIRELANSEGHIAWVGDGNNVFHDLALAALALGYDVKYATPVGMEPDSNVLSRCEIIASKTGSKIIGTNDPVEAVRNASVIYTDIFVSMGEEHMANKFSAFEGFQVNEELVAHAQPDYVFMHCLPAHRGEEVTDAVIDSRNSIVLDQAENRMWAQMSLLTYLCNNDAWHAYNEM

SEQ ID NO: 109532 - protein, 149 aa, Unknown
  Bacterial polypetide isolated from the Sargasso Sea
SIEGEKVCWSGDFNNVCYSYAEAANIFNFELHVACPKDFQPEIKELPNVTFTESLYEAVEGSSLVTTDVWVSMGDENEKEKRERLFSDYQINPSVMDKASNKAIFLHCLPAIRGQEISEDLLEDKRSKVWTQAENRLHAQKALLVELLK

SEQ ID NO: 109533 - protein, 210 aa, Unknown
  Bacterial polypetide isolated from the Sargasso Sea
MSRYVDAIMIRCFDHNTLLLLAKHATIPVINALTNRSHPCQLMADLQTMIENHGPLSGQRVAWLGDGNNVATSWVEAASLFGFQLRMACPNGYEPPAELMAWARANGGDIILTEDVFEAVDQVQTVVTDVWVSMGQQGGNQQRDLAAYQVNEEVMKQAAGDAIFMHCLPAKRGLEVSAAVIDGPQSAVFDEAENRLHVQKAILAWCFAGS

SEQ ID NO: 109534 - protein, 217 aa, Unknown
  Bacterial polypetide isolated from the Sargasso Sea
MKNFLNISDTSIQDLKGILEQAKTMKTARIGLPKGACDEGRPLSQHIVALVFEKPSTRTRTSFDVGVRQLGGKPILLSGTEMQLGQGETISDTARVLSRYVDLIMLRTFESQTLYEMAKYSTVPVINGLTNESHPCQIMADIMTFEEKRGSIKGKKVVWFGDGNNVFNSFLQAAKKFDFSLIFSGPKELDPSKNLTENTNNLGINFEIDRDPMFCNQ

SEQ ID NO: 109535 - protein, 308 aa, Unknown
  Bacterial polypetide isolated from the Sargasso Sea
MKNFLNIADHSSSLLRNIVEEAKERKLKREGLNKSSIDADKPLDGKSMIMIFEKPSTRTRISFDLAIKQLGGSSMILNPDGIHYGKGDESLKDTARVLSEYADILMIRTSSHKNLEEFSKYSKIPVINGLSDQSHPCQVMSDILTFEENNGNIEGKTISWIGDGNNNMSNSFIEAAVKFKFNLKIGCPKKYSPSVKILKWASKNKSKIFVTKDPREAAKDADCIMTDKWVSMNDKVNKKAKKKSLKDYQVNKKLFKLAKNDCIFMHCLPVGRGEEVADDIIDGKKSVVWQQAYNRVHAQKSIINWCLG

SEQ ID NO: 109536 - protein, 206 aa, Unknown
  Bacterial polypetide isolated from the Sargasso Sea
MLNPIKLASKNFLSSLDISSEEFLHILEIAKNLKNKDLNIKLKEKVLGLIFDKSSTRTRFSFQVAMSRLGGTTVDLNPATSQIGRGEPIRDTARVLSRYCDVLAIRTFKQTDLEEYAKWSSKPVINALTDLEHPCQALADFMTIKEEFLDFKDVVLTFIGDGNNVANSLILCGALLGVEVRIACPKGYEPNSLLIDKAYKIYENKN

SEQ ID NO: 109537 - protein, 304 aa, Unknown
  Bacterial polypetide isolated from the Sargasso Sea
MRHFLVVEDLTPQEIEGVFAISQDLETKFTAGVRDALFPGRVLALVFEKQSLRTRVSFQTAMVHLGGSGLFLGEDTGFASSRERIDDFSRVLSEYVDCIACRSKSHATIEQLAASSSVPVINALSDFSHPCQALADLYTLRRHIGRLEGLTFTFVGDGNNVARSLAVACALLGMRFILAAPKQYQFDESFKNRVTSLAPDAQVEQTEDPTAAVQDAVVVYTDVWASMGQEKEREARQTAFRPYQINSKLMANCPNAIFMHCLPARRGEEVTNDVIDGKQSVVVTQAANRMHVQKGLLAWLLGHR

SEQ ID NO: 109538 - protein, 293 aa, Unknown
  Bacterial polypetide isolated from the Sargasso Sea
MTTKHFLNLRDLSNQDILNVLDRAIERKSQKQKEKTLVGSKLGLIFEKPSTRTRISFESGILHLGGNAIFMSSSDLQLSRGEPVSDTAKVASSMLDVIALRVDKHETLEMFAANSSVPVINALSDLSHPCQILADLMTFKENSANELEKVCWIGDGNNVCNSYVEASKILDFELSIYCPKEYSPDPSFLNYAKKNSSFANSREEAAKGADIITTDVWVSMGDEKTKERAFQGYFVDTGLIENTGKESIFLHCLPAHRGQEITFELMEHPSSKVLQQAENRMHVQEALIENLLS

SEQ ID NO: 109539 - protein, 299 aa, Unknown
  Bacterial polypetide isolated from the Sargasso Sea
MINNFIDINDYNKSQIDEIILIAKNIKKNPKKFSSVLKDKTLGMIFEKQSLRTRLSFNVGMKKIGGNVLELSSKDIGFDNIREKSEDVLRVLSQFIDCLMIRNNDHKKLVDLSNQKIIPIINGLTNYSHPCQILGDFLTIQEKIKNFQNCTITWIGDFNNVLISLLQLQNIYLFELKVVIPSKILKSNQKQIKKFKNKKNEFISDPKLGALKTDCIMTDVWLSMGEKNKNKIKYFKNFTVNDKILNIASKKVIFMHCLPAKRGQEVTSKVLDGKHSVVLEQAKNRMYIQQAILIYVLKK

SEQ ID NO: 109540 - protein, 305 aa, Unknown
  Bacterial polypetide isolated from the Sargasso Sea
MSKIRHFKSLLDINKNEFLRIIDRASELKKEAMNGISNNSLANKTMAMIFKKNSTRTRVAFETAMTSMGGHAIFLSSDSTQISRGEELSDTAKVLSGMVDIIMIRTHDHDEVEELAKNSSVPVINGLTEKFHPCQLLADMQTYFEEKGSIEGKKVAWVGDGCNMCNSYINAAKILNFHLKIATPSGFEPDQSTLDLAKNNVELCDMPGKAVEDCDLVTTDVWSSMGDETEADKRRVMFKGYQINKHLFDKSKSDSIFLHCLPAHRGEEVDSDVIDGSRSKVWSQAHNRLYTSKALVEFLLLESKS

SEQ ID NO: 109541 - protein, 286 aa, Unknown
  Bacterial polypetide isolated from the Sargasso Sea
MDLITLAKTIKANPAEYRHALDGKSVVMLFEKPSLRTRVSFDIGINKLGGHCLYLDQQNGALGKRESVADFASNLSCWADAIVARTFSHKTIEQLAEFGTVPVINALSDLYHPCQALADFLTLAEHFENISDVKLAYVGDGNNVTNSLMYCAAILGATMTVICPAGHFPDGYVVAEVQELASRYGGKVVLTSDIGAIEGHDAIYTDTWISMGDPTPLAEIKDKFAPYQVNKGLMAKAGAHFFMHCLPAHRGVEVTDEVMDGEGSLILQQAENRMHAQNAVLVTLFS

SEQ ID NO: 109542 - protein, 273 aa, Unknown
  Bacterial polypetide isolated from the Sargasso Sea
MPNHLLEIDDLSASEIAEIIRLSNVENPPQVLRNKGAALLFEKPSNRTRNSMEMAIIQLGGHPITIRPDEVGIGERESAEDVARTLSCYHALIGARVFAHATVDELSTASTSPVVNMLSDKSHPLQALADLLTIWEEFGTFEGRIVSYVGDANNVARSLAIACGLMGIEFRIAHPNGYGFSESDEEAIRGVGTQFSATQNPREAVGGANVVYTDVWASMGQEEEREKRLADFEGYTVGDKLFELSSEDSIFMHCLPAHPGEEVSRSVLDSGKS

SEQ ID NO: 109543 - protein, 191 aa, Unknown
  Bacterial polypetide isolated from the Sargasso Sea
MNNNFLNLSDLSKKDIEIIIERSLSLKGSTKKSDMLAGKYIALIFEKSSTRTRVSFEVAMNQLGGKASFLAITDLQLGRGEPLEDTAKVLGSMADGVVLRTQKHETQETFASFSASSTINGLSDQSHPCQVLTDLFTYYEENGSIEGKKVCWSGDFNNVCFSYAEAAKIFNFQLHVACPKEFQPKIKVFLM

SEQ ID NO: 109544 - protein, 307 aa, Unknown
  Bacterial polypetide isolated from the Sargasso Sea
MKNNFLNLKDIHLNDLRAILSEALRIKDLRVNCLNGKKDEDKVLSDFIAALIFEKPSTRTRFSFDVGIRQLGGQTITSSSADMHLGKNENVSDTAKVLSRYVDLVMLRTFDEKILFEFCEHSAVPVINGLTDQSHPCQVLADIFTYEEKRGSISGKKVTWAGDGNNVCNSYLEAAGKFGFNFCFYGPQDCLPNRSLIAGVEKCGGKVLATEDPEEAFYNADLVVTDTWVSMHEIEKKEKRELFSAFQVTSKKMSLAKKDSIFLHCLPAHRGEEVTDEVIDGPNSQVFEAAENRLHVQKAIIKWVLEI

SEQ ID NO: 109545 - protein, 306 aa, Unknown
  Bacterial polypetide isolated from the Sargasso Sea
MPKHFLHLADYNSEDLWEILHLAKEIKTKFYNKENYKPFEGRSLAMIFAKPSARTRVSFETGFEWMGGHALFLGPNDIGIGKREAIKDISRVFSRYNDMIMARLFDHKHIIELAEHSEIPVINGLTDYNHPCQILADILTIWEHRGNLEGLKVTYLGDGNNIVNSWLQLGIRLPLHFVCCSPEGYEPDAKTIKRLEDSGVSSFELSQEPYSAVKNSDVIYTDVWASMGQKEEAEEREKVFANYQVNQKLVKQTGKETLFMHCLPAERGREVTDRVMEANYSIVFDQAENRMHAQNAIMVYLSNLTD

SEQ ID NO: 109546 - protein, 257 aa, Unknown
  Bacterial polypetide isolated from the Sargasso Sea
MRKPSTRTRMSFDIAVKQLGGSSIILNPDGIHYGKGDETLKDTAKVLSEYVDIVMLRTSSHKNLEEFGKHLDIPVINGLSDVSHPCQIMSDILTYEESNGSIEGKIVSWIGDGNNNMSNSLIEAAGKFNFQLKIGCPKKYAPNKTILNWSKKNKVNLIVTNKPYEAIKDSDCVMTDKWISMNDKVNKKVKKKILKPYQVNKKLMSAAKSDAIFMHCLPVGRGEEVTDDVIDGKQSVVWRQALNRVHAQKSIIKWCLD

SEQ ID NO: 109547 - protein, 292 aa, Unknown
  Bacterial polypetide isolated from the Sargasso Sea
MNRNFLNLEDLSKEELEKIIENAISLKSSRKSNDLLVGKYIALIFEKSSTRTRVSFEVAMNQLGGKASFLSISDLQLGRGEPLEDTARVIGSMADGVVLRTLKHKTQETFKSFSSSSTINGLSDLSHPCQVLTDLLTYYEENGSIEGEKVCWSGDFNNVCYSYAEAANLFGFKLHVACPKEFQPKDQTLPNVTFTESLDEAIEDSSLVTTDVWVSMGDEKEKEKREQLFKEYQINPLVMDKASEKAIFLHCLPAIRGQEISEELLEDKRSKVWTQAENRLHSQKALLVELLK

SEQ ID NO: 109548 - protein, 308 aa, Unknown
  Bacterial polypetide isolated from the Sargasso Sea
MPQKRDFISIMDWSSEELINNLELALELKKKTREGQCPKELEGRSYGMIFHKDSLRTRVSCEVAIFQLGGHVLTMSEKDFQMGKRESVQDVAKVLSRYLDGILIRTFSHQVVLELAEHAEVPVCNLLTDFNHPCQLMADALTILEKFGRLENIKVCYLGDCNNVTNSWLNLASRIPLDLRIATSKETLPPEHLVKQVQDAGLSKLSIYHEAAEAVQDAQVLYTDVWASMGEKEKIKEREQLLFGFQINRDLLNLSNPDSLVMHCLPANREREITAEVMDGPRSIVYDQAENRLHAQKAILAQLERWRN

SEQ ID NO: 109549 - protein, 308 aa, Unknown
  Bacterial polypetide isolated from the Sargasso Sea
MPQKRDFISIMDWSSEELINNLELALELKKKTREGQCPKELEGRSYGMIFHKDSLRTRVSCEVAIFQLGGHVLTMSEKDFQMGKRESVKDVAKVLSRYLDGILIRTFSHQVVLDLAEHAEVPVCNLLTDFNHPCQLMADALTILEKFGRLENIKVCYLGDCNNVTNSWLNLASRIPLDLRIATSKETLPPEHLVKQVQDAGLSKLSIYHEAAEAVQDAQVLYTDVWASMGEKEKTKEREKLLFGFQINRDLLNFSKLDSLVMHCLPANREREITAEVMDGPRSIVYDQAENRLHAQKAILAQLERWRN

SEQ ID NO: 109550 - protein, 308 aa, Unknown
  Bacterial polypetide isolated from the Sargasso Sea
MKNFINISDCSSVELKAIIEEAKKRKQNRSGLNKSAPDKDKPFEGRSMAMIFEKPSTRTRMSFDIAVKQLGGSSIILNPDGIHYGKGDETLKDTAKVLSEYVDIVMLRTSSHKNLEEFGKHLNIPIINGLSDLSHPCQIMSDILTYEESNGSIEDKTVSWIGDGNNNMSNSLIEAAGKFNFKLKIGCPKKYSPNKSILKLAKKERIKLTITSKPLEAVEGADCVMTDKWISMNDKVNKASKKKILKPYQVNKKLMSKANSDAIFMHCLPVGRGEEVTNEVIDGKQSVVWRQALNRVHAQKSIIKWCLD

SEQ ID NO: 109551 - protein, 308 aa, Unknown
  Bacterial polypetide isolated from the Sargasso Sea
MKNFINISDCSSVELRAIIEEAKKRKQNRSGLNKSAPDEDKPFEGKSMAMIFEKPSTRTRMSFDIAVKQLGGSSIILNPDGIHYGKGEETLKDTAKVLSEYVDIVMLRTSSHKNLEEFGKHLDVPIINGLSDLSHPCQIMSDILTYEESNGSIEGKTVSWIGDGNNNMSNSLIEAAGKFNFKLNIGCPKKYSPNKSILKLAKKEKVKLTITSKPLEAATGADCVMTDKWVSMNDKVNKVSKKKTLKPYQVNKKLMSKANSDAVFMHCLPVGRGEEVTNEVIDGKQSVVWRQALNRVHAQKSIIKWCLD

SEQ ID NO: 109552 - protein, 305 aa, Unknown
  Bacterial polypetide isolated from the Sargasso Sea
MKKDFIHVTDFDKKEIYDFLDFAVELKKRVKQSNDYKPFSGKSLAMIFAKPSARTRVSFETGFFRLGGHALYLGPNDIGIGKREAVKDIARVLSRYNDMIMARLFDHKHMLELAQNSSVPVINGLTDYNHPCQIMADILTVYEHLNNLDNIKIVYVGDGNNIVHSWLRLASVIPIHFTCLCPEGYEPDQETINLAKESSSSTIEITNDTINGAHGADIIYTDVWASMGQKDQAESRTKIFKNFQVNSKMMDSTKKDTLFMHCLPAERGNEVTDEVMESSNSIVFDQAENRMHAQNAIMVKILDKS

SEQ ID NO: 109553 - protein, 217 aa, Unknown
  Bacterial polypetide isolated from the Sargasso Sea
MAFNLRNRNFLKLLDFTPREIQYMIDLAIDLKKAKYGGYERKHLTGKNIALIFEKTSTRTRCAFEVAAFDQGAQVSYLGPSGSQIGHKESMKDTARVLGRMYDGIEYRGYGQEIVEELGAYAGVPVWNGLTNEFHPTQILADFMTMLEHGKGKRLDQIKFAYLGDARNNMGNSLMVGAAKMGMDIRLVAPKAFWPEEELVAKCRLIAEETGARITLT

SEQ ID NO: 109554 - protein, 309 aa, Unknown
  Bacterial polypetide isolated from the Sargasso Sea
MTTKTIRHYLQFKDFSLEDYEYVLERTGILKRKFKNYETYHPLHDRTLAMIFEKSSTRTRLSFEAGIFQLGGHAVFMSTRDTQLGRGEPVEDSAQVISRMVDIIMIRTFEQDVITRFAQNSRVPVINGLTNEYHPCQVLADIFTYYEHRGPIAGKTVAWVGDANNMLYTWIEAAQILGFKLRLSTPPGYALDMKLVSPDSAPFYEVFDDPNEACKGADLVTTDVWTSMGFEAENEARMQAFADWCVDEEMMGHANPDALFMHCLPAHRGEEVTAGVIDGPQSVVWDEAENRLHVQKALMEFLLLGRLKH

SEQ ID NO: 109555 - protein, 306 aa, Unknown
  Bacterial polypetide isolated from the Sargasso Sea
MNKKPHNVDILTLDELESKEINNIIDLAIDLKKELKKGKEKPLLQNKTLAMIFEKPSTRTRVSFETGMFQLGGHALTLSPNDLQLSRGESIADTARTLSRYVNVVMARVYDHKSLETFARNSSIPVINGLSDSYHPCQILADLMTIKEHKKNLKKIKIAWIGDGNNVCNSLILGCAKLKIQLSVAIPDGYEPEFDVIKIGKEAEILEVSDNPETAVQDADVVMTDTFVSIHNTSSDRVKKFLPKFQVNQALMNKAKKDAIFMHCLPAKRDQEVTSDVIDGSQSVVWDEAENRLHVQKALLVHLLGV

SEQ ID NO: 109556 - protein, 173 aa, Unknown
  Bacterial polypetide isolated from the Sargasso Sea
HPCQIMADILTFEESKGDINGKTIAWLGDGNNVANSFIEAATKFKFEFKIACPKKYQPNKKIVSEAKKNNCKLLVTEDPFEAAEGADCVMTDKWISMSDKGDKKKKKKILKKFQVNKKLMNSAKTDAIFMHCLPASRGEEVTNDVMDGKQSVVWLQAFNRIHAQKSIIEWCLK

SEQ ID NO: 109557 - protein, 306 aa, Unknown
  Bacterial polypetide isolated from the Sargasso Sea
MPKHFLHLSDYTSDELWDLLKLAKELKTKFKNKETYKPFDGKSLAMIFAKPSARTRVSFETGFEWMGGHALFLGPNDIGIGKREAIKDISRVFSRYNDMIMARLFDHKHIVELAKYSNIPVINGLTDYNHPCQILADILTVWEHRGSLDNLKITYVGDGNNIVHSWLQLATRLPMHFVCCSPDGYEPDAKTVNMLENSGISSFELSQEPRSAVKDTDVIYTDVWASMGQKEEAEAREKAFAAFQVNEELTKQTGKETLFMHCLPAERGREVTDEVMEANYSIVFDQAENRMHAQNAIMVYLQSLIN

SEQ ID NO: 109558 - protein, 302 aa, Unknown
  Bacterial polypetide isolated from the Sargasso Sea
MKHFIEINDFSKEEILKCIDDAIRLKKKSSHLSSIASGKVLAMIFEKKSTRTRLSFDVAIRQLGGSSIVLDIGDIHLGAGNESLSDTSKTIALYVDALVVRVNNHKNIVEMARNSSIPIINGLSNISHPCQVMADLMTIKEEKKSLDHLDLVWIGPITNVAHSWIEAYNKKLGFSLTICCPESLQRKYEEKCKLHNINFNNDIFVSDTSKDILGKADVIITDTWESMGEKVDKEELQELKKFTVSQSIMEMAPSECLFMHCLPANRNQEVEAKVIDGPSSRVWQEAENRLHIQKQILIECFN

SEQ ID NO: 109559 - protein, 95 aa, Unknown
  Bacterial polypetide isolated from the Sargasso Sea
MYFFMGEEHLEDKMKAFSGFQVNEELVSNAKEDYIFMHCLPAHRGEEVTDSVIDSNNSVVFQQAENRMWSQMSMLTYLVNRPAWDTYSELLEINY

SEQ ID NO: 109560 - protein, 293 aa, Unknown
  Bacterial polypetide isolated from the Sargasso Sea
MKHFIDISDFNSKQLNAIIKKAKHLKKNPNKVSNKCHHKTLGMIFQKESTRTRVSFNVGINKMGGNCIELNANSIGFGKRESHEDVLRTLSQYIDILMIRNDDHNIIKNLSALKLIPIINGLSDYSHPCQILSDLLTITEKLGDIKNQKICWVGDYNNVLRSLIELQYIYNFKLNIVLPKEIIKKNKMKIIKNNNLNITNVIQDGVKSANCVMTDAWVSMGESLSKKKYFKNYQVNSDIMKNANRDAIFMHCLPAHRSEEVSSELLDSKQSVVWEQAQNRMFVQQAIILELLS

SEQ ID NO: 109561 - protein, 305 aa, Unknown
  Bacterial polypetide isolated from the Sargasso Sea
MTETKKDFIDLTQFNKDELIFLIEDGINKKNMSSKNGMASVDEDACAKNKILATIFEKPSTRTRFSFETAMYQLGGKTIYANMSDMQLGRGETIDDTAKVISRYVDIAMLRTNKHSTLENFAKNASIPVINGLTDKSHPCQVLADLITVKEKIGDIENKSYVWFGPANNMLTSWIHAAQIIGFELRICSPKDYSVDNNLVSGFPNITTDLDPNDAAKDCDCIITDTWFSMGEDDNDQKRKILEPYKVDSNKISMASSDAIFLHCLPAHRGEEVDADVIDGVNSVVWDEAENRVHAQKSIIRWCLS

SEQ ID NO: 109562 - protein, 258 aa, Unknown
  Bacterial polypetide isolated from the Sargasso Sea
MTAKKIRHYLQFKDFSLDDYEYVLERARILKRKFKNYETYHPLHDRTLAMIFEKNSTRTRLSFEAGIFQLGGHAVFMSTRDTQLGRGEPIEDAAQVISRMVDIIMIRTFGQDILQRFAENSRVPVINGLTNEYHPCQVLADIFTYFEHRGPIRGKTVAWVGDANNMLYTWIEAAQILGFKLRLSTPPGYKLDHAMVAPESAPFYQEFDDPNEACTGADLVTTDVWTSMGFEAENEARKKAFADWCVDADMMARANSDA

SEQ ID NO: 109563 - protein, 89 aa, Unknown
  Bacterial polypetide isolated from the Sargasso Sea
MNKKPHNVNILTLDELDSKEINHIIDLAIDLKKQQKKDKEKPLLQNKTLAMIFEKPSTRTRVSFETGMFQLGGHALTLSPNDLQLSRGE

SEQ ID NO: 109564 - protein, 213 aa, Unknown
  Bacterial polypetide isolated from the Sargasso Sea
MLKPNKLANNNFLSSLDLSTDEVLHILDLANNFKNKKLNIDLGNKVLGLIFDKSSTRTRVSFQVAMSRLGGTTIDLNPKTSQIGRGEPIKDTARVLSRYCDVIAIRTFDHLDLQEYSKWSTKPVINALTDLEHPCQALADFLTIHEEFLDFKDLVLTFIGDGNNVANSLILCGALLGVEVRIATPRGYEPNSLVINKAYEIYKNKNLLKITND

SEQ ID NO: 109565 - protein, 301 aa, Unknown
  Bacterial polypetide isolated from the Sargasso Sea
MPKRDFLSLSDFSREELDALLLRAIELKEERSSNAIHNSLAGKTGILILAQNSTRTRIAFEAGMNQLGGHSIFLSDRDSQASRGEPLEDFARVVSEMADVVMTRHPEQSRIELLAKHASIPVINGMSSDLHPCQLLADMQTFIELKGSIEGRSVAFIGDGFNMCNSYIEASEIFQFKLNIASPKGFEPAPSFLRRGNNVELYGSAEDAVNGVDLVVTDVWSSMGQTNKDNDKADLFQPYQVNEQLLELSDEEAIFMHCLPAHRGEEISAGLLDHKKSVVWQEAGNRLHTQKALLEFLLKPV

SEQ ID NO: 109566 - protein, 311 aa, Unknown
  Bacterial polypetide isolated from the Sargasso Sea
MLSMKNFLNINDMSIQDLTGILEQAKLMKNARIGLPKGAYDEGQPLSQHIVALVFEKPSTRTRTSFDVGVRQLGGQPMLLSGAEMHLGHGETISDTARVLSRYVDLIMLRTFESQTLYEMANYSTVPVVNGLTNESHPCQIMADIMTFEEKRGSITGKKVVWFGDGNNVFNSFLQAAEKFNFSLVFSGPKELDPSKNLIQNAKRLGAYFKIDRDPTSAIKDADLIATDTWVSMHDNPEVKQERHNLLKPFQVNEELMSKASEDALFMHCLPAHRNEEATSGVMDGKNSVIFDEAENRLHVQKAIMRWCLSK

SEQ ID NO: 109567 - protein, 184 aa, Unknown
  Bacterial polypetide isolated from the Sargasso Sea
MARLFDHKHIVELAKYSNIPVINGLTDYNHPCQILADILTVWEHRGSLDNLKITYVGDGNNIVHSWLQLATRLPLHFVCCSPDGYEPDAKTVNMLENSGISSFELSQEPRSAVKDTDVIYTDVWASMGQKEEAEAREKAFAGFQVNQELTKQTGKETLFMHCLPAERGREVTDEVMEANYSIVF

SEQ ID NO: 109568 - protein, 215 aa, Unknown
  Bacterial polypetide isolated from the Sargasso Sea
MNKNFLSIDDWDNKTHKEFLYLTNEIKEGKYNKVLSEKNISLVFEKASLRTRVSFEVGIKKLGGNTIYLNNDDIGLGKRESITHIAKNLNRWVDGIVARVYLHSTLINFTQNTDVPVINALSDLEHPCQALADMYTIYNQFSKFQDLNFVYVGDGNNIAASLSLIAAKLGLNFTYSSPKKYQIPTAIFNKAKDIASISESQMNWIENPRKCSQKC

SEQ ID NO: 109569 - protein, 304 aa, Unknown
  Bacterial polypetide isolated from the Sargasso Sea
MRSFTDIKDLSKSDIEAILFRTKQEKKVIAEKGSLDIEKILLGKTVALIFEKPSTRTRVSFEVGISQLGGYSSVLQASDIQLSRGESISDTARVLSRYVDLIIIRCFEHQMMIDLAKNSSVPVINGLTDQSHPCQVMADILTIEENKGSLLNQNILWIGDGNNVSRSWVEASSLYNFQITLCTPKELSLPIKLIENSIAKGANITIDYEPESAINNKDVIITDTWSSMGDNSIDKENSLKPYQVNRELIKKARKDAVFMHCLPAHRGKEVTNEVIDSNQSLVFAGAENRMHVQRSIIWWCLKND

SEQ ID NO: 109570 - protein, 301 aa, Unknown
  Bacterial polypetide isolated from the Sargasso Sea
MKHLLSIKELTQQQLLDLITLAKTIKANPAEYRHALDGKSVVMLFEKPSLRTRVSFDIGINKLGGHCLYLDQQNGALGKRESVADFASNLSCWADAIVARTFSHTTIEQLAKFGSVPVINALSDLYHPCQALADFLTLAEHFENISDAKLAYVGDGNNVTNSLMYCAAILGATMTVICPAGHFPDGYVVAEVQELASRYGGKVVLTSDIDAIEGHDAIYTDTWISMGDPTPLAEIKDKFTPYQVNKALMAKAGAHFFMHCLPAHRGVEVTDEVMDGEGSLILQQAENRMHAQNAVLVTLFS

SEQ ID NO: 109571 - protein, 308 aa, Unknown
  Bacterial polypetide isolated from the Sargasso Sea
MLKPIKLASKNFLSSLDTSCEEFIHILELAKNLKNRDLNIKLKEKVLGLIFDKSSTRTRVSFQVAMSRLGGTTVDLNPSTSQIGRGEPIRDTARVLSRYCDVLAIRTFKQSDLEEYAKWSSKPVINALTDLEHPCQALADFMTIKEEFLDFKDVVLTFIGDGNNVANSLILCGALLGVEVRIACPKGYEPNSLLIDKAYEIYRNKNLLKITNDPNTAVLGANVLYTDVWSSMGEENQKDEKEKVFNGFTINNDLVSKADKDAIILHCLPAYRSKEITDEIFESHKSRIFDQAENRLHAQQALLSCILQ

SEQ ID NO: 109572 - protein, 308 aa, Unknown
  Bacterial polypetide isolated from the Sargasso Sea
MKNFLNISDTPIQDLTGILEQAKMMKNARIGLPKGARDEGQPLSKHIVALVFEKPSTRTRTSFDVGVRQLGGQPILLSGTEMQLGQGETISDTARVLSRYVDLIMLRTFESQTLYEMAKYSTVPVINGLTNESHPCQIMADIMTFEEKRGSIKGKKVVWFGDGNNVFNSFLQAAEKFNFSLVFSGPKELDPSKNLTENTNNLGINFEIDRDPMSAIKDADLIATDTWVSMHDNPEIKRERHNLLKPFQVNEELMSRASKDALFMHCLPAHRNEEATSSVMDGKNSVIFDEAENRLHVQKAIMRWCLSK

SEQ ID NO: 109573 - protein, 301 aa, Unknown
  Bacterial polypetide isolated from the Sargasso Sea
MKHLLSIKELSQTQLLDILALAKKIKANPAEYRRALDGKSVVMLFEKPSLRTRVSFDIGINKLGGHCLYLDQQNGALGKRESVEDFATNISCWADAIVARTYSHTTIEKLAKHGSVPVINALSDLYHPCQALADFLSLSEQFDDVRNAKLAYVGDGNNVTHSLIYGAAILGLTMTVICPEGYFPDALVVTEAQSIAAKNGGKLILSADIDQIEGHDAIYTDTWISMGDDTSLTEIKERFSPYQVNAELMAKAGAKYFMHCLPAHRGVEVTDEVMDGEGSLILHQAENRMHAQNAVLVTLLS

SEQ ID NO: 109574 - protein, 196 aa, Unknown
  Bacterial polypetide isolated from the Sargasso Sea
IIELAEFSNVPVINGLTDYNHPCQIMADIFTIFENRDNLDDLKIVYVGDGNNIVHSWIHLATRIPLHFTCICPEGFEPDKEAIDFISESDRSTFELSHDPINDVVGADIIYTDVWASMGQKDELNDRKKIFAPFQVNSNMLKSTGKKTLFMHCLPAERGREVTDNVIESTNSIVFNQAENRMHMQNAIMVMLAGKM

SEQ ID NO: 109575 - protein, 81 aa, Unknown
  Bacterial polypetide isolated from the Sargasso Sea
CQRKEALMPYQVTSDLVAKGKPEALFMHCLPAHRGEEVTGTVIDGPQSAVWDQAENRLHAQKAILLWCLLGEKGLEKYCQA

SEQ ID NO: 109576 - protein, 307 aa, Unknown
  Bacterial polypetide isolated from the Sargasso Sea
MKNFINISDLSRDELRSIIDKAKKRKSERGKKPHSQPDEDQPLNGKTMIMIFEKTSTRTRISFDLAVKQLGGSSIILNQDEFHYGKGDETIKDTAKVLSQYADILMIRTDLHKNVDEFKKYLEIPIINGLTDKGHPCQVMSDILTFEELKGEIKGKTIAWIGDGNNVANSFIEAATSFEFKLNIACPKKYQPDKKIINFAKKNKCKLLITDNPLKAVEGADCIMTDKWISMSDKGNKNTKKKALRKFQVNKKLMSYAKPDSIFMHCLPASRDEEVTSDIMDGKQSVVWLQAFNRIHAQKSIIEWCFK

SEQ ID NO: 109577 - protein, 272 aa, Unknown
  Bacterial polypetide isolated from the Sargasso Sea
MTRHFLTLTDLTPDELGYLIQRAIELKTMLRNGQNHEPLKGKTLGMIFEKSSTRTRVSFEVAMTHFGGSSIFLSPRDTQLGRGEPIEDSARVLSRMVDAVMIRTFDHATLQTFADHSAVPVINALTDDFHPCQLLADMQTFVEHRGSIQGKKVVWVGDGNNMCASYINAANQFDFELVISCPDGFTPDNDLLGRYPERVSLEADVATAVQGAHLVVTDVWASMGQEDEQQTRLNAFEGYQVTPELMDKADPDALFMHCLPAHRGEEVSHEMM

SEQ ID NO: 109578 - protein, 174 aa, Unknown
  Bacterial polypetide isolated from the Sargasso Sea
MEYLSKNFINLHELKKADLTQILLSAEQLKADRNSERDLLDGKSFILLFDKPSTRTRISFELAISELGASCIYLDMKTTQLGRGETIRDTAKVLSRYVDGIIIRNANHQDLIEFSNHSTISIINALTNESHPCQIMADLMTLKECFGTIDGLKVAWIGDGNNVANTWIQASTLF

SEQ ID NO: 109579 - protein, 243 aa, Unknown
  Bacterial polypetide isolated from the Sargasso Sea
MPDDGFALSGLHKDIFMTVNLKNRNFLKLLDYTPTEIQYLIDLAIELKTAKKAGRERQTLVGKNIALIFEKTSTRTRCAFEVGAFDQGAQVTYLGPSGSQIGHKESMKDTARVLGRMYDGIEYRGYGQDIVEELGQFAGVPVWNGLTNEFHPTQILADLMTMLEHAPGKTLPELSFAYLGDARNNMGNSLMVGAAKMGMDIRLVAPKSFWPDEALVAECREIASVTGARITLTEDVEEGVYDV

SEQ ID NO: 109580 - protein, 59 aa, Unknown
  Bacterial polypetide isolated from the Sargasso Sea
ARVPQTMRPPWARKVADKYGMKGLEVTEDVFESEHSIVFDEAENRMHTIKAVMVATLGD

SEQ ID NO: 109581 - protein, 298 aa, Unknown
  Bacterial polypetide isolated from the Sargasso Sea
MSKRIQHFLSLKDLSSDDLIKIISRAIELKKDKFKEGYEPLKNKTLALVFDKSSTRTRVSFEVAMTHFGGNTLFLSPRDTQLGRGEPIEDTAKVISSMVDLIAIRTHEHSEIELFAKNSSVPVINGLTEKFHPCQLLADMMTYIENKGSISGKKVCWIGDINNMCNSYINASKKFGFELSVSCPKDIIEKKKPVDEIDYYENPIDAAKKADLIVTDVWTSMGDENSSSHDKKFSNYQVNNFITMHANKDYVFMHCLPAHIGEEVSQEVFESNHSVVWQEAENRLHAQKALIEFLMKKE

SEQ ID NO: 109582 - protein, 275 aa, Unknown
  Bacterial polypetide isolated from the Sargasso Sea
MKKDPTGPQTAELMRLQTMVLIFEKTSTRTRTSFEVACAHLGGSSIFLSPTDSQMSRGESVSDTARIVSSMADLIVMRTSEHSRVCTMAEYSSVPVINALSEDFHPCQLLADLQTFVEHRGDIQNARTAFIGDGSSNVCQSWINAAAMMDFELRVGAPEGYHPQRALVEAAGDRCQVTTSAQEAVSDVDLVITDTWTGMGQENEKTQRLDALSDFQVNQQLMALASKDALFMHCLPAYRGQEVSADVLEGPQSVVWDEAENRLHAQKALIELLMT

SEQ ID NO: 109583 - protein, 92 aa, Unknown
  Bacterial polypetide isolated from the Sargasso Sea
MLPKDCDCIITDTWFSMGEDDNDKKRKILEPYRVDANKISMASSDAIFLHCLPAHRGEEVDADVIDGVNSVVWDEAENRVHAQKSIIRWCLS

SEQ ID NO: 109584 - protein, 303 aa, Unknown
  Bacterial polypetide isolated from the Sargasso Sea
MNNHFLHINDFSSDELLDIMNLAKDLKEKFRNRENYKVFSNRSLAMIFAKPSARTRISFETGFEWLGGHALFLGPNDIGIGKREAIKDIGRLLSRYNDLVMARLFDHKHMLDLASSSSIPVINGLTDYNHPCQIMSDLFTIWEHRGSLDDLKISYLGDGNNIVHSWLELTQKFPIDFVCACPAGYEPDKNTLDKSTEIALSKITVTNDPLDSINNSDVIYTDVWASMGQKEEVAIREEIFQPFQINHTIMSQAGENAKFMHCLPAERGREVTDEVMEADYSIVFDQAENRLHIQNAIMVTLLK

SEQ ID NO: 109585 - protein, 310 aa, Unknown
  Bacterial polypetide isolated from the Sargasso Sea
MLENFLTGLELDQQGALNLLKLARDLKAKPEKYSQVLAGKSVVTLFEKQSLRTRLSFDIGINRLGGHAVYLDQQNGAMGARESVKDFALNISTWADGIVARVNQHSTLTTLGEYSSVPVVNSLCDLYHPCQALADFLTLQEVHGDVSELKVAYLGEGNNVTHSLMLLAATLGTDFVAVTPKGSSPDSQILKKAEQIAAMNGASVMVSDRVEAAVGANVVYADTWVSMGDDTPLEQVKEKYMPYQLNQALLDQTGATTVLHCQPAHREFEITSEVMDGPASKIIQQAENRMHAQNALLVTLLNPNFVKEHL

SEQ ID NO: 109586 - protein, 140 aa, Unknown
  Bacterial polypetide isolated from the Sargasso Sea
PANNMLTSWIHAAQIIGFELRICSPKDYSVDNNLVSGFPNITTDLDPNDAAKDCDCIITDTWFSMGEDDNDQKRKILEPYKVDSNKISMASSDAIFLHCLPAHRGEEVDADVIDGVNSVVWDEAENRVHAQKSIIRWCLS

SEQ ID NO: 109587 - protein, 187 aa, Unknown
  Bacterial polypetide isolated from the Sargasso Sea
MNHFINISDLNKDELRSIIDSAKKKKSERGKKSASQPDNDQPLQGKNMIMIFEKTSTRTRISFDLAVKQLGGSSIILNQDEIHYGKGDETIKDTAKVLSQYADILMIRTDSHKNVNEFKKYLDIPIINGLTNEGHPCQVMSDILTFEELKGDIKNKTIAWIGDGNNVSVSFMEAASKFDFNLNIACP

SEQ ID NO: 109588 - protein, 155 aa, Unknown
  Bacterial polypetide isolated from the Sargasso Sea
MATACAGVAAVLSPLCGRDFLSSADCSAEETAALLDLAAQLKSSDRRIDLGNRVLGLIFSKASTRTRVSFQVAMARLGGQTVDLNPSVTQLGRGEPLEDTARVLSRYCDVLAIRTFAQQELVDYAHWASVPVINALTDLEHPCQALADFLTMQEA

SEQ ID NO: 109589 - protein, 293 aa, Unknown
  Bacterial polypetide isolated from the Sargasso Sea
MNKHFLDLNNFSKDDIDRILSNSLEMKSKEKNLKILEGKFLSLVFEKSSTRTRVSFEVAMAQLGGRASFLSVNDLQMGRGEPIEDTSKVLSSMVDGIVLRTLEHETQIKFAENSSVPIINGLSDRSHPCQLLADLLTYCEEKGSIEGKKVAWCGDFNNVCFSYAQAAELLNFELSVACPKEFYPKDMKSYKNVSFTQSISKAVEASDLVSTDVWVSMGDEREAEERQKLFSDYQVNEEILDHAKSDVVFLHCLPAIRGQEISYNLLQDPRSYVWKQAENRLHAQKGLLVELLN

SEQ ID NO: 109590 - protein, 314 aa, Unknown
  Bacterial polypetide isolated from the Sargasso Sea
MRGSDSKIDLLAIDDLSDRLSEIIDWAIRIKNDEEALYDFKPLDGMTIGSIYEKPSTRTRVSFEVGVSRLGGQPLTLLAGDIQLGTSETIADTAAVLSRYMDCITYRCFGHGDVAELAKHSTVPVINALSDMHHPCQAAADMMTIVENSDKMNGHVAWVGDGNNVLHDLVLGCATLGYDVVFATPQGFEPDESVISRALEISKKTGSKIEGVNDPKEAVEGAGAIYTDVFVSMGEEHMGGKMGSFDGFQVNEELVSDADDDYIFMHCLPAHRGEEVTDGVMDSPNSVVFDQAENRMWAQMSILTLLCNEVAWQT

SEQ ID NO: 109591 - protein, 218 aa, Unknown
  Bacterial polypetide isolated from the Sargasso Sea
TIKDTAKVLSQYADILMIRTDSHNDVDEFQKHLDIPIINGLTDLSHPCQIMADILTFEEAKGDINGKTIAWLGDGNNVSNSFIEAATKFKFELKIACPKKYQPNKKIVNEAKKNNCKLLITEDPFEAAKGADCVMTDKWISMSDKGDKKKKKKILKKFQVNKKLMNSAKTDAIFMHCLPASRDEEVTSEVMDGKQSVVWLQAFNRIHAQKSIIEWCLK

SEQ ID NO: 109592 - protein, 282 aa, Unknown
  Bacterial polypetide isolated from the Sargasso Sea
LNRKNLNKSAPDEDKPFEGKSMAMIFEKPSTRTRMSFDIAVKQLGGSSIILNPDGIHYGKGDETLKDTAKVLTEYVDIVMLRTSSHKNLEEFGKHLDIPIINGLSDQSHPCQIMSDILTFEETKGSIEGKTISWLGDGNNNMSNSLIEAAGKFGFQLKIGCPGKYTPNKKILNWAKKNKVNLLVTKKPEEAVKGSDCVMTDKWVSMNDKVNKKIKKKNLKSYQVNKKLMQKAKSDAIFMHCLPVGRGEEVTNDVIDGKQSVVWRQALNRVHAQKSIINWCLD

SEQ ID NO: 109593 - protein, 114 aa, Unknown
  Bacterial polypetide isolated from the Sargasso Sea
PKQFQPEIKELPNVTFTESLDEAIEESSLVTTDVWVSMGDEKEKEKREQLFSDYQINPSIMDKASNKAIFLHCLPAVRGQEISEDLLEDKRSKVWVQAENRLHAQKALLVELLK

SEQ ID NO: 109594 - protein, 318 aa, Unknown
  Bacterial polypetide isolated from the Sargasso Sea
MATAAAGVAAALSPLSGRDYLSSADCSAEETSALLDLAAQLKSGDRRIDLGNRVLGLIFTKASTRTRVSFQVAMARLGGQTVDLNPQVTQLGRGESLEDTARVLSRYCDVLAVRTFAQQELVDYAHWATVPVINALTDLEHPCQSLADFLTMREAHGDLPGQTLAYIGDGNNVAHSLMLCGALLGVNVRIGCPQGFEPLPGVLEQARSLAVQGASIEVIHDPREAVRGAQAVYTDVWASMGQEDEQSEREQTFAGFCVDEALMEAADTEAIVLHCLPAHRGEEISPGVMESSASRIFDQAENRLHAQQALLAALMGGL

SEQ ID NO: 109595 - protein, 301 aa, Unknown
  Bacterial polypetide isolated from the Sargasso Sea
MPKRDFLSLSDFSREELDALLLRAIELKKERSSNVIHNSLAGKTGILILAQNSTRTRIAFEAGMNQLGGHSIFLSDRDSQASRGEPLEDFARVVSQMADVVMTRQPEQKRIELLAKHASIPVINGMSSDLHPCQLLADMQTFLELKGSIEGRSVAFIGDGFNMCNSYIEASEIFQFKLNIASPEGFEPAPSFLERSSNVELYSSAEDAVNGVDLVVTDVWSSMGQTNKDSDKADVFQPYQINEQLLELSDKEAIFMHCLPAHRGEEISARLLDHKKSVVWQEAGNRLHTQKALLEFLLKPV

SEQ ID NO: 109596 - protein, 307 aa, Unknown
  Bacterial polypetide isolated from the Sargasso Sea
MSVRHCIKVDDFSSNEILDLFQLASELKSKYRSKESYQPFKDRSMAMIFAKPSARTRVSFETGFAWMGGHAIYLAPQDIGLGTRESASDLAQLFSRYNDMIMARVFSHSDMLEFEKHATVPVINGLTDYNHPCQILTDMFTIWEQKKDSFQDLKIVYVGDGNNIVNSWIRLASILPFEFTCVCPEGYEPDKDTISYAKSKNLSTINISHNPEDGVKDADVIYTDVWASMGQKEEIDERIKIFSPLQVNKELVKHAKDNYMFMHCLPAERGREVTDEVIDSSNSVVFEQAENRLHTQNAIMVTLADKG

SEQ ID NO: 109597 - protein, 267 aa, Unknown
  Bacterial polypetide isolated from the Sargasso Sea
LAGKSIVALFEKPSLRTRVSFDIGINKLGGHMVYLDVQSGKLAGREDAVDTAANLACWADAIVARVFSHDTLETFSKAANVPVINALCDKYHPCQGLADYLTMFERFGKTEGLTMAYVGDGNNVTHSLLIVGALLGCNQVVVTPEGHEAAPEIVAQAKAIAEKTGVSIVESTELSAANGADVIYADTWLSMGDETPLEVIKEKFMPYQVNEALMDATGASYVMHCQPAHRDLEITGSLIDSDKSLLMQQAENRMHGQNAILTQLLNA

SEQ ID NO: 109598 - protein, 231 aa, Unknown
  Bacterial polypetide isolated from the Sargasso Sea
DVAIQHLPVIFCMDRSGIAGEDGPTHHGSLDIAYLRCIQDMIVTAPRNGNEFRHLLYSALNQTKSPFSIRYPKSSSVVFDIDGQAELLPIGSWEVLRSGSDIAVLCVGSLSYDVERAAVVLQKEDISLEIVNCRFIKPMDEDYLRSIIERFKIVITIEEGVITGGFGDGVSSWLLENDFQGQIKRLGLPDSFIQHGKRDELLDEIGLDENSIINTIKSLFVNTSNDTLIES

SEQ ID NO: 109599 - protein, 332 aa, Unknown
  Bacterial polypetide isolated from the Sargasso Sea
FLQKKKELKLQHQQWEEKLAGWKQTDPEQAKLWDSHWEKKLPDDLLNQLIDTISGEEDATRNLSGKVIQKMADLIPSLVGGSADLEPSNKTLIKNAESIQPSSVDSDSAPDSSFSGRNIHFGIREHAMGGITNGLALFGSWRPFCGTFAVFSDFMRPSIRLAAISKLSSIFVFTHDSYGVGEDGPTHQPVEQLWALRLIPELEVWRPADAVETAAAWNYCLQNTSELSAKPGALFLTRQKTETLEREANFDPTVIAKGGYTVSGGDEDYPDLVLISTGSEGGAVQSAKKVIEQHDVSVRHVSIPCLERFLETSEEYHWDRPASFFHRSRCRS

SEQ ID NO: 109600 - protein, 163 aa, Unknown
  Bacterial polypetide isolated from the Sargasso Sea
MDSDSAPDPSFSGRNIHFGIREHAMGGITNGLALFGSWRPFCGTFAVFSDFMRPSIRLAAISKLSSIFVFTHDSYGVGEDGPTHQPVEQLWALRLIPELEVWRPADAVETAAAWNYCLQNTTELSAKPGALFLTRQKTETLEREANFDPTVIAKGGYTVPEEM

SEQ ID NO: 109601 - protein, 221 aa, Unknown
  Bacterial polypetide isolated from the Sargasso Sea
MKTGEDGPTHADPQALQLHLENYVPGTAITLTPWEPQEIWPLVAASFQAEAAVIVPFVTRPGEPVLDREALGLAPASEAAKGVYKLRSAASPAVGTIVLQGSGVALAFVQQALPLLTQYGIDLDVIYVASPELFDQLPQEERETLFNDQIAATTMGITGFTLPTMYRWIRSDIGLKHSLHPFVKGHYLGSGAGDMVIHEAGLDGEAQARAIRAWLDDGGGN

SEQ ID NO: 109602 - protein, 238 aa, Unknown
  Bacterial polypetide isolated from the Sargasso Sea
RVYDHIIHDCAIQHLPVIFCMDRSGIAGEDGPTHHGALDIAYLRCVQDMIVTAPKNGNEFRHLLYTALNINDKPFSIRYPKASSVIFDEAGQMELLPIGSWETCRQGKDIAILAVGPMVYYAIEAANKLEDRGISAEVVNCRFIKPMDTSCLDNIRLRFSKIITIEEGIINGGFGDGVSAWLLENSFSGRLRRLGLPDEFVEHGSRDQILSMLGLDVNGLLNTINDMVDEKKESHNYK

SEQ ID NO: 109603 - protein, 296 aa, Unknown
  Bacterial polypetide isolated from the Sargasso Sea
LGEEEIKNTRANLGWKHEAFNIPKEIYSEWDASDHGQAIEGEWNEIFKDYKSKYPSLAEEFLRRMASDLPEGIEEAIYKYIDAVQKDEPNIATRTSSQRVINVLGPLIPELVGGSADLTGSNNTNWEGTHEIANGDFSGNYINYGVREFAMTGIMNGLVLHGGIKPYSGTFLTFLDYARNAVRMAALMEISTILVYSHDSIGVGEDGPTHQPVEHLTSLRTTPNLETWRPCDTSETAISWLSAITNISKPTALILSRQSLPTFARNESQIQAISKGAYVIHEHKSEVELVLIATGS

SEQ ID NO: 109604 - protein, 290 aa, Unknown
  Bacterial polypetide isolated from the Sargasso Sea
IDQPSLIVAKTVIGKGAPTKEATAGSHGAPLGSEEIEAAKLASGWNDKPDFHVPDEVREVFAERKKELKLQHQQWEEKLAGWKQSDPGQAKLWDSHWEKKLPDDLLNQLIDSISGEEDATRNLSGKVIQKMAELIPSLVGGSADLEPSNKTLIKNAESIRASSLDSDSAPDPSFSGRNIHFGIREHAMGGITNGLALFGSWRPFCGTFAVFSDFMRPSIRLAAISKLSSIFVFTHDSYGVGEDGPTHQPVEQLWALRLIPELEVWRPADAVETAAAWNYCLQNTTELSAK

SEQ ID NO: 109605 - protein, 284 aa, Unknown
  Bacterial polypetide isolated from the Sargasso Sea
TKEALSIPLTPFYVPDSVKATFKHRQKELENEEERWNNKYTQWKQDNPEKAEEWDIHINQSLPENFEKKLQSLEIKPNIATRASSNAVLQALHDDVPYLIGGSADLSCSDSTLMKASGIMDSNDFNQRNIKYGVREFAMAAIANGIVLQGMSKTYCGTFLTFSDYMKNAIRLAALMNINVIYQFTHDSIFLGEDGPTHQPVEHLAGLRAMPNLTVIRPADQNEVKAAWAMALQEKGPVALILSRQGAPNLENSSFEGTKKGAYIIKRESSEQIDLAILSTGTEV

SEQ ID NO: 109606 - protein, 207 aa, Unknown
  Bacterial polypetide isolated from the Sargasso Sea
YVMSHDSIGLGEDGPTHQPVEQLSNLRSIPNLVVFRPADTVETFECWEVALSLKNSPSVIALSRQKINPVRKKYQPQNKCASGAYEILRTGQNIQLTILATGSEVDLAVEVSHKLAIQNIYSKVISVPSLEIFNLQSENYKNKIMKETKYKISIEAGSTDVWKQFIGENGICFGVDEFGKSAPGKDVFRSFNLYKDYIFERTVKMLK

SEQ ID NO: 109607 - protein, 268 aa, Unknown
  Bacterial polypetide isolated from the Sargasso Sea
LGKDEVALIRKKLKWEYEPFVIPKNIMKEWRKIGEKASQKSKNKKIKSKNISKVVSKIIKKEKQIYINSMETMATRKSSQKIINSLTKKIPELIGGSADLSGSNNTKSENHKIIKPGNFKGNYLHYGVREHAMCGIMNGLALHSNLIPYGGTFLIFSDYCKPSIRLSALMKQRVIYVMSHDSIGLGEDGPTHQPVEQLCNLRSIPNLNVYRPADTIETFECWELALKNYNTPSVIALTRQKISPVRKKYDPKNKCALGAYEILRTNKK

SEQ ID NO: 109608 - protein, 245 aa, Unknown
  Bacterial polypetide isolated from the Sargasso Sea
IREHAMGGIVNGLALHSKLIPYGSTFLVFSDYMRPSMRLASLMKVNSLFIFTHDSIYLGEDGPTHQPVEHLMSLRLIPNLDVIRPSNSKELIHSYRYSLEKRDNPIAIILSRQNMKFFDQDLSYKDFQTGAYEFRPGTDITLVATGSEVELALEISTKLSDFSVQIISAPILNRLSEERLESLGLSQNIFTIELGRTIGWDTYIKNIKKSFSIDSFGESAPIDQLAEKFNFSAEKISNEIRSLLT

SEQ ID NO: 109609 - protein, 314 aa, Unknown
  Bacterial polypetide isolated from the Sargasso Sea
KLNWKYSNFVIPNSIIKEWRKIGKKYSKISIKEGNNTRKIFKENNLVKKNFSSIKKFKNEYLKTLKPLATRKCSEMFIDIISNSKFLIGGSADLSGSNNTKTKSHKTIKPGKFKGNYIHYGVREHAMCGIMNGISLHSYLIPYGGTFLIFSDYCKPSIRLAAMMKKRVIYILSHDSIGLGEDGPTHQPVEQLTSLRSIPNLNVFRPADLIETFECWELALRSKNTPSVIALTRQSISPVRTKLEKKNKCSMGAYEIFRSSNHIKLTILSSGSETNLAFDISHKLATENIYSKVISMPCQEIFDQQSRKYKERLL

SEQ ID NO: 109610 - protein, 207 aa, Unknown
  Bacterial polypetide isolated from the Sargasso Sea
IFSHDSIGLGEDGPTHQPVEQLAGLRAIPNLNVFRPADINETLECWEIALKNPNTPSAIALSRQKVPYINPKNTKENKCEKGAYVVNITSHESNVTIIASGTEVDLALKVQEKLKQSNIHSKVVSMPCMELFDKQPQEFRKDIIEENSFVFTIEAGSIMSWQKYIGNNGMNFGIDRFGESAPYKDVYNHFELSEEKISGFIQKKLRE

SEQ ID NO: 109611 - protein, 199 aa, Unknown
  Bacterial polypetide isolated from the Sargasso Sea
GEDGPTHQPVEQLASLRAIPNLNVYRPCDIVETLECWATALATKSTPSVISLSRQGLPCLRKDHTEKNLSAKGGYVLFDSDSQRDITLLATGSEVAIALEAGIQLIQEGVNLAVVSIPCMEIFEQQNLDYRNKVLKPEVPVVVVEAAVEQSWGKYLGINGKFLGMSTFGASAPGNDLFQHFGITVENVKVAVKEVLSMN

SEQ ID NO: 109612 - protein, 320 aa, Unknown
  Bacterial polypetide isolated from the Sargasso Sea
KWKYEPFKIPSDLLNEWRKIGEMASQKAKKHESKYKKIFSKNSLQNSLNNSIKKIKNDYLKNSKPLATRKSSEMFLDIMYKLPNLIGGSADLTGSNNTKTKNHRIIKPGNFSGNYIHYGVREHAMCGIMNGIALHSDLIPYGGTFLIFSDYCKPSIRLAAMMKQRVIYVFSHDSIGLGEDGPTHQPVEQLTSLRAIPNLNVFRPADLIETFECWQLAIENKNSPSVIALTRQAINPVRTKNSSKNESSSGAYEVLRTADEIKLTIISTGSETSLACDISHKLATESIYSKVISMPCQELFDQQYERYKNKILSETDLIVS

SEQ ID NO: 109613 - protein, 295 aa, Unknown
  Bacterial polypetide isolated from the Sargasso Sea
KVMDKPSIIIGNTIMAKGSASMEKDHNTHGAPLPQDEIDLTKEKLGLPDKKFYVPTEVIEHFRTRYADLTNEAEKWSVRFDKLSKDLNFKNIIENTIGEKMVSGLEMPDFDSGETLATRKAFGAVLDSIADSLPQLVGGSADLEPSNYTGNFAKKFGDFTKDNHSGRNIPFGVREFPMAAMMNGMALHGGVIPFGGTFLVFADYERPALRLAAIQNIRLIHEFTHDSFYVGEDGPTHQPVEQAMSLRAIPNFNVYRPADAKETASCIKLALKDKNTPSALLLTRQGVPVLEKNQK

SEQ ID NO: 109614 - protein, 282 aa, Unknown
  Bacterial polypetide isolated from the Sargasso Sea
NLIFQEKERNFNEKPELATRQCSMKVIEILKKNFTQLIGGSADLSGSNNTKTSNSEVINSKSFKGNYIHYGVREHGMASIMNGLALYHNVIPYGGTFLIFSDYCKPSIRLSALMGLRVIYIFSHDSIGLGEDGPTHQPVEQLSGLRAIPNLKVFRPADINETLESWQLALKNFSGPSAIILSRQKLPYITRKISKENNCAFGAYEVNITSHDNKVTLLASGSEVSIALEVQNNLKNAGIESKVVSMPCHELFDEQNDKYKEKIIEQNNLIVSIEAGSISCWG

SEQ ID NO: 109615 - protein, 115 aa, Unknown
  Bacterial polypetide isolated from the Sargasso Sea
MATEQSRCAELEALANRCRGHILRMTHRAAAGHPGGSLSEIDILAALYSGHLRVRPEEPNWPDRDRFVLSKGHASPGMYAILAESGFISHEDMESYRVLGGVCQGHVDMKWTPGC

SEQ ID NO: 109616 - protein, 165 aa, Unknown
  Bacterial polypetide isolated from the Sargasso Sea
MDKLRREALKVRRNSWRALHAAGIGHVGGALSAADLLAGLYFHFLRLRPDEPEWEDRDRFVLSKGHGNAALSAVLAQAGFFEESRLDEFYAYGSLLGMHPDIKCEGVEMSTGGLGHGLPIGIGMALGARLRNKDFRTVVMIGDGELQEGSNWEAAMAAVHLSLSS

SEQ ID NO: 109617 - protein, 203 aa, Unknown
  Bacterial polypetide isolated from the Sargasso Sea
FTHDSIFVGEDGPTHQPVEHIMSLRLIPGLMVFRPADAVETQFCFETIMENNTKPSAILLTRQKLPLTNLDSERIKAGVKKGAYTIINHANPDAIIFTTGSELSLTLSIVESLEEKIKVVNMPCWELFEKQPNAYKEEILSHNCKKRISIEAGTTIGWEKFVGKNGLTIGINEFGHSAPGKDVAHKLNFTKEVILEKIKEHLK

SEQ ID NO: 109618 - protein, 283 aa, Unknown
  Bacterial polypetide isolated from the Sargasso Sea
GSASSHGSALGEEEIRNTRENLGWEHEAFSIPKEIYSEWDASKQGQLAEDAWNEVFQDYESKNPDLAKEFLRRMTLDLPDGIEEAIYEYIKEVQKEAPNIATRTSSQRILNVLGPLIPELVGGSADLRGSNNTDWDGTHEIQRDDFSGNYINYGVREFAMTGIMNGLILHGGVKPYSGTFLTFLDYARNAVRMAALMEIPTILVYSHDSIGVGEDGPTHQPVEHLTSLRTTPNLETWRPCDTSETAISWLSALTNTSKPTALILSRQGKPTFPRNDSQIKSIQ

SEQ ID NO: 109619 - protein, 243 aa, Unknown
  Bacterial polypetide isolated from the Sargasso Sea
SSLRRIIPFGGTFLIFSDYCKPSIRLSALMGLRVIYVFSHDSIGLGEDGPTHQPVEQLTGLRSIPNLNVFRPADINETLECWEIALKNYNTPSAIALSRQKVPYINPKNTKENKSAKGAYVVNITSYESNVTIVASGTEVELALRVQERLKESNIHSKVVSMPCMELFDRQPEDFRRDIIEESSLVVTLEAGSVVPWQKYVKNKGINIGIDQFGESAPFKDVYTHLGFSEDKIADLIQKKLRD

SEQ ID NO: 109620 - protein, 292 aa, Unknown
  Bacterial polypetide isolated from the Sargasso Sea
EKFYCPDIVKKYFRKGFSNLVDKSNSWEENKRELNDNKEVARLISNCIEGTLPVTKYPNFESGALLATRKAFGATLDAYAKDIPNLIGGSADLEPSNYTGNFAKDYDDFTLQNQSGRNIPFGVREFPMASMMNGMALHGGVIPFGGTFLVFADYERPALRLGSIQGVRLIHELTHDSFFVGEDGPTHQPVEHAMALRMIPNFNVFRPADAKETAVCFRLAMENERTPSALLLTRQGVPVLENDYESLEKNVRRGAYIIKDCDSKPELIFIATGSEVSLAIDTAKLMKDKQIR

SEQ ID NO: 109621 - protein, 309 aa, Unknown
  Bacterial polypetide isolated from the Sargasso Sea
MDLKQLRAFVTVAETGNVTRASSLLNLVQPAVSRQLRLLEEDMGTELFDRSRHGMQLTPSGKTMLEYARRILNEVARAKAEIQPTEGPVAGIVSIGLLASTSDLLATRLVGEVARRYPHIRLRLTIGYAGHLQDWLEAGDVDAALLYGQKGTPALHVKALIDESLWAVAAPSAKLSRKRPVSLERVAREPFILPAAPQGLRAAIEHAAAEAGVTLQVFAETNALSVQKELVAQGHGWTILPAVGVTQEVERGTLSAAPLASPGVRRTIVLAAPSSRQATAPVRCVVGVLLDCVKATFDQGDWPDARWLG

SEQ ID NO: 109622 - protein, 142 aa, Unknown
  Bacterial polypetide isolated from the Sargasso Sea
YGGTFLVFSDYCRPSIRLSALMKLPVIYVMTHDSIGLGEDGPTHQPVEHLAALRAIPNLNVIRPCDIVETIEAWEIALETKGPTILALTRQGLPTNKRSSYKENLVKKGAYIIKNHLEHDASIFASGSEVEIALLASDKLKE

SEQ ID NO: 109623 - protein, 255 aa, Unknown
  Bacterial polypetide isolated from the Sargasso Sea
GVREHAMCGIMNGISLHSNLIPYGGTFLIFSDYCKPSIRLAAMMGQRVIYVLTHDSIGLGEDGPTHQPVEQLAMLRSIPNLNVFRPSDTIETFECWQLALESKNKPSVIALTRQKIEPVRKEIIANNLCSKGAYEILRNGDNLKVTLLATGSETDLAIKVSHKLATENIYSKVISMPCHEIFDSQSSDYKKDILQEDTLKVSIEASESSYWKKYTGTNGLNLGINYFGKSAPYKDIYKHFELDVENITQNIKKNL

SEQ ID NO: 109624 - protein, 71 aa, Unknown
  Bacterial polypetide isolated from the Sargasso Sea
MVAASVSLESLCVNSIRMLAVDAVNKSNSGHPGLPMGCAPMGYALWQNILNHNPNNPKWFNRDRFVLSAGH

SEQ ID NO: 109625 - protein, 264 aa, Unknown
  Bacterial polypetide isolated from the Sargasso Sea
YAVNYKGSYVYYGIREHAMAGVMNGLALHGGIKPYGGTFLVFSDYCRPSIRLSALMKLPVIYVMTHDSIGLGEDGPTHQPVEHLAALRAIPNLNVIRPSDILETIEAWEIALETKGPTILALTRQGLPTNKRDSYEDNLARKGAYIIKNHSKYDASIFASGSEVEIALQASIKLQKININLRVISFPSMELFEMQNAKYKKEIIGNKPKFAVEAGVINGWEKYVDYENFIGMRSFGASGSYNDVYKHFNITADNICKKIQEKLI

SEQ ID NO: 109626 - protein, 310 aa, Unknown
  Bacterial polypetide isolated from the Sargasso Sea
EIPQAVSNAWQRIGVMHNEKVEAWNKRLKDSGQKDEFERVLEGTLPNKWKDPILDFKRKHTKGKTKMASRKASQETLNILTEMIPELIGGSADLTGSNLTKTKSQKSIAPGEFGGSYIHYGVREHGMAAAMNGLALHGGLIPYGGTFLIFTDYCRPSIRLSALMGQRVIYVMTHDSIGLGEDGPTHQPVEHLASLRAIPNLNVYRPCDIIETAECWAVALETKSTPSIISLSRQGLPCLRKDHTDQNLSAKGGYVLSDTDLKRDITLLATGSEVSIALEAGNMLLQEGINVAVASMPCLEIFEAQNHEYR

SEQ ID NO: 109627 - protein, 196 aa, Unknown
  Bacterial polypetide isolated from the Sargasso Sea
DKSIATRKCSQMVLERIGEHVPELIGGSADLKDSNLAYWSKSLPFMAKSYSGKYLHYGVREFAMSAISNGISLYGGFRPYASTFLIFSEYAKNGIRMSSIMHQPVIYIFTHDSIGLGEDGPTHQAVEQMNSLRLIPKMSLWRPADLTETAVSWNMMLHKQDGPSSIVLSRQSLPQIHRTEQQKKNITRGGYIIFEP

SEQ ID NO: 109628 - protein, 266 aa, Unknown
  Bacterial polypetide isolated from the Sargasso Sea
NDIEKAIQEAIKSDKPSLIACKTKIGFGSPSKEGKSSSHGAPLGSEDIAQMKKNLNWDYEEFEIPSDIKDAWRLVGLKNSSKRQEWEERLSSNKDKEIDFLKDIDGQVSEELDKEINEIKKVFSEEKPGWATRKSSQEVLETINKVLPNTIGGSADLTGSNNTKTKNINIIDSNNFAGRFIHYGIREHGMAAAMNGIALHKGLIPYSGTFLVFSDYCRPSIRLAALMDIKVIHVMTHDSIGLGEDGPTHQPVEHLPSLRAIPNLNV

SEQ ID NO: 109629 - protein, 292 aa, Unknown
  Bacterial polypetide isolated from the Sargasso Sea
KKRNKKKDYFWEKKYKDKQIFRNFMSQFKSIQFKRDSETYEFLKNLSKDKNSEATRKSSQKCLEFLSNKVPNFLGGSADLTSSNLTKTSNSQTNGKSMNYIHYGVREHLMAAAMNGIAVHGGFLPYGGTFLVFSDYCKNAIRLSAMMKQQVIYVFTHDSIGLGEDGPTHQPVEHLASLRSIPNLVVIRPCDAIETFEAWEFAIKNINSPTALILSRQNLPLIRNDFKENKLNKGAYFLSQVDGGKFSIISTGSEISLAIEVHKFFMSKKIKSNVISMPSMELFNKQSSNYQE

SEQ ID NO: 109630 - protein, 283 aa, Unknown
  Bacterial polypetide isolated from the Sargasso Sea
MILLGSNNTKTSEMGIFNADNYNGSYVYYGIREHAMAGVMNGLALHGGIRAYGGTFLVFSDYCRPSIRLAALMNIPVIYVMTHDSIGLGEDGPTHQPVEHLAALRAIPNLKVIRPCDMIETIESWEIALETKSPTVLALTRQGLPTFKRESYDKNMVNKGAYVIKNYSDYHASIFASGSEVEIAVEASHKLKEKNINLRVVSFPSMELFENQNENYKKEILGEKPLFAVEAGVINGWEKYINFKNFIGMGSFGASGPYKDVYKHFGITSDNICEKIQLQLKFV

SEQ ID NO: 109631 - protein, 261 aa, Unknown
  Bacterial polypetide isolated from the Sargasso Sea
DGRNIAFGVREFPMGAILNGISLHGGLIPFGGTFLVFSDYVKSAIRLSAIQKLHVLYEFTHDSIFVGEDGPTHQPVEHIMSLRLIPGLMVFRPADAVETQFCFEAIMKNNTNPSAILLTRQKLPLSNLDNESIKNGVKKGAYTIINHENPDAIIFTTGSELSLTLSIVASLEEKIKVVNMPCWELFEKQSKDYKKEILSHNCKKRISIEAGTTTGWEKFVGKDGLTVGINEFGHSAPGKDVAHKLDFTKEAIAYKIKEYLK

SEQ ID NO: 109632 - protein, 229 aa, Unknown
  Bacterial polypetide isolated from the Sargasso Sea
TFLVFADYMRPAIRLSALMKQRVIYILTHDSIGLGEDGPTHQPVETLASLRAIPNLNVFRPADPVEVAECWALALASQFAPSVIALTRQGVPTLRKKYTESNLCESGGYIISKSDLKPAVTIISSGSEVAIAVEVQEELALDNIGVNVVSMPSWEMFDNQSVDYQRLILGSGLRVGLEAAVEQGWHKYLGDSGIFVGMKGFGSSAPAEQLYDHFKINVQSVIGAIKSKL

SEQ ID NO: 109633 - protein, 283 aa, Unknown
  Bacterial polypetide isolated from the Sargasso Sea
GLPQLMGHLFGEEEIAATRESLKWPHLPFEIPEKIKSAWIRIGAMHTEKVKAWKDRLIESGQKDEFERVMSGTLPQNWEDKIQEFKRLHTKEKTKMASRKASQETLNVLTKFIPELAGGSADLTGSNLTKSKSQKTIAPGEFGGSYIHYGVREHGMAAAMNGIVLHGGFIPYGGTFLIFTDYCRPSIRLSALMEQRVIYVMTHDSIGLGEDGPTHQPVEHLASLRAIPNLNVYRPCDIIETAECWATALATKSTPSVISLSRQGLPCLRKDHTEQNLSANGGY

SEQ ID NO: 109634 - protein, 242 aa, Unknown
  Bacterial polypetide isolated from the Sargasso Sea
MNGLALHGGIKAYGGTFLVFSDYCRPSIRLSALMKLPVVYVMTHDSIGLGEDGPTHQPVEHLAALRAIPNLNVIRPCDIIETIEAWEIALETEGPTILALTRQGLPTNKRDYYKENLVLKGAYIIKNQSKHDASIFASGSEVEIALQASEKLKELDINLRVISFPSMELFEMQDIKYKKEIIDDKPKFAVEAGVINGWEKYIESDNFIGMKTFGTSGPYKDVYKHFSITPEHICEKIKHKLT

SEQ ID NO: 109635 - protein, 208 aa, Unknown
  Bacterial polypetide isolated from the Sargasso Sea
THDSIGLGEDGPTHQPVEHLASLRAIPNLNVYRPCDIVETAECWAAALATKSTPSVISLSRQGLPCLRNDHTEQNLSANGGYVLSDTDSKRDITLLATGSEVALALESANLLMREGINAAVVSMPCMEIFESQNLEYRNKVLPSGVPVVVVEAAVEQSWGKYLGIDGKFVGMSTFGASAPGNDLFQHFGITVEKVKAASKEVLSMNKV

SEQ ID NO: 109636 - protein, 125 aa, Unknown
  Bacterial polypetide isolated from the Sargasso Sea
MPSYEDISSFSSWSKEDKDLFAVAVIKGLIMDTVRNANSGHTGGPMSSTDFAYILFSEYLNFDPDNHNWFNRDRFVLSAGHESALLYTLLALIGWLNIDDLRDFRQLHSKKPGHPEVDIKGVKLL

SEQ ID NO: 109637 - protein, 225 aa, Unknown
  Bacterial polypetide isolated from the Sargasso Sea
KPSIRLSALMKKRVIYVMTHDSIGLGEDGPTHQPVEQLSGLRAIPNLNVFRPADRIETIECWEHALKSSKTPSVLSLTRQNLNPVRKKSSNKNLCSLGAYEVIRTSKKINLTILASGSEVNLAIDVSHKLAKDKIYSKVISMPCMDLFELQSKTYKNKILKETKFKISIEAGSSDCWKKYICDNGIAFGIDEFGKSAPYKDIYKYFGLESTNIKNITKRIIKKIK

SEQ ID NO: 109638 - protein, 224 aa, Unknown
  Bacterial polypetide isolated from the Sargasso Sea
YCKPSIRLSAIMKQKVIYIMTHDSIGLGEDGPTHQPVEQLAALRSIPNLNVLRPADQTETIECWDIALNSNKTPSILALTRQNLKPVRNSFSKKNQCSMGAYEVSRTAKNINLTILASGSEVSLAIETSHKLAKQKIYSKVISMPCQEIFDKQNKSYKDKILKESKNTFSIEAGSKMSWEKYIEKGLSFSIEDFGKSAPYKKVYDHFGLNSEKISKKIKFYLKK

SEQ ID NO: 109639 - protein, 207 aa, Unknown
  Bacterial polypetide isolated from the Sargasso Sea
THDSIGLGEDGPTHQPVEQLSSLRAIPNLNVMRPADRTETIECWELALKSLNTPSVLSLTRQNLSPVRKKYSKINKCAFGAYEILRTNKKIKLTILATGSEVNLAISASHKLAKYKIYSKVISVPSLELFKLQSKSYKNKVLNETKFKISIEAASTEPWKQLIGNNGFCFGLDDYGKSAPYIDIFRYFGLTSENIVNKIKKMLNKQI

SEQ ID NO: 109640 - protein, 450 aa, Unknown
  Bacterial polypetide isolated from the Sargasso Sea
AEKIQNAKYGDELVDHKTYVIASDGDLMEGISQEAISLAGHLKLSKLIVLFDDNNISIDGSIDLSDSTDQLMRFEASGWDVNRVDGHNHEDIELVIEEAINSNKPSLIACKTRIGFGSPSKEGKSSSHGAPLGAEDISEMKKNLNWNYKEFETPTDVKDAWRLIGLKNSSKREEWETRVSESKDKGTELLNDINGEISDELDKAINEIKKTFSEEKPNWATRKSSQEVLETINKVLTNTIGGSADLTGSNNTKTNNIEVISSDNFEGRFIHYGIREHGMAAAMNGIALHKGLIPYSGTFLVFSDYCRPSIRLAALMDINVIHVMTHDSIGLGEDGPTHQPVEHLPSLRAIPNLNVFRPADTTETAECWSLAIQSKGPSIIALSRQGCPHLRNEFDEKNKSSLGAYEIKSSEGDPQVNLIATGSEVSLALDVHEELKNSGINSRSCFSSFF

SEQ ID NO: 109641 - protein, 81 aa, Unknown
  Bacterial polypetide isolated from the Sargasso Sea
MDMVRKANSGHSGGPMSSADFTEILFTKYLKFDPNNPEWFNRDRFVLSAGHESALIYAMLTQIGWLNKEDLQNFRQLNSRT

SEQ ID NO: 109642 - protein, 280 aa, Unknown
  Bacterial polypetide isolated from the Sargasso Sea
SNYTDIKGETGSFQAYSPEKRYLHFGVREHAMAAILNGIAYHDSGLIPYGGTFLVFADYMRGSMRLSALSELGVIYVLTHDSIGVGEDGPTHQPVETIPSLRAMPNMLVFRPGDGNETSGAYKLAIKNRKRPSALCLSRQAMPNQENTSIEKVALGGYIVSDCEGTPDVIFIGTGSELNLCIEASKEISKLGKKTRVISMPCVELFEEQEASYKESVLPSSIKKRVVVEAAHSFGWHKYTGLDGICITMDRFGASAPGGKCMTSFGFTVENVVNKTKEIL

SEQ ID NO: 109643 - protein, 283 aa, Unknown
  Bacterial polypetide isolated from the Sargasso Sea
MHTYQELDSFEYWSITDKDQFSISVLKGLIMDAVRKANSGHPGGAMSSADFIYLLFKDYLKFDPKDPNWFDRDRFILSGGHMSMLQYGILHLVGWMKLSEIKKFRQLGSQTPGHPEVEIPGVECTTGPLGQGLAMGVGMALAEAYLSSLISNDDNESKKLIDHFTYVLATDGDLQEPVALGAAAIAGHLGLNKLVVYYDANDAQISGKVSRSDSVNYAVLFDGLGWNVQEIDGHDHSAMHFAIETAKVMDKPSIIIGNTVMAKGSSTMEGDHNTHGAPLPQEE

SEQ ID NO: 109644 - protein, 117 aa, Unknown
  Bacterial polypetide isolated from the Sargasso Sea
MNKKDKKNPNNEVSLNDMANAIRFLAADAVEKANCGHPGMPMGAADFTTVLYSKFLKIDPQKPDWPDRDRVILSAGHGSMLLYAVNHLVGFSDMTIEEIKNFRQLGSKTPGHPEYGH

SEQ ID NO: 109645 - protein, 328 aa, Unknown
  Bacterial polypetide isolated from the Sargasso Sea
GLGNAVGMAIAEEFMRTRWGSDLCDHYTYVIAGDGCLMEGISQEVISLAGKLKLKKLIVIWDDNGITIDGGVELSCNTDQISRFESSGWSTFSCDAHDPFEIDQAIDNAKKDSRPSLIAAKSIIGYGSTAKQGTSGAHGAPLGKNEVEQLRKSFDWQYKEFEIPANIKEAWVEIGQKNHTVFKDWSDHFRSLSEKKRTAFLNEIDKIFPSKLARGIKNFKKVYSQEIQTELATRKASELCLDLINECFNNTIGGSADLTGSNNTKTKTLEVFSELNRSGRYIHYGIREHGMAAIMNGMCLHGGIIPYGGTFLTFSDYCRGAIRLSALM

SEQ ID NO: 109646 - protein, 343 aa, Unknown
  Bacterial polypetide isolated from the Sargasso Sea
FPLSMDEIKNFRQLNSKTAGHPEVDTSIGIDTTTGPLGQGFANGVGFAVAERYLASLLGEDIINHFTFGIVSDGDLMEGISFEAAELAAVWKLGKIIYFFDDNNISIDGSVDKVSSTNQKEKFESIGWHVLEIDGHSEKEIIKSVEKGRKVEDKPTLIIAKSTIGKFAPNKENTSGVHGSPLGSDEMNKFLMNLDWSGDPFLHSDDIYDYFKEKREKDNEELRKWEENFKKKYQEDTSFKDNWDLLTSEDFPSLDGVSGEKYASRILGSKILENLSESTNSIIGGSADLAASTKQIIDESHFSSTNYKGRSIEFGIREHAMGAITNGITLHSNLIGYASTFFV

SEQ ID NO: 109647 - protein, 232 aa, Unknown
  Bacterial polypetide isolated from the Sargasso Sea
MDNLLQLANCIRFLSIDSVESAKSGHPGMPMGMADIATVLFKDHLKFDPSDPKWFDRDRLVISNGHGSMLLYACLYLTGYQDIDLDDLKKFRQLHSSTAGHPEYGELSGIETTTGPLSQGIANAVGFAIAEKKLASKFNTNLINHYTYVFAGDGCLMEGLSHEACSLAGHLKLHKLIVFYDDNSISIDGPTSLSMSENTAKRFDAYGWNVLSVDGHDYDSISNGIVQAKKSE

SEQ ID NO: 109648 - protein, 66 aa, Unknown
  Bacterial polypetide isolated from the Sargasso Sea
MSNQINHYEMANAIRALSIDAIETANSGHPGLPLGMADVATVLFSEFLNFDAKDPDWINRDRFILS

SEQ ID NO: 109649 - protein, 125 aa, Unknown
  Bacterial polypetide isolated from the Sargasso Sea
MDIAALRSANPDHWMKAAAIRALTLDAIAAANSGHSGMPMGMADVATVLFEKHLKFDAKNPLWPDRDRFILSAGHGSMLIYALLHLTGYEQVTLEEIKNFRQMGAKTAGHPENFLLDGVEVTTGP

SEQ ID NO: 109650 - protein, 87 aa, Unknown
  Bacterial polypetide isolated from the Sargasso Sea
AGKKVNVVSMPSTTLFDQQSEFYRDSVLPDQAKIVAIEAAHPDFWYKYVGKKGLIIGISSFGESAPGPALLDYFGFNADVIAAKILA

SEQ ID NO: 109651 - protein, 94 aa, Unknown
  Bacterial polypetide isolated from the Sargasso Sea
AVQAANSGHPGMPMGAADMATVLFTKYLKYDPADPEWTDRDRFILSAGHGSMLLYSLLYLTGYQDITIDEIKQFTQLGSKTAGHPEMGEAGGIE

SEQ ID NO: 109652 - protein, 205 aa, Unknown
  Bacterial polypetide isolated from the Sargasso Sea
PLGQGISNAVGFAIAEEILKKKIGKNIINHKTYVLAGDGCLMEGISHEAMSLAGHLKLKNLIMLFDNNSISIDGPTDLAVSDNFKKRFESYGWNYILINGHDEKQIFKALKKAQNANRPTIISCKTKIGYGSPNKQGKSSSHGSPLGNDEIKLVRQKLNWNYKPFEIPKKIINEWKKIGKKGNILEKKWNNIYKVKKIKVDKFFK

SEQ ID NO: 109653 - protein, 264 aa, Unknown
  Bacterial polypetide isolated from the Sargasso Sea
HLKLGKLIALYDDNHITIDGRTNVSFTEDVLKRYEAYGWHVQHVADGNTDVNAIAKAIEAAKAVTDKPSIIKVTTTIGYGSPNKSDTAGVHGAPLGEEEAALTRKQLGWDYGPFEVPQEAYDQYRQAIERGASLEAEWNQALASYRSKYPSESAEFERMLRGELPQGWDKDLPTYSADDKGLATRKHSQICLGALGPTLPELIGGSADLTHSNYTDIKGEAGSFQPETPEKRYLHFGVREHAMAAVLNGIAYHNSGLIPYGGTF

SEQ ID NO: 109654 - protein, 105 aa, Unknown
  Bacterial polypetide isolated from the Sargasso Sea
MSNAIRALSMDAVEKANSGHPGMPLGMSDVITILYKYFLNFNPKNPEWINRDRFILSAGHGSMLLYSVLHLTGYKNMTINQIKKFRQLNSKTAGHPEYDVKSGIE

SEQ ID NO: 109655 - protein, 261 aa, Unknown
  Bacterial polypetide isolated from the Sargasso Sea
YYSNLGVFPIDTFLHYDSAYKIFKNEAPIKDYWIVSGIVIDYIQSIFFKVFGVSWTTYILHSSLFNSFLAAFTYYFFLSSKLETYKAFFYSLSFSILAYPISGTPFVDHHATFFVFIATFLIIKGLHTQKNYFWFLAVFFFFLSFFSKQVPASYLALLYSLLLLIYLLKKKEFKLLIFIFLSVSFFSILTLFFLLINNINIKEFYIQYLGYPRYIGQSRLDNFDLSFHDIFNRYKFIILPIILIIFMKFKRLKENKMRFLS

SEQ ID NO: 109656 - protein, 130 aa, Unknown
  Bacterial polypetide isolated from the Sargasso Sea
MPYSEIDHRSIAVIKGLAMDAPHAAKSGHQGTAMALAPLAHVLWSRIMTYDPKEPLWPNRDRFILSAGHASILLYSMLHMTGYDLSLEDLKQFRQLGSLTPGHPERGHTDGVEVTTGPLGQGFANGVEWQ

SEQ ID NO: 109657 - protein, 29 aa, Unknown
  Bacterial polypetide isolated from the Sargasso Sea
EDKKIIDHYTYAFLGDGCLMEGISHEVVH

SEQ ID NO: 109658 - protein, 42 aa, Unknown
  Bacterial polypetide isolated from the Sargasso Sea
MSKQHRELANSIRFLSMDAVQKANSGHPGMPMGMADVTTSFV

SEQ ID NO: 109659 - protein, 82 aa, Unknown
  Bacterial polypetide isolated from the Sargasso Sea
MKVEHKQLANAIRFLSIDAVEAANSGHPGMPMGMADVATVLFKNFLKFNPKNPNWINRDRFILSAGHGSMLLYSLLYLTGYK

SEQ ID NO: 109660 - protein, 81 aa, Unknown
  Bacterial polypetide isolated from the Sargasso Sea
MPCTDAFEDQSPEYKESVLPASVSRRVAVEAGIADYWYKYVGLNGAVVGMTTFGESAPANELFEHFGFTVENIVSKANALF

SEQ ID NO: 109661 - protein, 326 aa, Unknown
  Bacterial polypetide isolated from the Sargasso Sea
ETTTGPLSQGLANAVGFAIAEKILQSKFGKNIFNHYTYVFAGDGCLMEGLSHESCSLAGHLNLSKLIVFFDDNSISIDGSTNLTVSDDIIARFKSYNWETISIDGHDHSSISKAINSAKKNKKPTLIACKTKIGFGSPNKESTASSHGSPLGEEEVEITRKNLNWNAKSFEIPSDLLKIWRNFYIRNNDNIKNWKKEYKNIKNKNFFNECFSNNISKELKDKIVNFKKIHVKENTNCATRKASEKSLEIFSESINNLIGGSADLTGSNNTKTKNMKTIEKNDFDGNYIYYGVREHGMAAIMNGLSLHGGLKVYGGTFLVFTDYAGL

SEQ ID NO: 109662 - protein, 117 aa, Unknown
  Bacterial polypetide isolated from the Sargasso Sea
MKTINIKSKKVSQLANCIRFLSIDAVQKANSGHPGMPMGMADIATVLFKNHLKFDPSDPKWIDRDRFILSNGHGSMLLYSCLFLTGYKDISLEDIKNFRQIGSPTAGHPEFGELEGI

SEQ ID NO: 109663 - protein, 148 aa, Unknown
  Bacterial polypetide isolated from the Sargasso Sea
MANAIRFLSADAVEQAQSGHPGMPMGMADVATILFSEFLKFDAENPLWPDRDRFILSAGHGSMLLYSLLYLSGYRDMTIDEIKNFRQLGSKTAGHPEFGHASGIETTTGPLGQGLAMAIGMALTERINCAKFGKDLVDHFTYVIVGDG

SEQ ID NO: 109664 - protein, 146 aa, Unknown
  Bacterial polypetide isolated from the Sargasso Sea
MKLTEPEIKKYIAMANAIRFLSADAVENAKSGHPGMPMGIAEVVTILFSKHLKFNPKNPEWANRDRFILSAGHGSMLMYSLLYLLGYPKISMKHIKNFRKVNSPTAGHPEYGELPGIETTTGPLGQGLGNSLGMAISEKIMRSRYG

SEQ ID NO: 109665 - protein, 202 aa, Unknown
  Bacterial polypetide isolated from the Sargasso Sea
ASAHGSPLGEEEIKLIRRKLKWKYKKFEIPKNILSEWRNIGNKGLKVEKRWTKIYKQRKNKIDKILNNNFNKSIKTEKIKSIKEMNVLATRKSSELTLSAFMKNSNTLIGGSADLAGSNNTKTKHHKIIKPNDFSGSYIHYGVREHAMCGIMNGLALHSKFIPYGGTFLIFSDYCKPAIRLAAMMKQRVIYVMTHDSIGLSE

SEQ ID NO: 109666 - protein, 314 aa, Unknown
  Bacterial polypetide isolated from the Sargasso Sea
MCWSPRIYFNSGIETTTGPLGQGLANSVGLAIAEEIYKKKFGKKVIDHKTYVIASDGDLMEGISHESMSLAGHLKLKNLIVFFDNNKISIDGSTSLSVSDNYKKRFESYGWNFIEINGHVEKQINNAIKKAHKSKKPTIISCKTIIGYGSPNKSGKSSSHGSPLGDEEIKLVRKKLKWSHAPFEIPEKILGAWREIGIKGESLEKEWLNKLNAENKSIKDKFNIFNNKIHKEDLKNLILKEKNKYFIEKPSMATRQCSMKVIESINKVLPNLIGGSADLSGSNNTKCSNSIVINSKNFSGNYIHYGVREHGRQQ

SEQ ID NO: 109667 - protein, 92 aa, Unknown
  Bacterial polypetide isolated from the Sargasso Sea
DKLSAAGKKVNVVSMPSTTLFDQQFEFYRDSVLPDQAQIVAIEAAHPDFWYKYVGKKGLIIGISSFGESAPGPALLDYFGFNAEVIAAKILA

SEQ ID NO: 109668 - protein, 54 aa, Unknown
  Bacterial polypetide isolated from the Sargasso Sea
MKKQHKDLSNAIRFLAIDAVEKANSGHPGLPMGMADVATILFKDFLRFNPNNPN

SEQ ID NO: 109669 - protein, 101 aa, Unknown
  Bacterial polypetide isolated from the Sargasso Sea
MNKQHNNLANCIRFLSIDAVQKANSGHPGMPMGMADVVTVLFKNFLKFNPKNPDWLNRDRFILSAGHGSMLLYSLLYLTGYKSISLKSIKEFRQLKSICAG

SEQ ID NO: 109670 - protein, 202 aa, Unknown
  Bacterial polypetide isolated from the Sargasso Sea
MTSNIKNLSENKKLSNCIRFLAIDAVQAAKSGHPGMPMGMADIATILFKEHLKFDPDDPHWIDRDRFIISNGHGSMLLYALLYLTGYKDITLNDIKNFRQLGSPTAGHPEYGDLAGIETTTGPLSQGLANGVGFALAEKILQNRFGQDLFDHYTYIFAGDGCLMEGLSHEASSLAGHLGLSKLIVFFDDNSISIDGSTQLSN

SEQ ID NO: 109671 - protein, 112 aa, Unknown
  Bacterial polypetide isolated from the Sargasso Sea
LLYSLLYLTGYKSVSIDDIKNFRQLNSICAGHPEYIKNSGIETTTGPLGQGLGNSVGMAIGEEIFRKKFGSNLINHKTYVIASDGDLMEGISHEAMSLAGHLKLKNLIVFFD

SEQ ID NO: 109672 - protein, 118 aa, Unknown
  Bacterial polypetide isolated from the Sargasso Sea
MKSYQDIANFSNWSKQEKDQYTISVMKGLVMDATRQANSGHPGGPMSCADFAYLLYRDHLIFDPKDPEWFNRDRFILSGGHMSMLQYSLLLFIGWLDLDDIRDFRQLHSNTPGHPEVE

SEQ ID NO: 109673 - protein, 247 aa, Unknown
  Bacterial polypetide isolated from the Sargasso Sea
INSGIETTTGFLGQGLGNSVGLAIAEEIYKKKFGSKIINHKTYVFASDGDLMEGISHECMSLAGHLKLKNLIVFFDNNKISIDGSTNLSVSDNYKKRFESYGWNFIEINGHNEKQINLAIKKSQKSKKPTLISCKTIIGFGSPNKAGKSSSHGSPLGEDEIKLVRKKLNWTHEPFKVPKEILQEWNEIGAKGEKFENEWLKQLNSLNQESKEKFNKMNNKIYKEDLQKFIIQQKEKYYREKPEMATR

SEQ ID NO: 109674 - protein, 180 aa, Unknown
  Bacterial polypetide isolated from the Sargasso Sea
MSLSLLSRYAFFAACVLFTLASLPFTHHEWLWPFTLTTGILSLIGVFDLLQQRHAVRRNYPILGNIRYLVEAIRPEIRQYLLESDSDALPFSRAQRSLVYARAKNEASDKPFGTLIDVYESGFEFIGHSMRPAPLADPSSFRVIVGGPQCSQPYSASIFNISAMSFGSLSANAIRALNQG

SEQ ID NO: 109675 - protein, 275 aa, Unknown
  Bacterial polypetide isolated from the Sargasso Sea
SSFGSRTPGHPEVEIPGVECTTGPLGQGFAMGAGMAHAEAYLRNLFTTNENNTDKLIDHYTYVLASDGDLQEPVALGSASLAGHLGLSKLIVFYDANSAQISGNTDRSDSTHYAEVFNGFQWDVQEIDGHDHDQLNNAIFQAKDSQKPSIIIGNTIMAKGTANMEGDHNTHGAPLPQDEISATKLKLGLSDDAFYFPPEVKTHFQSRFKVLSEMSKEWEKRCDYFRSSEKSGHLISMVMDNYLPDTKYPEFQPGQSLATRKAFGATLDEYATSIP

SEQ ID NO: 109676 - protein, 171 aa, Unknown
  Bacterial polypetide isolated from the Sargasso Sea
MISNIKNLSENEKLSNCIRFLAIDAVQAAKSGHPGMPMGMADIATVLFKEHLKFDPEDPHWIDRDRFIISNGHGSMLLYALLYLTGYKDITLNDIKNFRQLGFPTAGHPEYGDLAGIETTTGPLSQGLANGVGFALAEKILQNRFGKDLFDHYTYIFAGDGCLMEGLSHEA

SEQ ID NO: 109677 - protein, 296 aa, Unknown
  Bacterial polypetide isolated from the Sargasso Sea
HEALSLAGHLKLKNLILLFDNNKISIDGPTNLAVSDNFKKRFNSYGWNYIEIDGHNEKQIFSALKKAQKSKLPMAISCKTIIGYGSPNKSGKASAHGSPLGKDEVALVRKKLNWNYKPFEIPKQIMNEWRKIGEKASKKSQSKKIKNNRIFNNINKRSFAKKIQNIIREEKKNYIKSIEPMATRKSSEKILNVLTKRIPELIGGSADLAGSNNTKTKNHKIIKPGNFEGNYIHYGVREHAMSGVMNGIALHSNLIPYGGTFLIFSDYCKPSIRLSALMGQRVIYVMTHDSIGLGED

SEQ ID NO: 109678 - protein, 220 aa, Unknown
  Bacterial polypetide isolated from the Sargasso Sea
MLKNSNNLNQLANCIRFLSIDAVQKAKSGHPGMPMGMADIATVLFKFFLKFDPKEPSWIDRDRFILSNGHGSMLLYACLYLSGYKKISLNDIKNFRQLNSPTSGHPEFWEIPGIETTTGPLSQGLSNGVGMAIAERMLSQKFSKKIFNHHTYVFAGDGCLMEGLSHEACSLAGHLNLNKLIVFFDDNSITIDGSTDLTVSDKHLERFRSYGWDTISIDGH

SEQ ID NO: 109679 - protein, 248 aa, Unknown
  Bacterial polypetide isolated from the Sargasso Sea
TGPLGQGISTAVGMALAERILEARFGEDVVSHYTYVIAGDGDLMEGISHEAASLAGHLGLSRLIVLYDDNGISIDGSTSLSWSDDVLARFAAYGWDISAVDGHDPDAVVAAIESAQGKKEPSLIACRTTIAFGAPTKAGTSGSHGAPLGDDEIAGTRKAIGWSHAAFEIPGDIIGAWREAGSKGAEVRRAWETRLSSLNDEARNEFNRAMSGDLPSGWESAIQEIKAEFAADAPVQATRVSSGAVLEK

SEQ ID NO: 109680 - protein, 300 aa, Unknown
  Bacterial polypetide isolated from the Sargasso Sea
MTIHQITDFKDLNDNQKDLITVNIIKGLVMDGVRNANSGHPGGPMSLADFTYILYSEFLTIDPKNPDWENRDRVVLSVGHTCMLIYSILYLCGYLKMDDLKNFRKLGSLTPGHPEIETPGVDASTGPLGQGVGMGIGMALAEKASSNSPLKRFTYILAGDGDLQEPIALGASTLAGHWKLSNLVMFYDKNDIQIAGNTSRVDSTDYAKLYDAMGWHVQEIDGHNHDEIRLSLKNAQSSDKPSIIIGKTIIAKGSYSLEHSPKSHGSPFSEDEIKLTKEKLEIPQDSFFCNEDIIGHFKRN

SEQ ID NO: 109681 - protein, 285 aa, Unknown
  Bacterial polypetide isolated from the Sargasso Sea
IVFFDNNKISIDGSTSLSVSDDYKKRFQSYGWSFQEINGHNYKQISNAIKKANKSKKPSIISCKTIIGFGSPNKSGKASSHGAPLGDDEIKLVRKKLGWKHSPFEIPEDLLNTWKDIGRKGEKLENEWNGILNKKNTKIKEQYERLMKNELPTTLDKILGDEKLKFFQTKPKMATRQCSSSIISSISNVLPELIGGSADLSGSNNTKTDNSKVINSKNFSGNYIHYGVREHAMAGVMNGLALYSGLIPFGGTFLIFSDYLKPAMRLSALMKLRVIYIFSHDSIGL

SEQ ID NO: 109682 - protein, 308 aa, Unknown
  Bacterial polypetide isolated from the Sargasso Sea
RPIITRTFNGVGFAIAEKKLSSSLGQDLINHYTYVFAGDGCLMEGLSHEACSLAGHLKLNKLIVFFDDNSISIDGPLSLSSSDDVAQRFKSYNWNILTIDGHNHDEINDAIVNAKSSDKPTLICCKTKIGFGSPNKESTSSSHGSPLGSEEIELTRKNLNWHHDEFTIPDDLLKQWRGFAKKNLEIKNNWENKNRDFLNSKEFKKFFNIKLENKTKEAIINFKKSYAADETKYATRKASEKSLELLDNHIQNFIGGSADLTGSNNTKTSEMGIFNADNYNGSYIYYGIREHAMAGIMNGLALHGGIRA

SEQ ID NO: 109683 - protein, 166 aa, Unknown
  Bacterial polypetide isolated from the Sargasso Sea
MSNNPITDFNKLNDKQKDLHTVNIIKGLVMDGVRNANSGHPGGPMSLADFTYILYSEFLTIDPKNPDWENRDRVVLSVGHTCMLIYSILYLCGYLKMDDLKNFRKLGSLTPGHPEIETPGVDANTGPLGQGVGMGIGMALAEKASSNSSLKRFTYILAGDGDLQEQ

SEQ ID NO: 109684 - protein, 173 aa, Unknown
  Bacterial polypetide isolated from the Sargasso Sea
MTSNIKNLSENEKLSNCIRFLAIDAVQAAKSGHPGMPMGMADIATVLFKEHLKFDPDDPHWIDRDRFIVSNGHGSMLLYALLYLTGYKDITLNDIKNFRQLGFPTAGHPEYGDLAGIETTTGPLSQGLANGVGFALAEKILQNRFGKNLFDHYTNIFAGDGCLMEGLSHEASS

SEQ ID NO: 109685 - protein, 270 aa, Unknown
  Bacterial polypetide isolated from the Sargasso Sea
MSNNHISDFNNLNDNQKDLFTVNIIKGLVMDGVRNANSGHPGGPMSLADFTYILYSEFLTIDPKNPDWENRDRVVLSVGHTCMLIYSILYLCGILKMDDLKNFRKLGSLTPGHPEIETPGIDASTGPLGQGVGMGIGMALAEKASSNSSIKRFTYILAGDGDLQEPIALGASTLAGHWKLSNLIMFYDKNDIQIAGNTSRVDSTDYAMLYDAMGWHVQEIDGHNHEEIRTALGNAQSNDKPSIIIGKTVIAKGSHSLENSPKSHGSPFSE

SEQ ID NO: 109686 - protein, 96 aa, Unknown
  Bacterial polypetide isolated from the Sargasso Sea
MKTNNIKSEKLSQLANCIRFLSIDAVQKANSGHPGMPMGMADIATVLFKNHLKFDPNDPKWIDKDRFILSNGHGSMLLYACLYLTGYKDISIDNIK

SEQ ID NO: 109687 - protein, 50 aa, Unknown
  Bacterial polypetide isolated from the Sargasso Sea
MQGHIRSKDNMSSKMADAIRFLSMDAVQAANSGHPGMPMGMADVATVLFK

SEQ ID NO: 109688 - protein, 115 aa, Unknown
  Bacterial polypetide isolated from the Sargasso Sea
MGQGISNAVGFALAEEILKKKNGKNKIDHKTYVIAGDGCLMEGISHEALSLAGHLKLKNLILLFDNNSISIDGPTSLAVSDDYKKRFNSYQWDYLEINGHNFKEIFKALKKAQKS

SEQ ID NO: 109689 - protein, 227 aa, Unknown
  Bacterial polypetide isolated from the Sargasso Sea
MGRNLAFGVREFPMAAAMNGIALHGGLIPFGGTFLVFADYERPALRLASIQKCGVIHEFTHDSFWVGEDGPTHQPVEQAMSLRAIPGFNVFRPADAKETLASFELAMNNKSSPSALLLTRQGVPVLNHSMDIVVDGVSKGAYAVLEQDNPELVFIATGSEVSLAIDTANKMKDKRIRVVSMPCWEIFENQSNTYKESIIPQRGALKISFEAGVTLGWERYVGDNGMS

SEQ ID NO: 109690 - protein, 365 aa, Unknown
  Bacterial polypetide isolated from the Sargasso Sea
KPSLIACKPIIVFGSPNLAGTEKTHGAPLGSAEVKEVKKQLNWQYDSFHVPQNIVDDWEVVKIRGNKKRMDWNKRLQSNSKKEKFNNFLSQSTNEKFEKKFKTYIENLKKEKPKLATRQASMNFLEILNSSVENTIGGSADLTGSNLTKTQKMKPVSAGRYKGNYIHYGIREHMMGSVMNGIALHKGFVTYGGTFLVFSDYMRASIRLSALMKTKVIYVLTHDSIGLGEDGPTHQPIEHLAMLRATPGLNVFRPADAVETAEAWEESLKTNGPSILALSRQGLPAIRDEKSSENLTKKGGYILKHANGKRDVTLIASGSEVEIAIKTSELLLEANINAAVISLPCWELFENQSKEYKSEVLGNVL

SEQ ID NO: 109691 - protein, 263 aa, Unknown
  Bacterial polypetide isolated from the Sargasso Sea
FSGNYIHFGVREHAMCGIMNGISLHSELVPYGGTFLIFSDYCKPSIRLAAMMKQKVIYVFTHDSIGLGEDGPTHQPIEQLTSLRSIPNLNIFRPSDLIETFECWQLALNSKSSPSVIALTRQSLNPVRTKKSSKNLSLAGAYEVLRTSNKISATIIATGSETSLAIEVSHKLATDGIYSKVISMPCQELFDQQSEIYKNKILNETKLVVSIEASETGYWKKYTGSKGLNFGIDDFGKSAPYKDIYNHFGLSSEIIVKKIKKRL

SEQ ID NO: 109692 - protein, 103 aa, Unknown
  Bacterial polypetide isolated from the Sargasso Sea
MNKINTELANAIRFLSIDAVEKANSGHPGMPMGMADVATILFKNFLRFNPKDPDWINRDRFVLSAGHGSMLLYSLLYLTGYKSISLNDIKNFRQLNSICAGHP

SEQ ID NO: 109693 - protein, 254 aa, Unknown
  Bacterial polypetide isolated from the Sargasso Sea
VREHAMCGIMNGLSLHSGLIPYGGTFLIFSDYCKPSIRLAAMMKQRVIYIFTHDSIGLGEDGPTHQPIEQLASLRSIPNLNVFRPADTIETFECWQLALESNESPSVIALSRQKINPLRKEYSKINKCSKGAYEIMRTGENIKVILLSSGSETSLACEVSHKLATENIYSKVISMPCQELFDKQDEIYKKEIFSGTELLVSIEASETEFWKKYTGSNGMNFGINDFGKSAPYKDIYDHFKLNSTAITKAIKKRI

SEQ ID NO: 109694 - protein, 116 aa, Unknown
  Bacterial polypetide isolated from the Sargasso Sea
EQLANVARGGYVLKDCAGQPELIFIATGSEVELAVAAYEKLTAEGVKARVVSMPSTDAFDKQDAAYREAVLPKAVSARVAIEAGIADYWFKYVGLNGAIVGMTTFGESAPAEQLFR

SEQ ID NO: 109695 - protein, 268 aa, Unknown
  Bacterial polypetide isolated from the Sargasso Sea
PENFNGNYIHYGVREHAMCGIMNGLALHSKLIPYGGTFLIFSDYCKPSIRLAAMMKQQVIYVMTHDSIGLGEDGPTHQPIEQLSSLRTIPNLNVYRPADRFETIECWENALKNTKTPSVLSLTRQNLKSFRKKYSDNNKCSMGAYEVLRTNKKINLTILASGSEVNLALETSHELAKDRIYSKVISVPCMNIFDLQSSNYKRKILKETNFIISIEAGSTDCWKKYVGKNGLTFGIDEFGKSAPYTDIYKYFGLVSKKIVNKSKKLMGY

SEQ ID NO: 109696 - protein, 115 aa, Unknown
  Bacterial polypetide isolated from the Sargasso Sea
MTSTPSHQEMANAIRFLSPDAVQKANSGHPGMPMGMADVATVLLSSFLNFSASNPYWPDRDRLILSAGHGSMLLYSLLHLTGYQDFPIYEIKNFRQLGSLTAGHPEFGHGAGIEQ

SEQ ID NO: 109697 - protein, 315 aa, Unknown
  Bacterial polypetide isolated from the Sargasso Sea
FNSYKKKYPKQFSELQRRKKSRIKSSIPKILMNFKVDKDKSIATRKCSQMVLERIGEHVPELIGGSADLKDSNLAYWSKSLPFMAKSYSGKYLHYGVREFAMSAISNGISLYGGFRPYASTFLIFSEYAKNGIRMSSIMHQPVIYIFTHDSIGLGEDGPTHQAVEQMNSLRLIPKMSLWRPADLTETAVSWNMMLHKQDGPSSIVLSRQSLPQIHRTEQQKKNITRGGYIIFEPKNKLNGIIISTGSELYISINAAKELEKDKIFVRVVSMPCIETFLTQSKSYRNKVLTDTKNILAVEAGVGDCWDKFIGKDGG

SEQ ID NO: 109698 - protein, 308 aa, Unknown
  Bacterial polypetide isolated from the Sargasso Sea
DWIEPTGPLGQGLGNAVGMAIAEEVLRKKFGSNLINNKTYVIASDGDLMEGISHECMSLAGHLKLKNLIVFFDNNKISIDGSTSLSVSDNYKKRFEGYGWNFLNINGHNEKQIFNAINKAVKSNKPTIISCKTVIGFGSPNKSGKASSHGSPLGEDEIALVRKKLKWNNDPFVVPENILKAWREIGKKGIELEKKWIETLGKKNSKIKSELENVYIKSDLNNLESLIKDEKKKYFESKPNLATRQCSSLAIENISKILPQLIGGSADLSGSNNTKTKNSKVISSKNFDGNYIHYGVREHGMGCIMNGL

SEQ ID NO: 109699 - protein, 285 aa, Unknown
  Bacterial polypetide isolated from the Sargasso Sea
DVSKINSCIEKAKKSAKPTLICCKTVIGKGSPNKSGTSEVHGAALGDEEIQLTREEIGWEYPPFEVPEHVYEAWNNEKDGQAVEDDWNAMFDDYSKNYSKEHSEIERIFSNSLPEELNKIFEDLIENFSNDETHHASRKASGMCLDSLGPRIPELFGGSADLSPSNNTQWEGSEILENGIGNYLSYGVREFGMSAIMNGLYLHGGFRPYGGTFLTFLDYARNAVRMSALMKLPIIYVYTHDSIGVGEDGPTHQPVEHLTILRSTPNLNTWRPCDGVETAYSWKAH

SEQ ID NO: 109700 - protein, 244 aa, Unknown
  Bacterial polypetide isolated from the Sargasso Sea
ALHSKIIPYGGTFLIFSDYCKPSIRLSAMMKQQVIYVMTHDSIGLGEDGPTHQPIEQLSGLRNIPNLNVFRPADRYETIECWQEALKNSKTPSVLSLTRQNLNPIRSKYSKINKCSYGAYEVSRTNKKIKITILASGSEVNLAIETSHKLAKEKIYSKVISVPCMDLFDKQSSTYKDKILNETKLKLSIEAGSTDIWKKYVGKSGLTFGIDTFGKSAPYKDIFKHFGLISTNIANKLKKNLGTT

SEQ ID NO: 109701 - protein, 276 aa, Unknown
  Bacterial polypetide isolated from the Sargasso Sea
MQLSNCIRFLSIDAVQKANSGHPGMPMGMADIATILFKDHLKFDPSDPDWIDRDRLVISNGHGSMLLYSCLYLLGYKDITLNDLKNFRQLGSPTAGHPEYGEIGGIETTTGPLSQGLANAVGMAIAEKKLSNEFGKDFIDHFTYVFAGDGCLMEGLSHESCSLAGHLKLNKLIMFFDNNSISIDGSTNLSTSDDFKKRFESYQWNYFEIDGHNFEQISKAISKAKNSNRPTVISCKTRIGFGSPNKEGKSSSHGSPLGEDEIILTREKLFWNYNSL

SEQ ID NO: 109702 - protein, 301 aa, Unknown
  Bacterial polypetide isolated from the Sargasso Sea
NKLIMFFDDNSISIDGSTDLSVSDNVKKRFEAYNWNIIEIDGHNYEEIDQAIIQAKKSDAPTIISCKTKIGFGSPNKEGSASSHGSPLGEDEISLTRKKLKWNYSPFEIPNDLLNEWRNFYKRNDGSRNSWLSKNKELIESKNFKDSYYQKIDTQLPEKLGELKSEHFNNKTNCASRKSSELTLNLISNYQKNLIGGSADLTGSNNTKAKDMNVIKSDNFNGNYIHYGIREHGMAGIMNGIALHKGLIPYGGTFLVFTDYCRPSIRLSALMNVPVIYVMTHDSIGLGEDGPTHQPVEHLAS

SEQ ID NO: 109703 - protein, 67 aa, Unknown
  Bacterial polypetide isolated from the Sargasso Sea
MSKQNRDLANAIRFLSIDAVEKANSGHPGLPMGMADVVTMLFRYYLKFNPKNPGWVNRDRFVLSVWT

SEQ ID NO: 109704 - protein, 338 aa, Unknown
  Bacterial polypetide isolated from the Sargasso Sea
LKNQGSKTFKNNVVTISFSKKIQNIIKEEKQNYIKSMEAMATRKSSEKILEVLTKKVPELIGGSADLAGSNNTKTSSHKIIKPGNFEGNYIHYGVREHAMSGIMNGIALHSNLIPYGGTFLIFSDYCKPSIRLSALMDQRVIYVMTHDSIGLGEDGPTHQPVEQLSSLRSVPNLNVFRPADTIETFECWEMAINLKCPSIIALSRQKINPVRKEYNVQNKCMDGAYEILRTNQKIDLTILATGSEVNLAIEVSHKLATQKIYSKVISMPSFEMFELQTNRYKKEIMNETKYKISIEAGSTEPWKKYIGENGICFGVDDFGKSAPGKDVYESFYLYSDY

SEQ ID NO: 109705 - protein, 175 aa, Unknown
  Bacterial polypetide isolated from the Sargasso Sea
MVAPNKSGSHDCHGSPLGDNEIAKAREFLHWPYAPFEIPSNIYAAWDSKTKGAALEQQWTELFAAYTKEYPQLAAEYQRRVIDRVLPANFEAATQSFIDNCQNQQQDIASRKASQLCIAHFAALVPEILGGSADLAGSNLTLWSGSKGLSKEDSSGNYIYYGVREFGMAAIMNGI

SEQ ID NO: 109706 - protein, 94 aa, Unknown
  Bacterial polypetide isolated from the Sargasso Sea
MEGLSHEACSLAGTLGLGKLIAFWDDNGISIDGHVEGWFTDDTPSRFHSYGWQVIQVDGHNPAQIADAITQAQAETARPTLICCKTIIGFGSPQ

SEQ ID NO: 109707 - protein, 268 aa, Unknown
  Bacterial polypetide isolated from the Sargasso Sea
GHGSMLLYSLLYLTGYKSVKLNDIKNFRQINSICAGHPEYVENSGIETTTGPLGQGISNAVGFALAEEILKKKIGKDIINHKTYVIAGDGCLMEGISHEAMSLAGHLKLKNLIMLFDNNSISIDGPTSLAVSDNFKKRFESYGWDYLEIDGHKEKEIFNALKKVQNAKKPTVVSCKTKIGYGSPNKSGKASSHGSPLGAEEIELVRKELSWNYKPFEIPKNILKLWRNVGGKGEKIESRWNKIYRKKKTKINKFFKNDLKKSAANKKK

SEQ ID NO: 109708 - protein, 112 aa, Unknown
  Bacterial polypetide isolated from the Sargasso Sea
VREHAMCGIMNGLSLHSKLIPYGGTFLIFSDYCKPSIRLSAIMKQRVIYVMTHDSIGLGEDGPTHQPIEQLSGLRSIPNLNVFRPADRIETIECWELAIKNSKTPSVLSLTR

SEQ ID NO: 109709 - protein, 312 aa, Unknown
  Bacterial polypetide isolated from the Sargasso Sea
QWGSKTPGHQKTFETEGVEVTAGPLGAGISNAVGLAIAETHLAAKFNKPDCNIVDHYTYVIMGDGCNQEGIASEACSLAGHLKLGKLIALYDDNQITIDGRTDVSFTEDVLKRYEAYGWHVQHVEDGNHDVKGITEAIEKAKLITDKPSIIKISTTIGYGSPNKSDTAGIHGAAVGEEEAALTREFLNWEYPPFEIPDEVYAHFRKSINKGENLEKEWDSKFEEYQKKYPSEGAELNRMLKGQLPENWDSDLPSYTPDDKGLATRKHSQICLGALGPNLPELIGGSADLTHSNYTDIKGKTGSFQPHSPEKR

SEQ ID NO: 109710 - protein, 324 aa, Unknown
  Bacterial polypetide isolated from the Sargasso Sea
NQIKNFRQLHNKTAGHPEYGSAEGIETTTGPLSQGLANAVGMALAEKKLSNNYGKELFDHYTYVFAGDGCLMEGLSHEACSLAGHLKLNKLILFFDNNSISIDGSTDLSVSDDVKKRFEAYNWNIIEIDGHKYEEIDQAIIQAKKSDAPTIISCKTKIGFGSPNKEGSASSHGSPLGEDEISLTRKKLEWNYSPFEIPDDLLKEWRNFYKRNDESKNSWLSKNKELIESNNFKDSYYQKIDSELPEKLKELKFEHFNDKTNCASRKSSELTLNLISNYQKNLIGGSADLTGSNNTKAKNMNVIISDNFNGNYVHYGIREHGMAG

SEQ ID NO: 109711 - protein, 216 aa, Unknown
  Bacterial polypetide isolated from the Sargasso Sea
MANAIRFLSADAVENAKSGHPGMPMGIAEVVTLLFAKHLKFNPESPEWKNRDRFILSAGHGSMLIYSLLYLLGYPKISMDHIKNFRKVNSPAAGHPEFGELPGIETTTGPLGQGLGNGLGMAISEKIMRQRYGENVFNHYTYILAGDGCLMEGISHEFASLAGHLNLSNLVLIYDDNKISIDGPTSLTMSDNTLERFNALGWHTTSIDGYNLEESR

SEQ ID NO: 109712 - protein, 297 aa, Unknown
  Bacterial polypetide isolated from the Sargasso Sea
SPNKEGSASSHGSPLGEDEISLTRKKLEWNYSPFEIPNDLLHEWRSFYKKNDGSRNSWLSKNKELIESKNFKDSYYQKINSQLPEKLGELKSEHFNNKTNCASRKSSELTLNLISNYQKNLIGGSADLTGSNNTKAKNMNVITSDNFNGNYIHYGIREHGMAGVINGIALHKGLIPYGGTFLVFTDYCRPSIRLSAIMNIPVIYVMTHDSIGLGEDGPTHQPVEHLASLRAIPNLTVIRPCDIIETIEAWECAINNTGPTILVLTRQNLPMLQKDNRKENLVNKGAYKIRDLKNMMQ

SEQ ID NO: 109713 - protein, 263 aa, Unknown
  Bacterial polypetide isolated from the Sargasso Sea
EILDEWRNIGNKGEQLENKWLETVNKNHKIKSELNGANEKLDLNGLENLIRKEKDKYFESKPSLATRQCSMAAIEKISAFLPKLIGGSADLSGSNNTKTNNSKIINSKNFNGNYIHYGVREHGMAAVMNGLALYGGIIPYGGTFLIFSDYCKPSIRLSALMGLKVIYVFSHDSIGLGEDGPTHQPIEQLTGLRAIPNLNVFRPADINETFECWEIALKSENNPSAIALSRQKVPYINPSNSKENKCEKGAYVINLTSHESNVT

SEQ ID NO: 109714 - protein, 232 aa, Unknown
  Bacterial polypetide isolated from the Sargasso Sea
DLAGSNNTKTNNHKIIRPGNFNGNYIHYGVREHAMCGIMNGLALHSKFIPYGGTFLIFSDYCKPSIRLAAMMKQQVIYVMTHDSIGLGEDGPTHQPIEQLSGLRSIPNLNVFRPADRLETIECWELALRSSKTPSILSLTRQNLNPIRNKYSNTNKCSLGAYEVLRTNKKIKLTILASGSEVNLAIEASHKLAKDKIYSKVISVPCMELFDSQTINYKDKILNETKIKISIE

SEQ ID NO: 109715 - protein, 213 aa, Unknown
  Bacterial polypetide isolated from the Sargasso Sea
MSSNNIKSQKVSQLANCIRFLAIDAVQKANSGHPGMPMGMADIATVLYKKHLKFDPADPKWIDRDRLILSNGHGSMLLYACLYLTGYKDINLEDIKNFRQLKSPTAGHPEYGELEGIETTTGPLSQGLSNGIGFAIAEKKLSSTLGEDTINHHTYIFAGDGCLMEGLSHEACSLAGHLRLNKLIVFFDDNSISIDGPVSLSSSDDISLRFKSY

SEQ ID NO: 109716 - protein, 245 aa, Unknown
  Bacterial polypetide isolated from the Sargasso Sea
MQWGAITNGITLHSNLIGYASTFLVFSDYMRPSIRLASLMDINSVFIFTHDSIYLGEDGPTHQPIEHLMSLRLIPNVDVIRPSNSIEIDHSYRYAFSDSKNPKVLSLTRQDLDYLDFDIKYEEFIKGGYVVSDGDDFTLVASGSELEIAFKIKAALLEYSVRIISVPILNKLSNMQNEEINELLKNKHVFPIELGRSIGWESYLGRITKTFSIDSFGESAPIEDLEKNFGFDVPSITKEIIKYLN

SEQ ID NO: 109717 - protein, 65 aa, Unknown
  Bacterial polypetide isolated from the Sargasso Sea
MSKQHRELANSIRFLSIDAVQKANSGHPGMPMGMADVVTVLYKNFLKFNPKNPNWLNRDRFVLSA

SEQ ID NO: 109718 - protein, 297 aa, Unknown
  Bacterial polypetide isolated from the Sargasso Sea
FTKTLIDHYTYVFAGDGCLMEGLSHEACSLAGHLKLNKLIMFFDDNSISIDGSTELSSSDDIKKRFESYNWNYLKIDGHSFEEINNAIFEAKKSLSPTIIACKTTIGYGSPNKSGKASSHGSPLGEDEIELVRKELNWNYKAFEIPNDLLMSWRNFHNRNIKIRDSWIKTNSEIIKSKEFNNYFFNNINNELNKDIINFKNNHFEEKTICATRKASELSLNLISDHLPNLIGGSADLTGSNNTKTKEMKILKADDFSGSYLHYGIREHGMAGIMNGIALHGGLRPYGGTFLVFSDYC

SEQ ID NO: 109719 - protein, 267 aa, Unknown
  Bacterial polypetide isolated from the Sargasso Sea
TKPTIIVCKTIIGFGSPNKESTSSSHGSPLGKEEVELTRKNLNWNNEEFIIPDDLLFEWRNFAKRNSKEKKYWEDKNKEFLNSKIYKKYFYSKLDENIKDQIIDFKKLHGDDETKYATRKASEKSLELLNNNIENFLGGSADLTGSNNTKTKDMSIFNSKNYKGSYVYYGIREHAMAGIMNGLTLHGGIRAYGGTFLVFSDYCRPSIRLSALMNLPVIYVMTHDSIGLGEDGPTHQPVEHLASLRSIPNLNVIRPCDVIETIESWEV

SEQ ID NO: 109720 - protein, 281 aa, Unknown
  Bacterial polypetide isolated from the Sargasso Sea
KVKIGKKFIGHKTYVIAGDGCLMEGISHEALSLAGHLKLNSLILLFDNNSVSIDGPTNLAVSDNTKKRFESYGWNYLDINGHNEKQIFGALKKAQNSKKPFAISCKTTIGFGSPNKGGKASSHGSPLGQDEIALVRKKLNWKYKPFEIPDRILNAWREIGNKASLAAEKFDSVNNLKKENLIPVSISEEIEKFKKSYTKTLEPMATRKSSEKFLEIASKLTNLIGGSADLAGSNNTKTKNHKIIKPGKFDGNYIHYGVREHAMCGIMNGISLHSNLIPYGG

SEQ ID NO: 109721 - protein, 253 aa, Unknown
  Bacterial polypetide isolated from the Sargasso Sea
NIHYGVREHAMAAIANGMAVHRGVIPYIATFLIFSDYMKGAIRLSALMGIKVIYIFTHDSIGVGEDGPTHQPIEQTMSLRLIPGLTVIRPADANETANAWKTALENNGPTAILLTRQKLPIIDSDIVSHSDNGLNWIEKKENKTDLILLASGSEVSLAMNARNDLMKENISAQVISIPSWELFKKNNFGSENIPIITIEAGTTIGWSQFYSGREGKSIGIDRFGASAPGDIVMEKLGLSVKNVVLTAKKLLNK

SEQ ID NO: 109722 - protein, 258 aa, Unknown
  Bacterial polypetide isolated from the Sargasso Sea
EIPQDILNEWKNIGKKGEQLEKKWRELIDKKHTKIKDELEEDYFNSGLSELESLIEKEKTKYFESKPSLATRQCSMATIESVSALLPQLIGGSADLSGSNNTKTKNSVIINSKNFKGNYIHYGVREHGMSAVMNGVALYAGLIPYGGTFLIFSDYSKPSIRLSALMGLKVIYIFSHDSIGLGEDGPTHQPIEQLTGLRAIPNLNVFRPADINETLECWEIALKSNGTPSAIALSRQKVPYINPQNTKGNKCRKRCLRS

SEQ ID NO: 109723 - protein, 130 aa, Unknown
  Bacterial polypetide isolated from the Sargasso Sea
MKTYNNKPKKVSQLANCIRFLSIDAVQKAKSGHPGMPMGMADIATVLFKDHLKFDPKDPKWIDRDRFVLSNGHGSMLLYSCLYLAGYRDINIDDIKNFRQLNSPTAGHPEYGELAGIETTTGPLSQGLSN

SEQ ID NO: 109724 - protein, 273 aa, Unknown
  Bacterial polypetide isolated from the Sargasso Sea
LAEEILRERFGTQVFNHKTYVLAGDGCLMEGISHEALSLAGHLGLKNLVMLFDNNSISIDGPTSLAVSDNYKKRFNSYGWDFVEIDGHNEKKIFNALKKVQKAKKPTVISCITKIGFGSPNKSGSEKAHGSPLGINEVKLVRKKLDWKHKPFIIPKNIIESWRKIGKTGQIKEDKWKKFYVKKRKEIDKIFSSKFSDIFKKEKKQALKDLSALATRKSSEKILTALNVKKNMIIGGSADLAGSNNTKTKNHRPIKKNDFKGNYIHYGVREHAM

SEQ ID NO: 109725 - protein, 210 aa, Unknown
  Bacterial polypetide isolated from the Sargasso Sea
VIYVMTHDSIGLGEDGPTHQPIEQLTGLRAIPNLNVMRPADRTETIECWELALKSLNKPSILSLTRQNLNPVREKYSKTNRCASGAYEISRTNNKIKLTILASGSEVNLAIDTSHKLAKHKIYSKVISVPSLELFKLQSKPYKNKILGESKYRVSIEAGSTEPWKQLIGNDGFCFGLDDFGKSAPYKDAYKYFGLTTQNIVNKIKKMIHK

SEQ ID NO: 109726 - protein, 255 aa, Unknown
  Bacterial polypetide isolated from the Sargasso Sea
EEILKNKLGNDLINHKTYVLAGDGCLMEGISHEAMSLAGHLKLKNLVMLFDNNSISIDGPTSLAVSDNFKKRFEGYGWDYISINGHNEKEIFKALKKVQKTKKPTVISCKTKIGYGSPNKSGKASSHGSPLGTDEIKLVRKALNWKTKPFDIPNKILNEWRKIGQRGEILEKKWNKALKRKKIKFNQTLKNNFTTVLKKEKENAIREPKSLATRKCSEMTLNALTKQKNNLIGGSADLAGSNNTKTKNHKIIKPG

SEQ ID NO: 109727 - protein, 277 aa, Unknown
  Bacterial polypetide isolated from the Sargasso Sea
NLKLKSNWLKKNNKTLKSSKFKNFFKNSIDKKVINEINKFKLEHQNKNTACATRKASELSLELLNDKIGNLLGGSADLTGSNNTKTKDMKIFNSSNFSGNYIYYGVREHAMAAIMNGITLHGGLRPYGGTFLVFTDYCRPSIRLAALMKIPTIFVMSHDSIGLGEDGPTHQPVEHLASLRAIPNLIVLRPCDIMETIESWQIALEVQNPSIIVLTRQNLPLIRNTYLKDNLVKKGAYLVKDYKKYDATILATGSEVEIALQASAKLKKNNKNIRVVS

SEQ ID NO: 109728 - protein, 248 aa, Unknown
  Bacterial polypetide isolated from the Sargasso Sea
MMKIDQAIVSAKNETEKPTMIFCRTTIGFGSPNKSGTSDVHGAPLGEEEIVKTREALGWEYAPFELPKSIYDFWDHKSEGTSINESWNAGMQAYKSSNPEKYEELNRRIASKMPVDFEEKFSDFLNQCDAENSSMATRKASQLCLNFFVKELSELVGGSADLTPSNNTFSKSSSTFSNENPTGNHINYGVREFGMSAIMNGMVLHGGIKPYGATFLVFTDYARNAVRLSALMGLPNIFVYTHDSIALG

SEQ ID NO: 109729 - protein, 190 aa, Unknown
  Bacterial polypetide isolated from the Sargasso Sea
QLGSKTPGHPEFDIDIGVETTTGPLGQGIGNAVGMALAEKMLASRFNQDDGLKPIDHFTYTFLGDGCLMEGVSHEACSFAGTHGLGKLICFYDQNGISIDGEIANWFTDNTSQRFESYGWQVLEVDGHNVEETLEAIRTAQQDAERPTLICCKTIIGFGSPNKSGTSGVHGSALGEDEVKKTRDELGWEH

SEQ ID NO: 109730 - protein, 320 aa, Unknown
  Bacterial polypetide isolated from the Sargasso Sea
EVEVTAGPLGAGISNAVGLAIAETHLAAKFNKPDCNIVDHYTYVIMGDGCNQEGIASEACSLAGHLKLGKLIALYDDNQITIDGRTDVSFTEDVLKRYEAYGWHVQHVEDGNHDVKGITEAIETAKLIKDKPSIIKISTTIGYGSPNKSDTAGIHGAAVGEEEATLTREFLNWEYPPFEIPEEVYTHFRKSIEKGGNLEKEWDSRFEEYQKKYPSEGAELKRMLEGKLPENWDSDLPSYSPDDKGLATRKHSQICLGALGPNLPELIGGSADLTHSNYTDIKGETGSFQPHSPEKRYLHFGVREHAMAAVLNGIAYHNSG

SEQ ID NO: 109731 - protein, 300 aa, Unknown
  Bacterial polypetide isolated from the Sargasso Sea
FTGDGCLMEGISHEACSLAGTLKLGKLICLYDDNSISIDGETDGWFTDDTAKRFESYGWQVIDEVDGHDSASIAAAIDAAIADTDRPTLICCRTIIGYGSPNKQGTAGTHGAPLGDDEIAEVRKTIGWEFPPFEIPAHVADGWDARDAGSAAEAAWQKTWDAYKEARPDLAAEYERRMRGDLPSDWSDFADKAIVEIDAAGADMATRKASLIALNAFTPALPEMAGGSADLTGSNLTRHSGSADITGNDASGNYIYFGVREFGMAAMCNGMGLHGGVLPYYGTFLVFSDYARNALRMAAL

SEQ ID NO: 109732 - protein, 252 aa, Unknown
  Bacterial polypetide isolated from the Sargasso Sea
MKFYNFWDAKETGASLNSDWDNLIKSYQKKYPEKSKELLRRIKGSTPENFESDFDQFLKDCDMNNLSMATRKASKVCLDFFVKKMPELIGGSADLTPSNNTFSESSSTFSNENPSGNHINYGVREFGMSAIMNGMVLHGGIKPYGATFLVFTDYARNAVRLSALMGLPNIYVYTHDSVALGEDGPTHQPIEHLVTLRSTPNLINWRPADLVETAVAWKEAVISTSTPSCLVFSRQGTSAIQRTSEQLEAIHK

SEQ ID NO: 109733 - protein, 233 aa, Unknown
  Bacterial polypetide isolated from the Sargasso Sea
KKFRQLNSICAGHPEYHPNSGIETTTGPLGQGIANSVGFAIAEEILKKKLGSNLINHKTYVLAGDGCLMEGISHEAMSLAGHLRLNNLIMLFDNNSISIDGPTSLAVSDDYKNRFKSYGWNYILINGHNYREIYNALKKAQTSKKPTVISCKTKIGFGSPNKGGKASSHGSPLGIDEIKLVRKKLDWNYKPFKIPQRILTDWRKIGEKGIKKEKVWNKTFSKHNQKFKSIIKN

SEQ ID NO: 109734 - protein, 102 aa, Unknown
  Bacterial polypetide isolated from the Sargasso Sea
MANAIRFLSADAVEQAQSGHPGMPMGMADVATILFSEFLKFDAENPLWPDRDRFVLSAGHGSMLLYSLLYLSGYRDMTIDEIKNFRQLGSKTAGHPELGTQG

SEQ ID NO: 109735 - protein, 305 aa, Unknown
  Bacterial polypetide isolated from the Sargasso Sea
KNIFNHKTYVLAGDGCLMEGISHEALSLAGHLKLKNLIMLFDNNSISIDGPTSLAVSDNYKKRFNGYGWDYLDIDGHNEKQIFNAIKKVQKAKKPTVISCKTKIGYGSPNKSGSASSHGSPLGEDEINLVRKKLKWSYKPFEIPKHILDVWRNIGNKGLKEEEKWKKNYNKKKTLLNKFFKNNLKNIFEDQKKNLIKNQEDIATRKSSEKILNSLIKENQNIIGGSADLAGSNNTKTKYHEIIKPNNFKGNYIHYGVREHAMCGIMNGIALHSGLIPYGGTFLIFSDYCKPSIRLSAIMKQRVLY

SEQ ID NO: 109736 - protein, 199 aa, Unknown
  Bacterial polypetide isolated from the Sargasso Sea
YYLRFNPKNPSWINRDRFILSAGHGSMLLYSILFLTGYKKIKLQDIQNFRQLNSICAGHPEYEKNSGIETTTGPLGQGLANSVGMALAQEILSKKLGKDIINNKTYVIASDGDLMEGISHEAMSLAGHLNLKNLIVFFDNNKISIDGSTSLSVSDNYKKRFESYGWSFQEINGHNYKQIFNAIKKANKSKKPTLISCKT

SEQ ID NO: 109737 - protein, 164 aa, Unknown
  Bacterial polypetide isolated from the Sargasso Sea
IEQIKHFRQLKSITAGHPEYGHVSGAETTTGPLGQGLANAVGMALGEQLLAARFGVEGIDHYTYVVVGDGCLMEGVSHEAISLAGHLKLRKLIVLFDDNGISIDGSTNLTVSDDQRKRFEASGWNVWAIDGHDPEEISAAIKAAQKSDKPAMIACRTVIGFGAP

SEQ ID NO: 109738 - protein, 261 aa, Unknown
  Bacterial polypetide isolated from the Sargasso Sea
HVLFSRILRYSAQHPNWVNRDRFILSAGHASILQYAMLYLTGYGLTLDDIKNFRQWDSLTPGHPEVGHTDGVEVTTGPLGQGFANAVGMAISERWLREKFGSENIDHSIFTICGDGDLSEGISHEAASLAGQQKLGRLICIYDDNHVTIDGPTELALQDNAVKRFEAYGWEVIDLGESGEDLNKIENALLQAKANEDQPTLVIIRSHIGFPSPTLTDAPSAHGYAFKDDQIAEVKQVMGFPNDEQFYVPEDVIHFYRDAGS

SEQ ID NO: 109739 - protein, 255 aa, Unknown
  Bacterial polypetide isolated from the Sargasso Sea
GVREHAMCGVMNGISLHSGLIPYGGTFLIFSDYCKPSIRLAAMMKQRVIYVFTHDSIGLGEDGPTHQPIEQLTSLRSIPNLNVFRPADMIETFECWQLALENKDTPSVIALTRQKINPVRKKNTSKNLSSNGAYEILRTNDKIKLTILTSGSETSLACEISHKLATENIYSKVVSMPCQEIFDQQKDDYRRKILNETDLVVSIEASETNFWKRYTGQKGLNFGINSFGKSAPYKDIYENFGLNIRNITKIIKQKL

SEQ ID NO: 109740 - protein, 222 aa, Unknown
  Bacterial polypetide isolated from the Sargasso Sea
PSIRLSAIMKLRVIYVMTHDSIGLGEDGPTHQPIEQLSGLRSIPNLNIFRPADRIETIECWELALKSIKTPSVLSLSRQNLDPVRKKYSKQNKCSYGAYEVLRTKDKINLTLIASGSEVKIAVDVSHKLAKHNIYSKVISMPCQEIFDLQKNSIKKKIMNETSNKVSIEASTTDSWDKYIGKNGMKFGMSDFGKSAPYKDIYKHFGLTSENISKKIIKFFKK

SEQ ID NO: 109741 - protein, 312 aa, Unknown
  Bacterial polypetide isolated from the Sargasso Sea
SIDGSTDLSVSDNVKKRFEAYNWNIIEIDGHNYEEIDQAIIQAKESNSPTIISCKTKIGFGSPNKESSASSHGSPLGEDEISLTRKRLEWSYSPFEIPDDLLHEWRSFYKRNDELRNSWLSKNKDLIESKNFKDSYYQKIDSKLSEKLNELKFEHFNDKTNCASRKSSELTLNLIANNQKNLIGGSADLTGSNNTKAKDMNVITSDNFNGNYVHYGIREHGMAAVMNGIALHKGLIPYGGTFLVFTDYCRPSIRLSAIMNIPVIYVMTHDSIGLGEDGPTHQPVEHLASLRAIPNLTVIRPCDIIETIEAWE

SEQ ID NO: 109742 - protein, 229 aa, Unknown
  Bacterial polypetide isolated from the Sargasso Sea
FIFSDYCKPSIRLTAMMKQRVIYVMTHDSIGLGEDGPTHQPIEQLSGLRAIPNLNVLRPADRTETIECWEIALKSSTKPSILSLTRQNLNPIRNKYSKINKCYFGAYEILRTSNKIKLTILASGSEVNLAIDVSHKLAKYKIYSKVVSVPSHELFELQSKSYKTKILNESKYKFSIEAGSLDCWKKFIGENGLSFGINKFGKSAPYKDVYKHFGLKTENIVSKIKKFIK

SEQ ID NO: 109743 - protein, 90 aa, Unknown
  Bacterial polypetide isolated from the Sargasso Sea
MNKINKELAKAIRFLSIDAVEKANSGHPGMPMGMADVATILFKNFLRFNPKDPGWINRDRFVLSAGHGSMLLYSLLYLTGYKSVSFNDIK

SEQ ID NO: 109744 - protein, 251 aa, Unknown
  Bacterial polypetide isolated from the Sargasso Sea
YSLLYLTGYKSITLEDIKNFRQLDSICAGHPEYHPNTGIETTTGPLGQGISNAVGFALAEEILKKRLGSKIINHKTYVLAGDGCLMEGISHEALSLAGHLKLKNLILLFDDNSISIDGPTSLAVSDNHEKRFKSYGWDFIKINGHNQKEILRALRKAQKSKKPIAISCKTTIGFGSPNKSGKASSHGSPLGEEEIKLVRKKLKWNHEAFKIPNEFLNEWRKIGKNASEKAKKHENRNKKIFSKFRNINSYK

SEQ ID NO: 109745 - protein, 241 aa, Unknown
  Bacterial polypetide isolated from the Sargasso Sea
YSLLHLTGYKSVSIEDIKEFRQWGSKTPGHPETFETEGVEVTAGPLGAGISNAVGLAIAETHLAAKFNKPDCNIVDHYTYVIMGDGCNQEGIASEACSLAGHLKLGKLIALYDDNQITIDGRTDVSFTEDVLKRYEAYGWHVQHVENGNHDVKGITEAIEKAKLITDKPSIIKISTTIGYGSPNKSDTAGIHGAAVGEEEAALTREFLNWGYPPFEIPDEVYAHFKKSINKGENLEKEWDS

SEQ ID NO: 109746 - protein, 233 aa, Unknown
  Bacterial polypetide isolated from the Sargasso Sea
LWWTFLIFSDYCKPSIRLAAMMKQRVIYIFTHDSIGLGEDGPTHQPIEQLTSLRSIPNLNVFRPADFIETFECWQKALESENSPSVIALTRQAIDPIRIKDTSENKSSFGAYEVLRSDNNIKITIIASGSETSLASDICHKLATENIYSKVISMPCQELFDQQSEDYKNKILTETELTVSIEASETHYWKKYTGAKGLNFGINDFGKSAPYKEIYNHFGLNADNIIKKIKEKL

SEQ ID NO: 109747 - protein, 289 aa, Unknown
  Bacterial polypetide isolated from the Sargasso Sea
LWKRLFDHYTYVFAGDGCLMEGLSHEACSLAGHLKLNKLIMFFDNNSISIDGSTDLSVSDNVKKRFEAYNWNIIEIDGHNYEEIDKAIIKAKKNDAPTIISCKTKIGFGSPNKEGSASSHGSPLGEDEINLTRKKLEWNYSPFEIPNDLLHEWRSFYKRNDGSRNSWLSKNKELIESKNFKDSYYQKIDSQLSEKLGELKSEHFNDKTNCASRKSSELTLNLISNYQKNLIGGSADLTGSNNTKAKDMNVIKSDNFNGNYIHYGIREHGMAGVMNGIALHKGLIPYGGT

SEQ ID NO: 109748 - protein, 301 aa, Unknown
  Bacterial polypetide isolated from the Sargasso Sea
GPLGQGIANAVGMALGETRLAAEFNREGFSVVDHYTYAFVGDGCLMEGISHEACSLAGTWGLGKLIVFWDDNGISIDGKVGPWFSDNTPVRFESYNWQVIRGVDGHNPKELNKAITTAQEETGRPTLICCRTQIGFGSPKVANTAAAHGAPLGNEEIASTKEQIGWPHGPFQIPAEIKDAWSIQSRGAQQMAQWDALFADYAKEHPNLASEFKRRMSGDLPANFEKLSDGFIAETQKEQAKVATRKASLQALNAYAPLLPEMVGGSADLTGSNLTKWSRATNYSLDAQTGNYIRYGVREFG

SEQ ID NO: 109749 - protein, 305 aa, Unknown
  Bacterial polypetide isolated from the Sargasso Sea
AVGLAIAETHLAAKFNKPDCNIVDHYTYVIMGDGCNQEGIASEACSLAGHLKLGKLIALYDDNQITIDGRTDVSFTEDVLKRYEAYGWHVQHVEDGNHDVKGITEAIEKAKLITDKPSIIKISTTIGYGSPNKSDTAGIHGAAVGEEEAALTREFLNWEYPPFEIPNEVYAHFRKSINKGENLEKEWDSKFEEYQKKYPIEGAELNRMLKGQLPENWDSDLPSYTPNDKGLATRKHSQICLGALGPNLPELIGGSADLTHSNYTDIKGETGSFQPHSPEKRYLHFGVREHAMAAVLNGIAYHNSG

SEQ ID NO: 109750 - protein, 267 aa, Unknown
  Bacterial polypetide isolated from the Sargasso Sea
CFRTKIGFGSPNKEGSESSHGSALGTEEVSLVRENLGWDLPEWQIPDELYKAWDQTERGAGVHAGWDEKITAYKRKDEAKSEELFRRLEGKLPSGWSSELDELAWAEQSSGQNTATRKSSEKCIGKLVDPLPEVFGGSADLTGSNLTSWEGAGSSRYLNYGVREFAMTSITNGMILHGGFRPFSGTFLVFMEYARNAVRLASLMRLPNIFVYTHDSIAVGEDGPTHQPVEQLTNLRTTPNLSTWRPCDGVETAFAWKAAVSSDDKPT

SEQ ID NO: 109751 - protein, 220 aa, Unknown
  Bacterial polypetide isolated from the Sargasso Sea
DYCRPSVRLAALMNLPIIYIMTHDSIGLGEDGPTHQPVEHLASLRAIPNLTVIRPSDIIETIEAWQYALESQSPCVIVLTRQNLPMLRTNNNINVVESGAYPIIDFENYQGTILATGSEVEIACESSKILSSENINIRVISFPSWEIFDKKSKKEKMQILGNKLLFAIEAGAINGWEKYVSNENFIGMKSFGASGPYKELFEHFGITAKALVKLIKERIK

SEQ ID NO: 109752 - protein, 275 aa, Unknown
  Bacterial polypetide isolated from the Sargasso Sea
LNSKTAGHPEYRHISGIETTTGPLGQGLGNAVGFAIAEEFIGARWGSTLCDHYTYVIAGDGCLMEGISQEAISLAGKLELKKLIVIWDDNGITIDGGVDLSCSTDQISRFKSSGWSTFSCNAHNPIEIDQAIIEAKKDSRPSLIAAKSIIGFGSKAKQGTSGAHGAPLGKDEVEDLRKNFDWKYKEFVIPPNIKDAWEKIGESSKRKFTAWSDRFQSLSKKKKAAFLNELDQTFPLKLKSGIKNFKEFHSQESEKKLATRKASEICLDLINDCFS

SEQ ID NO: 109753 - protein, 199 aa, Unknown
  Bacterial polypetide isolated from the Sargasso Sea
LGEDGPTHQPIEQLSGLRSIPNLNVFRPADRMETIECWELALKNSKTPSILSLTRQNLNPVRNKYSINNKCALGAYEILRTNKKINLTILASGSEVNLALETSHKLAKNKIYSKVISVPCKDIFDSQSKSYKKKILGETKFKISIEAGSTDSWKKYVGNEGFTFGIDEFGKSAPYKNIYKYFGLTAENISKKIKNRLKN

SEQ ID NO: 109754 - protein, 241 aa, Unknown
  Bacterial polypetide isolated from the Sargasso Sea
MEGISHEAMSLAGHLKLKNLVMLFDNNSISIDGPTSLAVSDNYKKRFESYGWNYIYINGHNEKEIFRSLKKIQNTKKPTVISCKTKIGFGSPNKSGKSSSHGSPLGDDEIKLVRKKLNWKYKPFQIPKNILDEWRKIGSKGIKVEAKWNKIYKKKKNFINKILNNNLLRALNIEKKNALKENKSLATRKSSELTLNTLIKKSNILIGGSADLAGSNNTKTKYHKIIKPGDFSGNYIHYGVR

SEQ ID NO: 109755 - protein, 70 aa, Unknown
  Bacterial polypetide isolated from the Sargasso Sea
MSKLHNDLANCIRFLSIDAVQKANSGHPGMPMGMADVTTVLFKNFLRFNPKNPDWLNRDRFVLSAGHGSM

SEQ ID NO: 109756 - protein, 263 aa, Unknown
  Bacterial polypetide isolated from the Sargasso Sea
GNYIHYGVREHGMAAVMNGLALYGGIIPYGGTFLIFSDYCKPSIRLSALMGLKVIYIFSHDSIGLGEDGPTHQPIEQLTGLRAIPNLNVFRPADINETLECWQIALRSNSTPSAIALSRQKVRYINPKNSKENKSEKGAYVVNITSHDSNVTLVASGTEVELALNVQMKLKENNIHSKVVSMPCMELFDKQSKDYQKDIIEEDSLIVTLEAGSIMSWQKYIKQDGLNLGIDKFGESAPYKEVYNHFNLSEENITNFIQKKLRE

SEQ ID NO: 109757 - protein, 267 aa, Unknown
  Bacterial polypetide isolated from the Sargasso Sea
KNFDGNYIHYGVREHGMAAVMNGLALYSGLIPYGGTFLIFSDYCKPSIRLSALMGLKVIYIFSHDSIGLGEDGPTHQPIEQLNGLRAIPNLNVFRPADINETLECWEIALKSKNTPSVIALSRQKLPYINPKLSEKNKCENGAYIVKMISHSNQVTLVASGSEVELALEVQNALKENSINSKVVSMPCQELFDKQSDDFKKDILDEESLIVTIEAGNVSSWKKYLGNKGITLGIDRFGESAPYKKIYEHLNLSVEKIVLVIQEKLRK

SEQ ID NO: 109758 - protein, 256 aa, Unknown
  Bacterial polypetide isolated from the Sargasso Sea
GVREHAMAGIMNGISLHKGLRPYGGTFLVFTDYCRPSIRLAALMKLPVIYVMTHDSIGLGEDGPTHQPVEHLSSLRSIPNLQVIRPCDVIETIEAWEVALKSTDSPTILVLTRQNLPLLRNISTKYNLLKKGAYPIIDFKDYDATILATGSEVEIAHQSSKKLYTKGIKVRVISFPCWEIFEKQSIKYRKKIIGKKPVFAIEAGVINGWEKFIDEKNFIGMKSFGSSAPYKKLYEYFGLTESNLTKIVQKKIKRRT

SEQ ID NO: 109759 - protein, 269 aa, Unknown
  Bacterial polypetide isolated from the Sargasso Sea
YHQIIKPGDFSGNYIHYGVREHAMCGIMNGLALHSKLIPYGGTFLIFSDYCKPAIRLAAMMQQRVIYVLTHDSIGLGEDGPTHQPIEQLSGLRTIPNLNVLRPADRVETIECWELALKYSNKPSAICLTRQNLEPVRKTHTNSNKCSFGAYEIFRSGKKINLTMLASGSEVYLAIETSLKLAKDKVYSKVISVPCVEIFEKQASSYKNKILGETKFKVSLEAGSTNLWKKYVGQNGLTFGINEFGKSAPYKKIYKNFGLTSENISKKIK

SEQ ID NO: 109760 - protein, 233 aa, Unknown
  Bacterial polypetide isolated from the Sargasso Sea
LALHSNLMPYGSTFLVFSDYMRPSMRLASLMNVNSLFIFTHDSIYLGEDGPTHQPIEHLMSLRLIPNLDIIRPSNSMELIHSYRYALEKRDNPKAIILSRQNMKFFDNDVSYNDFQTGAYEFMPGKDITLVATGSELELAVEISKNLKDLSVQIISAPILNKINKDRIESLNFNQNIFTLELGRSTGWDSYIENIIRSFSIDSFGESAPIEDLTEKYNFSAEKISDEIRSLLN

SEQ ID NO: 109761 - protein, 238 aa, Unknown
  Bacterial polypetide isolated from the Sargasso Sea
MDIDNLKKNFESHWDKATAIRMLSIDAVQKAKSGHPGMPMGMADVCTVLFGNHLKFDSKHPNWPDRDRFILSAGHGSMLLYSILYLSGYEDININDIKNFRQIASKTAGHPEFGHIQGIETTTGPLGQGLATGVGMAIAELILRNKWGKNLINHKTYVLAGDGCLMEGISQEAITLAGKHELSNLIVLWDNNRITIDGDISKSCVTNQIDRFKSSNWSTFECDGHDPEEIDFTISKAQ

SEQ ID NO: 109762 - protein, 207 aa, Unknown
  Bacterial polypetide isolated from the Sargasso Sea
SIGLGEDGPTHQPVEHLAISRSTPNTLVFRPADSVETAEAWEIALHSKNTPSVLALTRQGLPTLRTNHKSANLSSKGAYILAESEGKRQVILIATGSEVTLALAARAELQSEGIGTRVVSMPCMELFEKQDEKYRKRILPGGRHIRIAIEAGVRDSWDKWLMGERGREASSGFIGMSSFGASAPANTLFDHYGITSKQIIKLVKSKI

SEQ ID NO: 109763 - protein, 235 aa, Unknown
  Bacterial polypetide isolated from the Sargasso Sea
WWNFLIFSDYAKPSIRLAALMGLKVIYIFSHDSIGLGEDGPTHQPIEQLTGLRAIPNLNVFRPADINETLECWEIALKSKNTPSVIALSRQKLPYINPNFSEKNKCQNGAYVVKINSHDNKVTLVASGSEVELALNAQIELKKNNIESKVVSMPCQELFDKQSHDFKKDIIDEESLIVTIEAGGVSSWRKYSGDKGISLGVEKFGKSAPYKKVYEDFNLSVEKIVSGIQEHLRKN

SEQ ID NO: 109764 - protein, 293 aa, Unknown
  Bacterial polypetide isolated from the Sargasso Sea
MGMADVATVLFKYYLRFNPKNPSWINRDRFILSAGHGSMLLYSLLYLTGYKSISIKDIQNFRQLNSICAGHPEYEKNSGIETTTGPLGQGLSNAVGMAIAEEILKKKFGSNLINHKTYVIVSDGDLMEGISHEAMSLAGHLKLRNLIVFFDNNKISIDGPTSLSVSDNYKKRFESYGWSFQEINGHNEKQISKAIKKSLNSKKPNIISCKTIIGFGSPNKAGKETSHGAALGEDEIALVRKKLKWEHPPFKIPKNILDEWRKIGEKGSKDEQKWIISYNKKSKKIKDQFNRVI

SEQ ID NO: 109765 - protein, 306 aa, Unknown
  Bacterial polypetide isolated from the Sargasso Sea
LILLFDNNSISIDGPTNLAVSDNFKKRFNSYGWNYIEIDGHNEKQIFNALKKVQNSKIPSAISCKTIIGYGSPNKSGKELAHGSPLGKDEVSLVRKKLKWNHKPFEIPQNIMDEWRKIGKKGFHKSKNKKIQKNINEIFSKIIKEEKRNYIESIEAMATRKSSQKILNRLTKKIPTLIGGSADLSGSNNTKTNSHKIIKPGNFNGNYIHYGVREHAMCGIMNGIALHSNLIPYGGTFLIFSDYCKPSIRLSALMKQRVIYVMSHDSIGLGEDGPTHQPIEQLSNLRSIPNLNVFRPADTIETFECW

SEQ ID NO: 109766 - protein, 259 aa, Unknown
  Bacterial polypetide isolated from the Sargasso Sea
VLVRKKLKWNYEPFKVPEKILEEWKKIGNNGAKEEIKWKKIYQRKKNLIEKTFSNNFSKILEKEKKNITNNPETIATRKSSEKILSKLVEKNKALIGGSADLSGSNNTKTKNHKIIKPGNFVGNYIHYGVREHAMSGIMNGLALHSRLIPYGGTFLIFSDYCKPSMRLSALMKQRVIYVMSHDSIGLGEDGPTHQPIEQLSALRSIPNLNVFRPADTTETLECWKLALENTNTPSVIALTRQKLEQVRKEFVKENKCAK

SEQ ID NO: 109767 - protein, 221 aa, Unknown
  Bacterial polypetide isolated from the Sargasso Sea
SIRLSALMKKRVIYVMTHDSIGLGEDGPTHQPIEQLSGLRAIPNLNVFRPADRIETIECWEHALKSSKTPSVLSLTRQNLNPIRKTYSNKNLCSSGAYEVLRTNKKINLTILASGSEVNLAIEVSHKLAKDKIYSKVISMPCMELFELQLKSYKNKILEETKFKISIEAGSSDCWKKYVGDNGITFGVDQFGKSAPYKDIYKYFGLESTKIKIITKKLVKK

SEQ ID NO: 109768 - protein, 147 aa, Unknown
  Bacterial polypetide isolated from the Sargasso Sea
SRQNLPHQSRDAQQLSDIARGGYVLKDSAGEPELILIATGSEVGLAVAAYDKLTAAGRKVRVVSMPSTSVFDAQDAGYKQDVLPLQVGARIAIEASHADYWYKYVGLEGRIIGMTSFGESAPAPALFEHFGFTVDNVVATAEELLDA

SEQ ID NO: 109769 - protein, 190 aa, Unknown
  Bacterial polypetide isolated from the Sargasso Sea
MDIENLKKNFEAHWDKATAIRMLSIDAVQKAKSGHPGMPMGMADVCTVLFDNHLKFDSKYPNWPDRDRFILSAGHGSMLLYSILYLTGYEDININDIKNFRQIASKTAGHPEFGHIQGIETTTGPLGQGLATGVGMAIAERILSNKWGKNLINHKTYILAGDGCLMEGISQEAITLAGKHKLSNLIVLWD

SEQ ID NO: 109770 - protein, 278 aa, Unknown
  Bacterial polypetide isolated from the Sargasso Sea
KSKKPIAISCKTTIGYGSPNKSGKESSHGSPLGEDEVKLVRKKLSWNYNSFEIPQKLLNEWKKIGDKASKKAKKKENKTKKIFKNNINSNSFNNLINEIKKSYLKNPKPLATRKASEKFLDIASKLPNIIGGSADLTGSNNTKTKNHKIIKPGNFSGNYIHYGVREHAMCGIMNGIALHSDLIPYGGTFLIFSDYCKPSIRLAAMMKQRVIYVFSHDSIGLGEDGPTHQPIEQLTSLRSIPNLNVFRPADLIETFECWQLAVENKSSHKCYSFNKTVY

SEQ ID NO: 109771 - protein, 228 aa, Unknown
  Bacterial polypetide isolated from the Sargasso Sea
FSDYCKPSIRLSALMQQRVIYIMTHDSIGLGEDGPTHQPIEQLSGLRSIPNLNVFRPADRIETIECWEEALKNSKTPSILSLTRQNLDPIRNKYSSVNKCSLGAYEVLRTNKKINLTILASGSEVNLAIATSHKLAKYKIYSKVISMPCQDIFDQQSVSYKKKILGESKIKISIEAASTDCWKKYVGTNGLTFGINAFGKSAPYKDIYRYFGLTASNIANKTKKLMRN

SEQ ID NO: 109772 - protein, 55 aa, Unknown
  Bacterial polypetide isolated from the Sargasso Sea
VQKANSGHPGMRMGMADVATVLFKDFLKFNPKNPNWLNRDRFVLSAGHGSMLLYS

SEQ ID NO: 109773 - protein, 222 aa, Unknown
  Bacterial polypetide isolated from the Sargasso Sea
LQFRLSALMQKRVIYVMTHDSIGLGEDGPTHQPIEQLSGLRSIPNLNVFRPADRVETIECWEHALKSSKTPSILSLTRQGLNPIRKTFTNINKCSLGAYEVLRTNNKINLTIFASGSEVNLAIETSHKLAKDKIYCKVISMPSMELFDQQSKLYKNKILNETKFKISIEAGSSDCWEKYVGSSGLTFGINEFGKSAPYKDIFKHFGLTVSNIVSKTKKMIGN

SEQ ID NO: 109774 - protein, 258 aa, Unknown
  Bacterial polypetide isolated from the Sargasso Sea
KKSLNSTKPNIISCKTIIGYGSPNKAGKASSHGAALGDEEVALVRKKLKWKYEPFEIPKKILDEWRKIGEKGSIEEKKWNSIYNKKNKKIRDEISRITDNKLPKEFNSQISSLKKKIFELKSGMATRKSSAYVLENLTKNIPELIGGSADLSGSNNTKTKNSTIIKPSNFNGNYIHYGVREHGMAGIMNGMALHGGIIPYGGTFLIFLDYCKPSLRLSALMGLKVIYIFSHDSIGLGEDGPTHQPIEHLAHLRAIPNL

SEQ ID NO: 109775 - protein, 215 aa, Unknown
  Bacterial polypetide isolated from the Sargasso Sea
KGNYIHYGVREHAMCGIMNGLALHSELIPYGGTFLIFSDYCKPSIRLAAIMNQKVIYVMSHDSIGLGEDGPTHQPIEQLTGLRSIPNLNVFRPADTAETFECWDLAASSSRNGPSIIAVSRQKINPIRKEFTKENKCSAGAYEVSRTKSEIDVTIIATGSEVELAIEVSQKLAIEKIYSKVISMPCQELFDMQKKDYKSKILNETKLKISIEAAT

SEQ ID NO: 109776 - protein, 298 aa, Unknown
  Bacterial polypetide isolated from the Sargasso Sea
LVKKIDSLVGGSADLSGSNNTKTKNHKIIKRANFDGNYIHYGVREHAMSGIMNGLALHGGLIPYGGTFLIFSDYCKPSIRLSALMKQRVIYIMSHDSIGLGEDGPTHQPIEQLSGLRAIPNLNVFRPADTTETLECWQIALESLNTPSVIALTRQKLNQVRKEFSQENKCFKGAYEISRNNEKIDLTIFATGSEVSLAVEVSHKLATHNIYSKVVSVPCQNFFDKQTTEYKEKILNETKYKVSIEAASTDCWRKFVGENGLCFGIDDFGKSAPYKDAFKHFGLTKENIVKKIYEIIKK

SEQ ID NO: 109777 - protein, 252 aa, Unknown
  Bacterial polypetide isolated from the Sargasso Sea
FNGNYIHYGVREHAMCGIMNGLALHSKFIPYGGTFLIFSDYCKPSIRLAAMMKQQVIYVMTHDSIGLGEDGPTHQPIEQLSGLRSIPNLNVFRPADRLETIECWEHALKSSKTPSILSLTRQNLNPIRNKYSKINKCSLGAYEVLRTNKKIKLTILASGSEVSLAIEASHKLAKERIYSKVISVPCMELFDSQSNNYKNKILNETKLKISIEAGSRDCWKKYVGDLGMAFGIDAFGKSAPYKDIYKYFGLIS

SEQ ID NO: 109778 - protein, 256 aa, Unknown
  Bacterial polypetide isolated from the Sargasso Sea
MGMADVATVLYKYYLKFNPKNPDWLNRDRFILSAGHGSMLLYSLLYLTGYKKIKIEDIKNFRQLNSICAGHPEYHKSSGIETTTGPLGQGLANSVGMAIAQEVLRKKFGSDIINNKTYVIASDGDLMEGISHEAMSLAGHLNLKNLIVFFDNNKISIDGSTSLSVSDNYKKRFESYGWSFQEINGHNYKQIFNAIKKANKSKKPTIISCKTIIGFGSPNKSGKASSHGAPLGDDEIKLVRKKLNWKYESFQIPNEI

SEQ ID NO: 109779 - protein, 302 aa, Unknown
  Bacterial polypetide isolated from the Sargasso Sea
MEGISHEAMSLAGHLKLKNLIMLFDNNSISIDGPTSLAVSDNFKQRFKSYGWDYININGHKEEEIYKALKKVQGAKKPTVISCKTKIGYGSPNKSGNASSHGSPLGADEIKLVRKELDWDYMPFEIPKNILKIWRDIGKKGEKIEKKWNKAYIKKKTKINKLTINDFSKSLLIEKKRAILENKSIASRKSSEAVISTLLKRSNTLIGGSADLAGSNNTKTKDHKILKPGNFNGNYIHYGVREHAMCGIMNGIALHSKLIPYGGTFLIFSDYCKPSMRLAAMMKQQVIYIMTHDSIGLGEDGP

SEQ ID NO: 109780 - protein, 264 aa, Unknown
  Bacterial polypetide isolated from the Sargasso Sea
EVPQEAYDQFRQAIDRGASLEAEWNQALATYRNKYPSEAAEFERMLRGELPEGWDKDLPTAGPEEKGLATRKHSQICLGALGPNMPELIGGSADLTHSNYTDIKGETGSYQPETPEKRYLHFGVREHAMAAILNGIAYHDSGLIPYGGTFLVFADYMRGSMRLSALSELGVIYVLTHDSIGVGEDGPTHQPIETIPSLRAMPGMLVFRPGDANETSGAYKLAIQNRKRPSALCLSRQGMANQANSSIDKVAKGGYVLEDCDGTP

SEQ ID NO: 109781 - protein, 281 aa, Unknown
  Bacterial polypetide isolated from the Sargasso Sea
HNHKEIFDSIEQAKKSSKPTLIACKTKIGYGSPNKESKSSSHGSPLGKEEVDLTRKNLNWPYDNFIIPKELLVEWRNFANRNKNTKEKWIKFNNDIISSDNFKKFFSNSLPKNIDKKIDEFKTKHFGEKTNCASRKASELSLEIFTSEIENLIGGSADLTGSNNTKTKNMIPITKNNFNGSYIYYGIREHGMAGIMNGLALHGGIRPYGGTFLVFTDYCRPSIRLAALMNLPVIYVMTHDSIGLGEDGPTHQPIEHLASLRAIPNLTLIRPSDIIETIDAW

SEQ ID NO: 109782 - protein, 302 aa, Unknown
  Bacterial polypetide isolated from the Sargasso Sea
MINHKTYVLAGDGCLMEGISHEALSLAGHLKLKNLILLFDNNSISIDGPTSLAVSDDHEKRFKSYGWDYIKINGHNFKEISKALKKAQKSKKPIAISCKTTIGYGSPNKGGKASSHGSPLGDEEIKLVRKKLNWNYSAFEIPKKLNEEWKLIGSKASIKAEKHEKIYKNKFKKDFPLENNLSKDTIVGSIEKVKADYLKTLEPMATRKCSEKFLEIISKLPSLIGGSADLAGSNNTKTKNHKTIKPNDFSGNYIHYGVREHAMCGIMNGISLHSGLIPYGGTFLNFSDYCKPSIRLAAMMKQ

SEQ ID NO: 109783 - protein, 291 aa, Unknown
  Bacterial polypetide isolated from the Sargasso Sea
KKGQKLNKNWKNKFNKSLKHKEILKQMKINKLTRSKDTITFLEKIIKSSKNEATRKSSQNSLEFLSTKITNLIGGSADLTGSNLTKTSSSKLNGKGLNYIHYGVREHFMSAAMNGIAVHGGFLPYGGTFLVFSDYCKNSIRLSAMMEQRVIYVFTHDSIGLGEDGPTHQPIEHLAGLRSIPNLNVFRPCDAVETFEAWEIAVNSLKTPSVLALSRQNLPLLRKKYKTNLSSRGGYLLKKTEKPKLTLITSGSEVSIGFEISQKLLEIGIHSNLVSMPCIEVLKDKIKAIKT

SEQ ID NO: 109784 - protein, 129 aa, Unknown
  Bacterial polypetide isolated from the Sargasso Sea
MPNKKNQSTVTHDDLANAIRFLSIDAVEKAKSGHPGLPMGMADVATVLFTKFLKYNPNVPKWHDRDRFVLSAGHGSMLLYSLLYLSGHKDMTIQEIKKFRQLGSKCAGHPEYGHAKGIENTTGPLGQGI

SEQ ID NO: 109785 - protein, 300 aa, Unknown
  Bacterial polypetide isolated from the Sargasso Sea
HPKTGIETTTGPLGQGIANAVGFAIAEEVLKKKLGKNLINHKTYVLAGDGCLMEGISHEAMSLAGHLKLKNLVMLFDNNNISIDGPTSLAVSDNFKKRFESYGWDYILVDGHNENQIYRALKRVQNAKKPTVISCKTTIGYGSPNKSGKSSSHGSPLGLEEIKLVRKTLKWKYKPFEVPNKLLNKWRAIGRRGQLIEKKWNKLIKKQSKKFNLVKKNNFKNALNSEKKLAIKEPKSLATRKCSELTLHALTNSNNNLIGGSADLAGSNNTKTKKHKIIAPRNFDGNYIHYGVQRACNEWG

SEQ ID NO: 109786 - protein, 113 aa, Unknown
  Bacterial polypetide isolated from the Sargasso Sea
MNANNKDLSNAIRFLSIDAVQKANSGHPGMPMGMADVATILFKNFLKFNPKNPNWLNRDRFVLSAGHGSMLLYSLLYLTGYKSISLKDIKNFRKLNSICAGHPEYIPNSGIET

SEQ ID NO: 109787 - protein, 237 aa, Unknown
  Bacterial polypetide isolated from the Sargasso Sea
QTTYPELEYPTFDAGTKLATRKAFGATLDKFADQIPNLIGGSADLEPSNYTGNFATKFGDFSKTNRTGRNLAFGVREFPMAAAMNGIALHGGLIPFGGTFLVFADYERPALRLGSIQKCRVMHEFTHDSFWVGEDGPTHQPIEHAMALRAIPNFNVYRPADAKETAVCFKLALESHETPSALLLTRQGVPVLESSIDATIDGVTKGAYAVYDCDSPELIFLATGSEVSLAIEVAQQM

SEQ ID NO: 109788 - protein, 199 aa, Unknown
  Bacterial polypetide isolated from the Sargasso Sea
MIWFVQVYIGFKVSLVFKDLSNALRFLSIDAVQKANSGHPGLPMGMADVATVLFKYYLRFNPKNPSWIDRDRFILSAGHGSMLLYSLLYLTGYKSVSLKDIQNFRQLNSICAGHPEYEKNTGIETTTGPLGQGLSNAVGLAMAEEILKKRFGTKLFDHKTYVIASDGDLMEGISHEAMSLAGHLKLKNLIVFFDNNKIS

SEQ ID NO: 109789 - protein, 255 aa, Unknown
  Bacterial polypetide isolated from the Sargasso Sea
VREHAMSGIMNGIALHSNLIPYGGTFLIFSDYCKPSIRLSALMKQRVIYVMTHDSIGLGEDGPTHQPIEQLSSLRYVPNLNVFRPADTIETFECWELAIGLNKPSIIALSRQKINPVRKEYDAQNKCKNGAYEILRTNQQIELTILSTGSEVNLAIEVSHKLATQNIYSKVISVPSFELFNLQTEQYKRQIMNETKHKISIEAGVTESWKKYVGENGICFGIDDFGKSAPGKDVYDSFNLNSNYIIGQIKNMLNK

SEQ ID NO: 109790 - protein, 67 aa, Unknown
  Bacterial polypetide isolated from the Sargasso Sea
MSKLYKELANCIRFLSIDAVQKANSGHPGMPMGMADVATVLFKDFLNFNPKNPDWINRDRFVLSAGH

SEQ ID NO: 109791 - protein, 287 aa, Unknown
  Bacterial polypetide isolated from the Sargasso Sea
PLGKDEVALVRKKLKWNYKPSEIPKKIMDEWRKIGKRTSKKSKNNKIKKNISKIVSEIIKKEKRKYIKSLESMATRKSSQKILNALTTKIPTIIGGSADLSGSNNTKTESHKIIKPKNFDGNYIHYGVREHAMSGIMNGIALHSNLIPYGGTFLIFSDYCKPSIRLSALMRQRVIYVMSHDSIGLGEDGPTHQPIEQLTNLRSIPNLKVFRPADTTETFECWELALTNRNSPSIIALSRQKINPIRKKYESENKCALGAYEILRTKEKIDVTILATGSEVDLGIEVS

SEQ ID NO: 109792 - protein, 231 aa, Unknown
  Bacterial polypetide isolated from the Sargasso Sea
FLIFSDYLKPSLRLSAFMGLRVIYIFSHDSIGLGEDGPTHQPIEHLESLRSIPNLNVFRPADINETIECWEIALKSKSNPSAIALSRQKLPYISEHNSGENMSSRGAYILKKNSKNPEVSLIASGSEVEIALEALEKLNNLNISSKVISVPCFDIFDKQNENYKKEILGENTFKISIEASSQSGWKKVVGKDGVTVGMSTFGKSGPYKEIYKLFNLTSEDVVKIVKSNVKK

SEQ ID NO: 109793 - protein, 113 aa, Unknown
  Bacterial polypetide isolated from the Sargasso Sea
MSKLHNDLANCIRFLSIDAVQKANSGHPGMPMGMADVATVLFKNFLKFNPKNPDWLNRDRFVLSAGHGSMLLYSLLYLTGYKSISINNIKKFRQLNSICAGHPEYHPKTGIET

SEQ ID NO: 109794 - protein, 177 aa, Unknown
  Bacterial polypetide isolated from the Sargasso Sea
MIWYVQVYIGFIVNPVFKDLSNAIRFLSIDAVQKANSGHPGLPMGMSDVATVLYKYYLRFNPKNPGWINRDRFILSAGHGSMLLYSLLYLTGYKSISIKDIQNFRQLDSICAGHPEYEKNSGIETTTGPLGQGLSNAVGMAIAEENLKKRYGSNLINHKTYVIASDGDLMEGISHEA

SEQ ID NO: 109795 - protein, 182 aa, Unknown
  Bacterial polypetide isolated from the Sargasso Sea
KYKKISNASFLKDFLKEKQNVINKPDAIATRKSSEKIISFLTKKNSIIIGGSADLSGSNNTKTKNHQIIKPGNFKGNYIHYGVREHAMCGIMNGLALHSELIPYGGTFLIFSDYCKPSIRLAAIMRQRVIYVMSHDSIGLGEDGPTHQPIEQLAGLRSIPNLNVFRPADTAETFECWDLAAI

SEQ ID NO: 109796 - protein, 274 aa, Unknown
  Bacterial polypetide isolated from the Sargasso Sea
TTTGPLGQGISNSVGFAIAEQILKKKIGKELINHKTYVLAGDGCLMEGISHEAMSLAGHLKLNNLIMLFDNNSISIDGPTNLAVSDNFKKRFESYGWNYLLIDGHDEKDIFNAIKKSHKSKKPTVISCKTKIGYGSPNKSGKASSHGSPLGEDEIKLVRKRLNWNYDKFEIPNKILNSWRKIGNKGAKVESRWNKIYKKKKSKVDKILKNNFNKSIKYEKIKAVKEINSLATRKSSELTLNSLIKNNNTLIGGSADLSGSNNTKTKYHKIINSN

SEQ ID NO: 109797 - protein, 202 aa, Unknown
  Bacterial polypetide isolated from the Sargasso Sea
GEDGPTHQPIEHLASLRSIPNLNVFRPCDIIETIECWEIALKSKNKPSIICLSRQNLPLIRKEKALTNHSQKGAYIVKDFVNKKKVILMATGSEVQIALKARDTLEKKGIGTRVISLPSWELFEEQEEKYKKKILPKGTVRIAIEAGVKLGWEKWLYKNGGSQIKTSFVGMSGFGTSAPEKDIFDHFQINVQEICRRVESLI

SEQ ID NO: 109798 - protein, 236 aa, Unknown
  Bacterial polypetide isolated from the Sargasso Sea
IPYGGTFLIFSDYCKPSIRLSAIMKQKVIYIMTHDSIGLGEDGPTHQPIEQLAALRSIPNLNVLRPADQTETIECWDIALKSNKTPSILALTRQNLKPIRNNFSKKNQCSKGAYEVLRTGKNINLTILASGSEVNLAIETSHKLAKEKIYSKVISMPCQEIFDKQNKSYKDKILKESKNTFAIEAGSKMSWEKYIKKGLSFSIEDFGKSAPYKKVYDHFGLSSGKISKKIKFYIKK

SEQ ID NO: 109799 - protein, 219 aa, Unknown
  Bacterial polypetide isolated from the Sargasso Sea
FIRLAAMMKQRVIYIFTHDSIGLGEDGPTHQPIEQLTSLRSIPNLNVFRPADMIETFECWQLALESKNTPSVIALTRQSVNPVRKKIISKNETSRGAYEILRTGDDIKITVLSSGSETSLACDISHKLATENIYSKVISMPCQELFDQQSNNYKKEILNETDLIVSIEASETDYWKKYTGQNGLNFGINNFGKSAPYKEIYNHFNLNVESIVNKIKKKL

SEQ ID NO: 109800 - protein, 281 aa, Unknown
  Bacterial polypetide isolated from the Sargasso Sea
GAGISNAVGLAIAETHLAAKFNKPDCNIVDHYTYVIMGDGCNQEGIASEACSLAGHLKLGKLIALYDDNQITIDGRTDVSFTEDVLKRYDAYGWHVQHIEDGNHDIKGITAAIEKAKSIKDKPSIIKISTTIGYGSPNKSDTAGIHGAAVGEEEAGLTREFLNWEYPPFEIPEEVYTHFRKSISKGENLEKEWDSRFEEYQTKYPSEGAELKRMLEGQLPDNWDSDLPSYSPDDKGLATRKHSQICLGALGPNLPELIGGSADLTHSNYTDIKGETGSFQP

SEQ ID NO: 109801 - protein, 235 aa, Unknown
  Bacterial polypetide isolated from the Sargasso Sea
QMKKELPKLATRQASQKALEVINKTIVNTLGGSADLTGSNLTKTSEMKTVSSRKFSGNYIHYGIREHAMGSIMNGVALHKGFIPYGGTFLVFSDYMRASIRLSALMSLRVIYVLTHDSIGLGEDGPTHQPIEHLAILRATPNLNLIRPADIVETAEAWDVALKTNGPTVLALSRQSLRAYRSDKNNKNMVLNGGYILNNISKDRDITLIATGSEIEIAMEAFEIMFKEGIKAAVV

SEQ ID NO: 109802 - protein, 284 aa, Unknown
  Bacterial polypetide isolated from the Sargasso Sea
LILLFDNNSISIDGPTSLSVSDDHEQRFKSYGWNYLNINGHNYKEIIKALKKAQKSNKPIAISCKTTIGYGSPNKGGKASAHGSPLGQDEIKLVKKKLKWNYEPFKIPNEILSEWRKIGESASQKAKKNRSKYKKIFSNFKNLKSFKNLIEKTKNDYLKNSKPLATRKSSEMFLNIVSRLPNLIGGSADLAGSNNTKTKDHRIIKPGNFSGNYIHYGVREHAMCGIMNGIALHSNLIPYGGTFLIFSDYCKPSIRLAAMMKQKVIYVFTHDSIGLGEDGPTHQP

SEQ ID NO: 109803 - protein, 281 aa, Unknown
  Bacterial polypetide isolated from the Sargasso Sea
SNNTKTKNHKIIKPGDFTGDYIHYGVREHAMSGVMNGIALHSHLIPYGGTFLIFSDYCKPSIRLSALMKKRVIYVMTHDSIGLGEDGPTHQPIEQLSGLRAIPNLNVFRPADRIETIECWEHALKSSKTPSVLSLTRQNLNPVRKIYPNKNLCSLGAYEVLRTNKKINLTILASGSEVNLALEVSHKLAKDKIYSKVISMPCMELFELQSKSYKNKILEETKFKISIEAGSSDCWKKYVGDNGIAFGIDEFGKSAPYKDIYKYFGLESTNIKNVTKKLLNK

SEQ ID NO: 109804 - protein, 118 aa, Unknown
  Bacterial polypetide isolated from the Sargasso Sea
MSSRKTLANALRALSMDAVQKAKSGHPGAPMGMADIAEVLWRDFLNHNPNNPSWADRDRFVLSNGHGSMLIYSLLHLSGYDLPIEELKNFRQLHSRTPGHPEVGYTAGVETTTGPLGQ

SEQ ID NO: 109805 - protein, 280 aa, Unknown
  Bacterial polypetide isolated from the Sargasso Sea
YYGSIGARLGNAVGMAIAEEIFRKKFGSGIINNKTYVIASDGDLMEGISHEAMSLAGHLKLKNLIVFFDNNKISIDGSTSLSVSDNYKKRFESYGWSFLEVNGHNEKKISKAITKASKSKKPTIISCKTIIGFGSPNKSGKASSHGSPLGDEEIALVRKKLKWNNQPFEVPQEILDEWRNIGNKGEQLENKWLETINKKNPKIKSELNGANEKLDLNGLENLIRQEKDKHFESKPSLATRQCSMAAIEKISAFLPELIGGSADLSGSNNTKTNNSKNYKL

SEQ ID NO: 109806 - protein, 311 aa, Unknown
  Bacterial polypetide isolated from the Sargasso Sea
CGTGSMLIYALLHLTGYADMTMDQLRNFRQLGAITAGHPESGHAGGIETTTGPLGQGIANAVGMAMAEHHLAAKFGRDLVDHFTYVIAGDGCLMEGVSHEAASMAGHMGLSRLIVLFDDNGISIDGSTDLAVSEDTTARFEAYGWQVLAVDGHDMDAVSAAIAEARADTARPSLIRCRTVIGFGAPKKAGSASVHGAPLGAKEIEDTRAAIGWSHAPFEIPAEISDAWRAVGSRGSAARKAWQSRHDAADTAAFDAAMKGDFNTAIDKSVGAWKQSLSAEPQKLATRVASQKAIEAILPACPSLIGGSADL

SEQ ID NO: 109807 - protein, 299 aa, Unknown
  Bacterial polypetide isolated from the Sargasso Sea
YDLDWSGDPFLHSDDIYDYFKEKREKDNEELRKWEENFKNKYQEDSSFKDNWDLLTSEDFPSFDGVSGEKYASRILGSKILENLSESTNSIIGGSADLAASTKQIIDESYFSSTNYKGRSLEFGIREHAMGAITNGITLHSNLIGYASTFLVFSDYMRPSIRLASLMDINSVFIFTHDSIYLGEDGPTHQPVEHLMSLRLIPNVDVIRPSNSIEMNHSYRYAFSDSKNPKVLSLTRQDLDYLDFDVKYEEFLKGGYVVSDGDDFTIVASGSELEIAFKIKAALLEYSVRIVSVPILNKF

SEQ ID NO: 109808 - protein, 88 aa, Unknown
  Bacterial polypetide isolated from the Sargasso Sea
MVAASVSLESLCVNSIRMLAVDAVNKSNSGHPGLPMGCAPMGYALWQNILNHNPNNPKWFNRDRFVLSAGHGCMLLYSLLHLTGYKSV

SEQ ID NO: 109809 - protein, 207 aa, Unknown
  Bacterial polypetide isolated from the Sargasso Sea
DSVCAGHPEYHPNTGIETTTGPLGQGISNAVGFAISGEILNKHLRKKKINHKTYVLAGDGCLMEGISHEALSLAGHLKLKNLILLFDNNSVSIDGPTKLAVSDNHEKRFKSYGWDYLKINGHDFKQISKALKKAQKSKKPIAISCKTTIGYGSPNKGGKASSHGSPLGDEEIKLVRKKLEWKYEPFKIPAELLSEWRKIGTRASKKA

SEQ ID NO: 109810 - protein, 263 aa, Unknown
  Bacterial polypetide isolated from the Sargasso Sea
PGMPMGMADVATVLFKYHLRFSPKNPNWINRDRFILSAGHGSMLLYSLLYLTGYKSISIDDIKNFRQLNSICAGHPEYVKGSGIETTTGPLGQGLGNAVGMAIAEEILRKKFGSTLINNKTYVIASDGDLMEGISHEAMSLAGHLKLKNLIVFFDNNKISIDGSTSLSVSDNYKKRFEGYGWNFLEINGHNEKQISKAITKASKANKPTIISCKTIIGFGSPNKSGKASSHGSPLGDDEIALVRKKLKWNNEPFEIPEDILNA

SEQ ID NO: 109811 - protein, 301 aa, Unknown
  Bacterial polypetide isolated from the Sargasso Sea
IQRANFGKSIVDHYTYVFAGDGCLMEGVSQEAITIAGRQKLSKLIVFWDNNNITIDGKVELSDNTNQVERFRSSGWHVLEIDGHNPVEIDRAIIEAKKSNKPTMIACETHIALGSSAQDTSKGHGALTDSKLIEETKKVYGWSQKKFYVPPEVKKEWEKIGQKGHKEKLSWEHRFKSLSSKKQLEFSRMHSMEVPQNLTRAINRLKKSISIEKPKVATRKSSEMVLNVINPIMTETIGGSADLSGSNNTKSSDMTVFDVDNRKGRYIHWGVREHGMAAAMNGMALHGGLRPYGGTFMCFTD

SEQ ID NO: 109812 - protein, 290 aa, Unknown
  Bacterial polypetide isolated from the Sargasso Sea
IGYAPGVETTTGPLGQGIANAVGMALAEKILATKYNKDNFQIFDHKTYAFVGDGDLMEGISHEACSLAGTLELGNLIVFYDDNEISIDGRVDNWFTDDTKKRFESYGWEVFGNVDGHDVNKINSCIEKAKKSVKPTLICCKTVIGKGSPNKSGTSEVHGAALGDEEIQLTREEIGWNHPPFEVPEHVYEAWNNEKEGQAKEDDWNAMFDDYLKNYSKEHSEIQRIFSSSLPGELDKIFEDLIENFSNDDTHHASRKASGMCLDSLGPRIPELFGGSADLSPSNNTQWEGF

SEQ ID NO: 109813 - protein, 117 aa, Unknown
  Bacterial polypetide isolated from the Sargasso Sea
MRELNKTLSNSIRALSMDAVQKANSGHPGMPMGMADVSTILFKYFLKFNPRNPSWINRDRFVLSAGHGSMLLYSLLYLTGYKSVKLKDIKNFRQINSICAGHPEYVENSGIETTTGP

SEQ ID NO: 109814 - protein, 279 aa, Unknown
  Bacterial polypetide isolated from the Sargasso Sea
NTKTKNHKIIKPGDFAGDYIHYGVREHAMSGVMNGIALHSNLIPYGGTFLIFSDYCKPSIRLSALMKKRVIYVMTHDSIGLGEDGPTHQPIEQLSGLRAIPNLNVFRPADRIETIECWEHALKSSKTPSVLSLTRQKLNPVRKTHPNKNLCSLGAYEVLRTNKKINVTILASGSEVNLALEVSHKLAKDKIYSKVISMPCMELFELQSKSYKNKILKETKFKISIEAGSSDCWKKYVDDKGIAFGIDEFGKSAPYKDIFKYFGLESKNIKNITKKLLKK

SEQ ID NO: 109815 - protein, 156 aa, Unknown
  Bacterial polypetide isolated from the Sargasso Sea
MRFLSVDAVQKANSGHPGMPMGMSDVATVLYKYYLRFNPKNPNWINRDRFILSAGHGSMLLYSLLYLTGYERIKLEDIKNFRQLNSICAGHPEYENGSGIETTTGPLGQGLANSVGMAIAQEVLKKRFGSDLINNKTYVIASDGDLMEGISHEAMS

SEQ ID NO: 109816 - protein, 230 aa, Unknown
  Bacterial polypetide isolated from the Sargasso Sea
LIFSDYCKPSIRLAAMMERQVIYVMTHDSIGLGEDGPTHQPIEQLSGLRSIPNLNIFRPADRLETIECWEHALKSFKTPSILSLTRQNLNPIRNKYSKTNKCSLGAYEILRTNKKIKLTILASGSEVNLALEASHKLAKDKIYSKVISVPCMELFDLQSNKYRDKILKETKLKISIEAGSSDCWKKYIGDNGMTFGIDVFGKSAPYKDIYKYFGLTSSNIANKSKKLFKN

SEQ ID NO: 109817 - protein, 214 aa, Unknown
  Bacterial polypetide isolated from the Sargasso Sea
MKQQVIYVMTHDSIGLGEDGPTHQPIEQLSGLRSIPNLNVFRPADRMETIECWELALKNSKTPSILSLTRQNLNPVRNKYSINNKCALGAYEILRTNKKINLTILASGSEVNLALETSHKLAKNKIYSKVISVPCQDIFDSQSKSYKKKILGETKLKISIEAGSTDCWKKYVGNEGFTFGIDEFGKSAPYKNIYKYFGLTAENISKKIKNRLKN

SEQ ID NO: 109818 - protein, 258 aa, Unknown
  Bacterial polypetide isolated from the Sargasso Sea
KIIKEEKAKHFSSKPTMATRQCSSSVIEVVSKLLPELVGGSADLSGSNNTKTKNSKIITSKNFNGNYIHYGVREHGMAAIMNGLALYGGLIPYGGTFLIFSDYCKPSVRLSALMGLRVIYIFSHDSIGLGEDGPTHQPIEQLSGLRAIPNLNVFRPADINETLECWEIALKSENNPSAIALSRQKLPYVSKNVSEKNKCSLGAYELNITSHDYKLILIASGSEVEIALEAQNKLKEENIDTKVVSMPCHELFDKQDKD

SEQ ID NO: 109819 - protein, 294 aa, Unknown
  Bacterial polypetide isolated from the Sargasso Sea
SDNYKKRFESYGWSFQEINGHNEKEISNAIKKASKSKKPNLISCKTIIGYGSPNKSGKASSHGSPLGEEEIELVRKKLKWRWNSFEIPNEILEAWRDIGKKGRSIEKDWEEDLTKKNPKIKLELEKMIKGFDVKDLEKIINEEKMKYFSSKPDMATRKCSSNTIETISNFLPGLIGGSADLSGSNNTKTKNSRIISSRNFNGNYIHYGVREHGMASIMNGLALYGGLVPYGGTFLIFSDYCKPSIRLSALMGLRVIYIFSHDSIGLGEDGPTHQPIEHLAGLRAIPNLNIFRPA

SEQ ID NO: 109820 - protein, 323 aa, Unknown
  Bacterial polypetide isolated from the Sargasso Sea
QEKKKYFEEKPQMATRQCSMKTIESLTDILPNLIGGSADLSGSNNTMTSKSKVIKAKNFGGNYIHYGVREHGMAAAMNGLALYHNIIPFGGTFLIFSDYCRPSIRLSALMGLRVIYIFSHDSIGLGEDGPTHQPIEQLTSLRAIPNLNVFRPADMNETLECWEMALKNDKGPSAIILSRQKLPYINQNFSEINNCSKGGYQLKISSHASNITLIASGSEVSLALEVQKDLKDLNIDSLVVSMPCQEIFDKQDKEYRDKVLENDSLKISIEAGNCISWKKYMSEKDLSISIETFGKSAPYKKLFEDYKLTSQEIIQLIQQKIRK

SEQ ID NO: 109821 - protein, 283 aa, Unknown
  Bacterial polypetide isolated from the Sargasso Sea
KKPTIISCKTKIGYGSPNKAGTASAHGSPLGDKEVKLVRKKLNWSHKPFFIPKDILNEWREIGKKGEKIENKWKKINKDKIKNFYKQINLGNLITKEKEKFIKNQTAIATRKSSEKFLEILDLKNLIGGSADLTGSNNTKTINHKIIKPGNFKGNYIHYGVREHAMSGVMNGIALHSNLVPYGGTFLIFSDYCKPSIRLSALMKQKVIYVFSHDSIGLGEDGPTHQPIEHLVSLRSIPNLKVFRPADTVETFECWQLALEAKDFPSAIALTRQKVNPVRLAHE

SEQ ID NO: 109822 - protein, 298 aa, Unknown
  Bacterial polypetide isolated from the Sargasso Sea
IFNSGIETTTGPLGQALANSVGLAIATEIYKKKFGSKIINNKTYVIASDGDLMEGISHESMSLAGHLKLKNLIVFFDNNKISIDGSTSLSVSDNYKKRFESYGWNFLEINGHNEKQINSAINKAHKSNKPTLISCKTIIGFGSPNKSGKSSSHGAPLGEDEIKLVRKKLKWPHLPFDIPQQILKEWRDIGSKGETLEKNWLNELNKSKSEIKENFNNLNNNIFRDKLNQLVSSEKEKYFRDKPIMATRQCSMKVIETINNLIPNLVGGSADLSGSNNTKTSNSIIINSKNYGGNYIHY

SEQ ID NO: 109823 - protein, 225 aa, Unknown
  Bacterial polypetide isolated from the Sargasso Sea
FSDYCKNAIRLSAMMKQQVIYVFTHDSIGLGEDGPTHQPIEHLASLRSIPNLFVIRPCDAIETFEAWEFAIKNVNSPTALILSRQNLPLIRNDFKENKINKGAYFLRQVNGGKFSIISTGSEVSLALEVHNFFMSKKIKSNVISMPSMELFNKQNSNYQNIILGNKPKVIIEAASSFGWHKYIRKNDLLISIDSFGESGKGNDLFDLFGFNCNNIVRLIKKEILT

SEQ ID NO: 109824 - protein, 314 aa, Unknown
  Bacterial polypetide isolated from the Sargasso Sea
RFIVSNGHGSMLLYSCLYLSGYSGINLENIKNFRQLNNPTAGHPEYGSAPGIETTTGPLSQGLSNAVGMAIAEKKLASKFSNKLIDHYTYVFAGDGCLMEGLSHEVCSLAGHLRLNKLILFFDDNSISIDGSTDLSSSDITKKRFESYNWNYLSIDGHNFEEIDQAIKEAKKSSLPTIIACKTIIGYGSPNKSGKASSHGSPLGEDEIKLVRKQLKWESDPFEIPLDLKNKWKNFYRRNIELKENWNNTNLNIFKSSDFKNYFFNLEYKELNEEIINFKKIHFNEKTNCATRKSSEMSLNLISDYLSNFIGGSA

SEQ ID NO: 109825 - protein, 256 aa, Unknown
  Bacterial polypetide isolated from the Sargasso Sea
GVREFGMTAMTNGMVLHGGIKPYSGTFLVFMDYARNAVRLAALMKIPNIFVYTHDSIGLGEDGPTHQPIEQLVTLRATPNLNNWRPADIIETAVSWKEAICSKDTPHTLILSRQNLPFIERSKGQIEMIEKGGYLLSSDDKADITLISSGSEVKLIIEAAKTIAKEGLKANVVSMPCLDKFVSQDNAYRDSIINPEIPKLVVEALHPNSWHCLVNLNDVVIGMETFGESAPGDELMNEFGFTVNNIVTQAKKLTAK

SEQ ID NO: 109826 - protein, 266 aa, Unknown
  Bacterial polypetide isolated from the Sargasso Sea
NKRPTIICCRTVIGYGSPKFQGTNQAHGAPLGNDEAEVVRKKLEWKYKPFEIPKDIYLKWNAKAKGKKYEDAWRLKVNKYKKLYKSEFAELERRIKRKIPKTVLTKLNNFMSKNHKPMATRKSSQIVMTEFGKSMPELIGGSADLKGSNLSYYDDMDSFSYSNPSGKYIYYGVREFGMSAISNGIFLHGASRPFASTFLIFSEYAKNAIRMSALMKLPIIYIFTHDSIGLGEDGPTHQAVEQLSSLRLVPGLDVWRPADTQETAAA

SEQ ID NO: 109827 - protein, 260 aa, Unknown
  Bacterial polypetide isolated from the Sargasso Sea
SLLYLTGYKSISINNIKKFRQLNSICAGHPEYHPKTGIETTTGPLGQGISNAVGFAIAEEILKNKLGKDLINHKTYVLAGDGCLMEGISHEAMSLAGHLKLKNLVMLFDNNSISIDGPTNLAVSDNFKKRFEGYGWDYISINGHNEKEIFKALKKVQNAKKPSVISCKTKIGYGSPNKSGKASSHGSPLGADEIKLVRKVLNWKNKPFDIPNKILKDWRKIGQRGEILEKKWNKILNRKKIKLSQTLKNNFNTALKKEKR

SEQ ID NO: 109828 - protein, 288 aa, Unknown
  Bacterial polypetide isolated from the Sargasso Sea
KNSKLKNEYDRLEKGDLPENLDDVLGDEKLKFFKEKPKMATRQCSASIINTISNIMPELIGGSADLSGSNNTKTEASKVINAKNFSGNYIHYGVREHAMAGVMNGMALYGGLIPFGGTFLIFSDYLKPSMRLSALMKLRVIYIFSHDSIGLGEDGPTHQPIEHLEHLRAIPNLNIFRPADINETIECWEIALKSKNNPSAIALSRQKLPYVSEHSSGESMCSKGAYVLKKTSENVDVSLIASGSEVEIALEAQEKLKNLNISSKVISVPCYDLFQNQTEHYKNDVLGK

SEQ ID NO: 109829 - protein, 303 aa, Unknown
  Bacterial polypetide isolated from the Sargasso Sea
AVGMAIALKKLSKEKKLSKTPKVYVFCGDGCLMEGISQEAISLAGHLELNNLILIYDNNNISIDGSTELAFSDNTNLRFKSVNWKVYSGKGHDHQNIYDLFKKAQISNAPCLLNFKTTIGFGSPNKSAKASSHGSPLGSDEVNLTRSKLSWSEKPFQIPDKLLKIWRGSADKNKKLYKKSKSTFHSNLSKKDIDKLFNKIELDLKNFNSDQATRKSSEAILNYIKEDHPILGGSADLTGSNNTKGKEMSVMNSKNMSGQYIHYGVREHGMAAIMNGIAATKIYKTYSGTFLSFADYMKPSLRL

SEQ ID NO: 109830 - protein, 279 aa, Unknown
  Bacterial polypetide isolated from the Sargasso Sea
LTGSNTLNWEGTHEIKYGDFSGNYINYGVREFAMTGIMNGLVLHGGIKPYSGTFLTFLDYARNAVRMAALMEIPTVLVYSHDSIGVGEDGPTHQPVEHLTSLRTTPNLETWRPCDTSETAISWLSAITNTSKPTALILSRQKLPTFSRNESQINSISKGAYVLYEPESKAELVLIATGSEVKLAMEVAEELKGKKNIRVVSMPCSERFDEQSDEYKTSVLGNGIKRVAIEASHEDWWRKYVGLEGEVIGMTSFGESAPGDDLFEHFGFTKEKIIKTLGL

SEQ ID NO: 109831 - protein, 309 aa, Unknown
  Bacterial polypetide isolated from the Sargasso Sea
IINNYGKEVFDHYTYVFAGDGCLMEGLSHEACSLAGHLKLNKLIMFFDNNSISIDGSTDLSVSDNVKKRFEAYNWNIIEIDGHRYEEIDQAIIQAKKSDAPTIISCKTKIGFGSPNKEGSAASHGSPLGEDEISLTRNKLEWNFSPFEIPNDLLHEWRNFYKKNDELRNSWLSKNKEIIGSKNFKDSYYQKIDSQLPEKLGKLKSEHFNNKTNCASRKSSELTLNLISNYQKNFIGGSADLTGSNNTKAKDMNVITSDNFNGNYIHYGIREHGMAGVMNGIALHKGLIPYGGTFLVFTDYCRPSIRLSA

SEQ ID NO: 109832 - protein, 264 aa, Unknown
  Bacterial polypetide isolated from the Sargasso Sea
TKNHQIIKPGNFKGNYIHYGVREHAMCGIMNGLALHSELIPYGGTFLIFSDYCKPSIRLAAIMKQRVVYVMSHDSIGLGEDGPTHQPIEQLTGLRSIPNLNVFRPADTAETFECWDLAAVSGKAQPGIIVVSRQKINPIRKEFTSENKCSTGAYEVSRTKSEIDVTILATGSEVELATEVSQKLATEKIYSKVISMPCHELFDIQKKDYKSKILNETKHKISIEASTTDYWKKYIGENGIAFGIDNFGKSAPYKEIYEHFGLTS

SEQ ID NO: 109833 - protein, 287 aa, Unknown
  Bacterial polypetide isolated from the Sargasso Sea
FNFLTKENSFLIGGSADLSGSNNTKTKHHKIIKPGNFDGNYIHYGVREHAMCGIMNGLALHSKIIPYGGTFLIFSDYCKPSIRLASIMKQKVIFVMSHDSIGLGEDGPTHQPIEQLAGLRSIPNLNVFRPADSSETYECWKHAIEEKETPSIIAVSRQKTNSIRKEFTKENKCSFGAYEVFRTNSNINLIIIATGSEVNLAVDISQKLATQNIYSKVISMPCQELFDKQNKEYKSKILNEAKFKVSIEASTSDQWKKYVGDGGISFGIDDFGKSAPYKKIYEHFGLT

SEQ ID NO: 109834 - protein, 271 aa, Unknown
  Bacterial polypetide isolated from the Sargasso Sea
KPGDFTGDYIHYGVREHAMSGVMNGIALHSNLIPYGGTFLIFSDYCKPSIRLSALMKKRVIYVMTHDSIGLGEDGPTHQPIEQLSGLRAIPNLNVFRPADRIETIECWEHALKSSKTPSVLSLTRQNLNPVRKKYSNKNLCSLGAYEVLRTSKKINLTILASGSEVNLAIEVSHKLAKDKIYSKVISMPCMDLFEIQSKTYKNKILKETKFKISIEAGSSDYWKKYIGDNGIAFGIDEFGKSAPYKDIYKYFGLESTNIKNITKRIIKKIK

SEQ ID NO: 109835 - protein, 254 aa, Unknown
  Bacterial polypetide isolated from the Sargasso Sea
RKKLKWPYPPFEIPENILKEWRKIGQQGEVLEKNWIDTLNKSKPEIKEKFNILNNKLYNKDLGELIYSEKTKYFQEKPTIATRQCSMKVIEKITEIMPNLIGGSADLSGSNNTKTNKSIVINAKNFGGNYIHYGVREHGMAAAMNGLALYHNLIPFAGTFLIFSDYCKPSIRLSALMGLRVIYIFSHDSIGLGEDGPTHQPIEQLSSLRSIPNLKVFRPADINETLECWEAAILNDKGPSALILSRQKLNYVSN

SEQ ID NO: 109836 - protein, 298 aa, Unknown
  Bacterial polypetide isolated from the Sargasso Sea
FFDNNKISIDGSTSLSVSDNYKKRFESYGWNFLEINGHNEKQITKAISKASKAKKPTIISCKTLIGFGSPNKSGKASSHGSPLGDEEIKLVRKKLKWNFKPFEIPQEILDEWREIGKKGELLERKWEETINNKSSKIKDELEKNYINSDLRDLESIIEKEKTKYFESKPSLATRQCSMAAIESISVMLPQLIGGSADLSGSNNTKTNNSKIINSKNFDGNYIHYGVREHGMAAVMNGLALYGGLIPYGGTFLIFSDYCKPSIRLSALMGLKVIYIFSHDSIGLGEDGPTHQPIEQLAG

SEQ ID NO: 109837 - protein, 193 aa, Unknown
  Bacterial polypetide isolated from the Sargasso Sea
METKNIKSEKLSQLANCIRFLTIDAVQRANSGHPGMPMGMADIATVLFKNHLKFDPNDPKWIDRDRFILSNGHGSMLLYACLYLTGYKDISLDNIKNFRQIGSPTAGHPEYGELEGIETTTGPLSQGLSNAVGFAMAESKLSSTLGKDSINHYTYVFAGDGCLMEGLSHEACSLAGHLKLNKLIVFFDDNSIS

SEQ ID NO: 109838 - protein, 301 aa, Unknown
  Bacterial polypetide isolated from the Sargasso Sea
HKTYVLAGDGCLMEGISHEALSLAGHLKLKNLILLFDNNSISIDGPTSLAVSDDHKKRFNSYGWDFIDINGHNEKEIFKALKKAQNSKKPIAISCKTKIGYGSPNKSGKASAHGSPLGEDEIKLVRKKLKWKFEPFEIPKKILDDWRAIGDKATKRARSHQKNYQKKLSSMSWLGWSLSNNFNNNFPPKNNLIKGPIYSAIEKVKLEYLKSLEPMATRKCSEKYLEIVSKIPNLIGGSADLAGSNNTKTKNHNIIKPGNFLGNYIHYGVREHAMCGIMNGLALHSGLIPYGGTFLIFSDYA

SEQ ID NO: 109839 - protein, 327 aa, Unknown
  Bacterial polypetide isolated from the Sargasso Sea
IDAVQKANSVHPGMPMGMADVATVLFKYHLRFNPKNPNWMNRDRFILSAGHGSMLLYSLLYLSGYKSISIEDIKSFRQLNSICAGHPEYKEGTGIETTTGPLGQGLANAVGMATAEEIFRKKFGSTVINNKTYVIASDGDLMEGISHEAMSLAGHLKLKNLIVFFDNNKISIDGSTSLSVSDNYKKRFESYGWSFQEINGHNEKQITKAISKASKSNKPTIISCKTIIGYGSPNKSGKASSHGSPLGDEEISLVRKKLNWNSKPFEIPKEILEEWREIGNKGEQLENKWLKTISKKNNKFKSEIIKNSQKLDFTALEKLIMRKKRNI

SEQ ID NO: 109840 - protein, 269 aa, Unknown
  Bacterial polypetide isolated from the Sargasso Sea
NNKSGRNIPFGVREFPMAAIMNGMALHGGLIPFGGTFLVFSDYERPALRLAAIQKVRVIHEFTHDSFYVGEDGPTHQPIEHIMSLRAIPDFNVYRPADAKETASCIKLAIENGNTPSALLLTRQGVPILNGSQKQVDANVSKGAYTLIDTKGSPEIIILATGSEVSLAIEVAKKLEGKKVRVVSMPCWETFDKQTDEYKKEVIPDRGSLKISIEAGITNGWEKHIGINGLAIGINHFGSSAPAGDLAREFGFTADQIADNIEKFLGKLL

SEQ ID NO: 109841 - protein, 201 aa, Unknown
  Bacterial polypetide isolated from the Sargasso Sea
RPFLLYAFLGDGCLMEGISHEVCSFAGTHKLGKLICFYDQNGISIDGEIDLWFTDNTKQRFESYGWHVVEIDGHDIDEINKATEEAKKETERPSMICCKTTIGFGSPNKSGTAGVHGSPLGDDEIEITRKELNWEHAPFEIPEDIYDAWNAKDEGAKKEKAWEDLLETYKQKYPEESNELERRFNSEMTHEFNERFDDFLR

SEQ ID NO: 109842 - protein, 296 aa, Unknown
  Bacterial polypetide isolated from the Sargasso Sea
MLKSLKVPDFGNDLMATRQAFGITLDEFANKFPNIIGGSADLDGSNCTTNFANTYDDFSASNPKGRNIAFGVREFPMGAIMNGIALYGKHLPFGGTFLVFSDYVRSAIRLSAIQKLQALYEFTHDSIFVGEDGPTHQPVEHAMSLRNIPNLLVFRPSDSFETYCCFKEVIKNTESPSAMLLTRQKLPKLSLEQNYIEQGVSKGAYILKKQDNPEAILFTTGSEAHLALDICNSLDKKIQIVNIPCWELFNKQDKNYISSIMLKDCKKRISLEAGITLGWEKFTGIDGLSIGINEFG

SEQ ID NO: 109843 - protein, 261 aa, Unknown
  Bacterial polypetide isolated from the Sargasso Sea
MGNYIHYGVREHGMAAIMNGLALYGGLIPYGGTFLIFSDYCKPSIRLSALMGLKVIYIFSHDSIGLGEDGPTHQPIEQLAGLRAIPNLNVFRPADINETLECWEIALKSSNTPSAIALSRQKVPYINPNNTKVNKCEKGAYTVNLTSHESKVTLVASGTEVELALKVQEQLKENNIHSKVVSMPCMELFDKQPDEYRKDILEENSLIVTLEAGSIMSWQKYIKDKGINLGIDKFGESAPYKEVYKHFKLSEEDITNFIQKK

SEQ ID NO: 109844 - protein, 314 aa, Unknown
  Bacterial polypetide isolated from the Sargasso Sea
PEYEKGSGIETTTGPLGQGLGNAVGMAIAEEILRKKFGPTLINNKTYVIASDGDLMEGISHEAMSLAGHLKLKNLIVFFDNNKISIDGSTSLSVSDNYKKRFEGYGWNFLEINGHNEKQISKAITKASKANKPTVISCKTIIGFGSPNKSGKASSHGSPLGDEEIALVRKKLKWNKEPFEIPEDILNAWRKIGEKGIQLEQRWLETLDKKDTKIKSVLKDTYIESNLKDLENLIKKEKAKYFETKPAMATRQCSSVAIESILNILPQLVGGSADLSGSNNTKTNNSKVINSKNFDGNYIHYGVREHGMAAVMNG

SEQ ID NO: 109845 - protein, 94 aa, Unknown
  Bacterial polypetide isolated from the Sargasso Sea
MSKQYRDLANCIRFLSIDAVQKANSGHPGMPMGMADVATVLFKDFLNFNPKNPNWINRDRFVLSAGHGSMLLYSLLYLTGYKSVSLNDIKNFRQ

SEQ ID NO: 109846 - protein, 258 aa, Unknown
  Bacterial polypetide isolated from the Sargasso Sea
VSLEDIKNFRQLDSICAGHPEYHPGSGIETTTGPLGQGIANAVGFALAEEILKNKVGKKIINHKTYVLAGDGCLMEGISHEALSFAGHLKLKNLILLFDNNSISIDGPTNLAVSDNTKKRFESYGWDYLDINGHDEKQIFKALKKAQKAKKPFAISCKTTIGYGSPNKGGKASSHGSPLGEEEINLVRKKLNWNYKPFEIPSEIRKLWREIGDKASAKAEKDEAKYQKEIKKFGWLGWSITRHFKNNYPIGFKNHKDQ

SEQ ID NO: 109847 - protein, 183 aa, Unknown
  Bacterial polypetide isolated from the Sargasso Sea
MIQLANCIRFLSIDAVQKANSGHPGMPMGMADIATILFKDHLKFDPNKPNWVDRDRFVVSNGHGSMLLYACLYLSGYKDITIEDIKNFRQLNSPTAGHPEYKELGGIETTTGPLSQGLANAVGLAIAEKKLSNKFGKDLFNHFTYVFAGDGCLMEGLSHESCSLAGHLKLNKLIVFFDDNSIS

SEQ ID NO: 109848 - protein, 274 aa, Unknown
  Bacterial polypetide isolated from the Sargasso Sea
CLNTHLRFNPKNPNWINRDRFILSAGHGSMLLYSLLYLTGYKSITIDDIKNFRQLNSICAGHPEYKKGTGIETTTGPLGQGLANAVGMAIAEEIFRKKFSKAVINNKTYVFASDGDLMEGISHESMSLAGHLKLKNLIVFFDNNKISIDGSTSLSVSDNYKKRFESYGWSFQEINGHNEKQISKAITKASKSKKPTIISCKTIIGFGSPNKSGKASSHGSPLGDDEISLVRKKLKWSSQPFEIPKEIFDEWREIGKRGDQLEVKWLETLNKKNP

SEQ ID NO: 109849 - protein, 310 aa, Unknown
  Bacterial polypetide isolated from the Sargasso Sea
YYESKPSLATRQCSMAAIESISAILPKLIGGSADLSGSNNTKTSNSKVINSKSFNGNYIHYGVREHGMAAVMNGLALYGGIVPYGGTFLIFSDYCKPSIRLSALMGLKVIYIFSHDSIGLGEDGPTHQPIEQLAGLRAIPNLNVFRPADINETLECWQIALESQNTPSVIALSRQKVSYINPENSRENKCKKGAYVVKITSHESKVTIVASGTEVELALKVQKNLKENNIHSKVVSMPCMELFDIQPENFRNDIIEQDSLIVTLEAGSVISWQKYVKDKGMSLGIDQFGESAPYKEVYNHFDLSEEKITK

SEQ ID NO: 109850 - protein, 257 aa, Unknown
  Bacterial polypetide isolated from the Sargasso Sea
LHSDDIYDYFKEKREKDNEELRRWEENFKNKYQEDSSFKDNWDLLTSEDFPSFDGVSGEKHASRILGSKILENLSESTNSIIGGSADLAASTKQIIDQSYFSSTNYKGRSLEFGIREHAMGAITNGITLHSNLIGYASTFLVFSDYMRPSIRLASLMDINSVFIFTHDSIYLGEDGPTHQPIEHLMSLRLIPNVDVVRPSNSIEIEHSYRYAFSDSKNPKVLSLTRQDLDYLDFDVKYEEFLKGGYVVSDGDDFTLV

SEQ ID NO: 109851 - protein, 301 aa, Unknown
  Bacterial polypetide isolated from the Sargasso Sea
QKALEVINKTIVNTLGGSADLTGSNLTKTSEMKTVTSSKFSGNYIHYGIREHAMGSIMNGVALHKGFIPYGGTFLVFSDYMRASIRLSALMSLRVIYVLTHDSIGLGEDGPTHQPIEHLAILRATPNLNLIRPADIVETAEAWDVAIKTNGPTVLALSRQGLKAYRSEKTNKNLVSHGGYILNNISKDRDITLIATGSEIEIAMEASEIMYKEGVKATVVSLPCWELFDKQSEEYKNQVLGNCPRIAIEAASEMGWSKYIGEKGIFIGMKSFGASGPASDLYNHFNITTKSIIDSAKLLLK

SEQ ID NO: 109852 - protein, 282 aa, Unknown
  Bacterial polypetide isolated from the Sargasso Sea
MGIETTTGPLGQGISNAVGFALAEEILKKKVGKKIIDHKTYVVAGDGCLMEGISHEALSLAGHLKLKNLILLFDNNSISIDGPTNLAVSDDHKKRFKSYGWDYIKINGHNFNEISKALKKAQRTKKPIAIACKTTIGYGSPNKSGKASSHGSPLGEEEIKLVRKKLSWKHNPFEIPQDLLIRWRSIGAKASKKAEIHEKRYKKIISKLGWLGWTLSNNFKNDFPPKNNLIKGTIYKAIEKTKSDYLKSLEPMATRKSSEKFLDIICKLPNLIGGSADLSGSN

SEQ ID NO: 109853 - protein, 88 aa, Unknown
  Bacterial polypetide isolated from the Sargasso Sea
MSNSIRVLSMDAVQKANSGHPGMPMGMADVSTVLFKYFLKFNPKNPNWINRDRFVLSAGHGSMLLYSLLYLTGYKSVKLGDIKNFRQI

SEQ ID NO: 109854 - protein, 107 aa, Unknown
  Bacterial polypetide isolated from the Sargasso Sea
ATGSEVQLAVDAAAKLSEQGKAVRVVSMPSTDVFDRQDAAYRESVLPSAVVKRVAVEALSKESWYKYVGFNGAIVGMDTFGESAPAGELFKHFNITVDAVVEAALGL

SEQ ID NO: 109855 - protein, 82 aa, Unknown
  Bacterial polypetide isolated from the Sargasso Sea
MSKLYKELANCIRFLSIDAVQKANSGHPGMPMGMADVATVLFKDFLNFNPKNPDWINRDRFVLSAGHGSMLLYSLLYLTGYK

SEQ ID NO: 109856 - protein, 259 aa, Unknown
  Bacterial polypetide isolated from the Sargasso Sea
AVGFAISEEIIKKQIGKKIIDHKTYVLAGDGCLMEGISHESLSLAGHLKLKNLILLFDNNSISIDGPTSLTVSDDYEKRFKSYGWNYLKINGHNFREISKALNKAQKSKKPVAISCKTTIGYGSPNKSGKASSHGSPLGVEEIKLVRKKLKWNYEPFKIPSKFLREWRKIGQSASQKAKRHEIKYKKIPYYLKNLNSYKKLIEKTKNNYLKNLKPLATRKSSEMFLNVIAKLPNLVGGSADLAGSNNTKTRDHKIIKRR

SEQ ID NO: 109857 - protein, 223 aa, Unknown
  Bacterial polypetide isolated from the Sargasso Sea
FLVFSDYMRPSIRLASLLDINSVFIFTHDSIYLGEDGPTHQPIEHLMSLRLIPNVDVIRPSNSIEVDHSYRYAFSDSKNPKVLSLTRQDLDYLDFDVKYEEFIKGGYVVSDGDDFTLVASGSELEIAFKIKAALLEYSVRIISVPILNRLSNMQNEEINELLKNKHVFPIELGRSIGWESYLGRITKTFSVDSFGESAPIEDLEKNFGFDVPSITKEIIKYLN

SEQ ID NO: 109858 - protein, 281 aa, Unknown
  Bacterial polypetide isolated from the Sargasso Sea
LGEEEVSLVRKKLKWKYEPFIIPKEILYEWREIGKKGTLEEKKWNSIFNKKDKKIRDEINRIIKNKLPEDLDKQIASLKKKIFNLKPVQASRKSSAFVLENITENLPELIGGSADLSGSNNTKTKYSTIIKPSNFKGNYIHYGVREHGMAGIMNGMALHGGIIPYGGTFLIFSDYCKPSLRLSALMGLKVIYIFSHDSIGLGEDGPTHQPIEHLAHLRAIPNLNVFRPADTIETLECWEMALKSSTNPSVIALSRQKISFVTETLTNKNMSALGGYELKKT

SEQ ID NO: 109859 - protein, 268 aa, Unknown
  Bacterial polypetide isolated from the Sargasso Sea
MVEFKRRHTEEKTKIASRKASQETLNVLTEVIPELAGGSADLTGSNLTKTRSQKTIVPGEFGGSYIHYGVREHGMAAAMNGIALHGGFIPYGGTFLIFTDYCRPSIRLSAMMEQRVIYVMTHDSIGLGEDGPTHQPVEHLASLRAIPNLNVFRPCDIVETAECWAAALATKSTPSVISLSRQGLPCLRKDHTEKNLSANGGYVLSGTDFERDITLLATGSEVSLALEAGIQLMQEGINAAIVSMPCIEIFEAQNVEYRSKVLQPGVPI

SEQ ID NO: 109860 - protein, 296 aa, Unknown
  Bacterial polypetide isolated from the Sargasso Sea
SLSSSDNVEARFLSYGWNVLKIDGHNHEQINEAINKAKTSKQPTIISCKTKIGFGSPNKEGSSSSHGSPLGEEEVNLTRKQLDWHNEEFIIPEELLMEWRSFAKRNEEIINKWKNKNNDFINSTQYNKFFDTNLDDEIKKEIVNFKTTYANDDTKFATRKASENSLSLLNKHIVNFIGGSADLTGSNNTKTKDMNIFNAENYAGSYIYYGIREHGMAGIMNGLALHGGIKAYGGTFLVFSDYCRPSIRLSALMKLPVVYVMTHDSIGLGEDGPTHQPVEHLAALRAIPNLNIIRPC

SEQ ID NO: 109861 - protein, 265 aa, Unknown
  Bacterial polypetide isolated from the Sargasso Sea
GKASSHGSPLGDEEIMLVRKKLKWNYKPFEIPKLVLDEWRKIGDKGDLLERKWSENLSKKNSKVKNDLEKNFINSSLGGLERLIEREKTKYFESKPSLATRQCSMASIESISKILPQLIGGSADLSGSNNTKTTNSKIINSKDFDGNYIHYGVREHGMSAVMNGLALYGSLIPYGGTFLIFSDYSKPSIRLSALMGLRVIYIFSHDSIGLGEDGPTHQPIEQLTALRAIPNLNVFRPADINETLECWQIALKTHGTPSAIALSRQ

SEQ ID NO: 109862 - protein, 334 aa, Unknown
  Bacterial polypetide isolated from the Sargasso Sea
GRINEAIINAKNSDKPTIICCKTKIGFGSPNKEASASSHGSPLGKEEVELTRKNLNWNHEEFYIPDDLLSEWRGFANRNAEIKKNWENKNADFLNSSKFNNFFNENLDSDIKAEIINFKKLYAKDDTKYATRKASESSLDLLNNHIVNFLGGSADLTGSNNTKTKGMDIFNAENYKGSYVYYGIREHAMAGVMNGLALHGGIKPYGGTFLVFSDYCRPSIRLSALMKLPVIYVMTHDSIGLGEDGPTHQPVEHLAALRAIPNLNIIRPCDILETIEAWEIALETKGPTILALTRQGLPTNKRDSFERYLVKKGALYIKNYSKYNASIFASGSEV

SEQ ID NO: 109863 - protein, 252 aa, Unknown
  Bacterial polypetide isolated from the Sargasso Sea
AMCGIMNGLALHSNLIPYGGTFLIFSDYCKPSIRLASMMKRQVIYVMTHDSIGLGEDGPTHQPIEQLSGLRSIPNLNIFRPADRLETIECWEHALKSSKTPSVLSLTRQNLNPFRNKYSKTNMCSSGAYEVLRTNKKVKLTILASGSEVNLAIETSHKLAKDRIYSKVISMPCMELFDLQSNRYKNKILNETKLKISIEAGSSSCWKKYVGDYGMTFGIDMFGKSAPYKDIYKYFGLESSKITGKLKKVIKK

SEQ ID NO: 109864 - protein, 276 aa, Unknown
  Bacterial polypetide isolated from the Sargasso Sea
CNWDLGSPNKSGKASSHGSPLGEEEISLVRKKLKWKSKPFEIPRDILNTWREIGEKGIKLEEKWSNILKKKSNNIKSALKETYIESNLKDLENLIKREKTKYFESKPSMATRQCSSAAIECITSILPQLIGGSADLSGSNNTKTNNSKVINSKSFDGNYIHYGVREHGMAAIMNGLALYSGIIPYGGTFLIFSDYCKPSIRLAALMGLKVIYIFSHDSIGLGEDGPTHQPIEQLNGLRAIPNLNVFRPADINETLECWEIALKNKNTPSAIALSRQ

SEQ ID NO: 109865 - protein, 201 aa, Unknown
  Bacterial polypetide isolated from the Sargasso Sea
DSIGLGEDGPTHQPIEQLASLRSIPNLNVFRPADLIETFECWQLAIENKNSPSVIALTRQGVNPVRIKNFPKNESAFGAYEVLRTGEDIQITILSSGSETSLACEVSHKLATENIYSKVISMPCQELFDQQNESYKSKVLSETKLIVSIEASETNYWKKYTGTSGLNFGIDDFGKSAPYKEIYNHFNLNPESIIKKIKEKL

SEQ ID NO: 109866 - protein, 230 aa, Unknown
  Bacterial polypetide isolated from the Sargasso Sea
GTFLVFSDYCRPSIRLSALMNIPVIYVMTHDSIGLGEDGPTHQPVEHLSALRSIPNLTVIRPCDIIETIEAWEVALSSNGPTVLVLTRQNLPISQIEHREENLLKKGAYAIIDYSKYDATILSSGSEVEIACSASKKLKKNKNLNIRVVSIPSFELFEKNNSDYKNQILGEKNLFGIEAGVVNGWEKYIESKNFIGMSTFGESGPYKDLYDHFNINDEMLINKILENLEE

SEQ ID NO: 109867 - protein, 200 aa, Unknown
  Bacterial polypetide isolated from the Sargasso Sea
MTVSIKLNELANAIRFLSIDAVQKANSGHPGMPMGMADVAAVLFKYHLRFNPKNPEWINRDRFILSAGHGSMLLYSLLYLTGYKSVSINDIKNFRQLNSICAGHPEYKKNTGIETTTGPLGQGLGNSVGIAIGEEIFRKKFGSNAINHKTYVIASDGDLMEGVSHEVMSLAGHLKLKNLIVFFDNNKISIDGSTSLSVSD

SEQ ID NO: 109868 - protein, 229 aa, Unknown
  Bacterial polypetide isolated from the Sargasso Sea
HGGIKPYGATFLVFTDYARNAVRLSALMGIPSIFVYTHDSVALGEDGPTHQPIEHMVTLRSTPNLNSWRPADLVETAVAWNEAVKSKKTPTCLIFSRQGTSAISRTEDQLSLINKGGYLIDESDNSDITLIASGSEVQLVIDAAKELKNHSISANVVSMPSLDKFLQQSEEFQSSIINPDKPILVVECSHPNSWYRILNRKDKVIGIESFGESAPGSELLEHFGFNIEN

SEQ ID NO: 109869 - protein, 255 aa, Unknown
  Bacterial polypetide isolated from the Sargasso Sea
ISLKSIKNFRKLNSICAGHPEFEANTGIETTTGPLGQGISNAVGFAIAEKILKNKLGKDIINHKVYVLAGDGCLMEGISHEAMSLAGHLKLNNLVMLFDNNSISIDGPTSLAVSDNYKKRFESYGWNYLLIDGHNEKEIFKALKKVNLSKKPTVISCKTKIGYGSPNKSGKASSHGSPLGENEVSLVRKKLNWKYKKFEIPNNILNQWRTIGNKGSKIESSWNKIYKRKKNRINKILKNNFSKSIRSEKINAIKE

SEQ ID NO: 109870 - protein, 286 aa, Unknown
  Bacterial polypetide isolated from the Sargasso Sea
LAEEILKGKIGKNLIDHKTYVLAGDGCLMEGISHEALSLAGHLKLKNLILLFDNNSVSIDGPTNLAVSDNTKKRFESYGWKYLDINGHSEKQIFNALKKAQNSKKPIAISCKTTIGFGSPNKGGKASSHGSPLGRDEIKLVRKKLNWKHKPFEIPDRILNAWRDIGNRASLEAEKFNSKDITNKENLIPISIKEEIEKFKKNYLKVLEPMATRKSSEKFLEIASKLTNLIGGSADLAGSNNTKTKNHKIIKPGKFDGNYIHYGVREHAMCGIMNGISLHSNLIPYG

SEQ ID NO: 109871 - protein, 240 aa, Unknown
  Bacterial polypetide isolated from the Sargasso Sea
GLIPFGGTFLVFADYERPALRLGAIQQCRVIHEFTHDSFWVGEDGPTHQPIEHAMALRAIPNFNVYRPADAKETAACFELTISQNNTPCALLLSRQGVPVLNKNLDFVIDGVSKGAYSILDCDNPELIFIATGSEVSLALEVAEKMSDKKIRVISMPCREIFEQQSDDYKNSIIPNRGAMKISMEAGITMGWEKYIGVNGLSIGIDHYGASAPGKDLSEEFGFTSEKVENKIRDHLSKLL

SEQ ID NO: 109872 - protein, 95 aa, Unknown
  Bacterial polypetide isolated from the Sargasso Sea
VATVLFINFLRFNPKNPDWLNRDRFVLSAGHGSMLLYSLLYLTGYKSISINNIKKFRQLNSICAGHPEYHPKTGIETTTGPLGQGISNAVGFAVD

SEQ ID NO: 109873 - protein, 276 aa, Unknown
  Bacterial polypetide isolated from the Sargasso Sea
LQSDKNFRQLWNQFNNFEIPEVELDWSSDEASRVIGGKILNEYGLSNKFIIGGSADLAASTKQIISDNIFGSNNYSGNSIEFGIREHAMGGIVNGLALHSKLIPYGSTFLVFSDYMRPSMRLASLMKVNSLFIFTHDSIYLGEDGPTHQPVEHLMSLRLIPNLDVIRPANSIELIHSYRYALENRDNPKAIILSRQNMKFFDHDVSYKDFQTGAYEFISGTDITLIATGSELELALEISTKLKDFSVQIISAPILNRLSQKRLESLGLSPNIFTLE

SEQ ID NO: 109874 - protein, 101 aa, Unknown
  Bacterial polypetide isolated from the Sargasso Sea
MNKENRDLANAIRFLSIDAVEKANSGHPGMPMGMADVITVLYKYYLKFNPKNPNWINRDRFVLSAGHGSMLLYSILYLTGYKSIYLNDIKNFRQLNSICAG

SEQ ID NO: 109875 - protein, 216 aa, Unknown
  Bacterial polypetide isolated from the Sargasso Sea
ALMKKRVIYIMTHDSIGLGEDGPTHQPIEQLLGLRAIPNLNVFRPADRIETIECWEHALKSSKTPSVLSLTRQNLNPVRKISSNKNLCSLGAYEVLRTNKKINLTILASGSEVNLAKEVSHKLAKDKIYSKVISMPCMELFELQSKSYKNKILEETKFKISIEAGSTDCWKKYVGSKGITFGINEFGKSAPYKDIYKYFGLESTNIKNISKKLLKK

SEQ ID NO: 109876 - protein, 321 aa, Unknown
  Bacterial polypetide isolated from the Sargasso Sea
GQGLSNSVGMALAQEILKKRFGSDLINNKTYVVASDGDFMEGISHESMSLAGHLNLKNLIVFFDNNKISIDGPTSLSVSDDYKKRFESYGWSFQEINGHNFKQIFNAIKKANKSKKPSIISCKTIIGFGSPNKSGKASSHGAPLGDDEIKLVRKKLKWKYDPFEIPQELTDSWREIGNKGEMIEGEWNKILNKKNNKIKEEYDRLMKGELPLSLDKVLGDEKLKFFQSKPKMATRQSSSYVINSISNILPELIGGSADLSGSNNTKTESSKVINSKNFSGNYIHYGVREHAMAGIMNGLALYGCLIPFGGTFLIFSDYLKP

SEQ ID NO: 109877 - protein, 251 aa, Unknown
  Bacterial polypetide isolated from the Sargasso Sea
MQWSNDEKDEYSIAVLKGLVMDATRKANSGHPGGPLSCADFAYVLYKYYLKFDPENPNWFNRDRFILSGGHMSMVQYALLLFSGWLTLEDIKKFRQFNSNTPGHPEVEIPGVECTTGPLGQGFGMATGMAHAEAYLRNIFRAKSSKAYQLVNHFTYVLASDGDLQEPVALGAASLAGHLGLSKLIVFYDANEAQISGHTNRSDSTNYKKIFDGFNWHVQKINGHDHDEIKKAIDSAQEDGRPSIIIGNTIM

SEQ ID NO: 109878 - protein, 285 aa, Unknown
  Bacterial polypetide isolated from the Sargasso Sea
MLLLVLFKNFLKFNPKNPNWLNRDRFILSAGHGSMLLYSLLYLTGYKSISINDIKNFRQINSICAGHPEFHHGSGIETTTGPLGQGIANAVGFALAEEILKNKVGKDIINHKTYVLVGDGCLMEGISHEALSLAGHLKLKNLILLFDNNSISIDGPTNLAVSDDIKKRFNSYGWDCVEINGHDEKQIFKALKKAQKAKKPFAISCKTTIGYGSPNKGGKASSHGSPLGEEEINLVRKKLNWQYKPFDLPEKIKKQWNMIGEKASINAQKYEAKHKSKLKKLGWLS

SEQ ID NO: 109879 - protein, 286 aa, Unknown
  Bacterial polypetide isolated from the Sargasso Sea
QGISNAVGFAIAEEILKNKLGKDLINHKTYVLAGDGCLMEGISHEAMSLAGHLKLKNLVMLFDNNSISIDGPTNLAVSDNFKKRFEGYGWDYISINGHNEKEIFKSLKKVQNAKKPSVISCKTKIGYGSPNKSGKASSHGSPLGADEIKLVRKVLNWKSKPFDIPNKILKDWRKIGLRGEILEKKWNKIFKRKKIKFNQTLKNKFTTALKKEKENAIKEPKSLATRKCSEMTLSALTKEKNNLIGGSADLAGSNNTKTKNHKIIKPGDLNGDYIHYGVREHAMSGV

SEQ ID NO: 109880 - protein, 252 aa, Unknown
  Bacterial polypetide isolated from the Sargasso Sea
GSADLAGSNNTKTKYQKIIKPGDFSGDYIHYGVREHAMSGIMNGIALYGNLIPYGGTFLIFSDYCKPSIRLSALMQKRVIYVMTHDSIGLGEDGPTHQPIEQLSGLRSIPNLNVFRPADRVETIECWEHALKNSKTPSILSLTRQGLNPIRKSFTKINKCSLGAYEVLRTNNKINLTIFASGSEVNLAIETSHKLAKDKIYCKVISIPSMELFDQQSKLYKNKILNETKFKISIEAGSSDCWKKYVGSSGLT

SEQ ID NO: 109881 - protein, 129 aa, Unknown
  Bacterial polypetide isolated from the Sargasso Sea
MDIDTLRKSFSDHWDKATAIRMLSVDGVEKANSGHPGMPMGMADVVTVLFEKHLKFLSSEPNWFDRDRFILSAGHGSMLLYSVLYLAGYPDITLEDIKNFRQLNSNTAGHPEYGHIPGIETTTGPLGQG

SEQ ID NO: 109882 - protein, 240 aa, Unknown
  Bacterial polypetide isolated from the Sargasso Sea
SNLIPYGGTFLIFSDYCKPSIRLSALMKKRVIYVMTHDSIGLGEDGPTHQPIEQLSGLRAIPNLNVFRPADRIETIECWEHALKSPKTPSVLSLTRQNLNPVRKTYSNKNLCSLGAYEVLRIKKKINLTILASGSEVNLAIEVSHKLAKDKIYSKVISMPCMDLFELQSKTYKNKILKETKFKISIEAGSSDCWKKYIGDNGITFGIDEFGKSAPYKDIYKYFGLESTNIKNISKKLVKN

SEQ ID NO: 109883 - protein, 264 aa, Unknown
  Bacterial polypetide isolated from the Sargasso Sea
MGKSTNYIHYGVREHLMAAAMNGIAVHGGFLPYGGTFLVFSDYCKNAIRLSAMMKQQVIYVFTHDSIGLGEDGPTHQPIEHLASLRSIPNLIVIRPCDSIETFEAWEFAIKNTNSPTALILSRQNLPLIRNDFKENKLNRGAYFLRQFNDGKFSIISTGSEVSLALKVHDFFVSKKIKSNVVSMPSMELFNKQTSSYQDKILGNKPKVIIEAASSFGWHKYIDKNDLLVSIDNFGESGKGDDLFDFFGFNCNNIVHLIKKKILT

SEQ ID NO: 109884 - protein, 249 aa, Unknown
  Bacterial polypetide isolated from the Sargasso Sea
TAIMNGMLLHGGMKPYGGTFLVFMDYARNAVRLAALMEIPNIFVYTHDSIGLGEDGPTHQPVEHLVTLRATPNLNNWRPADIIETAVGWKEAITSLKTPHSLILSRQNLPNIQRNKDQIVQIENGGYLLSHEENADITLIASGSEVQLILAVAKSIQEEGFKVNVVSMPCLDKFYQQDKTYRDSVVDPMIPKLVVEALHPDSWHGLLNLADTVIGMNTFGESAPAEELMAKFGFTENNIITEAKKLLKK

SEQ ID NO: 109885 - protein, 91 aa, Unknown
  Bacterial polypetide isolated from the Sargasso Sea
MATNNNDLANILRVLAMDAVEKAKSGHPGMPMGMADIAEALWRNHLNHNPNNPNWANRDRFVLSNGHGSMLIYALLHLSGYDLSLDEIKNF

SEQ ID NO: 109886 - protein, 108 aa, Unknown
  Bacterial polypetide isolated from the Sargasso Sea
MSKQNRDLANAIRFLSIDAVEKANSGHPGLPMGMADVVTVLFRYYLKFNPKDPGWINRDRFVLSAGHGSMLLYSLLYLTGYKSISLNNIKNFRQLNSICAGHPEYVPN

SEQ ID NO: 109887 - protein, 287 aa, Unknown
  Bacterial polypetide isolated from the Sargasso Sea
IKRFKAYNWNTLSIDGHNHLKISNAIIKAKKSKLPTLIACKTKIGFGSPNKEAKSSSHGSPLGEEEIILTRKKLNWQHKAFLIPKNLSDKWNNFHKRNINNIANWKKNAKKIISSKNYQMFFDNKKLKKLDKDISDFKFYHIKNQTNCATRKASELSLEIFTDHHKNLIGGSADLTGSNNTKVKNMQILSKENFKAQYIHYGVREHAMAAIMNGLALHGGIKPYGGTFLVFSDYCRPSIRLAALMKLPVIYVFTHDSIGLGEDGPTHQPVEHLAALRAIPNLNVIRR

SEQ ID NO: 109888 - protein, 300 aa, Unknown
  Bacterial polypetide isolated from the Sargasso Sea
RDLKKKLGKKIINHKTYVLAGDGCLMEGISHEALSLAGHLKLKNLILLFDNNSISIDGPTKLAVSDNHKKRFNSYGWDFLDINGHNEKEIFKALKKAQNSKKPIAISCKTKIGYGSPNKSGKASAHGSPLGEDEVKLVRKKLRWEYEPFVLPQKILNEWREIGNKASKKAKLNQKNYQTKNKLIGDSTYSAIEKVKSEYLKSLEPMATRKCSEKFLEIVSKISEIIGGSADLAGSNNTKTKNHSIIKPGNFSGNYIHYGVREHAMCGVMNGLALHSSLIPYGETFLIFSDYCKPSIRLAA

SEQ ID NO: 109889 - protein, 242 aa, Unknown
  Bacterial polypetide isolated from the Sargasso Sea
LSLHSSLVPYGGTFLIFSDYCKPSIRLAAMMKKKVIYVFTHDSVGLGEDGPTHQPIEQLTSLRSIPNLNVFRPCDFIETFECWQLALEKNDTPSVIALTRQKISPVRKQYDSRNLSSKGAYEILRTNKKIKVTILSSGSETSLACEISHKLATENIYSKVISMPCQELFDQQKEDYHKIILNETDLIVSIEASETSFWKKYTGQKGLNFGINSFGKSAPYKDIYDNFGLNSETITKKIIQRL

SEQ ID NO: 109890 - protein, 262 aa, Unknown
  Bacterial polypetide isolated from the Sargasso Sea
MNNLNNNKNLRQLSNCIRFLSMDAVEKAKSGHPGMPMGMADIATVLYKNHLKFDPNDPGWIDRDRLIISNGHGSMLLYSCLYLTGYKDIDINQIKNFRQLHNKTAGHPEYGSAEGIETTTGPLSQGLANAVGMALAEKKLSNNYGKELFDHYTYVFAGDGCLMEGLSHEACSLAGHLKLNKLIMFFDNNSISIDGSTNLSVSDNVKKRFEAYNWNIIEIDGHKYEEIDQAIIQAKKNDAPTIISCKTKIGFGSPKQRGFQLH

SEQ ID NO: 109891 - protein, 267 aa, Unknown
  Bacterial polypetide isolated from the Sargasso Sea
MSNNRSKPSKLIQLANCIRFLSIDAVEKAKSGHPGMPMGMADVATVLFKDHLKFDPQDPKWLDRDRLIISNGHGSMLLYSALYLLGYKDINIKDLKNFRQLGSPTAGHPEFGELKGIETTTGPLAQGLANAVGFALSERILNAKLGAKTINHYTYVFAGDGCLMEGLSHEASSLAGHLKLSKLIVFFDDNSISIDGPTNLTISEDTVARYKSYGWNTIKIDGHNHKEISKAISLAKKSSLPTLISCKTKIGFGSPNKESSSSSHVHH

SEQ ID NO: 109892 - protein, 211 aa, Unknown
  Bacterial polypetide isolated from the Sargasso Sea
NVFEVIYVLTHDSIGLGEDGPTHQPIEHLAILRSTPNLNLIRPADTVETAEAWDIALKTNGPTVLALSRQALKAFRCEKSSENKVSRGGYLVNDTSSRRDLTLIATGSEVELAIEASNLLKQDGINVAVVSLPCWELFDKQNDDYKLKVLGNSPRIAIEAACEMGWSKYTGEDGIFIGMSGFGASGPAPDLYKHFGITSKAIVEQARSFFK

SEQ ID NO: 109893 - protein, 430 aa, Unknown
  Bacterial polypetide isolated from the Sargasso Sea
DIKNFRQLKSPSAGHPELGEFEAIETTTGPLSQGLSNAVGFAMAEKKLSSILGENTINHYTYVFAGDGCLMEGLSHEACSLAGHLKLNKLIVFFDDNSISIDGPIALSSSDDVQKRFTSYNWNIINIDGHNHNEISDAIHKAKKSYKPTLICAKTKIGYGSPNKESKASSHGSPLGEDEITLTRKNLNWNHDEFIIPDDLLTEWRSFANRNTKEKNDWINKNTDFLNSSKFNKFFNQELESDLKKNIINFKINYSKDETRYATRKASEKSIELLNNHVENFIGGSADLTGSNNTKTNKMSVFNSENYNGSYVYYGIREHGMAGVMNGLALHGGVRAYGGTFLVFSDYCRPSIRLSALMKLPVIFVMTHDSIGLGEDGPTHQPVEHLASLRAIPNLKVIRPCDIIETIEAWEVALEAKGPTILALTRQGLS

SEQ ID NO: 109894 - protein, 286 aa, Unknown
  Bacterial polypetide isolated from the Sargasso Sea
ADLAGSNNTKTKNHKIIKPGDFSGDYIHYGVREHAMSGVMNGIALHSNLIPYGGTFLIFSDYCKPSIRLSALMKKRVVYVMTHDSIGLGEDGPTHQPIEQLSGLRAIPNLNVFRPADRIETIECWEHALKSSKTPSVLSLTRQNLNPVRKTYSNKNLCSLGAYEVLRTSKKINLTILASGSEVNLALEVSHKLAKDKIYSKVISMPCMELFELQSKSYKNKILEETKFKISIEAGSSDCWKKYVGDNGIAFGIDEFGKSAPYKDIYKYFGLESTNIKSITKKLLNK

SEQ ID NO: 109895 - protein, 140 aa, Unknown
  Bacterial polypetide isolated from the Sargasso Sea
MSKQYKKLANCIRFLSIDAVQKANSGHPGMPMGMADVATVLFKDFLNFNPKNPSWINRDRFVLSAGHGSMLLYSLLYLVGYKSISLNDIKNFRQLDSICAGHPRISSKYWNRNYHWSFGSRNIKCSRFCFSRRNFKKKKW

SEQ ID NO: 109896 - protein, 428 aa, Unknown
  Bacterial polypetide isolated from the Sargasso Sea
ACAEEDRPSLIRCRTVIGFGAPNKAGTSGVHGAPLGGDEIAGTRAALGWDHAPFEIPQPIVESWRAVGARGRAARQAWEARHKAADSAAFDAAMAGDFDGPIGDAVLAWKQALAAEPQKIATRVASQKAIDAIIPACPALIGGSADLTGSNNTRAGGQDVYSRDNPAGSYVHYGVREHGMAAAMNGIALHGGAIPYGGTFLVFTDYCRPSIRLSALMKQRVIYVMTHDSIGLGEDGPTHQPVEHLAALRAIPNLLVFRPGDAVETAEAWQCALAAHDRPSVLALSRQGLEQFRHGDMTDNLTAKGAYVAAEADGARQVTIMATGSEVGIALAARQALAADGIDAAVVSAPCLELFAEQDAGARAAVLGDAPRIAVEAAIRQPWDRLLRDGDDFVGMDGFGASGPAGDLYAHFGITADAVAARARAMIG

SEQ ID NO: 109897 - protein, 198 aa, Unknown
  Bacterial polypetide isolated from the Sargasso Sea
GEDGPTHQPIEQLSGLRAIPNLNVFRPADRIETIECWELALKSLKTPSVLALTRQNLELVRHKYLNRNKCSFGAYEVLRTNNKIKLTILASGSEVGLAIKTSHKLAKDKIYSKVISMPSQELFEIQSKAYKHKILGETKLKISIEASSTECWKKFVGANGITFGINEFGKSAPYKEIYKFFGLTSENISKKIKKIIRK

SEQ ID NO: 109898 - protein, 345 aa, Unknown
  Bacterial polypetide isolated from the Sargasso Sea
GFAELERRIKRKIPKTVITKLNNFMSKNHTPMATRKSSQIVMTEFGKSMPELIGGSADLKGSNLSYYDDMDSFSHSNPSGKYIYYGVREFGMSAISNGIFQHGASRPFASTFLIFSEYAKNAIRMSALMKLPIIYIFTHDSIGLGEDGPTHQAVEQLTSLRLVPGLDVWRPADTQETAAAWREAILSKDRPIALALSRQTLKEIPKTKRQISNISRGGYVVYGDSSDPHAIIIATGSEVSISVSAAEQLKIKGINIRVISMPCQEVYERQTLEYKNKCIPKNFANILAIESGIGESWYKFIGGKGAMISMESFGLSGTGSDVMNHFGFSISNIKKNINKLIKKNR

SEQ ID NO: 109899 - protein, 144 aa, Unknown
  Bacterial polypetide isolated from the Sargasso Sea
MTIKYKDLSNAIRFLSIDAVEKAKSGHPGLPMGMADVVTVLFKNFLNFNPKNPSWLNRDRFVLSAGHGSMLLYSCLYLSGYKSISLKDIQNFRQLNCICAGHPEYEKNSGIETTTGPLGQGISNAVGFAIAEEILKSRYGKKMF

SEQ ID NO: 109900 - protein, 96 aa, Unknown
  Bacterial polypetide isolated from the Sargasso Sea
MSQNLNSSSIPHENMANAIRFLSIDAVEKAKSGHPGLPMGMADVATILFTKFLKFNSAAPKWHDRDRFVLSAGHGSMLLYSLLYLTGYRDMTIKDI

SEQ ID NO: 109901 - protein, 437 aa, Unknown
  Bacterial polypetide isolated from the Sargasso Sea
NQKKKFESVGWQVLEIDGHNESEITEAINLSKEETNMPSLIIAKSTIGKFAPNKQNTSSIHGAPLGGEEMELFLNEVNWNGDVFEHDDDVYEYFAEKRLEDEKKYEDWKSNLDKKLKNDESFKIMWKQFCTNELIFPENFEISDGATRATGGSYLNLIGAKNKFVLGGSADLAASTKQVVSDKTYSSENRNGQNIDFGIREHSMAAIVNGINLHSKLFAYGSTFLVFSDYMRPSIRLASLMNLNSSYVFTHDSIYLGEDGPTHQPIEHLMSLRLIPGLDVIRPSNSIEILHSYRYLFSNTKNPKVLSLTRQNLEYLDFSIDYAEFLNGGYVVSDGKDITIFASGSEVNLAFDLKDRLNKYSVKIVSVPVLNKLTPENALSLNTTKFTFTLELGKSIGWGDYIGDITESISIESFGSSAPQNDLSKYFKIDVESIEKR

SEQ ID NO: 109902 - protein, 259 aa, Unknown
  Bacterial polypetide isolated from the Sargasso Sea
NSNSSGNYVYYGVREFGMNAIMNGMSLHGGIIPYGGTFLVFMDYGRNAVRMSALMGIRTIYVFSHDSVALGEDGPTHQPIEHLTTLRSTPNMHTWRPASLIETAVAWKKALTNKDGPTSIILSRQNLNNFSIENISDVERGGYFIKHSPDSTINLIATGSEVDTVLEAAKILEESGTKTNIVSVPCLEELEKDQSIYQKIFSQNTSNIVVECSHPNSWYKHTDKVIGIDTFGESGKGNDLMEHFGFTPSKVAKKISQLV

SEQ ID NO: 109903 - protein, 384 aa, Unknown
  Bacterial polypetide isolated from the Sargasso Sea
MSLAGHLKLKNLIVFFDNNKISIDGSTSLSVSDNYKKRFEGYGWNFLDINGHNEKQISKAISKASKANKPTIISCKTLIGFGSPNKSGKASSHGSPLGEEEIALVRKKLKWKYGPFEIPEDILNAWRKIGEKGAELEKNWSETLNKKNPKIKSELKNTYIDSNLEDLEDLIKKEKIKYFDSKPNMATRQCSSVAIESILTILPQLIGGSADLSGSNNTKTNNSKVISSKNFDGNYIHYGVREHGMASVMNGLALYSGLIPYGGTFLIFSDYCKPSIRLAALMGLKVIYIFSHDSIGLGEDGPTHQPIEQLNGLRAIPNLNVFRPADINETLECWEIALKSKNTPSAIALSRQKLPYINPKFSEKNECKNGAYVVKMNSHDYKVT

SEQ ID NO: 109904 - protein, 525 aa, Unknown
  Bacterial polypetide isolated from the Sargasso Sea
MINFGSHLVNHKTFVMAGDGDLMEGISQEAISLAGHLKLKKLTLLFDSNNISIDGPIAKTDSTNQIKRFEASGWNVTEINGHNTKEIFEAIKDSNSSDKPTMILCRTVIGYGSPNKQGTASVHGSPLGQDEYNLTRKELGIKYSKFQIPAEILKMWRSVGIKGQKQKKIWNDKLQKSPPSVKKEFKDQIKKFIHPSVFAKLNELKAELKEEPQSIATRKASEICLKYINDATAITLGGSADLTGSNNTKTDNINPVTAEAYGRYIHYGIREHAMGAIMNGVSLHGGFIPYGGTFLIFSDYCRPAIRLAALMQQQVIYVLTHDSIGLGEDGPTHQPIEQLSSLRAIPNVSVFRPGSAIETVECWELVLENKTGPSLLALSRQNLNEFRQSLDLESKYNPCKNGAYCVASNSKKPEFAIFASGSEVNIALEAYQELSRLNREVSVYSVPCLDYFNSQDNDFRERIISNATCNIVVEAGVSQGWDKILRDNGIFIGMSTFGASGPYKDLYKNFNITKERIIDVILNSK

SEQ ID NO: 109905 - protein, 76 aa, Unknown
  Bacterial polypetide isolated from the Sargasso Sea
MIQIGLGEDGPTHQPIEHLVTLRATPNLYNWRPADLKETAVAWKESILSKSPSCLILSRQSLPQVKMSEDKISNIS

SEQ ID NO: 109906 - protein, 218 aa, Unknown
  Bacterial polypetide isolated from the Sargasso Sea
MVFSDYMRPSIRLAALMELNSVFIFTHDSIYLGEDGPTHQPIEHLMSLRLIPGVDVIRPSNSEEIVYSYQYIFSKTNNPKALVLTRQNIDYLETNTSYEDFKKGYYELAHGTDATIFASGSEVNLAMEVSKLLKGKSIQIISTPILNKLKPELIDSIGINNKVFTIELGRSIGWQDYVGPVTKSFSIDSFGASAPIDQLEDNFNMEAKKISQQILDLL

SEQ ID NO: 109907 - protein, 355 aa, Unknown
  Bacterial polypetide isolated from the Sargasso Sea
MIKTYDEKYPDKSAELKRRIKGDLPDDFENSFKTFLSECDKNNMPMATRKCSKACLDFLVKELPELIGGSADLTPSNNTFSSSSSTFSNENPSGNHINYGVREFGMSAIMNGMVLHGGIKPYGATFLVFTDYARNAVRLSALMEIPSIFVYTHDSVALGEDGPTHQPVEHMVTLRSTPNLNSWRPADLVETAVAWNEAVKSKKTPTCLIFSRQGTSAISRTEDQLSLINKGGYLIDESDNSDITLIASGSEVQLIIDAAKELKNHSISANVVSMPSLDLFLQQSEEFQSSIINPDKPILVVECSHPNSWYRILNRKDKVIGIESFGESAPGSELLDHFGFNTENVVNSAKSLLND

SEQ ID NO: 109908 - protein, 183 aa, Unknown
  Bacterial polypetide isolated from the Sargasso Sea
MKVEHKQLANAIRFLSIDAVEEANSGHPGMPMGMADVATVLFKNFLKYNPKNPNWINRDRFILSAGHGSMLLYSLLYLTGYKSVTLNDIKNFRKLDSICAGHPEYHSNSGIETTTGPLGQGISNAVGFALAEEILKFKIGKKFIDHKTYVIAGDGCLMEGVSHEALSLAGHLKLKNLILLFDN

SEQ ID NO: 109909 - protein, 214 aa, Unknown
  Bacterial polypetide isolated from the Sargasso Sea
MKLRVIFIFSHDSIGLGEDGPTHQPIEQLEHLRAIPNLNVFRPADINETIECWEIALKSKSNPSAIALSRQKLPYVSEHNSGENMCSKGAYVLKKTSDNADISIIASGSEVEIALEAQEKLKDMNIDSKVISVPCYDLFQNQTNDYKNDILGKDTFKISIEASSQSNWKNVVGKSGVTLGLSTFGKSAPYKEIYKLFNLTSDEIVKTVKSRVKK

SEQ ID NO: 109910 - protein, 560 aa, Unknown
  Bacterial polypetide isolated from the Sargasso Sea
LKLRSLGVEATTGPLGQGVGMAVGMATVESMLRARFGELVDNADDLVGHYTYVVAGDGDFQEPVVLGSGSMAGHWGLSRLIVFYDSNNAQISGNVDRSDSTNYAQVFEGFGWHVQEIDGHNYDQICEAIEKAQVVDRPSLIIGTTTMAKGSANMEGDHETHGAPLPQEEINATKEQLGLPDESFYLPQEVIDFFQSRFSSLSDSVVKWNEDTNAALNNDKFQSLWNATILNKIEDLDYPEFENNSSLATRKAFGVTLDKFAEQLPSIIGGSADLEPSNYTGNFANTYGDFSKENRLGRNLAFGVREFPMAAAMNGMALHGGAIPFGGTFLVFADYERPALRLGAIQHCRVIHEFTHDSFWVGEDGPTHQPIEHAMALRAIPNFNVYRPADAKETAACFELTISQNNTPCALLLSRQGVPVLNKNLDFVIDGVSKGAYSILDCDNPELIFIATGSEVSLALEVAEKMSDKKIRVISMPCREIFEQQSDDYKNSIIPNRGTMKISMEAGITMGWEKYIGVNGLSIGIDHYGASAPGKDLSEEFGFTSEKVENKIRDHLSKLL

SEQ ID NO: 109911 - protein, 269 aa, Unknown
  Bacterial polypetide isolated from the Sargasso Sea
NFKGNYIHYGVIEHAMCGIMNGLALHSKLIPYGGTFLIFSDYCKPSIRLAAIMKLRVIYVMSHDSIGLGEDGPTHQPIEQLAGLRSIPNLNVFRPADTAETFECWDLATLSSKESPSIIAVSRQKVNPIRKEFTKENKCLAGAYEISRTKNEIDLTILATGSEVELAIEVSQKLAIEKIYSKVISMPCHELFDMQKKDYKYKILNETKYKISIEASTTDYWKKYIGENGKAFGIDSFGKSAPYKEIYEYFGLTSKNIVKKVKEMIGKKS

SEQ ID NO: 109912 - protein, 250 aa, Unknown
  Bacterial polypetide isolated from the Sargasso Sea
MSAIMNGMVLHGGIKPYGATFLVFTDYARNAVRLSALMGLPNIFVYTHDSVALGEDGPTHQPIEHIVTLRSTPNLNNWRPADLVETAVAWKNAVCSKITPTCLIFSRQGTSAIGRTQEQISAIEMGGYLLKEKKDNDITIVASGSEVQLALDAAKELENKSINVNVVSMPSLDIFLQQSSEYQKMVIDPDKPVLVVECAHPNSWYKILNRSDKVLGIETFGESAPGSELLEHFGFNKEKVIQAAKSLIDD

SEQ ID NO: 109913 - protein, 228 aa, Unknown
  Bacterial polypetide isolated from the Sargasso Sea
FSDYANLSIRLSALMQKRVIYVMTHDSIGLGEDGPTHQPIEQLSGLRSIPNLNVFRPADRVETIECWEHALKNSKTPSILSLTRQGLNPIRKSFTKINKCSLGAYEVLRTNNKINLTIFASGSEVNLAIETGHKLAKDKIYCKVISMPSMELFDQQSKLYKNKILNETKFKISIEAGSSDCWKKYVGSSGLTFGINEFGKSAPYKDIFKHFGLTVSNIVIKTKKMIGN

SEQ ID NO: 109914 - protein, 225 aa, Unknown
  Bacterial polypetide isolated from the Sargasso Sea
LYEASLRLAALMKINPIQIFTHDSIGLGEDGPTHQPIEQINMLRLIPNSYVFRPCDLKETIVCWREALKINDAPSFICLSRQNLPQISNKKLDSKKFKGAYVIYGPKINNDITIIATGSEVSLAVNVAVRIRGDGIIAKVISMPSTSVFEKQSKTFKNNLLKSKSSETFVIEAGSTMYWNKYTKYENIFGLDNFGASAPGNEVFRKFGLTTETVSSKIIRKIKTK

SEQ ID NO: 109915 - protein, 250 aa, Unknown
  Bacterial polypetide isolated from the Sargasso Sea
MSAIINGMVLHGGIKPYGATFLVFTDYARNAVRLSALMGIPSIFVYTHDSVALGEDGPTHQPIEHMVTLRSTPNLNSWRPADLVETAVAWNEAVKSKKTPTCLIFSRQGTSAISRTEDQLSLINKGGYLIDESENSDITLIASGSEVQLVIDAAKELKNHSISANVVSMPSLDKFLQQSEEFQSSIINPDKPILVVECSHPNSWYRILNRKDKVIGIESFGESAPGSELLEHFGFNIENVVNSAKSLLND

SEQ ID NO: 109916 - protein, 237 aa, Unknown
  Bacterial polypetide isolated from the Sargasso Sea
KDYSFGGTFLIFLDYCKPSLRLAALMKLRAIYILTHDSIGLGEDGPTHQPIEQLASLRATPNVKVFRPADLIETAEAWELALSNSKGPSVIALTRQKLPMIRKKYYAKNISAQGAYELKSNSKKPNISIFASGSEVEIALQLMAILEKKKKFVRVVSVPCMEQFKIQSKTYQKIIRGNSEINVSIEAGSNFGWSQICPENTLNIGMKDFGASAPYQKLYDFYGITAKKIFKLISKKI

SEQ ID NO: 109917 - protein, 407 aa, Unknown
  Bacterial polypetide isolated from the Sargasso Sea
MNNKDKTNPANEVSYSDMANAIRFLAVDAVEKANCGHPGMPMGAADFTTVLYSKFLKIDPQKPDWPDRDRIVLSAGHGSMLLYAVNHLIGYQDMTIEEIKNFRQLGSKTPGHPEYGHTLGVETTTGPLGQGISTAVGMAIAEKIQNAKYGDELVDHKTYVIASDGDLMEGISQEAISLAGHLKLSKLIVLFDDNNISIDGSIDLSDSTDQLMRFEASGWDVNRVDGHNHEDIELAIEEAINSNKPSLIACKTRIGFGSPSKEGKSSSHGAPLGAEDISEMKKNLNWDYKEFETPTDVKDAWRLIGLKNSSKREEWETRVSESKDKGTELLNDINGEISDELDKAINEIKKTFSEEKPNWATRKSSQEVLETINKVLTNTIGGSADLTGSNNTKTNNIEVISSDNFEG

SEQ ID NO: 109918 - protein, 231 aa, Unknown
  Bacterial polypetide isolated from the Sargasso Sea
IFSDYCKPSIRLSAMMGVQVIYVMTHDSIGLGEDGPTHQPIEHLSGLRAIPNLNVFRPADRLETIECWEHALNSLNTPSILSLTRQNLNPIRFKYSKTNKCSFGAYEVLRTNRRVELTILASGSEVNLAIDTSHKLAKKKIYSKVISVPCMELFDLQSKAYKDKILNETKLKISIEAGSKDCWKKYIGDFGMSFGIDKFGKSAPYNEIYKYFGLIASNIAIESIKLVKVKK

SEQ ID NO: 109919 - protein, 97 aa, Unknown
  Bacterial polypetide isolated from the Sargasso Sea
MNKLHNDLANCIRFLSIDAVQKANSGHPGMPMGMADVVTVLFKNFLRFNPKNPNWMNRDRFVLSAGHGSMLLYSLLFLTGYKSNSLNSIKNFRQLNS

SEQ ID NO: 109920 - protein, 436 aa, Unknown
  Bacterial polypetide isolated from the Sargasso Sea
MAGHLKLRNLIVFFDNNKISIDGSTSLSVSDNYKKRFEGYGWNFLEIDGHNEKKISQAITKASKSNKPTLISCKTIIGFGSPNKSGKASSHGSPLGDEEIALVRKKLRWNNKPFEIPEDILNAWRKIGERGAALEEKWQETLNKKSQKIKSELQENYIQSDLKDLKNLIIKEKTKYFDTKPSLATRQCSSAAIESISNILPQLIGGSADLSGSNNTKTNNSKVISSKNFNGNYIHYGVREHGMAAVMNGLALYSGFIPYGGTFLIFSDYCKPSIRLAALMGLKVIYIFSHDSIGLGEDGPTHQPIEQLNGLRAIPNLNVFRPADINETLECWEIALRNNNTPSVIALSRQKLPYINPSFSENNKCEKGAYVVNLTSHDSKVTLIASGSEVELALNVQNELKKNNVHSKVVSMPCQELFDKQSNDFKKDILDEDSLM

SEQ ID NO: 109921 - protein, 201 aa, Unknown
  Bacterial polypetide isolated from the Sargasso Sea
LGEDGPTHQPIEHVPSLRLIPGLDVWRPCDTLETAVAWKIATQKRKTPSALILTRQSLPQHNRSKEMTDNIQKGGYILIGGEDTEPDAIIIATGSEVQYAVNASNALQSEGYSIRVVSMPCVEIFEQQSDEYKESVVPHDHEKIMVIEASMASAWRGYAGRKGVVVGMESFGASAPAPELFKHFGFSDENVIEKLKAMINR

SEQ ID NO: 109922 - protein, 383 aa, Unknown
  Bacterial polypetide isolated from the Sargasso Sea
NWPDDPFNIPQEVYEDWDARNEGNQKEEDWNKIFEEYASENPELSSELKRLISGDLPDRIEDSIYSFIDEVQKDLPKMATRVSSQKVLNVLGSLIPELLGGSADLTGSNNTNWDGTKEIRANDFSGNYINYGVREFGMTGIMNGLVLHGGIKAYGGTFLTFLDYARNAVRMAALMKLQTILVYSHDSIGVGEDGPTHQPVEHLTSLRTTPNLETWRPCDTSETAISWLAALENTDKPTALILSRQGLPNFVRSKEQVDSIKKGAYILREPEVEPELIFIATGSEVELAMSVAEEVKDRTSVRVVSMPCSERFDSQSKDYKESVLGKGIKRVSIEASQTDWWRKYVGLEGDVIGMDSFGESAPGNILFEHFGFTKEQIISKLGL

SEQ ID NO: 109923 - protein, 344 aa, Unknown
  Bacterial polypetide isolated from the Sargasso Sea
MPSNNDLSTFSNWTEEDKDLFTVAVIKGLIMDTVRNANSGHTGGPMSSADFSYLLFSKYMNFDPDNSEWFNRDRFILSAGHESALLYTLLTLIGWLKIDDLQQFRQLHSKTPGHPEVEIEGVEATTGPLGQGVAMGIGMAVAEEKLRNIFSQKSNLKTDPISHYNYILASDGDMQEPVATGAAALAGHWGLSKVIMFYDSNDAQISGNVSRSDSSDYGTIFDGYGWHVQEINGHDHKQICSAIEKAQVVNKPSIIIGKTIMAYGAVEMEGDHETHGAPLPQNEINASKEKLGLPNEEFYLPAEVVSHFQSRFSTLRNNVSNWKSEVHQLNKNKEAESIWNLCID

SEQ ID NO: 109924 - protein, 443 aa, Unknown
  Bacterial polypetide isolated from the Sargasso Sea
MKNKFQKAITKASKSKKPTVISCKTIIGFGSPNKSGKASSHGSPLGDEEIALVRKKLKWNNRPFEVPKEILDEWRNIGYKGEQLENKWLETVNKKNPKIKNQLNDANEKLDLNGLENLIRQEKDKNFESKPSLATRQCSMAAIEKISAFLPKLIGGSADLSGSNNTKTNNSKIINSKNFNGNYIHYGVREHGMAAVMNGLALYGGIIPYGGTFLIFSDYCKPSIRLSALMGLKVIYVFSHDSIGLGEDGPTHQPIEQLTGLRAIPNLNVFRPADINETFECWEIALKSENTPSAIALSRQKVPYINPSNSKENKCEKGAYVVNLTSHESNVTLVASGTEVELALKVQDKLKENNIHSKVVSMPCMELFDKQPEDYRKDIIEENSLTITLEAGSVMSWQKYIKNKGANLGIDKFGESAPYKEVYKHFKLSEEDITNFIQKKLRE

SEQ ID NO: 109925 - protein, 108 aa, Unknown
  Bacterial polypetide isolated from the Sargasso Sea
MNKNNKDLSNAVRFLSIDAVQKANSGHPGMPMGMADVATVLFKNFLRFNPKDPSWINRDRFVLSAGHGSMLLYSLLYLTGYKSVSLNDIKNFRQLNSICAGHPEYHPN

SEQ ID NO: 109926 - protein, 226 aa, Unknown
  Bacterial polypetide isolated from the Sargasso Sea
MKPSIRLAALMNQRVVFVFTHDSIGVGEDGPTHQPIEHLASLRSIPNLTVIRPADSIETVAAWRSAILNTHGPTALILSRQSLPNLCTGDSIDLQPPSKGGYILKSSNNEPTVTIIATGSEVHLGVQVSELLENNNISSNVVSMPSWELFDQQSDEYKSTVIPKSSIKVSIEAASTFGWAKYVGENGISVGIDTFGASAPGQALFSHFGFEAKNICETIMSKLGPK

SEQ ID NO: 109927 - protein, 370 aa, Unknown
  Bacterial polypetide isolated from the Sargasso Sea
MENIGNKGERLENEWLETVNKKKPKIKSELNGVNEKLDLNGLENLIHQEKDKNFETKPSLATRQCSMAAIEKISAFLPELIGGSADLSGSNNTKTNNSKIINSKNFNGNYIHYGVREHGMAAIMNGLALYGSIIPYGGTFLIFSDYCKPSIRLSALMGLKVIYIFSHDSIGLGEDGPTHQPIEQLTGLRAIPNLNVFRPADINETFECWEIALKSENTPSAIALSRQKVPYINPSNSKENKCEKGAYVVNLTSHESNVTLVASGTEVELALKVQDKLKENNIHSKVVSMPCMELFDKQPEDYQKDILEENSLIFTLEAGSVVSWQKYIKNKGANLGIDKFGESAPYKEVYKHLKLSEEDITNFIQKKLRE

SEQ ID NO: 109928 - protein, 249 aa, Unknown
  Bacterial polypetide isolated from the Sargasso Sea
MELEKLRKLYPQHWEKANAIRVLTLDAVAAANSGHSGMPIGMADVATILFEKHLKFSTAQPNWPDRDRFILSAGHGSMLLYSVAYLCGYADFDIDQLKNFRQLGKKTAGHPENFLSDVIETTTGPLGQGIANSVGFAIAEESLRARFGRNIIDHHTFVIAGDGCLMEGVSQEAISLAGHLRLHKLIVFWDNNNITIDGTIDLTDSTDQKTRFEASGWEVIEIDGHDPEEIDSAISAAKKSEKPTMIACK

SEQ ID NO: 109929 - protein, 331 aa, Unknown
  Bacterial polypetide isolated from the Sargasso Sea
MFDNVTKSIRVLSAAAVERANSGHPGMPLGMADIGVVLYKNFLKVSNKNPDWINRDRFVFSAGHGSMLLYSLLHFNGFDISLDEIKNFRQLGSKTAGHPEKDSEIGIDTTTGPLGQGFANGVGLAVAERYLSSVFGEDIVDHHIYGIVSDGDLMEGISTEAAELAGLWKLGKLIYFFDDNNISIDGNVTQVSLTNQKEKFISMGWDVLEIDAHEENEIIGAVESAKNVSNKPTLIISKSTIGKYAPNKENTSGVHGSPLGENEFELFLENIEFSGDPFAHDSEIYSYFDDKRAEDNSKYDEWKANLESKLQSDKNFSKLWNQFNNLETPRG

SEQ ID NO: 109930 - protein, 448 aa, Unknown
  Bacterial polypetide isolated from the Sargasso Sea
VQEINGHDHKQICSAIEKAQVVNKPSIIIGKTIMAYGAVEMEGDHETHGAPLPQDEINASKEKLGLPNEEFYLPAEVVSHFQSRFSTLRNNVSNWKSEVHQLKKNKEIESLWNICIDKEMPELDLPEFEEDINLATRKAFGKTLDYFAEKIPNLVGGSADLEPSNYTGNFASKYEDFQKNNRSGRNFAFGVREFPMAGILNGIDLHGGLKSFGGTFLVFSDYERPALRLAAIQGLNVIHEFTHDSFYVGEDGPTHQPIEHAMSLRAIPNFQVFRPADAKETAVCFQIALQFNNTPSALLLTRQGVPVSSLKINSVIEGVQRGAYIVKEPENNPELVILATGSEVSLALEVAELINDRYIRVVSMPCFELFEKQSEEYKKSVIPDRGCMKISIEAGITHGWERYIGINGFSIGINHYGLSSPHKDLAKEFGFTPEKVKKRIIDHLNNLL

SEQ ID NO: 109931 - protein, 208 aa, Unknown
  Bacterial polypetide isolated from the Sargasso Sea
YIMTHDSIGLGEDGPTHQPIEQLSGLRSIPNLNVFRPADTMETYECWQLALESYKSPSILALTRQKINQVRKELANKNLCSYGAYEIFRSNSHIQLTIMASGSEVSLALDVSHKLATENIYSKVISVPCQEIFEQQNSNYKNKILKETNLNITIEAGSTDSWKKYIVNKGLNFGIEDFGRSAPYKEIYNFFGLTVENIVNETKKLIKN

SEQ ID NO: 109932 - protein, 358 aa, Unknown
  Bacterial polypetide isolated from the Sargasso Sea
DIYDYFKEKREKDNEELRKWEENFKNKYQEDSSFKDNWDLLTSEDFPSFDGVSGEKYASRILGSKILESLSESTNSIIGGSADLAASTKQIIDESYFSSTNYKGRSLEFGIREHAMGAITNGITLHSNLIGYASTFLVFSDYMRPSIRLASLMDINSVFIFTHDSIYLGEDGPTHQPVEHLMSLRLIPNVDVIRPSNSIEMNHSYRYAFSDSKNPKVLSLTRQDLDYLDFDVKYEEFLKGGYVVSDGDDFTIVASGSELEIAFKIKAALLEYSVRIVSVPILNKLSNMKNEEINELLKNKHVFPIELGRSIGWESYLGRLTKTFSIDTFGESAPIEDLEKNFGFDIPSITKEIIKYLN

SEQ ID NO: 109933 - protein, 404 aa, Unknown
  Bacterial polypetide isolated from the Sargasso Sea
SDGRPTLVCFRTKIGFGSPHKEGTAGAHGSALGEEEVALTRKALDWDTPAFEIDKEIYEAWDGKEKGQKSQNSWEDLFEGYVEKHAEKSAEFIRRMKCELSDSWEGVINQAITDEQSVSLESETRKSSQKAITILADAMPELFGGSADLTGSNNTKGDGNRESQHINYGVREFAMTAMTNGMLLHGGFRPYSGTFLVFMEYARNAVRLAALMKIPNIFVYTHDSVMVGEDGPTHQPVEQLTNLRTTPNLSTWRPCDTVETLVAWKMAIKSSSKPTALVFSRQKLPAQSRTPVQVEAILRGGYVLHEPSIPVSSIVVACGSEVQVAVEAASRLETENVGLRVVSMPCVDRFVEQDKDYQDSILPPSIRARVAVEAAHPDYWRRFVGLDGAVVGIDRYGVSAPGKE

SEQ ID NO: 109934 - protein, 386 aa, Unknown
  Bacterial polypetide isolated from the Sargasso Sea
KDEEIKETKKILGIPEDETFWVPDDVSEYYREVGARNEETRKKWYKTAPKQGEKSELWETLSGSGLISDWQKSLPLWEQGDNVATRKASNECIQSLMDFMPGLIGGGADLTGNTGTSISNFGVQSAEEPEGRQIFFGVREHAMGAISNGIALHGSLFPVTGTFLVFSDYMRGAVRLAALSNAKSVFVWSHDSVAVGEDGPTHQPVEHAASLRSIPNLDVFRPADANETSSAWELAVTHEGPTAMLLTRQDTPVITSSKNTDGVSKGAYIIRESTTEIALTIIATGSEVSLACTTANDIEKELDLGVRVVSMPCMERFERQTIEYQKSIIIPTIPSISIEAGSTYGWSKWADTTIGIDSFGTSAPGDVALTEFGIKSELFKWQQKIY

SEQ ID NO: 109935 - protein, 574 aa, Unknown
  Bacterial polypetide isolated from the Sargasso Sea
LSVGHTCMLIYSILYLCGYLKMDDLKNFRKLGSLTPGHPEIETPGVDASTGPLGQGVGMGIGMALAEKASSNSPLKRFTYILAGDGDLQEPIALGASTLAGHWKLSNLVMFYDKNDIQIAGNTSRVDSTDYAKLYDAMGWHVQEIDGHNHDEIRLSLKNAQSSDKPSIIIGKTIIAKGSYSLEHSPKSHGSPFSEDEIKLTKEKLEIPQDSFFCNEDIIGHFQRNFDSLNDKIALIDNEFEKDNQNLSQMFESLSVPDFGDNPMATRQAFGLSLDEFAEKFQHIIGGSADLDGSNCTTNFASSYDDFSSSNPKGRNIAFGVREFPMGAIMNGIALYGNHFPFGGTFLVFSDYVRSAIRLSAIQKLHVMYEFTHDSIFVGEDGPTHQPVEHTMSLRNIPNLLVFRPADALETFYCFKTIMKNQKNPSAILLTRQKLPKLNISLDKIEEGVNKGAYILHEEDNPDAILFATGSEAHLAVEICSGINKKIQIINLPCWELFEKQDKQYVSSIMSSNCRKRISLEAGITTGWQKFTGIDGLNIGINEFGASAPGKDVAKHLGFVKEKIASLIENYINE

SEQ ID NO: 109936 - protein, 414 aa, Unknown
  Bacterial polypetide isolated from the Sargasso Sea
SPNKSGTADVHGAPLGDEELKKTREALGWNYKPFEVPQEVYDFWNFREEGASFNDSWNKLIKDYEKKYPNDSSELHRRIDGYLPNNFQESFESFLNECNSNNLSMATRKASKACLDFFVKEMPELIGGSADLTPSNNTFSSFSSTFSNENASGNHINYGVREFGMSAIMNGMALHGAIKPYGATFLVFTDYARNAVRLSALMKLSNIFVYTHDSVALGEDGPTHQPIEHMVTLRSTPNLNNWRPADLVETAVAWRSAVSSKKTPTCLIFSRQGTSAIKRTPDQISMIDMGGYLLEESDKLDITIVASGSEVQLALDAAKELKNDSINANVVSMPCLDIFLDQDKEYQNKIINPEKPILVVECAHPNSWYRILNRNDKVIGIETFGESAPGSELLNHFGFNTDNVIKTAKSLIND

SEQ ID NO: 109937 - protein, 200 aa, Unknown
  Bacterial polypetide isolated from the Sargasso Sea
GLGEDGPTHQPIEHLESLRSVPNLNVFRPADINETIECWEIALKSKTNPSAIALSRQKLPYVSEHKSGENKCSKGAYVLKGDMNKAKVSLIASGSEVEIALEAYEKLNNENIDAKVISVPCYDIFNKQEENYKKEILGENTFKISIEASTESGWKKVVGKDGVTLGMSTYGKSGPYKEVYKLFNLTSDEVVKIVKENVHK

SEQ ID NO: 109938 - protein, 208 aa, Unknown
  Bacterial polypetide isolated from the Sargasso Sea
IFVYTHDSVALGEDGPTHQPIEHMVTLRSTPNLNNWRPADLVETAVAWKEAVSSKSTPTCLIFSRQGTSPISRSTEQISNIQKGGYLLETNPDPHLTIVATGSEVQLAIDAANELKTDSIKANVVSMPSLDIFMQQKEDFQNSIIDPDKPILVVECSHPNSWYKILNRGDMVIGIESFGESAPGNELLKHFGFTKENVIDAAKSLIND

SEQ ID NO: 109939 - protein, 249 aa, Unknown
  Bacterial polypetide isolated from the Sargasso Sea
MFDNVTKSVRVLSAAAVEKANSGHPGMPLGMADVGVAIYKNALKVSNKNPGWINRDRFVLSAGHGSMLLYSLLHFNGFDISIDDIKNFRQLGSVTAGHPEKDFQLGIDTTTGPLGQGFANGVGLAVAERYLSSVLGKDIIDHYIYGIVSDGDLMEGISTEAAELAGLWKLGKIIYFFDDNNISIDGNVTKVSITNQKNKFLSMGWDVLEIDGHQESEIIDAIKHAQKIADKPSLVIAKSTMENTLPIKQ

SEQ ID NO: 109940 - protein, 296 aa, Unknown
  Bacterial polypetide isolated from the Sargasso Sea
WNQRFEQYKSENPELADEFLASMEGNISNEMAHLDALIDELREDANVVATRKSSLVALNTLKEDQSNMIGGSADLTGSVCTYHDASKPITKDDHDGNYIFYGVREFGMSAIMNGIALHGGLIPYAGTFLTFSDYSRNAIRMAAMMELGVIHVLTHDSIGLGEDGPTHQPIEHVPSLRLIPGLDVWRPCDTLETAVAWKTATQKRNTPSALILTRQSLPQHNRSKEMTDNIQKGGYILIEGEDTQPDAIIIATGSEVQYAVNASNALQSEGHSIRVVSMPCVEIFEQQSDEYKESVV

SEQ ID NO: 109941 - protein, 242 aa, Unknown
  Bacterial polypetide isolated from the Sargasso Sea
MSESVNALRFLSIDAVQKANSGHPGMPMGMAEIATALWSNHLRHNPSNPRWFNRDRFVLSNGHGSMLLYSLLHLTGYNLTIEDIKDFRQLKSKTPGHPEYDIEIGVETTTGPLGQGIANGVGMAISEKILAAEFNEEDIKPIDHFTYVFLGDGCLMEGISHEACSFAGTHNLGKLICFYDQNGISIDGEIKHWFTDDSVKRFESYGWQTICVDGHNIEEIDKAISEAKIELNKPSMIFCKTT

SEQ ID NO: 109942 - protein, 127 aa, Unknown
  Bacterial polypetide isolated from the Sargasso Sea
MADAIRFLSMDAVQAANSGHPGMPMGMADVATILFKDFINIYPKKPDWPDRDRFVLSAGHGSMLLYALHYLLGYEDMPIENIKNFRQLNYNTAGHPEFGHAKGIETTTGPLGQGLATAVGMALSEKL

SEQ ID NO: 109943 - protein, 296 aa, Unknown
  Bacterial polypetide isolated from the Sargasso Sea
TICVDGHNIEEINNAISQAKETTDKPSMIFCKTTIGFGSPNKSGTADAHGAPLGDDEIIKTREALDWKYSEFELTDEIYNFWDAKEAGNNVNLDWDNLIKSYQEKYPEKSKELLRRIEGNTPENFESDFNQFLKDCDTNNSPMATRKASKACLDFFVKEMPELIGGSADLTPSNNTFSGSSSTFSNENPAGNHINYGVREFGMSAIMNGMVLHGGIKPYGATFLVFTDYARNAVRLSALMGLPNIFVYTHDSVALGEDGPTHQPIEHMVTLRSTPNLVNWRPADLVETAVAWKEAV

SEQ ID NO: 109944 - protein, 323 aa, Unknown
  Bacterial polypetide isolated from the Sargasso Sea
DEGAKKEKVWEDLLETYKQKYPEESNELERRFNSEMTHEFNERFDDFLSDCSLQEDPIATRKASQICLDHFCADLPELIGGSADLTGSNNTFSKHNTELTPDNPSGSHIYYGVREFGMVTIMNGMSLHGGIRPYGGTFLVFMDYARNAVRLSAMMSLPNIYVFTHDSIGLGEDGPTHQPIEHLVTLRATPNLYNWRPADLKETAVAWKESILSKSPSCLILSRQGLPQVKMSEDKIINISKGGYLVQKDEDAELNIISSGSELQLAIQAAKDLDQLGIKVNVVSMPCLDRFLEADLEYQNKVIQKDLPSIVVEAAHPNSWYKI

SEQ ID NO: 109945 - protein, 322 aa, Unknown
  Bacterial polypetide isolated from the Sargasso Sea
DSVKQANSGHSGMPMGMADIAEVLWQNHLIHNPENPDWFNRDRFVLSNGHGSMLIYGLLHLSGYDLSIQDLKDFRQLHSKTAGHPEFGITPGVETTTGPLGQGIANAVGMAIAEKTLASKFNTEKHKIIDHMTYVFTGDGCLMEGISHEACSLAGTLGLGNLVVLYDDNDISIDGNVEGWFTEDIPKRFESYGWEVIPNVDGHNFEEIDQAIIKSKSNADKPTLICCKTVIGKGSPNMSGTATAHGAILDPDEINLTRKELNWPNDPFDIPQEVYEDWDARNTGNQKEEDWNKILEEYISENPELSSELKRLIAGDLPDRIE

SEQ ID NO: 109946 - protein, 314 aa, Unknown
  Bacterial polypetide isolated from the Sargasso Sea
MHQSDPINTLRFLSIDAVQKANSGHPGMPMGMAEIATALWKNHLKHNPLNPTWFNRDRFVLSNGHGSMLLYSLLHLTGYKLSIKDIKDFRQLKSKTPGHPEYDIDIGVETTTGPLGQGIANAVGMAISEKILSAEFNKVDIKPIDHFTYAFLGDGCLMEGVSHEACSFAGTHNLGKLICFYDQNGISIDGEIHNWFTDESVKRFDSYGWQTICVDGHNIEEVNDAISQAKEELNKPTMIFCKTTIGFGAPNKSGTADVHGAPLGEDEIKNTREALDWKYPPFELPNDIYEYWDSKDIGADVNSKWDNLIENYIE

SEQ ID NO: 109947 - protein, 233 aa, Unknown
  Bacterial polypetide isolated from the Sargasso Sea
MANAVRALCMDAIEKAQSGHPGAPLGMADIAYTLWTKHLKHNPSNPGWFNRDRFVLSNGHGSMLLYALLHLTGYDLPIDELKRFRQLHSKTPGHPEYSYTPGVETTTGPLGQGLANAVGMAIAEKVLAAQFNKPEFSVVDHYTYCFAGDGCLMEGISHEACSLAGTLGLEKLIVFWDDNGISIDGEVRGWFTDDTQARFQAYGWQVSPTLTVMTMTPLITPFLEAKKSTGKPT

SEQ ID NO: 109948 - protein, 347 aa, Unknown
  Bacterial polypetide isolated from the Sargasso Sea
ETTTGPLGQGIANSVGFAISEEILKKKLGNDLINHKTYVLAGDGCLMEGISHEAMSLAGHLKLKNLVMLFDNNSISIDGPTDLAVSDNFKKRFEGYGWDYILINGHDEKEIFKALKNVQKAKKPTVISCKTKIGYGSPNKSGKATSHGSPLGLEEIELVRKALNWNNKPFNIPNKFLKEWRKIGQRCETQEKKWIKIFNKNKTKFKNLTKNSSISILKREKRNAILEPKNLATRKCSEMTLNALTNQNHNLIGGSADLAGSNNTKTKYQKIIKPGDFSGDYIHYGVREHGMSGIMNGIALYGNLIPYGGTFLIFSDYCKPSIRLSALMQKRVIYVMTHDSIGLERMA

SEQ ID NO: 109949 - protein, 205 aa, Unknown
  Bacterial polypetide isolated from the Sargasso Sea
MVAASVSLESLCVNSIRMLAVDAVNKSNSGHPGLPMGCAPMGYALWQNILNHNPNNPKWFNRDRFVLSAGHGCMLLYSLLHLTGYKSVSIEDIKEFRQWGSKTPGHPETFETEGVEVTAGPLGAGISNAVGLAIAETHLAAKFNKPDCNIVDHYTYVIMGDGCNQEGIASEACSLAGHLKLGKLIALYDDNQITIDGRTDVLLPK

SEQ ID NO: 109950 - protein, 297 aa, Unknown
  Bacterial polypetide isolated from the Sargasso Sea
MVAAPVSLDTLCINSIRMLAVDAVNKSNSGHPGLPMGCAPMGYTLWDKFLKHNPKNPKWFNRDRFVLSAGHGCMLLYALLHLTGYDSVSIDDIKQFRQWGSKTPGHPETFETPGIEVTTGPLGAGISNAVGLAIAEAHLAAKFNKPDAKVVDHYTYVIMGDGCNQEGVASEACSLAGHLKLGKLIALYDDNHITIDGRTNVSFTEDVLKRYEAYGWHVQHVAEGNTDVNAIAKAIEAAKAVTEKPSIIKVTTTIGYGSPNKSDTAGVHGAPLGEEEAALTRQQLGWDYGPFEVPQEA

SEQ ID NO: 109951 - protein, 305 aa, Unknown
  Bacterial polypetide isolated from the Sargasso Sea
KAIKSAQKSKKPTLISCKTKIGYGSPNKQGKASSHGAALGEDEVKLTRRKLKWNHKPFLIPKKILDEWRDSGQRSIGEYKKWNNNLNKLVSNKKNEFVRRINGKLPKELNRIFSDFKKECTNNPSAIATRQSSELVINKISPILPELIGGSADLTGSNNTRSKKMKTLNASNYKGEYIYYGIREHGMAAVMNGLSLHKGIIPFGGTFLIFVDYCKPSLRLAALMKKRAIYILTHDSIGLGEDGPTHQPIEQLASLRATPNVKVIRPSDTVETIEAWPIALNNKEGPTVIALTRQKTYSCEKKVYK

SEQ ID NO: 109952 - protein, 207 aa, Unknown
  Bacterial polypetide isolated from the Sargasso Sea
MSKISSSQSANALRILALDSVKQANSGHSGMPMGMADIAEVLWQNHLKHNPGNPDWFNRDRFVLSNGHGSMLIYGLLHLSGYDLSIQDLKDFRQLHSKTAGHPEFGITPGIETTTGPLGQGISNAVGMAIAEKTLASKFNTERHKIIDHMTYVFTGDGCLMEGISHEACSLAGTLGLGNLVILYDDNDISIDGNVEGWFTEDIPKRF

SEQ ID NO: 109953 - protein, 285 aa, Unknown
  Bacterial polypetide isolated from the Sargasso Sea
ADLTHSNYTDIKGETGSFQPHSPEKRYLHFGVREHAMAAVLNGIAYHNSGLIPYGGTFLVFADYMRGSMRLSALSELGVIYVLTHDSIGVGEDGPTHQPIETIPSLRAMPNMLVFRPGDGNETSGAYKLAIQNRKRPSALCLSRQGMPNQENTSIDKVALGGYVVSDCEGTPDLIFIGTGSELNLCIEASKELSSLGKKIRVVSMPCVELFEEQEESYKESVLPSSVKKRVVVEAAHSFGWHKYTGFDGICITMDRFGASAPGGECMKNFGFTVENVVIKTKEIL

SEQ ID NO: 109954 - protein, 319 aa, Unknown
  Bacterial polypetide isolated from the Sargasso Sea
NDLANCIRFLSIDAVQKANSGHPGMPMGMADVVTVLFKNFLRFNPKNPNWMNRDRFVLSAGHGSMLLYSLLFLTGYKSISLNSIKNFRQLNSICAGHPEYHPNSGIETTTGPLGQGIANSVGFAIAEEILKKKLGNDLINHKTYVLAGDGCLMEGISHEAMSLAGHLKLKNLVMLFDNNSISIDGPTDLAVSDNFKKRFEGYGWNYILINGHDEKEIFKALKNVQKAKKPTVISCKTKIGYGSPNKSGKATSHGSPLGLEEIELVRKALNWNNKPFNIPNKFLKEWRKIGQRCETQEKKWIKIFNKSKTKFKNLKKNSL

SEQ ID NO: 109955 - protein, 89 aa, Unknown
  Bacterial polypetide isolated from the Sargasso Sea
MFDDVTKSIRVLSAAAVERANSGHPGMPLGMADIGVVLYKNFLKVSNKHPDWINRDRFVLSAGHGSMLLYSLLHFNGFDISLDEIKNFR

SEQ ID NO: 109956 - protein, 216 aa, Unknown
  Bacterial polypetide isolated from the Sargasso Sea
MNKLHNDLANCIRFLSIDAVQKANSGHPGMPMGMADVVTVLFKNFLRFNPKNPNWMNRDRFVLSAGHGSMLLYSLLFLTGYKSISLNSIKNFRQLNSICAGHPEYHPNSGIETTTGPLGQGIANSVGFAIAEEILKKKLGNDLINHKTYVLAGDGCLMEGISHEAMSLAGHLKLKNLVMLFDNNSISIDGPTDLAVSDNFKKRFEGYGWDYILING

SEQ ID NO: 109957 - protein, 332 aa, Unknown
  Bacterial polypetide isolated from the Sargasso Sea
LYLTGYKSVSLEDIKNFRKLDSICAGHPEYHSNSGIETTTGPLGQGISNAVGFAIAEEVLKSKIGKKHIDHKTYVLAGDGCLMEGISHEALSLAGHLKLKNLILLFDNNSVSIDGPTNLAVSDNTKKRFESYGWNYLDINGHNEKQIFAALKKSQNSKKPIAISCKTTIGFGSPNKGGKASSHGSPLGQDEIKLVRKKLNWNYEPFKIPDRILNAWRDIGNKASISAEKSSSKNNGEKNNVIPSNVSEEIEELKKSYLKTMEPLATRKSSEKFLEIASKLSNLIGGSADLAGSNNTKTKNHKIIKPGKFNGNYIHYGVREHAMCGIMNGISL

SEQ ID NO: 109958 - protein, 303 aa, Unknown
  Bacterial polypetide isolated from the Sargasso Sea
MTLNALTNQNHNLIGGSADLAGSNNTKTKYQKIIKPGDFSGDYIHYGVREHGMSGIMNGIALYGNLIPYGGTFLIFSDYCKPSIRLSALMQKRVIYVMTHDSIGLGEDGPTHQPIEQLSGLRSIPNLNVFRPADRIETIECWEHALKSSKTPSILSLTRQGLNPIRKSFTNINKCSLGAYEVLRTNNKINLTIFASGSEVNLAIETSHKLAKDKIYCKVISMPSMELFDQQSKLYKKKILNETKFKISIEAGSTDCWKKYVGSSGLTFGINDFGKSAPYKDIFKHFGLSVSNIAIKTKKMIRN

SEQ ID NO: 109959 - protein, 233 aa, Unknown
  Bacterial polypetide isolated from the Sargasso Sea
MISHHELASAVRMLAVDAVEAAQSGHPGMPMGMADIATVLWRKHLRHNPCHPDWWNRDRFVLSNGHGAMLQYALLHLTGYDLCMRELERFRQWQSKTPGHPEHGHTPGVETTTGPLGQGLANAVGMALAESMLAAQFNKDNFCVIDHYTYVFAGDGCMMEGISHEACALAATWGLGKLVVFYDDNGISIDGAIDSWMTESVAQRFVAYGWHVSEPIDGHDPEAIDAAILAARA

SEQ ID NO: 109960 - protein, 202 aa, Unknown
  Bacterial polypetide isolated from the Sargasso Sea
MNKLHNDLANCIRFLSIDAVQKANSGHPGMPMGMADVVTVLFKNFLRFNPKNPNWMNRDRFVLSAGHGSMLLYSLLFLTGYKSISLNSIKNFRQLNSICAGHPEYHPNSGIETTTGPLGQGIANSVGFAIAEEILKKKLGNDLINHKTYVLAGDGCLMEGISHEAMSLAGHLKLKNLVMLFDNNSISIDGPTDLAVSDKFKK

SEQ ID NO: 109961 - protein, 249 aa, Unknown
  Bacterial polypetide isolated from the Sargasso Sea
MVAIMNGMSLHGGIRPYGGTFLVFMDYARNAVRLSAMMSLPNIYVFTHDSIGLGEDGPTHQPIEHLVTLRATPNLYNWRPADLKETAVAWKESILSKSPSCLILSRQGLPQIKMSEDKIINISKGGYLVQKDEDAELNIISSGSELQLAIQAAKDLDQSGIKVNVVSMPCLDRFLEADLEYQNKVIQKDLPSIVVEAAHPNSWYRILGRDDLVIGMTTFGESAPAKMLFEEFGFTAGNIVSKAKKLLNK

SEQ ID NO: 109962 - protein, 306 aa, Unknown
  Bacterial polypetide isolated from the Sargasso Sea
DIVQNFLKFNPKNPNWLNRDRFVLSAGHGSMLLYSLLYLTGYKSISLKDIKNFRQLNSICAGHPEYTPNSGIETTTGPLGQGIANAVGMAIAEEILKEKIGKNIINHKTYVLTGDGCLMEGISHEAMSIAGHLKLKNLVMLFDNNSISIDGPTSLAVSDNFKKRFESYGWDYILIDGHNEKQISKALKKVQKAKKPTVISCKTVIGFGSPNKSGKETAHGSPLGEDEIKLVRKKLKWNHPPFVVPKKILDEWRKIGIRGIKEAENWNKKNKYKKIFQTSFSKDFLKEKQNAINKSEAMATRKSSEK

SEQ ID NO: 109963 - protein, 274 aa, Unknown
  Bacterial polypetide isolated from the Sargasso Sea
KIKTIKEMNILATRKSSELTLSAFMKNSNTLVGGSADLAGSNNTKTKHHKIIKANDFSGNYIHYGVREHAMCGIMNGLALHSKFIPYGGTFLIFSDYCKPAIRLAAMMKQRVIYVMTHDSIGLGEDGPTHQPIEQLTGLRAIPNLNVMRPADRTETIECWELALKSLNKPSILSLTRQNLAPVRKKYSKKNRCASGAYEISRTNNKIKLTILASGSEVNLAIDTSHKLAKHKIYSKVISVPSLELFKLQSKPYKNKILNESRYKVSIEAGSTEP

SEQ ID NO: 109964 - protein, 215 aa, Unknown
  Bacterial polypetide isolated from the Sargasso Sea
LSALSELGVIYVLTHDSIGVGEDGPTHQPIETIPSLRAMPNMLVFRPGDGNETSGAYKIAIQNRKRPSALCLSRQGMPNQENTSIDKVALGGYIVSDCEGTPDLIFIGTGSELNLCIEASKEIANLGKKTRVVSMPCVELFEEQEESYKESVLPSSVTKRVVVEAAHSFGWHKYTGFDGICITMDRFGASAPGGECMKNFGFTVENVINKTKEIL

SEQ ID NO: 109965 - protein, 282 aa, Unknown
  Bacterial polypetide isolated from the Sargasso Sea
LVRKKLKWRYEPFKIPVELLNEWRKIGKRASKRAQKNRVDFSNFKNLNSFKKLIEKAKSEYFKNTKSIATRKSSEIFLNIIAKLPFLIGGSADLAGSNNTKTKDHKIIKPGNFSGNYIHYGVREHAMCGIMNGIALHSSLIPYGGTFLIFSDYCKPSIRLAAMMKQRVIYVFTHDSIGLGEDGPTHQPIEQLTSLRSIPNLNVFRPSDTIETFECWQLALESKNTPSVISLTRQSVSPIRLKNTLKNESSFGAYEVLRTSSIITVTILATGSETSLANDGRS

SEQ ID NO: 109966 - protein, 307 aa, Unknown
  Bacterial polypetide isolated from the Sargasso Sea
VLSAGHGSMLLYSLLYLTGYKSIKIEDIKKFRQLNSICAGHPEYHPNSGIETTTGPLGQGIANSVGFAIAEEILKKRLGKNIINHKTYVLAGDGCLMEGISHEAMSLAGHLKLKNLIMLFDNNSISIDGPTNLAVSDDYEKRFKSYGWNYILINGHNNKQIYNALNKAQSSKKPTVISCKTKIGFGSPNKSGKASSHGSPLGADEINLVRKNLGWSYKPFEIPKKILNEWRVIGKKGSKIEIRWNKNFIKHKSKFKNIVKNNFSSSINKQKREAIKNSQTLATRKSSEIFLTAILKNKNTLIGGSAD

SEQ ID NO: 109967 - protein, 250 aa, Unknown
  Bacterial polypetide isolated from the Sargasso Sea
HTAGHPELDLELGIETTTGPLGQGITNAVGMALAESILASKFNKGDHSIVDHFTYVFLGDGCLMEGISHEACSLAGTLNLSKLICIYDDNGISIDGEVYDWFDEDVCARFKSYGWHVIEDVDGHDAEAISKAITEAKASDKPSLIDCKTVIGFGSPNKAGTADTHGAPLGDEEIANVRESLGWEHGRFEIPDEIKNAWNCSEKGHSAENDWNERFEQYKSENPELADEFLASMEGNIINEMAHLDALIDE

SEQ ID NO: 109968 - protein, 176 aa, Unknown
  Bacterial polypetide isolated from the Sargasso Sea
MGDQAVSRRDCANAIRALSMDAVQKANSGHPGAPMGMADIAEVLWRDFMVHNPRNPNWFNRDRFILSNGHGSMLIYSLLHLTGYDLSIQDLQNFRQLNSKTPGHPEYGYTPGVETTTGPLGQGLANAVGMALAERTLAAQFNREGHVIVDHFTYVFVGDGCLMEGISHEACSLAGT

SEQ ID NO: 109969 - protein, 192 aa, Unknown
  Bacterial polypetide isolated from the Sargasso Sea
MKIDNKDLANSIRFLSVDAVQRANSGHPGMPMGMADVATILFKNFIKFDPANPSWINRDRFILSAGHGSMLLYSLLYLTGYKSVSLKDIKNFRQLNSICAGHPEFEQNSGIETTTGPLGQGISNAVGFALAEEILKAQYGKKIINHKTYVLAGDGCLMEGISHEALSLAGHLKLKNLILLFDNNSISIDGPT

SEQ ID NO: 109970 - protein, 276 aa, Unknown
  Bacterial polypetide isolated from the Sargasso Sea
AGVHGSPLGDEEIKIVRELFGWDHKPFYIPQHIIKAWYKSGSKNSHVRKQWTNNLNKLSEKKKEILLQSISGEIPTKLKNKFNNFKKTIINDQPTIATRKSSELSLTVVNKNIPYTIGGSADLTGSNNTLTPELGIFSPENPEGRYIHYGIREHAMAAAMNGISLHGGLIPYGGTFLAFTDYARGAIRLSSLMKIRVIYVMTHDSIGLGEDGPTHQPIEHLAILRATPNMLVFRPADTIETAETWEIALESKDTPSTIALSRQNLPTVRKKHSLKN

SEQ ID NO: 109971 - protein, 317 aa, Unknown
  Bacterial polypetide isolated from the Sargasso Sea
LGMADIAEVLWRKHLRHPPKNPKWFDRDRFVLSNGHGSMLLYSLLHLTGYDLTIKDLKDFRQLKSKTPGHPEYGITPGVETTTGPLGQGIANAVGMALAEKILANLLNSKRTNVIDHFTYCFLGDGCLMEGISHEAMSFAGVHELNKLICFYDSNGISIDGEISDWYKDDISLRCKAYGWNVIDNIDGHNREEIDEAISLSKKSKKPTMIVCKTHIGYGAGNKQDSESSHGAALGSEIVKELRENLDWPYSEFEIPHEIYADWDASDIGQKYEDDWNEKVLTLKSENPEKGELLERLLNEELPEKFDSNFSAFLEEI

SEQ ID NO: 109972 - protein, 309 aa, Unknown
  Bacterial polypetide isolated from the Sargasso Sea
HLRLKNLIMLFDNNSISIDGPTSLAVSDNYKNRFESYGWNYIDIDGHNEKQIYNAIKTARKSIKPTVISCKTKIGFGSPNKSGKASSHGSPLGPEEIELVRKKLNWPFKPFEIPKNILKEWRKIGLKGSKTEIKWKKDFSRNKNSFKELFNNNFSLSILKQKKDVIANLKPLATRKSSEAVLNSLFKLKNNLIGGSADLAGSNNTKSKLNKVINAKNFDGDYIHYGVREHAMCGIMNGLALHSNLIPYGGTFLIFSDYCKPSIRLSALMKQRVIYVMTHDSIGLGEDGPTHQPIEQLSGLRSIPNLNIL

SEQ ID NO: 109973 - protein, 315 aa, Unknown
  Bacterial polypetide isolated from the Sargasso Sea
DGHDFEQIDQAILKAQKETSKPSLICCKTVIGFGSPNKSGTAGIHGSPLGDDEIEITRKALNWIYEPFEIPEEIYQEWNAIEKGETSQNDWINVVSEYLDKFPEDYKEFMRRIANLTPKDFSERFESLINECLQNDASMATRKASQVCLDHFCEYLPELLGGSADLTGSNNTFSKHNSELTPDNGGGSHIYYGVREFGMVAMMNGMCLHGGIRPYGGTFLVFMDYARNAVRLSAMMQLPNIYVFTHDSIGLGEDGPTHQPIEHLVTLRSTPNLYNWRPADLTENSVAWKNAIVCDSPTCLILSRQSLPKLPLTKD

SEQ ID NO: 109974 - protein, 278 aa, Unknown
  Bacterial polypetide isolated from the Sargasso Sea
MLLYSLLYLTGYNSISLRDIKNFRKLNSICAGHPEYIPNSGIETTTGPLGQGIANAVGMAIAEEILKEKIGKNIINHKTYVLAGDGCLMEGISHEALSLAGHLKLKNLIMLFDNNSISIDGPTSLAVSDNFKKRFESYGWDYILINGHNEKQISKALKKVQKAKKPTVISCKTIIGFGSPNKSGKESSHGSPLGEDEIKLVRKKLKWNHPPFEVPKKILEEWRKIGSRGIKDSEKWYKKNKNKIVGQSSFLKDFLKEKQNVFNKPDVIATRKSSEKII

SEQ ID NO: 109975 - protein, 251 aa, Unknown
  Bacterial polypetide isolated from the Sargasso Sea
MNNISSSQSANALRILALDSVKQANSGHSGMPMGMADIAEVLWQNHLIHNPGNPNWFNRDRFVLSNGHGSMLIYGLLHLTGYDLSIQDLKDFRQLHSKTAGHPEFGITPGVETTTGPLGQGIANAVGMAIAEKTLASKFNTEKHKIIDHMTYVFTGDGCLMEGISHEVCSLAGTLRLGNLVVLYDDNDISIDGNVEGWFTEDIPKRFESYGWEVIPSVDGHNFEEIDQAIIKSKSSADKPTLICCKTVIGK

SEQ ID NO: 109976 - protein, 290 aa, Unknown
  Bacterial polypetide isolated from the Sargasso Sea
DNNSISIDGPTNLAVSDDHEKRFKSYDWNYLKINGHNFKEITQALKKAQKSKKPIAISCKTTIGYGSPNKGGKASSHGSPLGEDEIKLVRKKLNWPHKTFEIPKNLIDQWRSIGKKASIKSERNKRNFSLRFNKNIINAEIDRAKSNYLKKLQPIATRKCSEKFLEIVSKLPNLIGGSADLAGSNNTKTKNHKIIQSNDFSGNYIHYGVREHAMCGIMNGISLHSELVSYGGTFLIFSDYCKPSIRLAAMMKLKVIYVFTHDSIGLGEDGPTHQPIEQLTSLRSIPNLNV

SEQ ID NO: 109977 - protein, 298 aa, Unknown
  Bacterial polypetide isolated from the Sargasso Sea
GTGIETTTGPLGQGIANAVGFAIAEEKLKNNLGKKIINHKTYVLAGDGCLMEGISHESMSLAGHLKLKNLIMLFDNNSISIDGPTSLAVSDNYKKRFESYGWDYILINGHNYKDIYKALKKVQNAKKPTVISCKTKIGFGSPNKSGKASSHGSPLGVDEIKLVRKKLNWRYKPFLIPKKIINSWKQIGKNGIKLENKWNKENKNNKNKIKKIFETKFINTLKKEKIEALKNNKSLATRKSSELALMALTKNNKILVGGSADLAGSNNTKTKFQNVVKPGELGGNYIHYGVREHAMCGI

SEQ ID NO: 109978 - protein, 247 aa, Unknown
  Bacterial polypetide isolated from the Sargasso Sea
KNTTQTSKKLSHLANCIRFLSIDAVQKANSGHPGMPMGMADIATVLFKNHLKFDPNDPKWIDRDRFVLSNGHGSMLLYSILYLTGYKDITLNDIKNFRQLGSPTAGHPEFGELEGIETTTGPLSQGLSNAVGFAMAESKLSSILGKDCIDHYTYVFAGDGCLMEGLSHEACSLAGHLKLNKLIVFFDDNSISIDGPISLSSSDNVEGRFQSYGWNILKINGHDHEEINEAINKAKISEQPTIISCQT

SEQ ID NO: 109979 - protein, 165 aa, Unknown
  Bacterial polypetide isolated from the Sargasso Sea
MNKLHNDLANCIRFLSIDAVQKANSGHPGMPMGMADVATVLFKNFLRFNPKNPNWMNRDRFVLSAGHGSMLLYSLLFLTGYKSISLNNIKNFRQLNSICAGHPEYHPNSGIETTTGPLGQGVANAVGFAIAEEILKKKLGNDLINHKTYVLAGDGCLMEGISHEA

SEQ ID NO: 109980 - protein, 258 aa, Unknown
  Bacterial polypetide isolated from the Sargasso Sea
IYYGVREFGMVTIMNGMSLHGGIRPYGGTFLVFMDYARNAVRLSAMMNLPNIYVFTHDSIGLGEDGPTHQPIEHLVTLRATPNLQNWRPADLKETAVAWKESILSKSPSCLVLSRQALPQTKISEERISDISNGGYLVQKHEDAELNIISSGSELQLAVQAAKDLEQTGIKVNVVSMPCLDRFLEADLEYQSEVIQKDLPSIVVEAAHPNSWYKILGRDDLVIGMTTFGESAPAKMIFEEFGFTTENIVSNAKKLLNK

SEQ ID NO: 109981 - protein, 276 aa, Unknown
  Bacterial polypetide isolated from the Sargasso Sea
MACPHVEDGNHDVKGITEAIEKAKLVTNKPSIIKISTTIGYGSPNKSDTAGIHGAAVGEEEASLTREFLNWEYPPFEIPNEVYEHFRKSIKKGEELEKNWDAKFDEYENNYPSEGAELKRMLNGQLPENWDLDLPSYSPEDKGLATRKHSQICLGALGPNLPELIGGSADLTHSNYTDIKGETGSFQSHSPEKRYLHFGVREHAMAAVLNGIAYHNSGLIPYGGTFLVFADYMRGSMRLSALSELGVIYVLTHDSIGVGEDGPTHQPIETIPSLRA

SEQ ID NO: 109982 - protein, 197 aa, Unknown
  Bacterial polypetide isolated from the Sargasso Sea
MNKIYKELANCIRFLTIDAVQKANSGHPGMPMGMADVATVLFKDFLKFNPRNPSWINRDRFILSAGHGSMLLYSLLYLTGYKSVSLNDIKNFRQIESVCAGHPEFHPNSGIETTTGPLGQGIANAVGFAISEEILKKQLGKKNINHKTYVLAGDGCLMEGISHEALSLAGHLKLKNLILLFDNNSISIDGPTNLAVS

SEQ ID NO: 109983 - protein, 184 aa, Unknown
  Bacterial polypetide isolated from the Sargasso Sea
MSNAVRFLSIDAVEKANSGHPGMPMGMADVATVLFKNFLNFNPRNPDWINRDRFVLSAGHGSMLLYSLLYLTGYSSINLKDIKNFRQLDSICAGHPEFHPGTGIETTTGPLGQGIANAVGFAVGEEILRGRFGKKIFNHKTYVLAGDGCLMEGISHEALSLAGHLRLKNLIMLFDNNSISIDGP

SEQ ID NO: 109984 - protein, 208 aa, Unknown
  Bacterial polypetide isolated from the Sargasso Sea
MVAASVSLESLCVNSIRMLAVDAVNKSNSGHPGLPMGCAPMGYALWQNVLNHNPNNPKWFNRDRFVLSAGHGCMLLYSLLHLTGYKSVSIEDIKEFRQWGSKTPGHPETFETEGVEVTAGPLGAGISNAVGLAIAETHLAAKFNKPDCNIVDHYTYVIMGDGCNQEGIASEACSLAGHLKLGKLIALYDDNQITIDGRTDVSFTEDVL

SEQ ID NO: 109985 - protein, 282 aa, Unknown
  Bacterial polypetide isolated from the Sargasso Sea
LTGNFKNNYPPGFKNHKDQINQSIEKAIKNYLKNLNPIATRKSSEMFLELITSLPNLIGGSADLAGSNNTKTKKHEIIKPGNFKGNYIHYGVREHAMCGIMNGLSLHSGLIPYGGTFLIFSDYCKPSIRLAAMMMQRVIYIFTHDSIGLGEDGPTHQPIEQLASLRSIPNLNVFRPADTIETFECWQLALEFNKSPSVIALSRQKINPVRKEYSKINKCSKGAYEVMRTGDNIKLILLSSGSETNLACEVSHKLATENIYSKVISMPCQELFDKQDGNLQKT

SEQ ID NO: 109986 - protein, 140 aa, Unknown
  Bacterial polypetide isolated from the Sargasso Sea
MSEEITIDTVRDVELANAIRMLSVDAVEKANSGHPGMPMGMADVATVLFKKFLKFDANCPGWKNRDRFVLSAGHGSMLLYSLLYLTGYNDINIEDIKNFRQLGAKTAGHPEYGELEGIETTTGPLGQGLANAVGMAISER

SEQ ID NO: 109987 - protein, 322 aa, Unknown
  Bacterial polypetide isolated from the Sargasso Sea
DVLLWVIALWQNILNHNPNNPKWFNRDRFVLSAGHGCMLLYSLLHLTGYKSVSIEDIKEFRQWGSKTPGHPETFETEGVEVTAGPLGAGISNAVGLAIAETHLAAKFNKPDCNIVDHYTYVIMGDGCNQEGIASEACSLAGHLKLGKLIALYDDNQITIDGRTDVSFTEDVLKRYEAYGWHVQHVEDGNHDVKGITEAIEKAKLITNKPSIIKISTTIGYGSPNKSDTAGIHGAAVGEEEAALTREFLNWEYPPFEIPDEVYSHFRKSINKGENLEKDWNSKFEEYQKKYLSEGAELKRMLEGQLPENWDSDLPSYSPDDKG

SEQ ID NO: 109988 - protein, 290 aa, Unknown
  Bacterial polypetide isolated from the Sargasso Sea
DEINRATEKAQQETGKPSMICCKTTIGFGSPNKSGTAGVHGSPLGDDEIEITRKELNWEHAPFEIPEDIYDAWNAKDQGSKKEEAWKNLLKIYKEKYPKESDELERRFNSELPHDFNERFDDFLRDCLSQEDPIATRKASQICLDHFCADLPELIGGSADLTGSNNTFSKHNTELTIDNPGGSHIYYGVREFGMVTIMNGMNLHGGIRPYGGTFLVFMDYARNAVRLSAMMNLPNIYVFTHDSIGLGEDGPTHQPIEHLVTLRSTPNLHNWRPADLKETAVAGKNPSYQN

SEQ ID NO: 109989 - protein, 272 aa, Unknown
  Bacterial polypetide isolated from the Sargasso Sea
KSSESIINSLVKNNNTLIGGSADLAGSNNTKTKNHEIIKPGNFNGNYIHYGVREHAMCGIMNGLALHSKFIPYGGTFLIFSDYCKPSIRLAAMMKQQVIYVMTHDSIGLGEDGPTHQPIEQLSGLRAIPNLNVFRPADRIETIECWEHALKSTKTPSILSLTRQNLNPIRNKYSNTNKSSLGAYEVLRTNKKIKLTILASGSEVNLAIEVSHKLAKDRIYSKVISVPCMELFESQSGNYKNKILNETKLRISIEAGSSDCWKKYVGDFGMTL

SEQ ID NO: 109990 - protein, 287 aa, Unknown
  Bacterial polypetide isolated from the Sargasso Sea
NFLNKQNKILANAVRFLSIDAVQKANSGHPGMPMGMADVVTILFKNFLKFNPKNPNWLNRDRFVLSAGHGSMLLYSLLYLTGYKNISLKNIKNFRQLNSICAGHPEYKANSGIETTTGPLGQGIANSVGFAIAEKILKKKIGKDIINHKTYVLAGDGCLMEGISHEAMSLAGHLKLNNLVMLFDNNSISIDGPTSLAVSDNFKKRFESYGWNYLLIDGHNEKEIFYALKKSQISKKPTVISCKTKIGYGSPNKSGKASAHGSPLGEDEIKLVRKKLNWKHKKLKYQE

SEQ ID NO: 109991 - protein, 302 aa, Unknown
  Bacterial polypetide isolated from the Sargasso Sea
ATYRTQFPAEAAEFERMLRGELPEGWDKDLPTSGPDEKGLATRKHSQICLGALGPNLPELIGGSADLTHSNYTDIKGETGSYQPETPEKRYLHFGVREHAMAAILNGIAYHDSGLIPYGGTFLVFADYMRGSMRLSALSELGVIYVLTHDSIGVGEDGPTHQPIETIPSLRAMPGMLVFRPGDANETSGAYKLAIQNRKRPSALCLSRQGMANQANSSIDKVAKGGYVLEDCDGTPELILIGTGTELDLCVQAAKQLMEAGKKVRVVSMPCVELFDEQSDAYKGEVLPNAVRKRMVVEAAES

SEQ ID NO: 109992 - protein, 136 aa, Unknown
  Bacterial polypetide isolated from the Sargasso Sea
MFDDVTKSIRVLSAAAVERANSGHPGMPLGMADIGVVLYKNFLKVSNKHPDWINRDRFVLSAGHGSMLLYSLLHFNGFDISLDEIKNFRQLGSKTAGHPEKDFEIGIDTTTGPLGQGFANGVGLAVAERYLASVFG

SEQ ID NO: 109993 - protein, 314 aa, Unknown
  Bacterial polypetide isolated from the Sargasso Sea
MIPNYEKSCVNTIRFLAADAVEKAKSGHPGAPMGMADMAFVLWNQFLRYDPDDPDWKNRDRFVLSAGHASMLLYSLLHLAGYKLSMDELKNFRQWNSLTPGHPEYGLTPGVECTTGPLGSGFSNAAGMALGAKMMGSRFNSNDISLIDSRIFVLCSDGDMQEGIASETASWAGHLGLGNLIALYDSNDITIAGDAGLAMSEDVGKRFEAYGWHVQHCDGHNHDEIAVCLEESLSVATKPSLIVAKTIIGKGAPTKEGTAGSHGAPLGPEEIEAAKLASGWNDKPDFHVPDEVREVFAERKKELKLQHQQWEGKL

SEQ ID NO: 109994 - protein, 281 aa, Unknown
  Bacterial polypetide isolated from the Sargasso Sea
ICAGHPEYHPKTGIETTTGPLGQGIANAVGFAIAEEVLKKKLSKNLINHKTYVLAGDGCLMEGISHEAMSLAGHLKLKNLVMLFDNNNISIDGPTSLAVSDNFKKRFESYGWDYVLIDGHNENQIYRALKRVQNAKKPTVISCKTKIGFGSPNKSGKSSSHGSPLGLEEIKLVRKVLKWKYKPFEIPNKLLREWRAIGRKGQLGEKKWNKFIKKQTKKLNLIKKNNFKNVLNSEKKLAIKEPKSLATRKCSELTLNALTNSNNNLIGGSADLAGSNNTKTK

SEQ ID NO: 109995 - protein, 306 aa, Unknown
  Bacterial polypetide isolated from the Sargasso Sea
EREPDIGIETTTGPLGQGITNAIGMAMAEKILAAAFNKPDYEIVNHRTWVFTGDGCLMEGISHEACSLAGTWNLGKLICIYDDNGISIDGEIDGWFTDDTAARFKSYGWQVIDKVDGHDADAISSAIDEAIKNTNNPTLICCKTQIGFGSPNKAGTASSHGAPLGEDEIERTKEKLGWKHEAFEIPQDIREMWDDSEKGEKLEKSWEDLFANYSKHYPDLAEEFNRRINRNLPENWEEISKNAINEINHQAIDLATRQSSHLSLNKLGDSLPEMIGGSADLTGSNLTKHDASVVIDETNSDGNYIY

SEQ ID NO: 109996 - protein, 273 aa, Unknown
  Bacterial polypetide isolated from the Sargasso Sea
PVTKDDHDGNYIFYGVREFGMSAIMNGMALHGGLIPYAGTFLTFSDYSRNAIRMAAMMELGVIHVLTHDSIGLGEDGPTHQPIEHVPSLRLIPGLDVWRPCDTLETAVAWKIATQKRKTPSALILTRQSLPQYNRSKEMTDNIQKGGYILIGGEDTQPDAIIIATGSEVQYAVNASNALQSEGYSIRVVSMPCVEIFEQQSDEYKESVIPHDHEKIMVIEASMASAWKGYAGRKGVVIGMEGFGASAPAPELFKHFGFSDENAIEKLKAMINR

SEQ ID NO: 109997 - protein, 281 aa, Unknown
  Bacterial polypetide isolated from the Sargasso Sea
KKGLKIEHLWNKNFSKHKQKYNNNTKNKFASSILRQKKEAIKNSKTLATRKFSEQFLSTILKEKNTLIGGSADLAGSNNTKTKLHKVINSNNFDGNYIHYGVREHAMSGIMNGLALHSNFVPYGGTFLIFSDYCKPSIRLSAIMKQRVIYVMTHDSIGLGEDGPTHQPIEQLSGLRSIPNLNVFRPADQTETIECWDIALKNKKTPSVLALTRQNLKPIRNNFTKKNKCSMGAYEVLRTGKKIKLTILASGSEVNLAIETSHNLAKQKIYSKVISMPCQEI

SEQ ID NO: 109998 - protein, 256 aa, Unknown
  Bacterial polypetide isolated from the Sargasso Sea
GVREFGMTAIANGISLHGGFLPYTSTFLMFVEYARNAVRMAALMKQRQVMVYTHDSIGLGEDGPTHQPVEQVASLRVTPNMSTWRPCDQVESAVAWKYGVERHDGPTALILSRQNLAQQDRTAEQLANIARGGYVLKECAGQPELIFIATGSEVELAVAAWDKLTAEGVKARVVSMPSTDAFDKQDAAYRESVLPKAVSARVAVEAGIADYWFKYVGLNGAIVGMTTFGESAPAEQLFEEFGFTVDNVVAKAKALL

SEQ ID NO: 109999 - protein, 313 aa, Unknown
  Bacterial polypetide isolated from the Sargasso Sea
QLTLEGFGPLLPELIGGSADLAGSNLTLWSGSKGISRDEADGNYIYFGVREFAMAALGNGLALHGGLIPYSATFLVFSDYARNALRMAALMKIRQIFVFTHDSIGLGEDGPTHQPVEHTASLRLIPGMSLWRPCDAVETAVAWHCAIERNDGPTSLALSRQNLPHQVRDSAQIRNIARGGYTLIDCEGEPEAIIIATGSEVALATDAVTLLKEKGCRVRVVSMPSTDVFDSQDDSYRQSVLPSTVKARVAVEAGVTDGWLKYVGFEGAVVGLDRFGESAPADEAFKYFWLHSRECRTAGRIADLDEGVKMPLR

SEQ ID NO: 110000 - protein, 310 aa, Unknown
  Bacterial polypetide isolated from the Sargasso Sea
SNQIARFKASGWHTQSVMGHNFDQISKAIENAKKTNKPSFIACKTIIGFGSPNLAGTEKTHGAPLGDDEVKKVKEELNWKNNPFEVPKDILNSWRSSVDRGSKIRKEWEDRFNKSPKKNKFIKNNSNYLPQVFDKNLKSHIQKLKLEKPKLATRQASLEFLKILSSNVDNIAGGSADLTGSNLTKTPDMNSVKPKKFKANYIHYGIREHMMGAVMNGIALHKGFVTYGGTFLVFSDYMRSSIRLSALMKTKVIYVLTHDSIGLGEDGPTHQPIEHLAMLRATPNLNVFRPADAVETAEAWELALKYDGPS

SEQ ID NO: 110001 - protein, 204 aa, Unknown
  Bacterial polypetide isolated from the Sargasso Sea
MSKQYKELADCIRFLSIDAVQKANSGHPGMPMGMADVATVLYKNFLNFNPKQPNWINRDRFVLSAGHGSMLLYSILYLTGYKSVSINDIKNFRQLDSICAGHPEYHANTGIETTTGPLGQGVSNAVGFAISEEILKKKFGKSKINHKTYVLAGDGCLMEGISHEALSLAGHLKLKNLILLFDNNSISIDGPTSLAVSDNHEKRL

SEQ ID NO: 110002 - protein, 236 aa, Unknown
  Bacterial polypetide isolated from the Sargasso Sea
EVEGWFTDNTPQRFESYGWQVIPDVDGHDADAIRAAVEQARANTEQPTLICCKTIIGFGSPNKQGKEDCHGAPLGDDEIALTREALGWQHGPFEVPSDIYAAWDAKEKGAAAEKAWEEKFAAYEKAEPELAAEFKRRMAGELPADFSEKAQAYIQECQDKGDTIASRKASQNTLNAYGPLLPELMGGSADLAGSNLTIWSGCKGVSKEDASGNYIYYGVREFGMAAIMNGIALHGG

SEQ ID NO: 110003 - protein, 148 aa, Unknown
  Bacterial polypetide isolated from the Sargasso Sea
MNKLHNDLANCIRFLSIDAVQKANSGHPGMPMGMADVATVLFRSFLRFNPKNPDWMNRDRFVLSAGHGSMLLYSLLFLTGYKSISLNSIKNFRQLNSICAGHPEYHPNSGIETTTGPLGQGIANAVGFAISEEILKKKLGNNLVNHKT

SEQ ID NO: 110004 - protein, 276 aa, Unknown
  Bacterial polypetide isolated from the Sargasso Sea
MSNTIRVLSMDAVQKANSGHPGMPMGMADVSTILFKYFLKFNPKNPSWINRDRFVLSAGHGSMLLYSLLYLTGYKSVKLNDIKNFRQLNSICAGHPEFVENSGIETTTGPLGQGISNAVGFALAEEILKKKIGKDIINHKTYVIAGDGCLMEGISHEAMSLAGHLKLKNLIMLFDNNSISIDGPTSLAVSDNFKKRFESYGWNYIKINGHNENEIFKALKKVQNAKKPSVISCKTKIGYGSPNKAEKASSHGSPLGVEEIKLVRKELGWNYKPFQV

SEQ ID NO: 110005 - protein, 252 aa, Unknown
  Bacterial polypetide isolated from the Sargasso Sea
VREFGMASIMNGITAHGGFRCYGATFLMFMEYARNAVRMSALMKLPTIYVFTHDSIGQGEDGPTHQPIEQLTNLRTTPNLVTWRPADLTETAVAWKSALTSTSSPSALVFSRQNLRQFQRNPEQISLISKGGYILKDCGGAPDIVLIATGSELQLACDTAEQLSAAGKKVNVVSMPSTTLFDQQSEFYRDSVLPDQAKLVAIEAAHPDFWYKYVGKKGLIIGISSFGESAPGPALLEYFGFNAEIIAAKILA

SEQ ID NO: 110006 - protein, 295 aa, Unknown
  Bacterial polypetide isolated from the Sargasso Sea
MLKTIIYSLGGSADLAGSNNTKTKNHKIIRPGNFNGNYIHYGVREHAMCGIMNGLALHSKFIPYGGTFLIFSDYCKPSIRLAAMMKQQVIYVMTHDSIGLGEDGPTHQPIEQLSGLRSIPNLNVFRPADRLETIECWEHALKSSKTPSILSLTRQNLNPVRNKYSNINKCSLGAYEILRTNKNIKLTILSSGSEVNLAIEISHKLAKDKIYSKVISVPCMELFNSQPDNYKNKILNETKMKISIEAGSSDCWKKYLGNFGMTFGIDVFGKSAPYKDIYKYFGLTSSNIVRELKKE

SEQ ID NO: 110007 - protein, 299 aa, Unknown
  Bacterial polypetide isolated from the Sargasso Sea
MTVAHADMANAIRFLSADAVQQANSGHPGMPMGMADVATVLFTKYLKFDASDPNWPDRDRFVLSAGHGSMLIYSLLYLTGYEAMTVDQLRNFRQLGSITAGHPEYGHAPGVETTTGPLGQGLTTAVGMALAERMMNARFGDDAVDHHTYVIAGDGCLMEGISHEAVSLAGALKLAKLIVLFDDNDICIDGPTNMAVIDDQPARFAASGWHVQSIDGHDKDAVATAIEAAQADDRPSMIACKTVIGRGAPNKEGSASTHGAPLGDEEITLARKAMGWPHLPFEVPQDVLSAWRQAGARGG

SEQ ID NO: 110008 - protein, 290 aa, Unknown
  Bacterial polypetide isolated from the Sargasso Sea
LGEDEIKLTRRKLKWDHKPFIIPKRILDEWRTSGQRSIVEYKKWNSNLNKLVLNKKNEFLRRLNGKLPKELNKIFSDFKKECINNPSVIATRQSSELVINRISPKLPELIGGSADLTGSNNTRSKKMKTLNAANYKGEYIYYGIREHGMAAVMNGLALHKGIIPFGGTFLIFVDYCKPSLRLAALMKQRAIYILTHDSIGLGEDGPTHQPIEQLASLRATPNVKVLRPSDTVETIEAWQIALNNKEGPTVIALTRQKLVPARKKYTSKNLSEFGAYELKNNSKKPQVSIY

SEQ ID NO: 110009 - protein, 291 aa, Unknown
  Bacterial polypetide isolated from the Sargasso Sea
KVFQIWENYEKDQFTIAVLKGLVMDATRKANSGHPGGPLSCADFAYILYHDYLKFDPRNPDWFDRDRFILSGGHMSMIQYSILSLIGWLNIDDIKNFRQLNSKTPGHPEVEIPGVECTTGPLGQGFAMGAGMAHAEAFLRNLFGKTNQKAFNLVDHYTYVLASDGDLQEPVSLGTASLAGHLGLSRLIVFYDSNEAQISGNTNRSDSTDYKMIFEGFKWHVQEIDGHNHSEIREAIEKAKKSEKPSVIIGKTIMAKGTANMEGDHNTHGAPLSEEEIAESNINLITMKIYV

SEQ ID NO: 110010 - protein, 236 aa, Unknown
  Bacterial polypetide isolated from the Sargasso Sea
MNKLHNDLANCIRFLSIDAVQKANSGHPGMPMGMADVVTVLFKNFLRFNPKNPNWMNRDRFVLSAGHGSMLLYSLLFLTGYKSISLNSIKNFRQLNSICAGHPEYHPNSGIETTTGPLGQGIANSVGFAIAEEILKKKLGNDLINHKTYVLAGDGCLMEGISHEAMSLAGHLKLKNLVMLFDNNSISIDGPTDLAVSDNFKKRFEGYGWNYILINGHDEKEIFKALKNVKKQKNQL

SEQ ID NO: 110011 - protein, 277 aa, Unknown
  Bacterial polypetide isolated from the Sargasso Sea
IRFLSIDAVQKANSGHPGMPMGMADVVTVLFKNFLKFNPKDPDWLNRDRFVLSAGHGSMLLYSLLYLTGYKSIKLDDIKNFRQLNSICAGHPEYHPKSGIETTTGPLGQGISNAVGFAIAEEIQKKKNGKNIFNHKTYVLAGDGCLMEGISHEALSLAGHLKLKNLILLYDNNSISIDGPTSLAISDNHKKRFDSYGWNFFEIDGHDEKQIFKALKKAQNSKVPTAISCKTIIGYGSPNKSGKASVHGSPLGKEEVALVRKKFKWNYKPFEIPKKYF

SEQ ID NO: 110012 - protein, 261 aa, Unknown
  Bacterial polypetide isolated from the Sargasso Sea
PDWINRDRFVLSAGHGSMLLYSLLYLTGYKSITLNDIKNFRQLNSICAGHPEYHPNSGIETTTGPLGQGIANAVGFAIAEEILKKKLGKKIINHKTYVLAGDGCLMEGISHEALSLAGHLKLKNLILLFDNNSISIDGPTNLTVSDNFKKRFNSYGWNYIEIDGHNEKQIFNALKKAQTSKIPSAISCKTIIGYGSPNKSGTASVHGSPLGKDEIALVRKKLKWNYKPFEIPKKILDEWRKIGKQACKRFKGMKIKKNKII

SEQ ID NO: 110013 - protein, 275 aa, Unknown
  Bacterial polypetide isolated from the Sargasso Sea
LRFNPKDPSWFNRDRFVLSAGHGSMLLYSLLYLTGYKSVSIDDIKNFRKLDSICAGHPEYHLNSGIETTTGPLGQGISNAVGFALAEEILKKKLGKKKIDHKTYVLAGDGCLMEGISHEALSFAGHIKLKNLILLFDNNSISIDGPTNLAVSDNTKKRFESYGWSYLEIDGHNDKQIFTALKKAQNSKKPFAISCKTTIGYGSPNKSGKASSHGSPLGTDEVKLVRKKLKWNYEPFKIPEKILSEWRKIGESASSKAEKNKSYEPEFNIFNDEDY

SEQ ID NO: 110014 - protein, 141 aa, Unknown
  Bacterial polypetide isolated from the Sargasso Sea
MVAAPASLDTLCINSIRMLAVDAINKSKSGHPGLPMGCAPMGYALWDKFLKHNPKNPKWFNRDRFVLSAGHGCMLLYALLHLTGYDSVSIDDIKQFRQWGSKTPGHPETFETPGVEVTTGPLGAGISNAVGLAIAESHLAA

SEQ ID NO: 110015 - protein, 325 aa, Unknown
  Bacterial polypetide isolated from the Sargasso Sea
ASSHGSPLGEEEIKLVRKKLKWKYEPFKIPAELLSEWRKIGKKASQKAQKNKINFSNLKNLDSYKKLVVKEKIKYSKNLKPIATRKSSEIFLNIMAKFPNLIGGSADLAGSNNTKTKDHKIIKPGNFSGNYIHYGVREHAMCGIMNGIALHSELIPYGGTFLIFSDYCKPSIRLAAMMKQQVIYVFTHDSIGLGEDGPTHQPIEQLTSLRSIPNLNVFRPSDTIETFECWELALESKNTPSVISLTRQSVNPIRLENFLKNKSSLGAYEVLRTGDNISVTILATGSETGLANDVGHKLATDGIYSKIISMPCQKIFDHQSEEYKK

SEQ ID NO: 110016 - protein, 288 aa, Unknown
  Bacterial polypetide isolated from the Sargasso Sea
IIGFGSPNKSGKASSHGAPLGDDEIKLVRKKLNWKHDPFQVPVELLNSWREIGNRGEKIEDEWNSALKKKNTKIQDEYKRLLKGDLPISLDKIFGDEKLKYFQSKPKMATRQCSSSVINSISNDLPELIGGSADLSGSNNTKTDKSKVITSKNFNGNYIHYGVREHAMAGVMNGLALYGGIIPFGGTFLIFSDYLKPSLRLSAIMNLRVIYIFSHDSIGLGEDGPTHQPIEQLEHLRAIPNLNVFRPADINETLECWEIALKSKNNPSAIVLSRQKLPYVSEHKSGEN

SEQ ID NO: 110017 - protein, 274 aa, Unknown
  Bacterial polypetide isolated from the Sargasso Sea
ENISTRDSSGIVLNKLSEDSSLFIGGSADLAGSTKTYINSSTSINSSDYSGVNMHYGVREHAMGGISNGLALSGFIPFAGTFLIFSDYMRNSIRLSALSELQVLYILTHDSIGLGEDGPTHQPISQLMSLRLIPNLLVFRPADYFETIKCFEESLKNTNKPSVFALTRQGVPALTNNATSESNKGGYVLSGNLEETQDIILIGTGSEVQLCIEAQKELNKINITSRVVSMPCWELFEMQSDEYKNKVLPTGMKKRVSVEAGATLGWQKYIGDHG

SEQ ID NO: 110018 - protein, 172 aa, Unknown
  Bacterial polypetide isolated from the Sargasso Sea
MATKNTDLANILRVLAMDAVEEAKCGHPGMPMGMADIAEVLWRNHLIHNPNNPNWSNRDRFVLSNGHGSMLIYALLHLSGYDLNLDEIKNFRKLGSKTPGHPEYGITPGVETTTGPLGQGISNAVGMAIAEKVLADKFNTSNHNIVDHMTYVFTGDGCLMEGISHEACSLAG

SEQ ID NO: 110019 - protein, 300 aa, Unknown
  Bacterial polypetide isolated from the Sargasso Sea
LNRDRFVLSAGHGSMLLYSLLYLTGYKSVSLKNIKQFRQLNSICAGHPEYKSNSGIETTTGPLGQGISNAVGFAIAEKVLKEKIGKDLINHKTYVLAGDGCLMEGISHEAMSLAGHLKLNNLVMLFDNNSISIDGPTSLAVSDNFKKRFESYGWEYFLIDGHNEKDIFNALKKAQMSKKPTVISCKTKIGYGSPNKSGKASAHGSPLGEDEIQLVRKKLKWKYKKFEIPNNILNEWRKIGNKGIKIETRWNRIYKRKKNKIDKILKNNFNKSIKTEKIKATKERNSLATRKSSELTLSAL

SEQ ID NO: 110020 - protein, 290 aa, Unknown
  Bacterial polypetide isolated from the Sargasso Sea
EVKLVRKKLKWKFKPFQIPKNLLAEWRKIGEKANKNSKKKNIKVYKVINENRTFNRFNNSLNRVKHEYLKNLKPIATRKTSEMFLDVVSKLPNLIGGSADLAGSNNTKTKNHEIIKPGNFFGNYIHYGVREHAMCGIMNGIALHSNLIPYGGTFLIFSDYCKPSIRLAAMMKQRVIYIFTHDSIGLGEDGPTHQPIEQLTSLRSIPNLNVFRPADLLETFECWTLAIQNKNTPSVIALTRQGVAPVRFKNSNINHSAKGGYEILRTKKKIDLTILASGSETSLACDISHK

SEQ ID NO: 110021 - protein, 300 aa, Unknown
  Bacterial polypetide isolated from the Sargasso Sea
MSLDAVNNANSGHPGAPMGMADIATILWREFLKHNPNNPNWFNRDRFVLSNGHGSMLLYSLLHLTGYKLSIDDIKNFRQLDSITPGHPECDITEGVETTTGPLGQGLANAVGMAIAEKSLSAEYNKKGHEIVDHHTYVFAGDGCLMEGISHEACSLAGTLKLNKLIMFYDMNKISIDGDVNGWFTENVPSRFKSYGWNVIKGINGHDFVSIRKAIKQAKLEKNRPTIICCRTVIGYGSPKFQGTSQAHGAPLGHDEAEVIRKKLEWKYKPFEIPKDIYIKWNAKAKGKRYEDAWTLKVNK

SEQ ID NO: 110022 - protein, 267 aa, Unknown
  Bacterial polypetide isolated from the Sargasso Sea
MSKNLDLLTINTLRFLAVDAVQSANSGHPGLPLGAAPMAYVIWKKHLKHNPKNPNWYDRDRFVLSAGHGSALLYALIHLSGYDLSLNELRNFRQWDSKTPGHPEYGHTPGVETTTGPLGQGFANGVGMAMAERFLSKKYNKPDFNIIDHYVYGIVSDGDLMEGIASEAASIAGHLNLGKLIYLYDDNNITIDGSTDLAFTEDVSKRFESYNWHVQSVDDGNNIDLIDEAIKNAKRDDRPSLIKVKTIIGFGSPNEGTSSVHGSPLGE

SEQ ID NO: 110023 - protein, 294 aa, Unknown
  Bacterial polypetide isolated from the Sargasso Sea
VSFTEDVLKRYEAYGWHVQHVKDGNHDVKGITEAIERAKSITDKPSIIKISTIIGYGSPNKSDTAGIHGAAVGEEEATLTREFLNWEYPPFEIPQEVYAHFRKSINKGENLEKEWDSKFEEYQKKYPSEGAELNRMLKGQLPEDWDSDLPSYTPDDKGLATRKHSQICLGALGPNLPELIGGSADLTHSNYTDIKGETGSFQPHSPEKRYLHFGVREHAMAAVLNGIAYHNSGLIPYGGTFLVFADYMRGSMRLSALSELGVIYVLTHDSIGVGEDGPTHQPIETIPSLRAMPN

SEQ ID NO: 110024 - protein, 241 aa, Unknown
  Bacterial polypetide isolated from the Sargasso Sea
QLEEKWRKKFTQYKKLYPKLHKELSRRIQNKLPSGIDRTLTKMIKTNNKSMATRKSSQVTLENIGPLLPELIGGSADLKESNLVFWQESKAISKKDFTGKYIHYGVREFGMSAISNGISLHGGLRPYASTFLIFSEYAKNAIRMSAIMHQPVIYVFTHDSIGLGEDGPTHQAIEQMASLRLIPGMSVWRPADLSETAVAWKSGLIKDNGPTSLILSRQTLPEIKRSVRQFRDISKGGICYL

SEQ ID NO: 110025 - protein, 297 aa, Unknown
  Bacterial polypetide isolated from the Sargasso Sea
YNLSKDAINDTIEKVKANYLKTLEPLATRKCSEKFLEIVSKLPSLIGGSADLAGSNNTKTKNHKIIKPNDFSGNYIHYGVREHAMCGIMNGIALHSGLIPYGGTFLIFSDYCKPSIRLAAMMKQKVIYVFTHDSIGLGEDGPTHQPIEQLTSLRSIPNLNVFRPADLIETFECWQKALESENSPSVIALTRQAIDPIRIKDTSENKSSFGAYEVLRSGNDIKATIIASGSETSLACDICHKLATENIYSKVISMPCQELFDQQSEGYKNKILNETEFNISIEASETHYWKKYTGAKG

SEQ ID NO: 110026 - protein, 297 aa, Unknown
  Bacterial polypetide isolated from the Sargasso Sea
SLNDIKNFRQLFSICAGHPEYHPNTGIETTTGPLGQGISNAVGFAISEEILKKQLGKKKINHKTYVLAGDGCLMEGISHESLSLAGHLKLKNLILLFDNNSISIDGPTSLAVSDDHEKRFKSYGWDFLRINGHDFKEISKALKKAQKSKKPIAISCKTTIGYGSPNKGGKASSHGSPLGDEEIKLVRKKLKWKYEPFKIPTELLNEWRKIGEKASQKAQKNNVNFSNFKSLNSFKKLIEKVKVEYTKNTKPIATRKSSEIFLSIIAKFPYLIGGSADLAGSNNTKTKDHKIIKPGDF

SEQ ID NO: 110027 - protein, 273 aa, Unknown
  Bacterial polypetide isolated from the Sargasso Sea
ITDLQANPAKIATRKASQNTLNAYGPILPELLGGSADLAPSNLTIWKGSSSLKEDHAGNYIHYGVREFGMTAIANGIAHHGGFVPYTATFLMFVEYARNAARMAALMKARQIMVYTHDSIGLGEDGPTHQAVEQLASLRLTPNFSTWRPCDQVEAAVGWKLAVERHDGPTALILSRQNLAQVERTPEQVQQIARGGYVLKDGGGKPDVILIATGSEMEITLLAAEKLTGEGRNVRVVSLPSTDIFDAQDETYRESVLPANVSARVAVEAGIAD

SEQ ID NO: 110028 - protein, 273 aa, Unknown
  Bacterial polypetide isolated from the Sargasso Sea
LIGGSADLAGSNNTKTKNHKIIKHNDFSGNYIHYGVREHAMCGIMNGISLHSDLIPYGGTFLIFSDYCKPSIRLAAMMKQKIIYVFTHDSIGLGEDGPTHQPIEHLASLRSIPNLNVFRPSDLIETFECWQLALESKNSPSVIALTRQGIKPVRKKSSIKNMSSAGAYEILRTGDNISVTIIATGSETSLACDVGHKLATDGIYSKIISMPCHELFDQQSESYKSKILDETNLVVSIEASETDYWKKYTGKNGINFGINDYGKSAPYKMIYNH

SEQ ID NO: 110029 - protein, 289 aa, Unknown
  Bacterial polypetide isolated from the Sargasso Sea
DYKNRFKSYGWNYILINGFNYREIYNALKKAQTSKKPTVISCKTKIGFGSPNKGGKASSHGSPLGIDEIKLVRKKLDWDYKEFKIPQKILTDWRKIGEKGVKKEKIWNKTFIKQKQKFKSIIKNKFSRSIIKQKKDSIKNFKTIATRKSSEEFLSAILKERNTLIGGSADLAGSNNTKTKLHKIINSSNFGGNYIHYGVREHAMSGIMNGLALHSNFIPYGGTFLIFSDYCKPSIRLSAMMKQKVIYIMTHDSIGLGEDGPTHQPVEQLAALRSIPNLNVLRPADQTET

SEQ ID NO: 110030 - protein, 203 aa, Unknown
  Bacterial polypetide isolated from the Sargasso Sea
FIGLGEDGPTHQPVEQIASLRVTPNMSTWRPCDQVETAVAWKYAVERQDGPTALILSRQNLAQQERTAEQLANITRGGYVLKDSHDQPELILIATGSEVSLAVAVWEKLTAEDINARVVSMPSTDVFDSQDAAYRESVLPAAVLSRVAIEAGIADSWFKYVGLRGVIVGMTTFGESAPAETLFERYGFTLANVMEKAKAVLNQ

SEQ ID NO: 110031 - protein, 320 aa, Unknown
  Bacterial polypetide isolated from the Sargasso Sea
CLQEGISHEAIEFAGHLKLSKLIVLWDDNEISIDGKTKLSTSSNQISRFKSCGWDAQKIDGHNYEEIFNAIEKAQKSKKPSLIACKTIIGFGSPNLAGTEKTHGAPLGSEEVKEVKKQLNWNFHSFEVPQSIIDDWKVVKIRGNKKRIDWNKRLESDSKKEKFNSFLSQSINEKFEKSFKTYVKKLKKEKPKLATRQASMNFLEILNSSVENTIGGSADLTGSNLTKTHKMKTVSAGRYKGNYIHYGIREHMMGAVMNGIALHRGFITYGGTFLVFSDYMRASIRLSALMKTKVVYVLTHDSIGLGEDGPTHQPIEHLAM

SEQ ID NO: 110032 - protein, 150 aa, Unknown
  Bacterial polypetide isolated from the Sargasso Sea
MIKNNKDLSNAIRFLSMDAVQKANSGHPGMPMGMADVATILFKNFLRFDPKDPGWINRDRFVLSAGHGSMLLYSLLYLTGYKSISLNDIKNFRQLDSICAGHPEYHPNSGIETTTGPLGQGISNAVGFALSEEILKKKVGKKIINHKTYV

SEQ ID NO: 110033 - protein, 323 aa, Unknown
  Bacterial polypetide isolated from the Sargasso Sea
GISHEACSLAGTLGLGKLVAFWDDNGISIDGEVEGWFSDDTPARFKAYGWHVISDVDGHDSDAVSAAISEAKSVTDKPTLICCKTIIGYGSPNKSGSHDCHGAPLGDDEIKASREFLGWTGDAFEIPEDIYAQWDGKAKGQELESSWDEKFAAYAKAFPELAAEYKRRTNSDLPADWAEKSQAYIEQLQANPANPASRKASQNALNAFGPLLPEFMGGSADLAGSNLTIWEGSKGLTADDASGNYVYYGVREFGMSAIMNGIALHKGFIPYGATFLMFMEYARNAVRMAALMKQPSIFVYTHDSIGLGEDGPLTTSRANASMR

SEQ ID NO: 110034 - protein, 261 aa, Unknown
  Bacterial polypetide isolated from the Sargasso Sea
ESNELERRFNSEMTHEFNERFVEFLRDCSLQEDPIATRKASQICLDHFCADLPELIGGSADLTGSNNTFSKHNTELTPDNPSGSHIYYGVREFGMVTIMNGMSLHGGIRPYGGTFLVFMDYARNAVRLSAMMSLPNIYVFTHDSIGLGEDGPTHQPIEHLVTLRATPNLYNWRPADLKETAVAWKESILSKSPSCLILSRQGLPQVKMSEDKIINISKGGYLVQKDENAELNIISSGSELQLAIQAAKDLDQLGIKVNVVS

SEQ ID NO: 110035 - protein, 302 aa, Unknown
  Bacterial polypetide isolated from the Sargasso Sea
SSSHGSPLGEEEIVLTRKNLNWESKPFEIPEKLLNEWRNFYLRNLSVKKEWNLKNKDIINSDRYKEIFDLNLSPETINSINKFKLKHYEEQTSCATRKASELSLEVFNVHIDNLIGGSADLTGSNNTKTKNMEQFNASNYNGNYIYFGIREHAMAAVMNGIALHGGLRPYGGTFLVFTDYCRPSIRLSALMGLPTIYIMTHDSIGLGEDGPTHQPVEHLASLRSIPNLNVIRPCDIIETIEAWQIALESSNPSIIVLTRQNLPLIRKEKTDENLLKKGAYCIKNYDTYHATILATGSEVEIA

SEQ ID NO: 110036 - protein, 208 aa, Unknown
  Bacterial polypetide isolated from the Sargasso Sea
MNKFNRTLANSIRALSMDAVQKANSGHPGMPMGMADVSTILFKYFLKFNPKNPSWINRDRFVLSAGHGSMLLYSLLFLTGYKSIKLNDLKNFRQLDSICAGHPEYVPNSGIETTTGPLGQGIANAVGFALAEEILKKKFGKDIINHKTYVIAGDGCLMEGISHEAMSFAGHLKLKNLIMLFDNNSISIDGPTSLAVSDNFKKRFESYG

SEQ ID NO: 110037 - protein, 276 aa, Unknown
  Bacterial polypetide isolated from the Sargasso Sea
ILSAGHGSMLLYAINYFLGYQDMKIDEIKNFRQLNSITAGHPEYGHAKGIETTTGPLGQGLANAVGMAISQKLFNKRFGSKIIDHYTYVIVGDGCLMEGISHEAIDLAGHLKLNKLIVFWDDNGISIDGDTLLATSTNQIERFKSCGWEVFAVDGHNFEQIENTIKLARKSNYPSLIACKTKIGYGSPNFQGTSKVHGAPLGESEIKLTRTNLNWEYEPFLYPIDALDAWKAISENSKEIYNNWKENINKSDLKKNFYDALNLSLSEKLYSELKKF

SEQ ID NO: 110038 - protein, 113 aa, Unknown
  Bacterial polypetide isolated from the Sargasso Sea
MTRKELANAIRALSMDAVQKANSGHPGAPMGMADIAEVLWNDFLRHNPTDPTWYDRDRFILSNGHASMLLYSLLHLSGYDLPIEELKNFRQLHSKTPGHPEIGYTPGVKPPPD

SEQ ID NO: 110039 - protein, 269 aa, Unknown
  Bacterial polypetide isolated from the Sargasso Sea
MKNKEKNLSNAIRFLSIDAVQKANSGHPGMPMGMADVVTILYKYFLKFNPKNPTWLNRDRFILSAGHGSMLLYSLLYLTGYKSVSLKDIKKFRQLNSICAGHPEYHPNSGIETTTGPLGQGIANSVGFAIAGEILKKKLGSKLINHKTYVLAGDGCLMEGISHEAMSLAGHLKLNNLIMLFDNNSISIDGPTSLAVSDNYKNRFESYGWNYILINGHNYREIYNALKKAQTSKKPTVISCKTKIGFGSPNKSGKASSQGSPLGIDEIKL

SEQ ID NO: 110040 - protein, 328 aa, Unknown
  Bacterial polypetide isolated from the Sargasso Sea
ADFSDKADAIIAELQANPQNIASRKASQNALNAFGPLLPELLGGSADLAGSNLTIWEGSKGVEANDASGNYIYYGVREFGMSAMMNGIALHGGFKAYGATFLMFMEYARNAVRMAALMKQPAIFVYTHDSIGLGEDGPTHQPVEQAVALRATPNLDNWRPCDQVESAVSWKSAIERTDGPTTLIFTRQGLAQQERTAQQVADIAKGGYVLKDCEGTPELILIATGSEVQLAVEAAAKLTEQGKAVRVVSMPSTDVFDRQSADYRESVLPSSVVKRVAVEALSKDSWYKYVGFNGAIVGMDTFGESAPAGDLFKHFNITTDAVVEAALS

SEQ ID NO: 110041 - protein, 302 aa, Unknown
  Bacterial polypetide isolated from the Sargasso Sea
SIDGEIENWFTDDSVKRFESYGWHTICVNGHNIEEINNAISQAKETSDKPSMIFCKTTIGFGSPNKSGTADVHGAPLGEDEIIKTREALDWKYAEFELTDEIYNFWDAKEAGVNVNSDWDNLIKSYQEKYPEKSKELLRRIEGNTPENFESDFNQFLKDCDMSNSPMATRKASKACLDFFVKTMPELIGGSADLTPSNNTFSESSSTFSNENPSGNHINYGVREFGMSAIMNGMVLHGGIKPYGATFLVFTDYARNAVRLSALMGLPNIFVYTHDSVALGEDGPTHQPIEHMVTLRSTPNFN

SEQ ID NO: 110042 - protein, 312 aa, Unknown
  Bacterial polypetide isolated from the Sargasso Sea
ISHEAMSLAGHLNLKNLIVFFDNNRISIDGATSLSVSDNYKKRFEGYGWSFQEINGHNFKQIDKAIKKANNSKKPTIISCKTIIGFGSPNKSGKASSHGAPLGEDEIKLVRKKLGWKYQPFEIPENILNSWREIGNKGEELENKWKNNLEKNPKIKSELDKIAKGELSLNLDKIMGDEKLKFFQTKPKMATRQCSSTVIETLTNVLPELIGGSADLSGSNNTKTEKSKIINAKSFAGNYIHYGVREHAMGAAMNGLALYGGLIPFGGTFLIFSDYLKPSLRLSAIMNLRVIYIFSHDSIGLGEDGPTHQPIE

SEQ ID NO: 110043 - protein, 252 aa, Unknown
  Bacterial polypetide isolated from the Sargasso Sea
MNLLPTILGGSHIYYGVREFGMVTIMNGMSLHGGIRPYGGTFLVFMDYARNAVRLSAMMSLPNIYVFTHDSIGLGEDGPTHQPIEHLVTLRATPNLYSWRPADLKETAVAWKESILSKSPSCLILSRQGLPQVKMSEDKISNISKGGYLVQKDEDAELNIISSGSELQLAIQAAKDLDQSGIKVNVVSMPCLDRFLEADLEYQNKVIQKDLPSIVVEAAHPNSWYRILGRDDLVIGMTTFGESAPAKMLFEE

SEQ ID NO: 110044 - protein, 210 aa, Unknown
  Bacterial polypetide isolated from the Sargasso Sea
LPNIYVFTHDSIGLGEDGPTHQPIEHLVTLRATPNLYNWRPADLKETAVAWKESILSKSPSCLILSRQGLPQVKMSEDKISNISKGGYLVQKDEDAELNIISSGSELQLAIQAAKDLDQSGIKVNVVSMPCLDRFLEADLEYQNKVIQKDLPSIVVEAAHPNSWYKILGRDDLVIGMTTFGESAPAKMLFEEFGFTAGNIVSKAKKLLNK

SEQ ID NO: 110045 - protein, 296 aa, Unknown
  Bacterial polypetide isolated from the Sargasso Sea
KNLMDQWRSIGKKASIKASKNKKKFSLKLNKNTINAEIEKAKLDYLKKLQPIATRKCSEKFLEIASKLPNLIGGSADLAGSNNTKTKNHKIIQSNDFSGNYIHFGVREHAMCGIMNGISLHSELVPYGGTFLIFSDYCKPSIRLAAMMKQKVIYVFTHDSIGLGEDGPTHQPIEQLTSLRSIPNLNIFRPSDLIETFECWQLALNSKSSPSVIALTRQSLNPVRTKKSSKNLSLAGAYEVLRTSNKISVTIIATGSETSLAIDVSHKLATDGIYSKVISMPCQELFDQQTEIYKNK

SEQ ID NO: 110046 - protein, 265 aa, Unknown
  Bacterial polypetide isolated from the Sargasso Sea
MGGQYIHYGVREHGMAAIMNGIAATKIYKTYSGTFLTFADYMKPSLRLAALMKIDPIQVFTHDSIGLGEDGPTHQPIEQINMLRLIPNSYIFRPCDLKETIVCWREALKIDDAPSFICLSRQNLPQISYKKLVSKNFKGAYVISGPKKNNDITIIATGSEVSLAVHIAEILKNNRINAKVISMPSSSIFEKQSRSFKITLLKSKLDETFVIEAGSTMYWNKFTNSENIFGLDNFGASAPGSDVFKKFGLTTKTISTKILRKIKTK

SEQ ID NO: 110047 - protein, 279 aa, Unknown
  Bacterial polypetide isolated from the Sargasso Sea
IKHKKDAIKNFKTIATRKSSEEFLSAILKERNTLIGGSADLAGSNNTKTKLHKIINSSNFDGNYIHYGVREHAMSGIMNGLALHSNFIPYGGTFLIFSDYCKPSIRLSAIMKQKVIYIMTHDSIGLGEDGPTHQPIEQLAGLRSIPNLNVLRPADQTETIECWDIALKSNKTPSILALTRQNLKPIRNKFSKKNQCSMGAYEVLRTGKNINLTILASGSEVNLAIETSHKLAKQKIYSKVISMPCQEIFDKQNKSYKNKILKESKNTFAIEAGSKMSWE

SEQ ID NO: 110048 - protein, 290 aa, Unknown
  Bacterial polypetide isolated from the Sargasso Sea
QETLADFEKNHFEDSKELHRLINGSLPSNFELTFENLINNFSEDGNSYASRKCSGMCLDAIGPIMPELIGGSADLSPSNNTEWKGTSHLAEDGSGNYLNYGVREFGMSAIMNGMILHGGIRPYAGTFLTFLDYARNAVRMSALMKLPVIYVYTHDSIGVGEDGPTHQPVEHISMLRITPGIYTWRPCDGVETACAWKFALESKAAPSALILSRQSLDAQKRETNYSIFKGGYELASAQNPKITLVASGSEVGLAMKVRDQLNEQKISSRVVSMPCTEIFDEQSSEYQRET

SEQ ID NO: 110049 - protein, 121 aa, Unknown
  Bacterial polypetide isolated from the Sargasso Sea
MNKLYKELANCIRFLSIDAVQKANSGHPGMPMGMADVATVLFKDFLKFNPKNPSWINRDRFVLSAGHGSMLLYSLLYLTGYKSVSLNDIKNFRQLESICAGHPEYHPNTGIETTTGPLGQG

SEQ ID NO: 110050 - protein, 288 aa, Unknown
  Bacterial polypetide isolated from the Sargasso Sea
MLQQLYSCKTKIGFGSPNKEGSASSHGSPLGEDEISLTRKKLEWNYLPFEIPDDLLHEWRNFYKRNDKLKNSWLSKNKELIKSKNFKDSFYQKIDPELPEKIKDLKFEHFNDKTNCASRKSSELTLNLISNYQKNLIGGSADLTGSNNTKAKNMNVITSDNFNGNYVHYGIREHGMAGVMNGIALHKGLIPYGGTFLVFTDYCRPSIRLSAIMNIPVIYVMTHDSIGLGEDGPTHQPVEHLASLRAIPNLTVIRPCDIIETIEAWECAINNTGPTILVLTRQNLPMLQ

SEQ ID NO: 110051 - protein, 293 aa, Unknown
  Bacterial polypetide isolated from the Sargasso Sea
SNFKNLNSFKNLIEKTKNEYLKNSKPLATRKSSEMFLNIISKLPNLIGGSADLAGSNNTKTKDHIIIKPGNFSGNYIHYGVREHAMCGIMNGIALHSNLIPYGGTFLIFSDYCKPSIRLAAMMKQKVIYVFTHDSIGLGEDGPTHQPIEQLTSLRSIPNLNVFRPSDTIETFECWELALKSQDTPSVIALTRQGINPVRVKSSSKNESSAGAYEILRTGDNINVTILATGSETSLASDVGHKLATDGIYSKIISMPCHKLFDQQSEGYKKKILGETKLVVSIEASETDFGKSI

SEQ ID NO: 110052 - protein, 261 aa, Unknown
  Bacterial polypetide isolated from the Sargasso Sea
MNKINKELANAIRFLSIDAVEKANSGHPGMPMGMADVATILFKNFLKFNPKNPSWINRDRFVLSAGHGSMLLYSLLYLTGYKSISLKDIKNFRQLNSICAGHPEYHPNSGIETTTGPLGQGIANAVGFAIAEEILKKKLGKKIINHKTYVLAGDGCLMEGISHEALSLAGHLKLKNLILLFDNNSISIDGPTSLAVSDDFKKRFNSYGWNYIEIDGHNEKQIFNALKKVQKSKIPSAISCKTTIGYGSPNKSGKESVHGSP

SEQ ID NO: 110053 - protein, 304 aa, Unknown
  Bacterial polypetide isolated from the Sargasso Sea
LYFIDGPTSLAVSDNYKKRFESYGWNYIEIDGHNGKQIYSAINKAQKAIKPTVISCKTKIGFGSPNKSGKASSHGSPLGLKEIELVRKKLNWPYKPFEIPKNILKEWRKIGLKGSKTEAKWKKNFSRNKNNLKNLFSNSFSNSFIKQKKDVIENLKPLATRKSSETVLNSLFKLKNNLIGGSADLAGSNNTKSKFNKVINAKNFDGDYIHYGVREHAMCGIMNGLALHSNLIPYGGTFLIFSDYCKPSIRLSALMKQRVIYVMTHDSIGLGEDGPTHQPIEQLSGLRSIPNLNILRPADQIETI

SEQ ID NO: 110054 - protein, 277 aa, Unknown
  Bacterial polypetide isolated from the Sargasso Sea
PKNILNEWKKIGIKGAKLESNWNKIYKRKKSKIDKIFKNQFNKVLKSEKKNAFKNIKSLATRKSSELILSALTYGNNTLIGGSADLAGSNNTKTKFHNIIKENNFNGNYIHYGVREHAMCGIMNGLALHSKLIPYGGTFLIFSDYCKPSIRLSALMKQRVIYVMTHDSIGLGEDGPTHQPIEQLTGLRSIPNLNIFRPADRTETIECWDLALKNSKTPSILSLTRQNLNPVRKKYSHNNKCSYGAYEIFRSNKKIKLTILASGSEVDLAIKTSLKWP

SEQ ID NO: 110055 - protein, 244 aa, Unknown
  Bacterial polypetide isolated from the Sargasso Sea
MGLEEVELVRKTLNWNNKPFNIPNKFLKEWRKIGQRGDAQEKKWNKIFKKNKTKFKNTIKNNSISVLRKEKRNAILEPKNLATRKSSEMTLNALTNQNNNLIGGSADLAGSNNTKTKHQKIIKPGDFSGDYIHYGVREHAMSGIMNGIALYGNLIPYGGTFLIFSDYCKPSIRLSALMQKRIIYVMTHDSIGLGEDGPTHQPIEQLSGLRSIPNLNVFRPADRVETIECWEHALKSSKHQAFYV

SEQ ID NO: 110056 - protein, 252 aa, Unknown
  Bacterial polypetide isolated from the Sargasso Sea
RFLSIDAVQKANSGHPGMPMGMADVAMVLFKNFLNFDPKNPNWINRDRFILSAGHGSMLLYSLLYLTGYESINLNDIKNFRQLDSICAGHPEYHPNSGIETTTGPLGQGISNAVGFALAEEILKKKVGKNIINHKTYVLAGDGCLMEGISHEALSLAGHLKLKNLILLFDNNSISIDGPTSLAVSDDHRKRFNSYGWDFLDINGHNEKEIFKALKKAQNTKKPIAISCKTTIGYGSPHKSGKASAHGSPLGK

SEQ ID NO: 110057 - protein, 232 aa, Unknown
  Bacterial polypetide isolated from the Sargasso Sea
MNKQNRDLSNAIRFLSIDAVEKANSGHPGLPMGMADVATILFKYFLKFNPENPSWINRDRFVLSAGHGSMLLYSLLYLTGYKSISINSIKNFRQLNSICAGHPEYEKNTGIETTTGPLGQGIANAVGFAIAEEILKKKLSKNIINHKTYVLAGDGCLMEGISHEALSLAGHLKLKNLIMLFDNNSISIDGPTSLATSDNFKKRFNSYGWDYIEIDGHNEKQIIKALKKHKKQ

SEQ ID NO: 110058 - protein, 128 aa, Unknown
  Bacterial polypetide isolated from the Sargasso Sea
MFDKVTKSVRVLSAAAVEKANSGHPGMPLGMADVGVALYKNFLKVSNEKPDWINRDRFVLSAGHGSMLLYSLLHLNGFPLSMDEIKNFRQLNSKTAGHPEVDTSIGIDTTTGPLGQGFANGVGFAVAE

SEQ ID NO: 110059 - protein, 310 aa, Unknown
  Bacterial polypetide isolated from the Sargasso Sea
DAVQRANSGHPGMPMGMADVATVLFKNFLRFNPKNPDWLNRDRFVLSAGHGSMLLYSLLYLTGYKSISINNIKKFRQLNSICAGHPEYHPKTGIETTTGPLGQGISNAVGFAIAEEILKKKLGKDLINHKTYVLAGDGCLMEGISHEAMSLAGHLKLKNLIMLFDNNSISIDGPTNLAVSDNFKKRFEGYGWDYISINGHNEKEIFNALKKVQNAKKPSVISCKTKIGYGSPNKSGKASSHGSPLGADEIKLVRKVLNWKSKPFDIPNKILKDWRKIGQRGEIFEKKWNEIFKRKKIKFNQTLKNKFTKV

SEQ ID NO: 110060 - protein, 295 aa, Unknown
  Bacterial polypetide isolated from the Sargasso Sea
QKNNLIGGSADLAGSNNTKTKNHKIIKPGDFNGDYIHYGVREHAMSGVMNGIALHSNLIPYGGTFLIFSDYCKPSIRLSALMKKRVIYVMTHDSIGLGEDGPTHQPIEQLSGLRAIPNLNVFRPSDRIETIECWEHALKSSKTPSVISLTRQNLNPVRKTHSNKNLCTLGAYEILRTNKKINLTILASGSEVNLAMEVSHKLAKEKIYSKVISMPCMELFELQSKSYKNKILKETKFKISIEAGSSDCWKKYLGDNGIAFGIDEFGKSAPYKDIYKYFGLESTNIKNITKKLLKK

SEQ ID NO: 110061 - protein, 314 aa, Unknown
  Bacterial polypetide isolated from the Sargasso Sea
MLAVDAVNKSNSGHPGLPMGCAPMGYTLWDKFLKHNPKNPKWFNRDRFVLSAGHGCMLLYALLHLTGYDSVTIEDIKQFRQWGSKTPGHPETFETPGIEVTTGPLGAGISNAVGLAIAEAHLAAKFNKPDAKVVDHYTYVIMGDGCNQEGVASEACSLAGHLKLGKLIALYDDNHITIDGRTNVSFTEDVLKRYEAYGWHVQHVADGNTDVNAIAKAIEAAKAVTDKPSIIKVTTTIGYGSPNKSDTAGVHGAPLGEEEATLTRQQLGWDYGPFEVPQEAYDQYRQAIERGASLEAEWNQPWPATAASTPAKRL

SEQ ID NO: 110062 - protein, 289 aa, Unknown
  Bacterial polypetide isolated from the Sargasso Sea
KNFRQLNSICAGHPEYTPNSGIETTTGPLGQGIANSVGMAIAEEILKEKIGKNIINHKTYVLAGDGCLMEGISHEALSLAGHLKLKNLVMLFDNNSISIDGPTSLAVSDNFKKRFESYGWDYILINGHNEKQISKALKKAQKAKKPTVISCKTVIGFGSPNKSGKASAHGSPLGEDEIKLVRKKLKWNHPPFQVPKKILDEWKKIGIKGTKEEEKWNKKNRRNFKKINKLFQPINRTSTGLDMFSLKLGDDFLKEKENIINENEAIATRKSSEKILNFFVKKIPIIIGG

SEQ ID NO: 110063 - protein, 203 aa, Unknown
  Bacterial polypetide isolated from the Sargasso Sea
MSKFYKELANCIRFLSIDAVQKANSGHPGMPMGMADVATVLFKDFLKFNPKNPSWINRDRFVLSAGHGSMLLYSLLYLTGYKSVSLNDIKNFRQLESICAGHPEYHPNTGIETTTGPLGQGVSNAVGFAISEEILKKQLGKGKINHKTYVLAGDGCLMEGISHESLSLAGHLKLKNLILLFDNNSVSIDGPTNLAVSDDHEKR

SEQ ID NO: 110064 - protein, 263 aa, Unknown
  Bacterial polypetide isolated from the Sargasso Sea
SHGSPLGEDEIKLVRKKLKWNYEPFNIPSEFLGEWRKIGESASQKAKKHEKKYKKKILDFKSIDSFKDSIEKFKNDYLKDSKPIATRKSSEMFLNIVTKLPNLIGGSADLAGSNNTKTKDHKIIKPGNFLGNYIHYGVREHAMCGIMNGIALHSNLIPYGGTFLIFSDYCKPSIRLAAMMKQKIIYVFTHDSIGLGEDGPTHQPIEQLTSLRSIPNLNVFRPSDLIETFESWQLALESRNTPSVIALTRQAIRPVRVKNSLKN

SEQ ID NO: 110065 - protein, 314 aa, Unknown
  Bacterial polypetide isolated from the Sargasso Sea
RNWSGNTTGPLGQGIGNAVGMALAEKVLASKFNQPDGLQPIDHYTYTFLGDGCLMEGVSHEVCSFAGTHRLGKLICFYDQNGISIDGEITNWFTDNTAQRFESYDWQVLEVDGHNIVQILEAIKNAQAESSRPTLICCKTEIGFGSPNKAGTSGVHGSPLGDEEIVKTRNQLEWEHGPFDIPENIKSEWDAIEDGSKVNSEWDSLMNEYSKKHPVLFNELKRLINNDLPNDFEQNYEDFIEGLIATDQKDMATRKASEVCLNFFCEQLPELIGGSADLTGSNNTFSSVSSELLPDNPPGNHIFYGVREFGMTTI

SEQ ID NO: 110066 - protein, 272 aa, Unknown
  Bacterial polypetide isolated from the Sargasso Sea
TTSLDTLCVNSIRMLAVDAINKSKSGHPGLPMGCAPMGYALWDKHLRHNPKNPKWFNRDRFVLSAGHGCMLLYALLHLTGYDSVTIEDIKEFRQWGAKTPGHPETFETPGVEVTAGPLGAGISNAVGLAIAEAHLAAKFNKPDSTVVDHYTYVIMGDGCNQEGISSEACSLAGHLKLGKLIALYDDNHITIDGRTDVSFTEDVLKRYEAYGWHVQEISEGNTDIEGISQAIEKAKSVTDKPSIIKVTTTIGYGSPNKSDTAGIHGAPLGEEE

SEQ ID NO: 110067 - protein, 314 aa, Unknown
  Bacterial polypetide isolated from the Sargasso Sea
MLPTVLFTKFLKFNSSAPKWHDRDRFVLSAGHGSMLLYSLLYLTGYRDMTIKDIKKFRQLDSKCAGHPEYGHAQGIETTTGPLGQGIGNAVGMALAEKILSGQFGQKIIDHHTYVIASDGDLMEGISHEVASFAGHLKLNKLIVFFDDNGISIDGPVKLSNSENTIDRFKAYGWNTIKINGHNKDEIIKAISKAKKSKKPTIISCKTKIGFGSPNKQGKSSSHGSPLGEEEVSLTRSKLKWPHKPFSVPTNILNEWKKSGKRSADVYKKWKIDFEKLSKKKKDEFERRISGNIPKKVNQLLSKFKKDSIKKPID

SEQ ID NO: 110068 - protein, 243 aa, Unknown
  Bacterial polypetide isolated from the Sargasso Sea
MSKQYRELANCIRFLSIDAVQKANSGHPGMPMGMSDVATVLFKDFLNFNPKNPSWINRDRFILSAGHGSMLLYSLLYLTGYKSVSLNDIKNFRQLDSICAGHPEYHPDTGIETTTGPLGQGIANSVGFALSEEILKKKFGKNKINHKTYVLAGDGCLMEGISHEALSLAGHLKLKNLILLFDNNSISIDGPTNLAVSDDNEKRFKSYGWNYLKINGHNYKEISKALKKAQNSKKPIAISCKTT

SEQ ID NO: 110069 - protein, 245 aa, Unknown
  Bacterial polypetide isolated from the Sargasso Sea
LEIASKLPNLIGGSADLAGSNNTKTKNHKIIHSNDFSGNYIHFGVREHAMCGIMNGISLHSELIPYGGTFLIFSDYCKPSIRLAAMMKQKVIYVFTHDSIGLGEDGPTHQPIEQLTSLRSIPNLNVFRPSDLIETFECWQLALNSKSSPSVIALTRQSLNPVRTKKSSKNLSLVGAYEVLRTGNIISATIIATGSETSLAIDVSHKLATDGIYSKVISMPCQELFDQQSEVYKNKILNETKLVIS

SEQ ID NO: 110070 - protein, 282 aa, Unknown
  Bacterial polypetide isolated from the Sargasso Sea
RKSSEIFLNIITKLPNLIGGSADLAGSNNTKTKDHKIIKPGNFSGNYIHYGVREHAMCGIMNGIALHSNLIPYGGTFLIFSDYCKPSIRLAAMMEQRVIYVLTHDSIGLGEDGPTHQPIEQLTSLRSIPNLNVFRPSDTIETFECWQLALESENTPSVIALTRQGINPVRLENSSKNMSSLGAYEILRTGNNISVTILATGSETSLASEVGHKLATDGIYSKIISMPCHELFDQQNEGYKNKILGETSLIVSIEASETNLWKKYTGNNGLNFGINNFGKSAP

SEQ ID NO: 110071 - protein, 204 aa, Unknown
  Bacterial polypetide isolated from the Sargasso Sea
MNKKNKILANSIRFLSMDAVQKANSGHPGMPMGMADVVTILFKYFLKFNPNNPSWLNRDRFVLSAGHGSMLLYSLLYLTGFKSVSLKDIKNFRQLNSICAGHPEYIPNTGIETTTGPLGQGISNAVGFALAEEMLKKKLGKDIINHKTYVVAGDGCLMEGISHEAMSLAGHLKLKNLVMLFDNNSISIDGPTSLTVSDNFKKRF

SEQ ID NO: 110072 - protein, 242 aa, Unknown
  Bacterial polypetide isolated from the Sargasso Sea
MNKLHNDLANCIRFLSIDAVQKANSGHPGMPMGMADVVTVLFKNFLRFNPKNPNWMNRDRFVLSAGHGSMLLYSLLFLNGYKSISLNSIKNFRQLNSICAGHPEYHPNSGIETTTGPLGQGIANAVGFAIAEEILKKKLGNDLINHKTYVLAGDGCLMEGISHEAMSLAGHLKLKNLVMLFDNNSISIDGPTDLAVSDNFKKRFEGYGWDYILINGHNEKEIFKALKNVQKAKKPTVISVKQ

SEQ ID NO: 110073 - protein, 134 aa, Unknown
  Bacterial polypetide isolated from the Sargasso Sea
MNKISSSQSANALRILALDSVKQANSGHSGMPMGMADIAEVLWQNHLIHNPGNPDWFNRDRFVLSNGHGSMLIYGLLHLSGYDLSIQDLKDFRQLHSKTAGHPEFGITPGIETTTGPLGQGIANAVGMAIAEKT

SEQ ID NO: 110074 - protein, 161 aa, Unknown
  Bacterial polypetide isolated from the Sargasso Sea
MSKIHNDLANCIRFLSIDAVQKANSGHPGMPMGMADVATVLFRYFLKFNPQNPNWINRDRFVLSAGHGSMLLYSLLYLTGYKSISLNSIKNFRQLNSICAGHPEYHPKTGIETTTGPLGQGIANAVGFAIAEEVLKKKIGKNLINHKTYVLAGDGCLMEGI

SEQ ID NO: 110075 - protein, 194 aa, Unknown
  Bacterial polypetide isolated from the Sargasso Sea
MNKLHNDLANCIRFLSIDAVQKANSGHPGMPMGMADVVTVLFKNFLRFNPKNPNWMNRDRFVLSAGHGSMLLYSLLFLTGYKSISLNSIKNFRQLNSICAGHPEYHPNSGIETTTGPLGQGIANSVGFAIAEEILKKKLGNDLINHKTYVLAGDGCLMEGISHEAMSLAGHLKLKNLVMLFDNNSISIDGPTDL

SEQ ID NO: 110076 - protein, 123 aa, Unknown
  Bacterial polypetide isolated from the Sargasso Sea
MNKENKILANAIRFLSIDAVQKANSGHPGMPMGMADVVTILFKHFLKFNPKNPSWLNRDRFVLSAGHGSMLLYSLLYLTGYKSISLNSIKSFRQLNSICAGHPEFEANTGIETTTGPLGQGIS

SEQ ID NO: 110077 - protein, 158 aa, Unknown
  Bacterial polypetide isolated from the Sargasso Sea
MADAIRFLSMDAVQAANSGHPGMPMGMADVATVLFKDFINIYPDKPDWPDRDRFVLSAGHGSMLLYSLHYLLGYKDMPIENIKNFRQLNYNTAGHPEFGHANGIETTTGPLGQGLATAVGMALSEKLMASRFSNNLVDHFTYVICGDGCLQEGISHEA

SEQ ID NO: 110078 - protein, 312 aa, Unknown
  Bacterial polypetide isolated from the Sargasso Sea
LLYLTGYKKIQLEDIKNFRQINSICAGHPEYEFDSGIETTTGPLGQGLGNSVGMAIAQEILQKRLGSKIINNKTYVIASDGDLMEGISHEAMSLAGHLNLKNLIVFFDNNKISIDGATSLSVSDNYKKRFEGYGWSFQEINGHNYKQIDKAIKKANNSKKPTIISCKTIIGFGSPNKSGKASSHGAPLGEDEIKLVRKKLGWKYQPFEIPENILNSWREIGNKGEELEKKWKNNLEKNPKTKSDLDRIIKGELSLNLDKIMGDEKLKFFQTKPKMATRQCSSTVIETLTNVLPELIGGSADLSGSNNTKTEK

SEQ ID NO: 110079 - protein, 281 aa, Unknown
  Bacterial polypetide isolated from the Sargasso Sea
TKFKKLTKNNLINALKKEKRNAIKEPKKLATRKCSEMTLNALTNQNHNLIGGSADLAGSNNTKTKNQKIIKPGDFSGDYIHYGVREHGMCGIMNGISLYGNLIPYGGTFLIFSDYCKPAIRLSALMQKRVIYVMTHDSIGLGEDGPTHQPIEQLSGLRSIPNLYVFRPADRVETIECWELALKSSKTPSILSLTRQGLNPVRKSFTNINKCSLGAYEVLRTNNKINLTIFASGSEVNLAIEISHKLAKDKIYCKVVSMPSMELFDLQSKLYKNKILKETKS

SEQ ID NO: 110080 - protein, 255 aa, Unknown
  Bacterial polypetide isolated from the Sargasso Sea
MVAASVSLESLCVNSIRMLAVDAVNKSNSGHPGLPMGCAPMGYALWQNILNHNPNNPKWFNRDRFVLSAGHGCMLLYSLLHLTGYKSVSIEDIKEFRQWGSKTPGHPETFETEGVEVTAGPLGAGISNAVGLAIAETHLAAKFNKPDCNIVDHFTYVIMGDGCNQEGIASEACSLAGHLKLGKLIALYDDNQITIDGRTDVSFTEDVLKRYEAYGWHVQHVEDGNHDVKGITEAIEKAKLVTDKPSIIKISTTHR

SEQ ID NO: 110081 - protein, 249 aa, Unknown
  Bacterial polypetide isolated from the Sargasso Sea
ASSHGAPLGEEEISLVRKKLKWKSEPFVVPEQILNTWREIGKKGAKLEDDWQKKLSKTNSTIKSDMENILLDKNINNLEELINSEKTKYFESKPSMATRQCSASVIDSITNVLPELIGGSADLSGSNNTKTNSSKIISSKNFKGNYIHYGVREHGMAAIMNGLALYNGLIPFGGTFLIFSDYCKPSIRLSALMGLRVIYIFSHDSIGLGEDGPTHQPIEQLSGLRAIPNLNVFRPADMNETLECWEIAL

SEQ ID NO: 110082 - protein, 260 aa, Unknown
  Bacterial polypetide isolated from the Sargasso Sea
CKTKIGYGSPNKSGKSSSHGSPLGLDEIKLVRKKLRWKYKPFEIPKKILKEWREIGKKGELLENKWKKIYTKKKNKIDKILKNNFAKVLKKQKQISIKEIKSLATRKSSELTLNALTKESNTLIGGSADLAGSNNTKTKFHKIIKPGEFNSDYIHYGVREHAMCGIMNGLSLHSSLIPYGGTFLIFSDYCKPSIRLSALMKQRVIYIMTHDSIGLGEDGPTHQPIEQLSGLRAIPNLNVFRPADRVETIECWQEALKNSN

SEQ ID NO: 110083 - protein, 309 aa, Unknown
  Bacterial polypetide isolated from the Sargasso Sea
MSDVATLLFSKFIKIYPKDPKWPNRDRFVLSAGHGSMLLYALNYFLGYKDMTIDQIKKFRQINSITAGHPEFGHADGIETTTGPLGQGLANAVGMSISEQIFNKKFGSEIIDHFTYAIVGDGCLMEGLSHEAIDIAGHLKLKKLIVLWDNNSISIDGNTSLATSINQIDRFKACGWDVHYVDGHNFDDIEKVILKSQVSELPSLISCETKIGFGAPNLESTNKVHGAPLGESEIDLTRKNLKWDYPPFEFPKEVMDAWHLVSNKSKSAYEDWNNLINSSNSKNEFYNRINYNFPDKLFKKLNEYSKTLI

SEQ ID NO: 110084 - protein, 205 aa, Unknown
  Bacterial polypetide isolated from the Sargasso Sea
MVAASVSLESLCVNSIRMLAVDAVNKSNSGHPGLPMGCAPMGYALWQNILNHNPNNPKWFNRDRFVLSAGHGCMLLYSLLHLTGYKSVSIEDIKEFRQWGSKTPGHPETFETEGVEVTAGPLGAGISNAVGLAIAETHLAAKFNKPDCDIVDHYTYVIMGDGCNQEGIASEACSLAGHLKLGKLIALYDDNQITIDGRTDGFFYR

SEQ ID NO: 110085 - protein, 256 aa, Unknown
  Bacterial polypetide isolated from the Sargasso Sea
GVVLGFADVLTVLWRKHMRYDLADASWQNRDRFVLSNGHASALYYAILHCCGFDLTLDDLKSFRQLGSRTPGHPERDPELGIDVSTGPLGQGLANAVGMSLAQKYLESDVGDKSQNDLIDYYTYVAVGDGCLMEGISHEACSLAGRFSLGRLIVCWDDNGISIDGECENWSEKSVAGRFLSYGWQVIDGVDGHDPDAIDKAIIQAKACLDKPTLICFKTVIGHGTDLAGSSVSHGKPLGRARIEGLKKSLQWTLDD

SEQ ID NO: 110086 - protein, 275 aa, Unknown
  Bacterial polypetide isolated from the Sargasso Sea
MVNRDRFVLSAGHGSMLLYSLLYLTGYKSISLSSIKNFRQLNSICAGHPEYHPKTGIETTTGPLGQGISNSVGFAISEEILKKKFGQKIFNHKTYVIAGDGCLMEGVSHEAMSLAGHLKLKNLIMLFDNNSISIDGPTKLAVSDNYKKRFQSYNWNYIEIDGHNEKQIFRALKNAQASKKPTCISCKTKIGYGSPNKSGTSSAHGSPLGKEEIKLVRKKLKWNYSPFNLPKNIIQEWRNIGLKGKKLEKKWNKIYLNNKKSINNYFNFNPQPALS

SEQ ID NO: 110087 - protein, 299 aa, Unknown
  Bacterial polypetide isolated from the Sargasso Sea
MSKIHNDLANCIRFLSIDAVQKANSGHPGMPMGMADVVTVLFKNFLKFNPQNPNWINRDRFVLSAGHGSMLLYSLLYLTGYKSISLNSIKKFRQLNSICAGHPEYHPKTGIETTTGPLGQGIANAVGFAIAEEVLKKKLGKNLINHKTYVLAGDGCLMEGISHEAMSLAGHLKLKNLVMLFDNNNISIDGPTSLAVSDNFKKRFESYGWDYILVDGHNENQIYRALKKVQNAKKPTVISCKTKIGYGSPNKSGKSSSHGSPLGVDEIKLVRKALKWKYKAFEIPNKVINEWRAIGSKGQ

SEQ ID NO: 110088 - protein, 225 aa, Unknown
  Bacterial polypetide isolated from the Sargasso Sea
KLKSKTPGHPEYDIDIGVETTTGPLGQGIGNAVGMALAEKNLAATFNKEDIKIIDHFTYAFLGDGCLMEGISHEVCSFAGTHKLGKLICFYDQNGISIDGEIDLWFTDNTKQRFESYGWHVVEIDGHDIDEINKATEEAKKETERPSLICCKTTIGFGSPNKSGTAGVHGSPLGEDEIEITRKELNWEHGPFEIPEDIYDVWNAKDEGAKKEKAWEDLLKTYRQK

SEQ ID NO: 110089 - protein, 289 aa, Unknown
  Bacterial polypetide isolated from the Sargasso Sea
SEMTLNALTKQNHNLIGGSADLAGSNNTKTKHQKIIKPGDFSGDYIHYGVREHGMSGIMNGIALYGNLIPYGGTFLIFSDYCKPSIRLSALMQKRVIYVMTHDSIGLGEDGPTHQPIEQLSGLRSIPNLNVFRPADRVETIECWEHALKSSKTPSILSLTRQGLNPIRKTFTNINKCSLGAYEVLRTNNKINLTIFASGSEVNLAIETSHKLAKDKIYCKVISMPSMELFDQQSKLYKNKILNETKFKISIEAGSSDCWEKYVGSSGLTFGINEFGKSAPYKDIFKHLD

SEQ ID NO: 110090 - protein, 151 aa, Unknown
  Bacterial polypetide isolated from the Sargasso Sea
MSKLHNDLANCIRFLSIDAVQKANSGHPGMPMGMADVATVLFKNFLRFNPKNPDWLNRDRFVLSAGHGSMLLYSLLYLTGYKSISINKIKKFRQLNSICAGHPEYHPKTGIETTTGPLGQGISNAVGFAIAEEILKNKLGKDLINHKTYIL

SEQ ID NO: 110091 - protein, 251 aa, Unknown
  Bacterial polypetide isolated from the Sargasso Sea
MTEQNLDMLSINTIKLLSVDSVQKANSGHPGAPMGAATMAYVLWKDFLKHNPENPQWINRDRFILSPGHASALLYSLLHLTGYEVSLEDLQQFRQLESKTPGHPEYGVTPGVEVTTGPLGQGFANGVGMAIAEAKLASDFNTEEHQIIDHYTYAIVSDGDLQEGVASEAASLAGTLKLNKLIYLYDSNNISIEGDTKLSFTENVAGRFKAYDWQVIGPVNGSDINEIHNAISQARNETSKPSLIICETVIG

SEQ ID NO: 110092 - protein, 266 aa, Unknown
  Bacterial polypetide isolated from the Sargasso Sea
KDKPSFIACKTTIGFGSPNKAGTATTHGAPLGEDEIAATRESLNWPHPPFEIPQTVSSAWRRIGEMHTEKVEVWKNRLNESKQKDEFERVMSGTLPQKWEDTLLEFKRNHTEEKTKMASRKASQETLNVLIEVIPELAGGSADLTGSNLTKAKSQKTIVPGEFGGSYIHYGVREHGMAAAMNGIALHGGFIPYGGTFLIFTDYCRPSIRLSALMEQRVIYVMTHDSIGLGEDGPTHQPVEHLASLRAIPNLNVYRPCDIVETAECW

SEQ ID NO: 110093 - protein, 232 aa, Unknown
  Bacterial polypetide isolated from the Sargasso Sea
MTSSPRHQEMANAIRFLSADAVQKANSGHPGMPMGMADVATVLLSRFMNFSASNPDWPDRDRLILSAGHGSMLLYSLLHLTGYKDFTIDEIKNFRQLGSRTAGHPEYGHGAGIETTTGPLGQGLANASGMALAERMLSERFGSEIVDHYTYVIAGDGCLMEGVSHEAVSFAGCLRLGKLIVIFDDNGISIDGSTQLAVNDNQLTRFESCGWDVSECDGHNPHAMNKSLSRQE

SEQ ID NO: 110094 - protein, 304 aa, Unknown
  Bacterial polypetide isolated from the Sargasso Sea
LRFNPKNPNWINRDRFILSAGHGSMLLYSILYLTGYNSVSINDIKNFRQINSICAGHPEYHDSSGIETTTGPLGQGIANAVGLALAEEILKKKLGKKTINHKTYVIAGDGCLMEGISHEALSFAGHLKLKNLILLFDNNSISIDGSTKLAVSDDIKKRFQSYGWNYLDINGHKEKEIIMALKKAQNSNKPFAISCKTTIGFGSPNKGGKASSHGSPLGKDEIDLVRKKLNWKFDPFVIPEKILNAWREIGNKAASKAEMNEGAPIKNNLIPSSIYSKIEQLKRDYLKSLEPLATRKSSEKFLEV

SEQ ID NO: 110095 - protein, 236 aa, Unknown
  Bacterial polypetide isolated from the Sargasso Sea
LCINSIRFLAVDAVNKSKSGHPGLPMGCAPMGYTLWDKFLKHNPKNPKWFNRDRFVLSAGHGCMLIYALLHLTGYDSVTIDDIKQFRQWGSKTPGHPETFETPGVEVTTGPLGAGISNAVGLAIAESHLAAKFNKADAKIVDHYTYAVMGDGCNQEGIASEACSLAGHLKLGKLIALYDDNHITIDGRTDVSFTEDVLKRYEAYGWHVQHVADGNTDVDAIAKAIEAAKAVTDKPS

SEQ ID NO: 110096 - protein, 163 aa, Unknown
  Bacterial polypetide isolated from the Sargasso Sea
MSEHPIEERVLANAIRFLSMDAIEKAKSGHPGLPMGFADVATVLFLNHMKFDPKKPRWPNRDRFVLSAGHGSMLLYSLLYLLGYEDMTIEELKSFRMLGSKTPGHPEYQITPGIETTTGPLGQGVANAVGMAISERILNSRLNDSVVNHFTYVVAGDGCLMEG

SEQ ID NO: 110097 - protein, 124 aa, Unknown
  Bacterial polypetide isolated from the Sargasso Sea
MTSQTELANAIRVLAMDAVQAAKSGHPGAPMGMADISEVLWNRLMRHNPANPDWPNRDRFVLSNGHGSMLIYALLHLTGYELSIEDLKQFRQLHSKTPGHPEYGYTPGVETTTGAAGGRASRTL

SEQ ID NO: 110098 - protein, 272 aa, Unknown
  Bacterial polypetide isolated from the Sargasso Sea
RDRFVLSAGHGSMLLYALLYLTGYEKIKLEDIKNFRQLNSICAGHPEYIFNSGIETTTGPLGQGLANSVGLALSAEIYKKKLNSKIINNKTYVIASDGDFMEGISHEAMSLAGHLKLKDLIVFFDNNKISIDGSTSLSVSDNYKKRFESYGWNFIEINGHDEKKINSAIIKAKKSNKPSLISCKTIIGYGSPNKSGKSSSHGAPLGEEEIKLARKKLKWPYQAFEIPKEILSEWREIGAKGEKLEKEWLNELNKTKEDTKKIFNKLNNRVFK

SEQ ID NO: 110099 - protein, 203 aa, Unknown
  Bacterial polypetide isolated from the Sargasso Sea
MISSPSHQEMANAIRFLSADAVQKANSGHPGMPMGMADVATVLLSKFMNFSASNPDWPDRDRLILSAGHGSMLLYSLLNLTGYKDFPIYEIQNFRQLGSRTAGHPEFGHGAGIETTTGPLGQGLANASGMALAERMLSERFGSEIVDHHTYVIAGDGCLMEGVSHEAASFAGHLRLGKLIVIFDDNEISIDGSTQLAVNDNQL

SEQ ID NO: 110100 - protein, 200 aa, Unknown
  Bacterial polypetide isolated from the Sargasso Sea
MANAIRALSMDAVQAANSGHPGAPMGMADMATVLFTRHLKFDATNPEWPDRDRFVLSNGHASMLLYSLLYLTGSPDMTLDEVRNFRQLGSRTPGHPEYGHAAGVETTTGPLGQGIANAVGMALAERMMNARYGDDIVDHHTYVFVGDGCLMEGISHEAISLAGHLGLSRLIVLFDDNEITIDGDTNLSVSDDQMARFAAS

SEQ ID NO: 110101 - protein, 293 aa, Unknown
  Bacterial polypetide isolated from the Sargasso Sea
MTQEIIKFKNNHFKEKTICATRKASELSLNIISNNLENLIGGSADLSGSNNTKANNMQIITPESFDGNYIHYGVREHAMAGIMNGIALHGGLKPYGGTFLVFSDYCRPSIRLSALMNIPVIYIMTHDSIGLGEDGPTHQPVEHLSALRAIPNLTVIRPCDIIETIESWEVALQNTGPTVLVLTRQNLPLIQNNERKDNLVKKGAYEIINYENYDATILATGSEVEIACSASIKLQKHNNLNIRVVSIPSFELFDINEEKYKLDILGDQPIFGIEAGVVNGWEKYLDSKNFVGM

SEQ ID NO: 110102 - protein, 278 aa, Unknown
  Bacterial polypetide isolated from the Sargasso Sea
MGWSISRHFKNNYPPGFKNHKDQINQSIEKTIKNYLKKSDPNATRKSSEMFLELISSLPNLIGGSADLAGSNNTKTKKHEIIKPGNFKGNYIHYGVREHAMCGIMNGLSLHSGLIPYGGTFLIFSDYCKPSIRLAAMMKQRVIYIFTHDSIGLGEDGPTHQPIEQLASLRSIPNLNVFRPADTIETFECWQLALENKNAPSVIALTRQKIDPVRLEYSSTNKSSFGAYEILRTGDDLSVTILATGSETSLAINIGHKLATDGIYSKVVSMPCQELFDQ

SEQ ID NO: 110103 - protein, 154 aa, Unknown
  Bacterial polypetide isolated from the Sargasso Sea
MSKIHNDLANCIRFLSIDAVQKANSGHPGMPMGMADVATVLFKNFLKFNPQNPNWINRDRFVLSAGHGSMLLYSLLYLTGYKSISLNSIKKFRQLNSICAGHPEYHPKTGIETTTGPLGQGIANAVGFAIAEEVLKKKLGENLINHKTYVLAGD

SEQ ID NO: 110104 - protein, 274 aa, Unknown
  Bacterial polypetide isolated from the Sargasso Sea
FKYYKLKKQNITNIFSNNFHKDFENEKKNIIKNLESIATRKSSEKILNILIKNNSNIIGGSADLAGSNNTKTQNHKIISPGNFKGNYIHYGVREHAMCGIMNGLALHSNLIPYGGTFLIFSDYCKPSIRLSALMKKRVIYVMTHDSIGLGEDGPTHQPIEQLSGLREIPNLYVFRPADTTETLECWQIALEKINSPSIIALTRQKLNPVRKEFVKNNKCSYGAYEVLRTKNEINVTIFASGSEVNLAIEISHKLATENIYSKVISVPSQELLNE

SEQ ID NO: 110105 - protein, 286 aa, Unknown
  Bacterial polypetide isolated from the Sargasso Sea
PLGKDEIALTREALGWKEDAFVIPEDVYAAWDAKAKGQTSETAWNELFAQYQAKYPTEAAELLRRINGDLPAEFAAQADAFIAETNAKAETIATRKASQNTLQAFGPLLPELLGGSADLAGSNLTLWKGCQGVQENPAGNYVYYGVREFGMTAIANGVALHGGFVPYVATFLMFMEYARNAVRMSALMKQRVIHVYTHDSIGLGEDGPTHQPIEQIASLRGTPNLNTWRPCDTVEAAISWKSALQRKDGPTALIFSRQNLPFQARNEAQIQNAAKGGYVLAEEKVS

SEQ ID NO: 110106 - protein, 257 aa, Unknown
  Bacterial polypetide isolated from the Sargasso Sea
MNKFNKTLANSIRALSMDAVQKANSGHPGMPMGMADVSTILFKYFLKFNPKNPSWINRDRFVLSAGHGSMLLYSLLFLTGYKSVKLSDIKNFRQLDSICAGHPEYIPNSGIETTTGPLGQGISNAVGFALAEEILKKKFGKDIINHKTYVIAGDGCLMEGISHEAMSLAGHLKLKNLIMLFDNNSISIDGPTSLAVSDNFKKRFESYGWDYIDINGHNEKEIFKALKKVQKAKKPTVITGKTKIGYGSPNKSGKASS

SEQ ID NO: 110107 - protein, 267 aa, Unknown
  Bacterial polypetide isolated from the Sargasso Sea
LIGGSADLTHSNYTDIKGETGSFQPHSPEKRYLHFGVREHAMAAVLNGIAYHNSGLIPYGGTFLVFADYMRGSMRLSALSELGVIYVLTHDSIGVGEDGPTHQPIETIPSLRAMPNMLVFRPGDGNETSGAYKLAIQNRKRPSALCLSRQGMPNQENTSIDKVALGGYVVSDCEGTPDLIFIGTGSELNLCIEASKEISSLGKKIRVVSMPCVELFEEQEESYKESVLPSSVKKRVVVEAAHSFGWHKYTGFEGICITMDRFGASAP

SEQ ID NO: 110108 - protein, 274 aa, Unknown
  Bacterial polypetide isolated from the Sargasso Sea
MSNAIRALTMDAVQAANSGHPGMPMGMADAATTLFCDHLKFSASAPSWADRDRFVLSAGHGSMLLYALLHLTGYADMTLEELRNFRQLGARTAGHPEFGHASGIETTTGPLGQGVANAVGMAMAERHLAAKFGDDLVDHHTYVIAGDGCLMEGISHEAASMAGHMQLSRLIVLFDDNGISIDGSTNLTVSDNITERFESYGWQVLACDGHDMAAVSGAITAAKADKRPSLIRCKTVIGFGSPAKQGTSGVHGAPLGAAEITAARAALDWPHAAF

SEQ ID NO: 110109 - protein, 274 aa, Unknown
  Bacterial polypetide isolated from the Sargasso Sea
MSDCIRVLSAEAVQNANSGHPGMPMGIADVATVLFTNFINIDPLKTDWADRDRFILSAGHGSMLIYALNFLSGFKDMSLESIKNFRQLNSNTPGHPEYGHTEGVETTTGPLGQGLANAVGMALAEKMLNARFSDELVNHFTYVIVGDGCLQEGISHESVEFAGHQNLSKLIVFWDNNSISIDGDTNLATSSNQINRFKSSGWHTQEINGHNYNEIQTAIEQAKKIDKPSFIACKTIIGFGSPNLSGTEKSHGSPLGDEEVKNVKNNLNWSEQKF

SEQ ID NO: 110110 - protein, 159 aa, Unknown
  Bacterial polypetide isolated from the Sargasso Sea
MIEYRVIANAIRFLSIDAIEKAKSGHPGMPMGFADVATVLFLKHLKFDPSQPDWPDRDRFVLSAGHGSMLLYSLLYLTGYEEMTLDEIKSFRQLGSKTPGHPEFTITPGIETTTGPLGQGLANAVGMAISEKIMNSKLSDSIIDHYTYVVVGDGCLMEG

SEQ ID NO: 110111 - protein, 288 aa, Unknown
  Bacterial polypetide isolated from the Sargasso Sea
GGSADLTGSNNTYSSASSEMLPDNPQGNHIFYGVREFGMTAMMNGMLLHGGIKPYGGTFLVFMDYARNAVRLAALMEIPNIFVYTHDSIGLGEDGPTHQPIEHLVTLRATPNLNNWRPADIIETAVSWKEAITSSDTPHSLILSRQNLPFVQRTKEQISLIQKGGYLLSHEEDADITLVASGSEVQLILAAAKSIKNDGFKVNIVSIPCLDKFYLQDQTYRDSVVAPEIPKLIVEALHPDSWHGLVNLNDKIIGIKSFGESAPGDELMVKFGFTEENIVSEVKKLLTK

SEQ ID NO: 110112 - protein, 316 aa, Unknown
  Bacterial polypetide isolated from the Sargasso Sea
MSDRQRYANALRVLAMDAVQKANSGHPGMPMGMADIAEVLWRDYIKCNPTHPNWFDRDRFVLSNGHGSMLLYGLLHLTGYDVSLDDLRQFRQLHSKTPGHPELHEAPGVETTTGPLGQGLANAVGMALAEHKCARHFNRPDFNIVDHYTYVFAGDGCLMEGISHEACSLAGTWGLGKLIVFWDDNGISIDGDVSGWFTDDTPARFESYRWQVIRDVDGHDSAAIAAAIASARANIDQPTLICCKTKIGFGSPNMVGTAKTHGSPLGDEEIAAVRQQLGWSEPAFEIPSDIQQAWNLTEKGNDAELLWNHVFTKYET

SEQ ID NO: 110113 - protein, 301 aa, Unknown
  Bacterial polypetide isolated from the Sargasso Sea
FNPKNPDWINRDRFVLSAGHGSMLLYSLLYLNGYKSISIEDIKNFRQLNSICAGHPEYKKSTGIETTTGPLGQGLANAVGMAVAEEIFRKKFGSEFINNKTYVIASDGDLMEGISHEAMSLAGHLKLKNLIVFFDNNKISIDGSTSLSVSDNYKKRFESYGWSFMEVNGHDEKQISKAITKASKSKKPTIISCKTIIGFGSPNKSGKASSHGSPLGNEEIALVRKKLKWNSASFEIPQQILDEWREIGNKGEQLEKNWLQIINKKNPKIKNELNKFKEKLDLSGLESLIQKEKEKYLKLNQ

SEQ ID NO: 110114 - protein, 266 aa, Unknown
  Bacterial polypetide isolated from the Sargasso Sea
LSAGHGSMLLYSLLYLTGYKSISINDIKNFRQLDSICAGHPEYHPNTGIETTTGPLGQGISNAVGFAISEEILKKKYGKKKIDHKTYVLAGDGCLMEGISHEALSLAGHLKLKNLILLFDNNSISIDGPTSLAVSDNHEKRFQSYGWNFIKINGHNYKEIFNALKKAQKSKKPVAISCKTTIGFGSPNKSGKASSHGSPLGEDEIKLVRKKLGWKYEPFHIPGNLFDEWKKIGEKAYKNAKKHESRFKKIFKDKKNLKSLNTLMKK

SEQ ID NO: 110115 - protein, 233 aa, Unknown
  Bacterial polypetide isolated from the Sargasso Sea
MNKINKELANAIRFLSIDAVQKANSGHPGMPMGMANVATILFKYFLRFNPKNPNWLNRDRFVLSAGHGSMLLYSLLYLTGYKSITLKDIKSFRQIDSICAGHPEYHPNTGIETTTGPLGQGISNAVGFALAEEILKKKVGKKIINHKTYVLAGDGCLMEGISHEALSLAGHLKLKNLILLFDNNSISIDGPTSLTVSDDHKKRFNSYGWDFLEINGHNDKEIFKALKKSQNSK

SEQ ID NO: 110116 - protein, 204 aa, Unknown
  Bacterial polypetide isolated from the Sargasso Sea
MSKQNRDLANAIRFLSIDAVEKANSGHPGLPMGMADVVTILFKYYLKFNPQNPNWINRDRFVLSAGHGSMLLYSLLYLTGYKSISIDSIKNFRQLNSICAGHPEYEPYTGIETTTGPLGQGIANAVGFALAEEILKKKFGKKTINHKTYVLAGDGCLMEGISHEALSLAGHLKLKNLVMLFDNNSISIDGPTSLSVSDNYKKRF

SEQ ID NO: 110117 - protein, 142 aa, Unknown
  Bacterial polypetide isolated from the Sargasso Sea
MSKLHNDLANCIRFLSIDAVQKANSGHPGMPMGMADVATVLFKKFLRFNPKNPDWLNRDRFVLSAGHGSMLLYSLLYLTGYKSISINNIKKFRQLNSICAGHPEYHPKTGIETTTGPLGQGISNGVGFAIAEEILKNKLGKD

SEQ ID NO: 110118 - protein, 196 aa, Unknown
  Bacterial polypetide isolated from the Sargasso Sea
MNKLNKTLSNAIRVLSMDAVQKANSGHPGMPMGMADVVTILYKYFLRFNPKNPDWLNRDRFVLSAGHGSMLLYSLLYLTGYKSISINDIKKFRQINSICAGHPEYHPNSGIETTTGPLGQGISSAVGFAIAEEILKKKIGKNIINHKTYVLAGDGCLMEGISHEAMSLAGHLKLKNLIMLFDNNSISIDGPTNLAV

SEQ ID NO: 110119 - protein, 288 aa, Unknown
  Bacterial polypetide isolated from the Sargasso Sea
IDGHDPDAIASAIDIAKVDDRPSMIACKTIIGRGAPNKEGSAATHGAPLGDAEIAAAREAMGWPHPPFEVPDDVLSAWREAGMRGSDAYAAWVKRTSSADDSFWRALDGGLKDGWLDALNSHKAVCSKEQPNWATRKASGEALGVLTEAIPEMVGGSADLTGSVNTKTASMLPVFAEEFGGRYIHYGVREHAMAAIMNGIALHGGFIPYGGTFLVFADYMKGAMRLSALMEQRVIYVLTHDSIGLGEDGPTHQAVETLAMLRALPNLKVYRPCDPVETAECWALALQD

SEQ ID NO: 110120 - protein, 181 aa, Unknown
  Bacterial polypetide isolated from the Sargasso Sea
MSTTTSGATRSVDRQTKANAIRALSMDAVQKAKSGHPGMPMGMADISEVLWCDFLKHNPSNPAWPDRDRFILSNGHGSMLHYALLHLAGYDLPITELQNFRQLHSRTPGHPEYGYAPGVETTTGPLGQGITNGVGMALAEKVLAAQFNRDEHVVVDHYTYVFLGEGCMMEGISHEACSLAG

SEQ ID NO: 110121 - protein, 229 aa, Unknown
  Bacterial polypetide isolated from the Sargasso Sea
MNKLHNDLANCIRFLSIDAVQKANSGHPGMPMGMADVVTVLFKSFLKFNPKNPNWMNRDRFVLSAGHGSMLLYSLLFLTGYKSISLNGIKNFRQLNSICAGHPEYHANSGIETTTGPLGQGIANAVGFAIAEEILKKKLGNELINHKTYVLAGDGCLMEGISHEAMSLAGHLKLKNLVMLFDNNSISIDGPTDLAVSDNFKKRFESYGWDYILINGHNEKEIFKALKNV

SEQ ID NO: 110122 - protein, 310 aa, Unknown
  Bacterial polypetide isolated from the Sargasso Sea
GLNEIKLVRKALKWKYKPFEVPNKLLKEWRAIGNKGQLIEKKWNKLIKKQSKKFSLIKKNNFKNALNLQKKLAIKEPKSLATRKCSELTLNALTNSNNNIIGGSADLAGSNNTKTKKHKIITPGNFDGNYIHYGVREHAMSGVMNGIALHSNFIPYGGTFLIFSDYCKPSIRLSALMQQRVIYVMTHDSIGLGEDGPTHQPIEQLSGLRSIPNLNVFRPADRIETIECWEHALKTAKTPSVLSLTRQNLDPIRKKYSSNNKCSLGAYEVLRTNKKIKLTILASGSEVNLAIEACHKLARDKIYSKVISVP

SEQ ID NO: 110123 - protein, 304 aa, Unknown
  Bacterial polypetide isolated from the Sargasso Sea
WLRAILASKYNKDGHSIVDHYTYVFLGDGCLMEGISHEACSLAGTLNLSKLICVYDDNGISIDGEVDGWFDEDVCARFKSYDWHVIENVDGHNAEAISKAISEAKASNQPSLIDCKTVIGFGSPNKAGTADTHGAALGDDEIANLRESLGWEHDPFIVPDEIKNAWDCKEKGQLQENDWNQRFEEYKSQHPELADEFLNCINENIADDEMVNLDALIDQLRENADVVATRKSSLIALNALKEDCSNMIGGSADLTGSVCTYHESSKPITKNDHDGNYIFYGVREFGMSAIMNGIDLHGGLIPYS

SEQ ID NO: 110124 - protein, 275 aa, Unknown
  Bacterial polypetide isolated from the Sargasso Sea
RCSTVLFTKFLRFNPKNPDWLNRDRFVLSAGHGSMLLYSLLYLTGYKSISINNIKKFRQLNSICAGHPEYHPKTGIETTTGPLGQGISNAVGFAIAEEILKNKLGKDLINHKTYVLAGDGCLMEGISHEAMSLAGHLKLKNLVMLFDNNSISIDGPTNLAVSDNFKKRFEGYGWDYISINGHNEKEIFRALKKAQKAKKPTVISCKTKIGYGSPNKSGKASSHGSPLGLDEIKLVRKALNWKNKPFDIPNKILKNWRKIGQRGENIEKKWNRILN

SEQ ID NO: 110125 - protein, 168 aa, Unknown
  Bacterial polypetide isolated from the Sargasso Sea
MVAASVSLESLCVNSIRMLAVDAVNKSNSGHPGLPMGCAPMGYALWQNILNHNPNNPKWFNRDRFVLSAGHGCMLLYSLLHLTGYKSVSIEDIKEFRQWGSKTPGHPETFETEGVEVTAGPLGAGISNAVGLAIAETHLAAKFNKPDCNIVDHYTYVIMGDGCNQEGI

SEQ ID NO: 110126 - protein, 254 aa, Unknown
  Bacterial polypetide isolated from the Sargasso Sea
SREHAMAAILNGIAYHNSGLIPYGGTFLVFADYMRGSMRLSALSELGVIYVLTHDSIGVGEDGPTHQPIETIPSLRAMPNMLVFRPGDGNETSGAYKLAIQNRKRPSALCLSRQGMPNQENTSIDKVALGGYIVSDCEGTPDLIFIGTGSELNLCIEASKEIANLGKKTRVVSMPCVELFEEQEESYKESVLPSSVTKRVVVEAAHSFGWHKYTGFDGICITMDRFGASAPGGECMKNFGFTVENVVNKTKEIL

SEQ ID NO: 110127 - protein, 290 aa, Unknown
  Bacterial polypetide isolated from the Sargasso Sea
RFVLSNGHGSMLIYALSHLTGYDLSIEDIKNFRQLHSRTPGHPELGYAPGVETTTGPLGQGITNAVGMAIAEKSLAAQFNKPEHEIINHYSYVFLGDGCLMEGISHEACSLAGTLGLGKLIAFYDDNGISIDGHVEGWFTDDTPGRFEAYGWQVIPAIDGHDSVAIKQAIGSARLNKEKPTLICCKTIIGKGAPNKQGGEACHGSPLGEAEIIQARELLNWPHKAFHVPEEVYESWSAKVSGAELESQWNQLFDRYAKSYPELSKELKRRLSGELPEGFAEACKEYVKAC

SEQ ID NO: 110128 - protein, 284 aa, Unknown
  Bacterial polypetide isolated from the Sargasso Sea
ATILFKNFLRFNPNNPNWFNRDRFVLSAGHGSMLLYSLLYLTGYKSISINNIKKFRQLNSICAGHPEYHPKSGIETTTGPLGQGISNAVGFAIAEEILKNKLGKDLINHKTYVVAGDGCLMEGISHEAMSLAGHLKLKNLVMLFDNNSISIDGPTNLAVSDNFKKRFEGYGWDYISINGHNEKEIFKALKKVQKAKKPTVISCKTKIGYGSPNKSGKASSHGSPLGLDEIKLVRNALNWKNKPFNIPNKILKSWRKIGQKGEATEKKWKKIFKRKKIKFNLIFK

SEQ ID NO: 110129 - protein, 289 aa, Unknown
  Bacterial polypetide isolated from the Sargasso Sea
LKKDKILASRKSSELIISSLVKKNNILIGGSADLAGSNNTKTKNHEIITPGNFNGNYIHYGVREHAMCGIMNGLALHSKIIPYGGTFLIFSDYCKPSIRLAAMMEQQVIYVMTHDSIGLGEDGPTHQPIEQLSGLRSIPNLNIFRPSDRLETIECWEHALESFKTPSILCLTRQNLNPIRSKYSKTNKCSLGAYEVLRTNKKVKLTILASGSEVNLALETSHKLAKDKIYSKVISVPCMELFDLQSNKYKDKILKETRLKISIEAGSSDCWKKYVGDNGMTFGIKQFWE

SEQ ID NO: 110130 - protein, 271 aa, Unknown
  Bacterial polypetide isolated from the Sargasso Sea
SADLSGSNNTKTKNMLTIKKNFFKGSYIYYGVREHGMAAIMNGIALHGGLIPYGGTFLVFTDYCRPSIRLAAIMKLPVIYVMTHDSIGLGEDGPTHQPVEHLSSLRAIPGLTVIRPCDLIETIEAWEYALQSNSPTVIVLTRQGLPMLRKKKSSNMLKKGAYPVIDPKNYHATILATGSEVEIACESSKELQKKGIFVRVLSFPSWELFDKLSDKEKNKILGKKPIFAIEAAIINGWEKYVTNKNFIGMKSFGASGPYKKLYDHFGINSKA

SEQ ID NO: 110131 - protein, 303 aa, Unknown
  Bacterial polypetide isolated from the Sargasso Sea
ACKTKIGFGSPNKESKSSSHGSPLGEDEIKLTRKNLDWDYDSFEIPDDILSKWRSFPKKNKTIRQNWIEKNANIISSKKYKDFFSKNLSDEIIDKLKVFKNKHFKEKTNCASRKASETAIEFFSSELENLVGGSADLTGSNNTKTKNMTHISKNDFNGSYIYYGIREHGMAAIMNGLALHGGLRPYGGTFLVFTDYCRPSIRLAALMNLPIIYIMTHDSIGLGEDGPTHQPIEHLASLRAIPNLTVIRPSDIIETIEAWQYALESQSPCVIVLTRQNLPMLRINNNINVVENGAYPIIDFENT

SEQ ID NO: 110132 - protein, 213 aa, Unknown
  Bacterial polypetide isolated from the Sargasso Sea
MNKLHNDLANCIRFLSIDAVQKANSGHPGMPMGMADVATVLFKNFLRFNPKNPDWLNRDRFVLSAGHGSMLLYSLLHLTGYKSISLNSIKKFRQLNSICAGHPEYHPKTGIETTTGPLGQGIANAVGFAIAEEILKQKIGKEIINHKTYVLAGDGCLMEGISHEAMSLAGHLKLKNLIMLFDNNSISIDGPTNLAVSDNFKKRFESYGWEYIL

SEQ ID NO: 110133 - protein, 280 aa, Unknown
  Bacterial polypetide isolated from the Sargasso Sea
MADVATILFKNFIKFNPKNPNWLNRDRFVLSAGHGSMLLYSLLYLTGYKSISLKDIKNFRQLNSICAGHPEYVPNSGIETTTGPLGQGIANAVGMAIAEEILKEKIGKNIINHKTYVLAGDGCLMEGISHEALSLAGHLKLKNLIMLFDNNSISIDGPTSLAVSDNFKKRFESYGWDYILINGHNEKQISKALRKVQNAKKPTVISCKTVIGFGSPNKSGKETSHGSPLGEDEIKLVRKKLKWNHPPFEVPKKIIDEWRKIGSKGIKEAEKWYKKNRNKK

SEQ ID NO: 110134 - protein, 189 aa, Unknown
  Bacterial polypetide isolated from the Sargasso Sea
MPTNLDLANAIRALSMDAVETASCGHPGMPMGMADIAEVLWRKHLKHNPNNPNWPDRDRFVLSNGHGSMLIYSLLYLTGYDLSIDDLKNFRQLGSKTPGHPEHGITPGVETTTGPLGQGLANAVGMALSERMLAERFNKDELEVVDHMTYVFAGDGCLMEGISHEACSLAGTLGLGKLIVIYDDNEISI

SEQ ID NO: 110135 - protein, 236 aa, Unknown
  Bacterial polypetide isolated from the Sargasso Sea
VLKKEKKNAIKEPKSLATRKCSEMTLNALTKQKNNLIGGSADLAGSNNTKTKNHKIIKPGNFTGDYIHYGVREHAMSGVMNGIALHSNLIPYGGTFLIFSDYCKPSIRLSALMKKRVIYVMTHDSIGLGEDGPTHQPIEQLSGLRAIPNLNVFRPADRIETIECWEHALKSSKTPSVLSLTRQNLNPVRKTYLNRNLCSLGAYEVLRTNKKINLTILASGSEVNLASEVSHKLAKR

SEQ ID NO: 110136 - protein, 132 aa, Unknown
  Bacterial polypetide isolated from the Sargasso Sea
MNKQNKILANAVRFLSIDAVQKANSGHPGMPMGMADVVTILFKYFLRFNSKNPSWLNRDRFVLSAGHGSMLLYSLLYLNGYKSISLKSIKNFRKLNSICAGHPEFKANTGIETTTGPLGQGISNAVGFAIAD

SEQ ID NO: 110137 - protein, 291 aa, Unknown
  Bacterial polypetide isolated from the Sargasso Sea
DIKNFRQLNSICAGHPEYEKNSGIETTTGPLGQGIANAVGFAIAEEVLKKKLGSKIINHKTYVLAGDGCLMEGISHETMSLAGHLKLKNLIMLFDNNSISIDGPTNLAVSDNYKKRFESYGWNYIDIDGHNERQIFSAINKAQKAIKPTVISCKTEIGFGSPNKSGKASSHGSPLGPEEIELVRKKLNWPYKPFEIPNSILKEWRKIGLKGSKTEVKWKKYFSRNKNNLKDLFNNNFYHSILKQKKDVIANLKPLATRKSSEAVLNSLFKLKNNLIGGSADLAGSNNTKSK

SEQ ID NO: 110138 - protein, 183 aa, Unknown
  Bacterial polypetide isolated from the Sargasso Sea
MSLQNKDLSNAIRFLSIDAVEKANSGHPGMPMGMADVATVLFKHFLKFNPKDPDWVNRDRFVLSAGHGSMLLYSLLYLTGYKSISINDIKNFRQLNSICAGHPEYYPSTGIETTTGPLGQGIANAVGFALSEEILKKKISKKIINHKTYVLAGDGCLMEGISHEALSLAGHLKLKNLIMLFDK

SEQ ID NO: 110139 - protein, 271 aa, Unknown
  Bacterial polypetide isolated from the Sargasso Sea
EGTAATHGAPLGVEEIAEARKKLDWPHPEFMIPEPIKQAWDSNKKGFAAESAWKEKLVAYEEEYPELAMELVRRIKGQLPGHFLKKADQFIRECQQNRNTIATRKASQNCLEAYASLLPEVIGGSADLAGSNLTLWSGSTPISEKTDGNYIYYGVREFGMTAISSGIALHGGFIPYSATFLIFMEYARNAARMAALMRQRSILVYTHDSIGQGEDGPTHQPVEQLTALRVTPNMSVWRPCDSVETAVAWKAAIQRSDGPTALVLSRQGVPH

SEQ ID NO: 110140 - protein, 303 aa, Unknown
  Bacterial polypetide isolated from the Sargasso Sea
NINKIFSSNFSNIFKKEKQNAIKKLETLATRKSSEKILTALNEKKNMIIGGSADLAGSNNTKTKNHIPISKNNFKGNYIHYGVREHAMCGIMNGLSLHSKLIPYGGTFLIFSDYCKPAIRLSALMKLNVVYVMTHDSIGLGEDGPTHQPIEQLTGLRSIPNLNVFRPADTTETIECWELALKNLATPSVLALSRQNLSPIRKSYESQNKCSLGAYEIYRSSDKVDLTIYASGSEVNLAIEVSHKLATVNIYTKVISVPCQEIFFKQNKNYKNNILNETNYKISIEAGRSDTWSKFVEKMGYLW

SEQ ID NO: 110141 - protein, 209 aa, Unknown
  Bacterial polypetide isolated from the Sargasso Sea
MVAASVSLESLCVNSIRMLAVDAVNKSNSGHPGLPMGCAPMGYALWQNILNHNPNNPKWFNRDRFVLSAGHGCMLLYSLLHLTGYKSVSIEDIKEFRQWGSKTPGHPETFETEGVEVTAGPLGAGISNAVGLAIAETHLAAKFNKPDCNIVDHYTYVIMGDGCNQEGIASEACSLAGHLKLGKLIALYDDNQITIDGRTDVSFTEDVLK

SEQ ID NO: 110142 - protein, 215 aa, Unknown
  Bacterial polypetide isolated from the Sargasso Sea
LSALSELGVIYVLTHDSIGVGEDGPTHQPIETIPSLRAMPNMLVFRPGDGNETSGAYKLAIQNRKRPSALCLSRQGMPNQENTSIDKVALGGYIVSDCEGTPDLIFIGTGSELNLCIEASKQISNLGKKTRVVSMPCVELFEEQEKSYKESVLPSSVTKRVVVEAAHSFGWHKYTGFDGICITMDSFGASAPGGECMKNFGFTVENVVDKTKEIL

SEQ ID NO: 110143 - protein, 250 aa, Unknown
  Bacterial polypetide isolated from the Sargasso Sea
ANGIALHGGFLPYTSTFLMFVEYARNAVRMAALMKQRHIMVYTHDSIGLGEDGPTHQPVEQLASLRVTPNVSTWRPCDQVETAVAWRYGVERHDGPTALILSRQNLVQQERSEQQLADIARGAYVLKDCVGQPQLILIATGSEVELALAARDRLTAEGVRARVVSMPSTDAFDKQDVAYREAVLPKTVTARIAIEAGIADGWYKYIGLNGAVVGMTTFGESAPAEALFVKFGFTVDNVVMQAKRILNNGI

SEQ ID NO: 110144 - protein, 243 aa, Unknown
  Bacterial polypetide isolated from the Sargasso Sea
MNKLYSELANCIRFLSIDAVQKANSGHPGMPMGMADVATVLFKDFLNFNPQNPNWINRDRFVLSAGHGSMLLYALLYLTGYKSVSLKDIKNFRQLNSICAGHPEYHPNSGIETTTGPLGQGISNAVGFAISEEILKKKLRKNKINHKTYVIAGDGCLMEGISHEALSLAGHLKLKNLILLFDNNSISIDGPTNLSVSDNHEKRFKSYGWEYLKIDGHNHKEIFKALKKAQKSKKPIAISCKNT

SEQ ID NO: 110145 - protein, 199 aa, Unknown
  Bacterial polypetide isolated from the Sargasso Sea
MTNAIRFLSMDAVQKAKSGHPGMPMGMADVATVLFKHFLKYNPKNPNWLNRDRFILSAGHGSMLLYSLLYLTGYKSISLNNIKKFRQLNSICAGHPEYHPGTGIETTTGPLGQGIANSVGFAIAEEILRKKIGKEIINHKTYVLAGDGCLMEGISHEAMSLAGHLKLKNLVMLFDNNSISIDGPTSLAVSDNFKKRFES

SEQ ID NO: 110146 - protein, 312 aa, Unknown
  Bacterial polypetide isolated from the Sargasso Sea
FTYCFLGDGCLMEGISHEAMSFAGVHELNKLICFYDSNGISIDGEISDWYKDNISLRCKAYGWNVIDNIDGHNREEIDEAIFVAKKSKKPTMIVCKTHIGYGAGNKQDSELSHGAALGSEIVKELRENLDWPYSEFEIPHEIYADWDASDIGQKYEDDWNEKVQILKSENPEKGELLERLLNEELPEKFDSNFSAFLEEILKHNEPIATRKASQKVLEFLKKNLPELIGGSADLSGSNNTNTSISNPITSSQNGNYIYYGVREFGMNAIMNGISLHGGLIPYAGTFLVFMDYGRNAVRMAALMGIKVIFVYS

SEQ ID NO: 110147 - protein, 272 aa, Unknown
  Bacterial polypetide isolated from the Sargasso Sea
MANCIRFLSIDAVQKANSGHPGMPMGMADVATVLFKDYLKFNPKNPSWINRDRFVLSAGHGSMLLYSILYLTGYKSVSLNDIKNFRQLDCICAGHPEYHPNTGIETTTGPLGQGISNAVGFAIAEEILKKKVGKNKIDHKTYVLAGDGCLMEGISHEALSLAGHLKLKNLILLFDNNSISIDGPTSLAVSDNHEKRFQSYGWDYIKINGHNFKEISKAFKKAQKAKKPIAISCKTVIGYGSPNKSGKASSHGSPLGEDEVKLVRKKLNWNYE

SEQ ID NO: 110148 - protein, 175 aa, Unknown
  Bacterial polypetide isolated from the Sargasso Sea
MSKLHNDLANCIRFLSIDAVQKANSGHPGMPMGMADVATVLFKDFLNFNPKDPSWINRDRFVLSAGHGSMLLYSLLYLTGYKSISLNNIKNFRQLDSICAGHPEYHENSGIETTTGPLGQGISNAVGFAISEEILKKKVGKKIIDHKTYVLAGDGCLMEGISHEALSLAGHLKLK

SEQ ID NO: 110149 - protein, 307 aa, Unknown
  Bacterial polypetide isolated from the Sargasso Sea
NSGKSSSHGSPLGVDEIKLVRKTLKWSHKPFQIPNKILNEWKKIGKKGEKNEKKWNKIYKTKKKLIKKFFQNNFTKVLKEEKQNACKEIKSLATRKCSELTLNLLTKNNNTLIGGSADLAGSNNTKTKNHKIIKPGSFDGNYIHYGVREHAMSGIMNGLALHSNFIPYGGTFLIFSDYCRPSIRLSALMKQRVIYVMTHDSIGLGEDGPTHQPIEQLSGLRSIPNLNVFRPADRMETIECWEQALKNSKTPSILSLTRQNLNPIRKKYSNINKCSFGAYEVLRTNQKIHITILASGSEVSLAIEISP

SEQ ID NO: 110150 - protein, 265 aa, Unknown
  Bacterial polypetide isolated from the Sargasso Sea
NERFDDFLRDCSLQEDPIATRKASQICLDHFCADLPELIGGSADLTGSNNTFSKHNTELTPDNPSGSHIYYGVREFGMVTIMNGMSLHGGIRPYGGTFLVFMDYARNAVRLSAMMSLPNIYVFTHDSIGLGEDGPTHQPIEHLVTLRATPNLYNWRPADLKETAVAWKESILSKSPSCLILSRQGLPQVKMSEDKISNISKGGYLVQKDEDAELNIISSGSELQLAIQAAKDLDQSGIKVNVVSMPCLDRFLQADLEYQNKVIQK

SEQ ID NO: 110151 - protein, 303 aa, Unknown
  Bacterial polypetide isolated from the Sargasso Sea
GLSAVLPELLGGSADLTGSNLTNWKAAKPVRVNAEGKAAGNYVNYGVREFGMSAAINGIALHGGFKAFGGTFLTFSDYSRNALRVAALMKAPSIFVFTHDSIGLGEDGPTHQSIEHVASLRLIPNLQVWRPADTVETAVAWTHAVEHHGPSCLIFSRQNLPFSERTDAQIANIEKGGYVLRDWNDEIVARKTILIATGSEVELALNAVEPLAREGIAARVVSMPSTTVFDKQDAEYRERVLPQGVRRVAIEAGVTDFWRKYVGLEGGVVGIDTFGESAPAGVLFKHFGFTVEHVVETAKAALG

SEQ ID NO: 110152 - protein, 179 aa, Unknown
  Bacterial polypetide isolated from the Sargasso Sea
MSKLYKELANCIRFLSIDAVQKANSGHPGMPMGMADVATVLFKDFIKFNPKDPSWVNRDRFVLSAGHGSMLLYSLLYLTGYKSVTLKDIKNFRQIHSICAGHPEYHPKTGIETTTGPLGQGISNAVGFAISEEILKKKLGKKIIDHKTYVLAGDGCLMEGISHEALSLAGHLKLKNLIL

SEQ ID NO: 110153 - protein, 244 aa, Unknown
  Bacterial polypetide isolated from the Sargasso Sea
TVISCKTKIGYGSPNKSGKASSHGSPLGADEIKLVRKVLNWKSKPFDIPKKILKDWRKIGQRGEILEKKWNKILKRKKIKFKQTLKNNFTTAIKKEKENAIKEPKSLATRKCSEMTLSALTKEKNNLIGGSADLAGSNNTKTKNHNIIKPGDFTGNYIHYGVREHAMSGIMNGIALHSNLIPYGGTFLIFSDYCKPSIRLSALMKKRVIYIMTHDSIGLGEDGPTHQPIEQLSGLRAIPNLKCI

SEQ ID NO: 110154 - protein, 236 aa, Unknown
  Bacterial polypetide isolated from the Sargasso Sea
IRPYGGTFLVFMDYARNAVRLSAMMSLPNIYVFTHDSIGLGEDGPTHQPIEHLVTLRATPNLYNWRPADLKETAVAWKESILSKSPSCLILSRQGLPQVKMSEDKIINISKGGYLVQKDENAELNIISSGSELQLAIQAAKDLDQLGIKVNVVSMPCLDRFLEADLEYQNKVIQKDLPSIVVEAAHPNSWYKILGRDDLVIGMTTFGESAPAKMLFEEFGFTAGNIVSKAKKLLNK

SEQ ID NO: 110155 - protein, 285 aa, Unknown
  Bacterial polypetide isolated from the Sargasso Sea
HVIENVDGHDAEAISKAISEAKASNQPSLIDCKTVIGYGSPNKAGTADTHGAALGDDEIANLRESLGWEYDPFIVPDEIKNAWDCKEKGQLQENDWNRRFEEYKSQNPELADEFLNCINGEIADNEMVNLDTLIDQLRENADVVATRKSSLIALNALKEDCSNMIGGSADLTGSVCTYHESSKPITKNDHHGNYIYYGVREFGMSAIMNGIDLHGGLIPYSGTFLTFSDYSRNAIRMAAMMELGVIHVLTHDSIGLGEDGPTHQPIEHVPSLRLIPGLDVWRPCD

SEQ ID NO: 110156 - protein, 256 aa, Unknown
  Bacterial polypetide isolated from the Sargasso Sea
CETQEKKWIKIFNKNKTKFKNLTKNSSISILKREKRNAILEPKNLATRKCSEMTLNALTNQNHNLIGGSADLAGSNNTKTKYQKIIKPGDFSGDYIHYGVREHGMSGIMNGIALYGNLIPYGGTFLIFSDYCKPSIRLSALMQKRVIYVMTHDSIGLGEDGPTHQPIEQLSGLRSIPNLNVFRPADRVETIECWEHALKSSKTPSILSLTRQGLNPIRKSFTNINKCSLGAYEVLRTDNKINLTIFASGSEVNLAI

SEQ ID NO: 110157 - protein, 286 aa, Unknown
  Bacterial polypetide isolated from the Sargasso Sea
LAVSDNFKKRFESYGWDYILINGHNEKEIYKALKKVQKAKKPTVISCKTKIGYGSPNKSGKASSHGSPLGIEEIKLVRKNLKWASKPFEIPKDILNQWKKIGYRGVKLESKWNKIYQRKKNKINKLLENKFSKSIKFEKKKAAKEIKSLASRKSSELVLNSIIKDSNTLLGGSADLAGSNNTKTKYHKIIKSGDFVGNYIHYGVREHAMCGIMNGLALHSKFIPYGGTFLIFSDYCKPSIRLAAIMKQRVIYVMTHDSIGLGEDGPTHQPIEQLAGLRAIPNLNVF

SEQ ID NO: 110158 - protein, 253 aa, Unknown
  Bacterial polypetide isolated from the Sargasso Sea
GVETTTGPLGQGLANAVGMAVAEKTLAAQFNRQGHDIVDHYTYVFVGDGCLMEGISHEVCSLAGTLGLGKLIVVYDDNGISIDGEVDQWFSDDTNKRFEAYGWQVLSADGHNAEETSEALKKARSEKNRPSIISCQTIIGFGAPSKEGTAATHGAPLGEEEITAARKKLGWPHDDFVIPKSVKDAWNAIEKGFSAESAWKEKLVAYEEEHPDLAMEFVRRIKGQLSEHFGQKADEFIRQCQENGNDIATRKAS

SEQ ID NO: 110159 - protein, 269 aa, Unknown
  Bacterial polypetide isolated from the Sargasso Sea
KNSDLANILRVLSMDAVEEAKSGHPGMPMGMADIAEVLWRKHLIHNPNNPDWPNRDRFVLSNGHGSMLIYALLHLSGYDLSLDELRNFRQLGSKTPGHPEYGITPGVETTTGPLGQGISNAVGMAISEKILAEKFNTSEHNLVDHMTYVFTGDGCLMEGISHEACSLAGTLGLGKLILIYDDNGISIDGNVKGWFTEDIPERFKSYGWQVIPAVDGHNADDIDKAIKTAKADADKPTIICCKTIIGKGSPKKEGSASVHGSALGEEEIK

SEQ ID NO: 110160 - protein, 142 aa, Unknown
  Bacterial polypetide isolated from the Sargasso Sea
QGLANATGMALAERMLSERFGSEIVDHYTYVIAGDGCLMEGISHEAASFAGNLGLSKLIVLFDDNGISIDGCTELAVNDNQLLRFEACAWHVSECDGHDPDAIEQAIRQAKENQEKPSFIACKTVIGFGSPNKAGTAASHGA

SEQ ID NO: 110161 - protein, 223 aa, Unknown
  Bacterial polypetide isolated from the Sargasso Sea
MANCIRFLSIDAVQKANSGHPGMPMGMSDVATVLFKDFLNFNPKNPSWINRDRFVLSAGHGSMLLYSLLFLTGYKSISLNDLKNFRQLDSICAGHPEYHPNSGIETTTGPLGQGISNAVGFAISEEILKKKFGKNKINHKTYVLAGDGCLMEGISHEALSLAGHLKLKNLILLFDNNSISIDGPTSLAVSDDHEKRFKSYGWNYLKINGHNYKEIFKALKNAQ

SEQ ID NO: 110162 - protein, 144 aa, Unknown
  Bacterial polypetide isolated from the Sargasso Sea
MTKNYKNLSNAIRFLSVDAVQKANSGHPGMPMGMADVATVLFKDFLNFNPKNPSWINRDRFVLSAGHGSMLLYSLLYLTGYKSVSLNDIKNFRQLDSICAGHPEYHINSGIETTTGPLGQGISNAVGFAIAEEILKKKMEKIKS

SEQ ID NO: 110163 - protein, 147 aa, Unknown
  Bacterial polypetide isolated from the Sargasso Sea
MVAASVSLESLCVNSIRMLAVDAVNKSNSGHPGLPMGCAPMGYALWQNILNHNPNNPKWFNRDRFVLSAGHGCMLLYSLLHLTGYKSVSIEDIKEFRQWGSKTPGHPETFETEGVEVTAGPLGAGISNAVGLAIAETHLAAKFNKPD

SEQ ID NO: 110164 - protein, 272 aa, Unknown
  Bacterial polypetide isolated from the Sargasso Sea
EYIPNSGIETTTGPLGQGIANSIGFAIAEEILKNRFGKKKINHKTYVLAGDGCLMEGISHEALSLAGHLKLKNLILLFDDNNISIDGPTNLTVSDDNRKRFKSYGWNYLQVNGHDVKQIYRAIKKVQNSKKPTCISCKTVIGYGSPNKSNTSSVHGSPLGKSEINLVRKRLKWAYKPFEIPKNILSAWRNVGIVASKNAKKQKFLLKNNNYSKRISKIVKSEKEKFFKNPENIATRKSSEKILNVLTKSIKELIGGSADLAGSNNTKTKSHR

SEQ ID NO: 110165 - protein, 165 aa, Unknown
  Bacterial polypetide isolated from the Sargasso Sea
MGSNLCPALPSTVDRHPRENGFMNHVATAADTQCINTLRTLAMDAVQKANSGHPGTPMGLAPVGYTLWSRFLRYHPEHPDWPNRDRFVLSVGHASMLLYSLLHLAGVVEIDAHGKRSGQPAVSLEDIKQFRQMGSKTPGHPEYRMTTGVETTTGPLGQGCANSVG

SEQ ID NO: 110166 - protein, 243 aa, Unknown
  Bacterial polypetide isolated from the Sargasso Sea
SGHPGMPMGMADVVTILYKYFLKFNPKNPTWLNRDRFILSAGHGSMLLYSLLYLTGYKSVSLKDIKKFRQLNSICAGHPEYHPNSGIETTTGPLGQGIANSVGFAIAGEILKKKLGSKLINHKTYVLAGDGCLMEGISHEAMSLAGHLKLNNLIMLFDNNSISIDGPTSLAVSDNYKNRFESYGWNYILINGHNYREIYNALKKAQTSKKPTVISCKTKIGFGSPNKSGKASSHGSPLGIDEI

SEQ ID NO: 110167 - protein, 243 aa, Unknown
  Bacterial polypetide isolated from the Sargasso Sea
LVRKKLKWNYEPFKIPGEFLNEWRKIGNNASRKAEKYDVKFKKKFSNFKNLNTFKNSIEKIKNDYLKDSKPLATRKSSEMFLNIISKLPNLIGGSADLAGSNNTKTKDHKIIKPGNFSGNYIHYGVREHAMCGVMNGIALHSNLIPYGGTFLIFSDYCKPSIRLAAMMKQKVIYVFTHDSIGLGEDGPTHQPIEQLTSLRSIPNLNVFRPSDLIETFECWQLAIESKNSPSVIALTRQSVNPV

SEQ ID NO: 110168 - protein, 264 aa, Unknown
  Bacterial polypetide isolated from the Sargasso Sea
YKRNKQKINKILKNNFAKVLKEEKQNTIKDLKSLATRKSSEKTLEAIIRNNNLLIGGSADLAGSNNTKTKHHKVIKPGDFNGNYIHYGVREHAMSGIMNGLALHSKFIPYGGTFLIFSDYCKPSIRLSALMKQKVIYVMTHDSIGLGEDGPTHQPIEQLSGLRSIPNLNVFRPADRIETIECWEKALNTPKTPSIMSLTRQNLEPVRKKYSHINKCSLGAYEILRTNKKISLTIIASGSEVNLAIKTSLKLAKDKIYSKVISMP

SEQ ID NO: 110169 - protein, 289 aa, Unknown
  Bacterial polypetide isolated from the Sargasso Sea
MNIKNKDLSNAIRFLSIDAVQKANSGHPGMPMGMADVATVLFKNYLKFDPKNPSWVNRDRFVLSAGHGSMLLYSLLYLTGYKSVTLKDIKNFRQLNSICAGHPEYEKNSGIETTTGPLGQGISNAVGFALAEEILKSQYGKKIINHKTYVLAGDGCLMEGISHEALSLAGHLKLKNLILLFDNNSISIDGPTSLAVSDNYRKRFNSYGWDYLNINGHNFKEINNALRVAQNSKKPFAISCKTKIGFGSPNKSGKAEAHGSPLGKDEVKLVRKNLEWNYDSFEVPKYNSR

SEQ ID NO: 110170 - protein, 227 aa, Unknown
  Bacterial polypetide isolated from the Sargasso Sea
KFKNIIKNKFSSSIIKQKKDAIKNFKTIATRKSSEEFLSAILKERNTLIGGSADLAGSNNTKTTLHKIINSSNFGGNYIHYGVREHAMSGIMNGLALHSNFIPYGGTFLIFSDYCKPSIRLSAIMKQKVIYIMTHDSIGLGEDGPTHQPVEQLAALRSIPNLNVLRPADQTETIECWDIALNSNKTPSILALTRQNLKPIRKNFSKKNQCSMGAYEVIRTGKNINLT

SEQ ID NO: 110171 - protein, 319 aa, Unknown
  Bacterial polypetide isolated from the Sargasso Sea
MTIILFSIDGPTSLAVSDDYENRFKSYGWNYILIDGHNNRQIFNALKKAQNSKKPTIISCKTKIGFGSPNKGGKSSSHGSPLGIDEIKLVRRNLDWEHKPFNIPQKILNEWRKIGKKGLKIQKRWNKNFNKHKLKFRHTTKNNFSISIIKQKKEAIKNLKTLATRKSSEQFLSEILKEKNTLIGGSADLAGSNNTKTNLHKIINSNSFEGNYIHYGVREHAMSGIMNGLALHSNFIPYGGTFLIFSDYCKPSIRLSAIMKQRVIYVMTHDSIGLGEDGPTHQPIEQLAGLRSIPNLYVLRPADQTETIECWDIALRNIK

SEQ ID NO: 110172 - protein, 266 aa, Unknown
  Bacterial polypetide isolated from the Sargasso Sea
MQQSDHINVLRFLSADAVQKANSGHPGMPMGMAEIATALWSRHLRHNPNNPTWFNRDRFVLSNGHGSMLLYSLLHLTGYDLSVDDIKDFRKLKSKTPGHPEYDIDIGVETTTGPLGQGIANAVGMAVAEKILAAEFNKDDIKPIDHFTYVFLGDGCLMEGISHEACSFAGTHNLGKLICFYDQNGISIDGEIEHWFTDDSVKRFESYGWQTICVDGHDIEEIDGAIHKAKEEVNKPTMIFCKTTIGYGSPNKSGTADVHGAPLGDD

SEQ ID NO: 110173 - protein, 149 aa, Unknown
  Bacterial polypetide isolated from the Sargasso Sea
MNNNNKILSNAIRFLSIDAVQKANSGHPGMPMGMADVVTILFKYFLKFNPKNPSWLNRDRFVLSAGHGSMLLYSLLYLTGYKSISLKNIKNFRQLNSICAGHPEYHPNTGIETTTGPLGQGISNAVGFAIAEEILKKKIGKNIINHKTY

SEQ ID NO: 110174 - protein, 96 aa, Unknown
  Bacterial polypetide isolated from the Sargasso Sea
MADAIRFLSMDAVQAANSGHPGMPMGMADVATVLFKDFINVYPKEPDWPDRDRFVLSAGHGSMLLYALHYLLGYDDMPIESIKNFRQLNYNTGRSP

SEQ ID NO: 110175 - protein, 320 aa, Unknown
  Bacterial polypetide isolated from the Sargasso Sea
CAPMGYTLWDKFLKHNPKNPKWFNRDRFVLSAGHGCMLIYALLHLTGYDSVTIEDIKQFRQWGSKTPGHPETFETPGVEVTTGPLGAGISNAVGLAIAESHLAAKFNKADAEIVDHYTYVVMGDGCNQEGIASEACSLAGHLKLGKLIALYDDNHITIDGRTDVSFTEDVLKRYEAYGWHVQHVADGNTDVDAIAKAIEAAKAVTDKPSIIKVTTTIGYGSPNKGDTAGVHGAPLGEEEAELTRKQLGWNYGPFEVPQEAYDQYRQAIDRGASLEAEWNQSLAAYRTKYPSEAAEFERMLRGELPEGWDKDLPTAGPEEK

SEQ ID NO: 110176 - protein, 244 aa, Unknown
  Bacterial polypetide isolated from the Sargasso Sea
MNKLYKELANCIRFLSIDAVQKANSGHPGMPMGMADVATVLFKDFLKFDPKNPSWINRDRFVLSAGHGSMLLYSLLYLTGYKSISLNDIKNFRQLESICAGHPEYHPNTGIETTTGPLGQGISNAVGFAISEEILKKNLRKKKINHKTYVLAGDGCLMEGISHEALSLAGHLKLKNLILLFDNNSISIDGPTNLSVSDNHEKRFKSYGWNYLKIDGHDFKQISIALKKAQNQKNPLQFHVKLQS

SEQ ID NO: 110177 - protein, 227 aa, Unknown
  Bacterial polypetide isolated from the Sargasso Sea
MNKENKILANAVRFLSIDAVQRANSGHPGMPMGMADVVTILFKYFLKFNPKNPSWLNRDRFVLSAGHGSMLLYSLLYLTGYKSISLKNIKNFRKLSSICAGHPEYEKNTGIETTTGPLGQGISNAVGFAIAEKVLKKKIGKDIINHKTFVLAGDGCLMEGISHEAMSLAGHLKLNNLVMLFDNNSISIDGPTSLAVSDNFKKRFESYGWNYVSIDGHNEKEIFNALK

SEQ ID NO: 110178 - protein, 137 aa, Unknown
  Bacterial polypetide isolated from the Sargasso Sea
NVARGGYVLKDCDGEPELILIATGSEVGLAVNAWTALNEQGHKVRVVSMPSTSVFDQQDAAYKQSVLPLEVGARIAIEASHADFWYKYVGLDGRIIGMQSFGESAPAAALFEEFGFTLDNVLAAAQELLEELTGAGG

SEQ ID NO: 110179 - protein, 215 aa, Unknown
  Bacterial polypetide isolated from the Sargasso Sea
FGVREHAMAAILNGIAYHNSGLIPYGGTFLVFADYMRGSMRLSALSELGVIYVLTHDSIGVGEDGPTHQPIETIPSLRAMPNMLVFRPGDGNETSGAYKVAIQNRKRPSSLCLSRQGMANQANSSIDKVALGGYVLEDCAGTPDLILIGTGTELDLCVQAAKQLTAEGKKVRVVSMPCVELFDEQSDAYKEEVLPNAVRKRMVVEAAESFGWHRF

SEQ ID NO: 110180 - protein, 151 aa, Unknown
  Bacterial polypetide isolated from the Sargasso Sea
MNKQYKELANCIRFLSIDAVQKANSGHPGMPMGMADVATVLFKDFLNFNPKNPNWINRDRFVLSAGHGSMLLYSILYLTGYKSVSLNDLKNFRQIDSICAGHPEYHPNTGIETTTGPLGQGISNAVGFALAEEILKKKLGKKIIDHKTYVL

SEQ ID NO: 110181 - protein, 284 aa, Unknown
  Bacterial polypetide isolated from the Sargasso Sea
KELGWNYKPFEVPKNILKIWRDIGGKGEKIENRWNKIYRKKKSKINNFFKNDFLKSAVNEKKIALKEKKSLASRKSSESIICSLVKNNNTLIGGSADLAGSNNTKTNNHKIIKPGNFNGNYIHYGVREHAMCGIMNGLALHSKFIPYGGTFLIFSDYCKPSIRLAAMMKQQVIYVMTHDSIGLGEDGPTHQPIEQLSGLRSIPNLNVFRPADRLETIECWEHALKSAKTPSILSLTRQNLDPIRDKYSNMNKCSLGAYEVLRTNKKIKLTILASGSEVNLAIKA

SEQ ID NO: 110182 - protein, 194 aa, Unknown
  Bacterial polypetide isolated from the Sargasso Sea
RKIGKKGSKIESRWNKIYKRKKNKIDKILKNNFNNSIKSEKINAIKEFKSEASRKSSELFLNTLTKNKNTLIGGSADLAGSNNTKTKYQKIIKPNDFLGSYIHYGVREHAMCGIMNGLALHSKLIPYGGTFLIFSDYCKPSIRLSAMMKQRVIYVMTHDSIGLGEDGPTHQPIEQLSGLRAIPNLNVLRPSRQN

SEQ ID NO: 110183 - protein, 234 aa, Unknown
  Bacterial polypetide isolated from the Sargasso Sea
MNNLNNIKNLRQLSNCIRFLSMDAVEKAKSGHPGMPMGMADIATVLYKNHLKFDPNDPTWIDRDRLIISNGHGSMLLYSCLYLTGYKDIDINQIKNFRQLHNKTAGHPEYGSAEGIETTTGPLSQGLANAVGMALAEKKLSNDYGKELVDHYTYVFAGDGCLMEGLSHEACSLAGHLKLNKLIMFFDNNSISIDGSTDLSVSDNVKKRFEAYNWNIIEIDGHNYEKNDQAIIQA

SEQ ID NO: 110184 - protein, 123 aa, Unknown
  Bacterial polypetide isolated from the Sargasso Sea
MANAIRFLSMDAVQAANSGHPGMPMGMADVATVLFKDFINIYPEKPDWPDRDRFVLSAGHGSMLVYALHYLLGYKDMTIENIKNFRQLNYNTAGHPEFGHAKGIETTTGPLGQGLATAVWNGS

SEQ ID NO: 110185 - protein, 274 aa, Unknown
  Bacterial polypetide isolated from the Sargasso Sea
NRDRFVLSAGHGSMLLYSLLYLTGYKSISLENIKNFRQLNSICAGHPEYIANTGIETTTGPLGQGISNAVGFAIAEKILKKKIGKEVINHKTYVLAGDGCMMEGISHESMSLAGHLKLNNLVVLFDNNSISIDGPTSLAVSDNYKKRFESYGWNYLLIDGHNQKEIIYALKKSQVSKKPTVISCKTKIGYGSPNKSGKASAHGSPLGEDEIKLVRKKLNWKYKKFEIPKYILKEWRKIGSSGIKTESKWNKIYKRKKSKINKILNNNFHKSIGT

SEQ ID NO: 110186 - protein, 230 aa, Unknown
  Bacterial polypetide isolated from the Sargasso Sea
MVAASVSLESLCVNSIRMLAVDAVNKSNSGHPGLPMGCAPMGYALWQNILNHNPNNPKWFNRDRFVLSAGHGCMLLYSLLHLTGYKSVSIEDIKEFRQWGSKTPGHPETFETEGVEVTAGPLGAGISNAVGLAIAETHLAAKFNKPDCNIVDHYTYVIMGDGCNQEGIASEACSLAGHLKLGKLIALYDDNQITIDGRTDVSFTEDVLKDTKLMDGIYNMSKMAIMMSKE

SEQ ID NO: 110187 - protein, 248 aa, Unknown
  Bacterial polypetide isolated from the Sargasso Sea
MNKQNKNLANAIRFLSMDAVQKANSGHPGMPMGMADVVTVLFKYFLKFNPQNPSWLNRDRFILSAGHGSMLLYSLLYLTGYKSISLNNIKKFRQLNSICAGHPEYEPNTGIETTTGPLGQGISNAVGFAIAEKILKKKIGKEVINHKTYVLAGDGCLMEGISHEAMSLAGHLKLNNLVMLFDNNSISIDGPTSLAVSDNFKKRFESYGWNYLLIDGHNEKEIIKALKKAQLSKKPMVISCKTIIGYGH

SEQ ID NO: 110188 - protein, 381 aa, Unknown
  Bacterial polypetide isolated from the Sargasso Sea
MKNYTKLANCIRFLSIDAVEKAKSGHPGMPMGMADIATVLFLDFLVHNPKDPNWLLRDRFVLSNGHGSMLLYSLLYLTGYKKMTISQIKNFRQLGYITAGHPEYEPDAGIEITTGPLGQGISNAVGMAIALKKLSKEKKLSKAPKVYVFCGDGCLMEGISQEAISLAGHLKLNNLILIYDNNNISIDGSTDLAFSDNTNLRFKSVNWEVHSGRGHDHKNIYKLLKKAQVSKVPCLLNFKTTIGFGSPNKSAKASSHGSPLGSEEVKLTRSKLSWNEKPFQIPDKLLKIWRNSSTKNLQIYKKTKSISHTNLSNKDIDNLFNKIETDFKDFKSDQATRKSSEAILHYFKKDHPILGGSADLTGSNNTKGKEMSILDSMNTTG

SEQ ID NO: 110189 - protein, 277 aa, Unknown
  Bacterial polypetide isolated from the Sargasso Sea
LTMWSGSKSLTNDDASGNYIHYGVREFGMSAIMNGIALHGGFIPYGATFLMFMEYARNALRMAALMKQRAIFVYTHDSIGLGEDGPTHQPVEQIASLRLTPNMSTWRPCDQVESAIAWKHAIERTDGPTALIFSRQNLAQMDRSAQQLADTAKGGYVLKDCAGKPELILIATGSEVELAVAAYEQLTAKGRAVRVVSMPATDVFDAQSAEYKESVLPASVTKRVAIEAGIADYWYKYVGFGGKIIGMTTFGESAPAELLFKEFGFTVENVVATAESL

SEQ ID NO: 110190 - protein, 242 aa, Unknown
  Bacterial polypetide isolated from the Sargasso Sea
MLECHAFSLVRLLCPFRVSWRRTVRRSGLAFEHPGLKRAPLSDSVSGLDMTTPSPAPTSLMANAIRALSMDAVQKANSGHPGMPMGMAEIGVALWSRHLRHNPKNPQWADRDRFILSNGHGSMLLYSLLHLTGYDLPMEELKNFRQMHSKTPGHPEYGITPGVETTTGPLGQGLANAVGMALAESLLATEFNKPDAKIVDHHTYVFVGDGCLMEGISHEACSLAGVLKLNKLIAFYDDNGIS

SEQ ID NO: 110191 - protein, 338 aa, Unknown
  Bacterial polypetide isolated from the Sargasso Sea
MSNAIRFLSIDAVEKANSGHPGMPMGMADVATVLFKDFLKYNPKNPDWLNRDRFILSAGHGSMLLYSLLYLTGYKSISLNEIKNFRQLNSICAGHPEYHPGSGIETTTGPLGQGIANGVGIAIAEEILKNKIGKNIINHKTYVLAGDGCLMEGISHEALSLAGHLKLKNLILLFDNNSISIDGPTSLAVSDNYKKRLNSYGWDYIDIDGHNEKQIFKALKKVQNAKKPTVISCKTKIGYGSPNKSGTASVHGSPLGEGEVSLVRKKLKWKHNPFMIPKEILNEWKKIGEKGIKKENSWLKLYKLKKQTIKNIFSNNFQSDFENEKKNIIKNLEAIATR

SEQ ID NO: 110192 - protein, 499 aa, Unknown
  Bacterial polypetide isolated from the Sargasso Sea
MFDNVTKSVRVLSAAAVEKANSGHPGMPLGMADVGVAIYKNALKASNKNPDWINRDRFVLSAGHGSMLLYSLLHFNGFDISMDDIKNFRQLGSVTAGHPEKDFQLGIDTTTGPLGQGFANGVGLAVAERYLSSVLGEDIIDHYIYGIVSDGDLMEGISTEAAELAGLWKLGKIIYFFDDNNISIDGNVTNVSITNQKNKFLSLGWDVLEIDGHQESEIIDAIKHGQKITDKPSLVIAKSTIGKFSPNKANSSGVHGSPLGEKEFELFLDNIGYSGDPFAHSSDIYDYFNNERERDNKTFQEWKANLDKKISNDENFKTLWEEFSNNDFQSLSLAWSDDQASRVVGGKILNKIGKSNKFIIGGSADLAASTKQIVSDEVFGSQNYSGKTIEFGIREHAMGGIVNGIALHSNLIPYGSTFLVFSDYMRPSIRLASLMKTNSVFIFTHDSIFLGEDGPTHQPIEHLMSLRLIPGLEVVRPANNNEILYAYRYAFENKNNPTA

SEQ ID NO: 110193 - protein, 261 aa, Unknown
  Bacterial polypetide isolated from the Sargasso Sea
MSKFYKELANCIRFLSIDAIQKANSGHPGMPMGMADVATVLFKDFLKFNPKNPSWINRDRFVLSAGHGSMLLYSLLYLTGYKSVSLNDIKNFRQLESICAGHPEYHPNTGIETTTGPLGQGVSNAVGFAISEEILKKQLGKKKINHKTYVLAGDGCLMEGISHEALSLAGHLKLKNLILLFDNNSISIDGPTNLAVSDDHEKRFKSYGWDYLRINGHDFKEISKALKKAQKSKKPIAISCKTTIGYGSPNKSGKASSHGSP

SEQ ID NO: 110194 - protein, 549 aa, Unknown
  Bacterial polypetide isolated from the Sargasso Sea
FPLSMDEIKNFRQLNSKTAGHPEVDTSIGIDTTTGPLGQGFANGVGFAIAERYLASLLGEDVINHFTFGIVSDGDLMEGISFEAAELAAVWKLGKIIYFFDNNNISIDGSVDKVSITNQKEKFESIGWHVLEIDGHNEKEIIKSVEKGRKVEDKPTLIIAKSTIGKFAPNKENTSGVHGSPLGSDEMNKFLMNLDWSGDPFLHGDDIYDYFKEKREKDNEELRKWEENFKNKYQEDSSFKDNWDLLTSKDFPTLDGLNGEKYASRILGSKILENLSESTNSIIGGSADLAASTKQIIDESYFSSTNYKGRSLEFGIREHAMGAITNGITLHSNLIGYASTFLVFSDYMRPSIRLASLMHINSVFIFTHDSIYLGEDGPTHQPIEHLMSLRLIPNVDVIRPSNSIEIEHSYRYAFSDSKNPKVLSLTRQDLDYLDFDVKYEEFIKGGYVVSDGDDFTLVASGSELEIAFKIKAALLEYSVRIISVPILNKLSNMQNEEINELLKNKHVFPIELGRSIGWESYLGRITKTFSIDSFGESAPIEDLEKNFGI

SEQ ID NO: 110195 - protein, 454 aa, Unknown
  Bacterial polypetide isolated from the Sargasso Sea
VIRDVNGHDFVNIRYAINKAKLEKNRPTIICCKTVIGYGSPKFQGTSQAHGAPLGNDEAEVVRKKLEWKYKPFEIPRQIYREWNAEAKGKKYEGTWTLKVNKYKKLYRREFAELERRIKRKIPKNVIAKLNNFMSKNHMPMATRKSSQIVMTEFGKSMPELIGGSADLKGSNLSYYDNMDSFSHSNPSGKYIYYGVREFGMSAISNGIFLHGASRPFASTFLIFSEYAKNAIRMSALMKLPIIYIFTHDSIGLGEDGPTHQAVEQLSSLRLVPGLDVWRPADTQETAVAWREAILSQERPTAFALSRQTLKEIPKTKKQISNISRGGYVVYGDSSNPDAIIIATGSEVSISVGAAEQLRIKGVTVRVISMPCQEVYERQTLAYKNKCIPKNFDNILAIESGIGDSWHKFVGNKGAMISMESFGLSGTGSDVMNHFGFSVSNIKKNINKLIKKNR

SEQ ID NO: 110196 - protein, 563 aa, Unknown
  Bacterial polypetide isolated from the Sargasso Sea
GYTPGVETTTGPLGQGIANAVGFAIAEKVLGAQFNREGHNIVDHNTYVFLGDGCMMEGISHEVCSLAGTLGLGKLIAFYDDNGISIDGEVEGWFTDDTPKRFEAYGWQVIRNVDGHDAEEIKMAIETARKSVDQPTLICCKTTIGFGSPNKQGKEECHGAPLGNDEIALTRAALGWNHGPFEIPAEIYAEWDAKEAGAAAEAAWNDKFAAYAAAHPELAAEFKRRITGELPADFAEKAAAYIKDVAEKGETIASRKASQNALNAFGPLLPEFLGGSADLAGSNLTLWKGCKGVSAEDASGNYMFYGVREFGMSAIMNGIALHGGFVPYGATFLIFMEYARNAVRMSALMKKRVLYVFTHDSIGLGEDGPTHQPIEQLASLRGTPNLDTWRPADAVESAVAWKYAIERADGPSALVFSRQNLPHQPRDAQQLSDIERGGYVLKDSAGEPELILIATGSEVGLAMAAYDKLTAAGRKVRVVSMPSTSVFDAQDAGYKQDVLPLQVGARIAIEASHADYWYKYVGLEGRIIGMTSFGESAPAPALFEHFGFTVDNVVATAEELLDA

SEQ ID NO: 110197 - protein, 539 aa, Unknown
  Bacterial polypetide isolated from the Sargasso Sea
MQTTQHTDHKTRANAIRALAMDAVQKANSGHPGAPMGMADIAEVLWLQFLKHNPANPSFSNRDRFVLSNGHASMLLYSLLHLTGYDLSIEDLKSFRQLHSKTPGHPELGYTPGVETTTGPLGAGIANAVGMAIAEKTLAAQFNRPDYPVVDHFTYCFLGDGCLMEGLSHEACSLAGTLGLGKLIAFWDDNGISIDGHVEGWFTDDTPARFHSYGWQVIRVDGHNPAQIADAITQAQAETDRPTLICCKTIIGFGSPNKSGSHDSHGSPLGDSEIAKTREFLLWSHLPFEIPADIYAAWDSKTKGAALEQHWTELFAAYKNEYPELAAEYQRRVIDRVLPANFEAATQSFIDHCQNQQQDIASRKASQLCIAHFAALVPEVLGGSADLAGSNLTLWSGSKGLTKDDSSGNYIYYGVREFGMVAIMNGITAHGGFRCYGATFLMFMEYARNAVRMSALMKLPNIYVFTHDSIGQGEDGPTHQPIEQLTNLRTTPNLVTWRPADLTETAVAWKTALTTTTSPSALVFSRQNLRQYQRNPEQI

SEQ ID NO: 110198 - protein, 669 aa, Unknown
  Bacterial polypetide isolated from the Sargasso Sea
MLEKHNLANAIRALSMDAVQRANSGHPGAPMGMADIAEVLWNDFLKHNPNNPNWDNRDRFVMSNGHGSMLIYALLHLSGYDLPMEEIKNFRQLHSKTPGHPEYGYAPGIETTTGPLGQGLANAVGMALAESVLSAKFNRDDLDIINHHTYVTVGDGCLMEGVSHESCSLAGTLGLGKLVAIYDSNQISIDGDVAGWFTEDIPKRFESYGWHVVRDIDGHKPKEIKRALESAIKNTSQPSILYCNTVIGWGSPNKAGKESSHGAPLGDEEIQLTRKELGWEHEPFDIPDEYYAAWDAKPNGEKLESAWQKKLSSYEKKYPELAAEYKRRMQNELPSNWSDVVDRYLNSTVEKAESLATRKASQNAIEAYAKHLPEMIGGSADLTGSNLTNWSGSIMIDRKNKDGNYISYGVREFAMAAINNGISLHKGFIPYSGTFLMFSEYARNALRMAALMKIQNIFVFTHDSIGLGEDGPTHQAVEQASTLRLMPNMSLWRPCDAVESAIAWQAAIERDNGPTSLLLSRQNLAHLKRTESQLQNIKRGGYTLIEGSQKPEAIIIATGSEVEMALNVATRLNANNKNIRVVSMPSADVFDAQEEGYKETVLPFSCRNRIAIEAGVTDYWKKYTGLDGLALGVDTFGESAPAKKVFEHFGLTENSLEKTIINFLEQKKK

SEQ ID NO: 110199 - protein, 662 aa, Unknown
  Bacterial polypetide isolated from the Sargasso Sea
MQKSEPINALRFLSADAVQKANSGHPGMPMGMAEIATALWSKHLKHNPSNPTWFDRDRFVLSNGHGSMLLYSLLHLTGYDLSIEDIKDFRQLKSNTPGHPEYDIDIGVETTTGPLGQGIANAVGMAISEKILAAEFNKDDIKPIDHYTYVFLGDGCLMEGVSHEACSFAATHNLGKLICFYDQNGISIDGEIDNWFTDDSVKRFDSYGWQTICVDGHNVEEVSDAISKAKEEPNKPTMIFCKTTIGFGSPNKSGTADVHGAPLGGEEIEKTREALGWNYSAFEVPKEVYDFWDSKKSGAGINSIWDDLIKNYKEKYPNESLELERRIKGDLPENFQQSFLNFLNDCNSNNSPMATRKASKACLDFFVKEMPELVGGSADLTPSNNTFSASSSTFSNENPSGNHINYGVREFGMSAIMNGMVLHGGIKPYGATFLVFTDYARNAVRLSALMGLPNIFVYTHDSVALGEDGPTHQPIEHLVTLRSTPNLNSWRPADLVETAVAWNNAVSSATTPTCLIFSRQGTSAIERTPEQLSSINIGGYLLEEHEDPNITIVASGSEVQLAIDAAKELKNESINANVVSMPCLDVFLKQSNQLQDKVINPNKPVLVIECAHPNSWYKILNRSDKVIGMETFGESAPGSELLEHFGFNKDNVIQAARSLIND

SEQ ID NO: 110200 - protein, 415 aa, Unknown
  Bacterial polypetide isolated from the Sargasso Sea
MNKLNKDLSNAIRFLSIDAVEKANSGHPGLPMGMADVVTILYKNFLKFNPKDPNWINRDRFVLSAGHGSMLLYSLLYLTGYKSISLNDIKNFRQLNSICAGHPEYSPNSGIETTTGPLGQGISNAVGFAIAEEILKRKLGNKVINHKTYVLAGDGCLMEGISHEALSLAGHLKLKNLILLFDNNSISIDGPTSLAVSDNFKKRFNSYGWNYIEIDGHNEKQIFNALKKVQKSKIPTAISCKTIIGFGSPNKSGTASVHGSPLGKDEVSLVRKKLKWSYKPFEIPKRIFDEWRRIGEKASKKAKTKEIKNSYLTLTKNNSSFTNKIQKIISEEKKKYLKSIEPMATRKSSQKILNELAKKIPQLIGGSADLAGSNNTKTDNHKIIKPGMFDGNYIHYGVREHAMSGIMNGIALHSN

SEQ ID NO: 110201 - protein, 530 aa, Unknown
  Bacterial polypetide isolated from the Sargasso Sea
AEEILRKKLGSNLINNKTYVIASDGDLMEGISHEALSLAGHLKLKNLIVFFDNNKISIDGSTSLSVSDDYKKRFEGYGWNFLEINGHNEKQISKAITKASKASKPTLISCKTIIGFGSPNKSGKASSHGSPLGDEEISLVRKKLKWDSGPFEVPMDILNAWRKIGEKGAKLEEEWLETLNKKKSNIKSELKNTYIESNLKNLEELMIKEKTKYFESKPSMATRQCSSAAIDIISSILPQLIGGSADLSGSNNTKTKNSKVINSKNFDGNYIHYGVREHGMAAIMNGLALHSGLIPFGGTFLIFSDYCKPSIRLAALMGLRVIYIFSHDSIGLGEDGPTHQPIEQLTGLRAIPNLNVFRPADINETLECWEIALKSKNTPSAIALSRQKLPYINPKFSEKNECENGAYIVKMSSHNNKVTLVASGSEVELALNVHEELKKNNILSKVVSMPCQELFDKQSVDFKKQILDEESLIVTIEAGNVSSWKKYLGQRGISLGIDRFGESAPYKKVYEHLNLSVEKIVLTIQDNLRK

SEQ ID NO: 110202 - protein, 435 aa, Unknown
  Bacterial polypetide isolated from the Sargasso Sea
AIEKAKLITDKPSIIKISTTIGYGSPNKSDTAGIHGAAVGEEEAALTREFLNWEYPPFEIPTEVYSHFRKSINKGENLEKEWNSKFEGYQKNYPSEGAELKRMLEGKLPENWDSDLPSYSPDDKGLATRKHSQICLGALGPNIPELIGGSADLTHSNYTDIKGETGSFQSHSPEKRYLHFGVREHAMAAVLNGIAYHNSGLIPYGGTFLVFADYMRGSMRLSALSELGVIYVLTHDSIGVGEDGPTHQPIETIPSLRAMPNMLVFRPGDGNETSGAYKLAIQNRKRPSALCLSRQAMPNQENTSIDKVALGGYVVSDCEGAPDLIFIGTGSELNLCIEASKEISSLGKKIRVVSMPCVELFEEQEESYKESVLPSSVKKRVVVEAAHSFGWHKYTGFEGICITMDRFGASAPGGECMKNFGFTVENVVNKTKEIL

SEQ ID NO: 110203 - protein, 302 aa, Unknown
  Bacterial polypetide isolated from the Sargasso Sea
SEMFLNVASKLPNLIGGSADLAGSNNTKTKNHKIIKPGDFSGNYIHYGVREHAMCGVMNGISLHSNLIPYGGTFLIFSDYCKPSIRLAAMMKQRVIYIFTHDSIGLGEDGPTHQPIEQLTSLRSIPNLYVFRPADLIETFECWDIAIKSKDTPSVIALTRQGINPVRRKISYKNKSERGGYEILRTKDKIDITIISSGSETSLACEICHKLATENIYSKVISMPCQELFDLQSTDYKNKILKETPMVVSIEASETNYWKKYTGMNGLNFGIDEFGKSAPYQKIYDHFKLNSKSIIESIKKRL

SEQ ID NO: 110204 - protein, 542 aa, Unknown
  Bacterial polypetide isolated from the Sargasso Sea
LNAVGLAIAETHLAAKFNKPDCNIVDHYTYVIMGDGCNQEGIASEACSLAGHLKLGKLIALYDDNQITIDGRTDVSFTEDVLKRYEAYGWHVQHVEDGNHDINGITEAIEKAKSIKDKPSIIKISTTIGYGSPNKSDTAGIHGAAVGEEEAALTREFLNWEYPPFEIPNEVYEHFRKSINKGENLEKEWDSKFEEYQKKYPSEGAELSRMLKGQLPENWDLDLPSYTPDDNGLATRKHSQICLGALGPNLPELIGGSADLTHSNYTDIKGETGSFQPHSPEKRYLHFGVREHAMAAVLNGIAYHNSGLIPYGGTFLVFADYMRGSMRLSALSELGVIYVLTHDSIGVGEDGPTHQPIETIPSLRAMPNMLVFRPGDGNETSGAYKLAIQNRKRPSALCLSRQGMPNQENTSIDKVALGGYVVSDCEGTPDLIFIGTGSELNLCIEASKEISNLGKKIRVVSMPCVELFEEQEESYKESVLPSSVKKRVVVEAAHSFGWHKYTGFDGICITMDRFGASAPGGECMKNFGFTVENVVKKTKEIL

SEQ ID NO: 110205 - protein, 310 aa, Unknown
  Bacterial polypetide isolated from the Sargasso Sea
MSKQHRELANSIRFLSMDAVQKANSGHPGMPMGMADVVTVLFKDFLKFNPKKPDWLNRDRFVLSAGHGSMLLYSLLYLTGYKSVSIEDIKNFRQLDSICAGHPEYHEGSGIETTTGPLGQGIANAVGFALAEEILKKKVGKKIINHKTYVLAGDGCLMEGISHEALSFAGHLKLKNLILLFDNNSISIDGPTNLAVSDNTKKRFESYGWDYVDINGHDEKQIFKALKKAQKAKKPFAISCKTTIGYGSPNKGGKASSHGSPLGQEEINLVRKKLNWNYKPFEIPDEIKKEWKKIGEKASAYAEKNEAKYQ

SEQ ID NO: 110206 - protein, 354 aa, Unknown
  Bacterial polypetide isolated from the Sargasso Sea
HGSMLLYSLLYLTGYKSVSLDDIKNFRKLDSICAGHPEYHSNSGIETTTGPLGQGISNAVGFALAEEILKSKIGKKFIGHKTYVLAGDGCLMEGISHEALSLAGHLKLKNLILLFDNNSVSIDGPTNLAVSDNTKKRFESYGWNYLDINGHSEKQIFSALKKAQNSKKPIAISCKTTIGFGSPNKGGKAASHGSPLGQDEIALVRKKLNWKYKPFEIPDRILNAWRDIGNKASLAAEKLNSKNNIKKGNLIPVSLSEEIEEFKKSYIKTLDPMATRKSSEKFLEIASKLTNLIGGSADLAGSNNTKTKNHKIIKPGEFDGNYIHYGVREHAMCGIMNGISLHSNLIPYGGTFLI

SEQ ID NO: 110207 - protein, 690 aa, Unknown
  Bacterial polypetide isolated from the Sargasso Sea
MPPCPRFLDSFSGLDMTTSSPASTTLMANAIRALAMDAVQQANSGHPGMPMGMAEIGVALWSRHLKHNPTNPHWADRDRFVLSNGHGSMLLYSLLHLTGYDLPIEELKNFRQLHSKTPGHPEYGITPGVETTTGPLGQGLANAVGMALGEALMADEFNRDGAKIVDHHTYVFLGDGCLMEGISHEACSLAGTLKLNKLIALYDDNGISIDGDVVNWFHDDTPKRFEAYGWNVIPNVNGHDVDAVDAAIAKAKLSDKPTLICCKTVIGQGAATKAGGHDVHGAALGAEEIAKTREALGWTWAPFVIPQEVYAAWDAKEAGKRAETEWNATFAAYRAKFPAEAAEFERRMANQLPADWAEKAAAIIAGANERAETVATRKASQQAIEGLAAALPELLGGSADLTGSNLTNWKASKAVRANPEGPGVQLGNHINYGVREFGMSAAINGLALHGGHKPFGGTFLTFSDYSRNALRVAALMKVPSIFVFTHDSIGLGEDGPTHQSIEHVSSLRLIPNHDVWRPADTVETAVAWTHAVAADRPSSLIFSRQNLAFNPRTDAQIANIEKGGYVLKDWDDEIVARKIILIATGSEVELAMKAVEPLAQQGIAARVVSMPSTNVFDRQDAEYRERVLPHGVRRVAIEAGVTSFWHKYVGLEGGVVGIDTFGESAPAGVLFKYFGFTVEHVVETAKAVLA

SEQ ID NO: 110208 - protein, 267 aa, Unknown
  Bacterial polypetide isolated from the Sargasso Sea
MSKQHRELANSIRFLSIDAVQKASSGHPGMPMGMADVVTVLYKDFLRFNPKNPNWINRDRFVLSAGHGSMLLYSLLYLTGYKSISLDDIKNFRQLDCICAGHPEYHSSSGIETTTGPLGQGIANAVGFALAEEILKSKAGKEIINHKTYVLAGDGCLMEGISHEALSLAGHLKLKNLILLFDNNSISIDGPTNLAVSDNIKKRFESYGWDYLDINGHDEKQISKALRKAQKAKRPFAISCKTTIGYGSPNKGGKKSSHGSPLGEEEI

SEQ ID NO: 110209 - protein, 214 aa, Unknown
  Bacterial polypetide isolated from the Sargasso Sea
MGNQAVSRRDCANAIRALTMDAVQKANSGHPGAPMGMADIAEVLWRDFMVHNPGNPNWWNRDRFILSNGHGSMLIYSLLHLTGYDLSIEEIKNFRQLHSKTPGHPEYSYTPGVETTTGPLGQGLANAVGMAVAEKTLAAQFNREGHNIVDHFTYVFAGDGCLMEGISHEVCSLAGTLGLGKLVVIYDDNGISIDGEVEQWFSDNTNTRFEGTVA

SEQ ID NO: 110210 - protein, 476 aa, Unknown
  Bacterial polypetide isolated from the Sargasso Sea
MLLYSLLYLTGYKSISLKDIKNFRQLNSICAGHPEYIPNSGIETTTGPLGQGIANSVGMAIAEEILKEKIGKNIINHKTYVLAGDGCLMEGISHEALSLAGHLKLKNLIMLFDNNSISIDGPTSLAVSDNFKKRFESYGWDYILINGHNEKQISNALKKVQKAKKPTVISCKTIIGFGSPNKSGKETSHGSPLGEDEIKLVRKKLKWSHPPFEVPKKILDEWRKIGSRGIKEAEKWVKKNKYKKISYTSFLKDFLKEKQNVINKPEAIATRKSSEKIISFLTKKNPTIIGGSADLSGSNNTKTKNHQIIKPGNFKGNYIHYGVREHAMCGIMNGLALHSELIPYGGTFLIFSDYCKPSIRLASIMKQRVIYVMSHDSIGLGEDGPTHQPIEQLAGLRSIPNLNVFRPADTAETFECWDLAAISGKDQPSIIAVSRQKINQIRKEFTNENKCSAGAYEVSRTKSEINLTILATGSEV

SEQ ID NO: 110211 - protein, 376 aa, Unknown
  Bacterial polypetide isolated from the Sargasso Sea
MWDGSKKGEKLEKSWIDLFNNYSKQYPDLAEEFKRRINRNLPENWEEISKNAINEINHQAIDLATRQSSHLSLNKLGDFLPEMIGGSADLTGSNLTKHDASVVIDETNSDGNYIYYGVREFGMAAIGNGMILHGGVIPYSGTFLTFSDYSRNALRMAALMEIQNIFVFTHDSIGLGEDGPTHQPIEHVSSLRIIPNMNVWRPCDAVETITSWCHAIENQSGPTSLILTRQKLHHQLRTEEQVQLIKKGGYILKESKNTPEIILIATGSEVSVAMESAKVLDSDGIDVRVVSMPCNNIFNQQTESYRSAVLPESVKSRLAIEAGITNFWWQYVGSEGDVIGIDEFGLSAPASELFEYFGFTVKNITERARLLIEKNS

SEQ ID NO: 110212 - protein, 168 aa, Unknown
  Bacterial polypetide isolated from the Sargasso Sea
MSNAIRFLSIDAVEKANSGHPGMPMGMADVATVLFKNFLNFNPRNPDWLNRDRFVLSAGHGSMLLYSLLYLTGYSSIGIKDIKNFRQLNSICAGHPEFHPGSGIETTTGPLGQGVANAVGFAIAEEILRERFGSKIFNHKTYVLAGDGCLMEGISHEALSLAGHLCLK

SEQ ID NO: 110213 - protein, 411 aa, Unknown
  Bacterial polypetide isolated from the Sargasso Sea
MQHIVPTNALRFLSIDAVQKANSGHPGMPMGMAEIATSLWGKHLNHNPLNPHWFDRDRFVLSNGHGSMLLYSLLHLTGYDISIDDLKDFRKLHSKTPGHPEYDIDIGIETTTGPLGQGIANAIGMAVSEKIMAAEFNEDDIKPINHYTYVFLGDGCLMEGISHEVCSFAGTHKLGKLICFYDQNGISIDGEIENWFTDDSIKRFDSYGWQTICVDGHNIEEIDKAIVDAKNETNKPTMIFCKTIIGFGSPNKSGTADVHGAALGEEEVIKTRKALNWDHDAFKVPQEAYDFWDSTKKGSELNLDWDNLIKTYDEKYPDKSAELKRRIKGDLPDDFENSFKIFLSECDKNNMPMATRKCSKACLDFFVKELPELIGGSADLTPSNNTFSSSSSTFSNENPSGNHINYGVREF

SEQ ID NO: 110214 - protein, 655 aa, Unknown
  Bacterial polypetide isolated from the Sargasso Sea
MSTLHKDLSNAIRFLSIDAVERANSGHPGMPMGMADVVTVLFKNFLKFNPKNPNWLNRDRFVLSAGHGSMLLYSLLYLTGYKSISLDNIKNFRQLNSICAGHPEYHAGTGIETTTGPLGQGIANAVGFALAEEILKEKFGKKIFDHKTYVLAGDGCLMEGISHEALSIAGHLNLKNLVMLFDNNSISIDGPTNLAVSDNYKKRFNSYGWDYIKIDGHNERQIYKALKKVQKAKRPTVISCVTKIGYGSPNKSGSESAHGSPLGKDEIKLVRKKLKWNYEPFEIPKKILNIWRETGTKGEKIEEKWKKIYNKKKEEIDKVFSVNFANTFKNEKEKTIKNLEALATRKSSEKILTALYEKKNILIGGSADLAGSNNTKTKYHKAVKKNNFKGNYIHYGVREHAMCGIMNGLALHSKIIPYGGTFLIFSDYCKPSIRLSALMKLKVIYVMTHDSIGLGEDGPTHQPIEQLTGLRSIPNLNVFRPADTTETIECWEIALKNLNTPSVLALTRQKLNPVRKKFDKENKCSLGAYEVLRTNENVELTIFASGSEVNLAIEVSHKLATENTYSKVISVPCQEIFDKQKENYKSKILDEGEHKISIEAGTTDIWKKYVGKKGISFGLNDFGKSAPYKDIYKNFKLTTDDIVKLTREMITNNKN

SEQ ID NO: 110215 - protein, 477 aa, Unknown
  Bacterial polypetide isolated from the Sargasso Sea
MFDKVAKSVRVLSAAAVEKANSGHPGMPLGMADVGVALYKNFLKVSNEKPDWINRDRFVLSAGHGSMLLYSLLHLNGFPLSMDEIKNFRQLNSKTAGHPEVDTSIGIDTTTGPLGQGFANGVGFAVAERYLGSLLGEDVINHFTYGIVSDGDLMEGISFEAAELAAVWKLGKIIYFFDDNNISIDGSVDKVSITNQKEKFESIGWHVLEIDGHNEKEIIKSVEKGRKEEDKPTLIIAKSTIGKFAPNKENTSGVHGSPLGSDEMNKFLMNLDWSGDPFLHSDDIYDYFKEKREKDNEELRKWEENFKNKYQEDSSFKDNWDLLTSEDFPSFDGVSGEKYASRILGSKILENLSESTNSIIGGSADLAASTKQIIDESYFSSTNYKGRSLEFGIREHAMGAITNGITLHSNLIGYASTFLVFSDYMRPSIRLASLMDINSVFIFTHDSIYLGEDGPTHQPVEHLMSLRLIPNVDVIRP

SEQ ID NO: 110216 - protein, 442 aa, Unknown
  Bacterial polypetide isolated from the Sargasso Sea
MLDSELRKSCVNIIRFLAADAVEKAKSGHPGAPMGMADMAFVLWNQFLRYDPDDPDWKNRDRFVLSAGHASMLLYSLLHLAGYKLSMDELKNFRQWNSLTPGHPEYGLTPGVECTTGPLGSGFSNAAGMALGAKMMGSRFNSSDISLIDSRIFVLCSDGDMQEGIASETASWAGHLGLGNLIALYDSNDITIAGDACLAMSEDVGKRFEAYGWHVQHCDGHNHDEIAACLDESLSVVKKPSLIVAKTVIGKGAPTKEGTAGSHGAPLGQEEIEAAKLASGWNDKPNFHVPDEVREVFAERKKELKLQHQQWEEKLAGWKQSDPEQAKLWDSHWEKKLPDDLLNQLIDSISGEEDATRNLSGKVIQKMADLIPSLVGGSADLEPSNKTLIKNAESIRASSMGSDSAPDPSFNGRNIHFGIREHAMGGITNGLALFGSWRPFCG

SEQ ID NO: 110217 - protein, 587 aa, Unknown
  Bacterial polypetide isolated from the Sargasso Sea
MPSRKQLANAIRALSMDAVQKAKSGHPGAPMGMADIAEVLWRDYLIHNPQDPSWANRDRFVLSNGHGSMLLYSLLHLSGYDLGIEDLKQFRQLHSRTPGHPEYGYAPGVETTTGPLGQGITNAVGMAIAEKALAAQFNKPGHDVVDHYTYAFLGDGCLMEGVSHEACSLAGTLGLGKLIAFWDDNGISIDGHVEGWFTDNTPARFEAYGWHVIAGVDGHDSSAIAAAIEQGKSVTDKPTLICCKTIIGYGSPNKSGSHDCHGAPLGDAEIAAAREYLGWEHAPFVIPQDIYQEWDGKTKGASAQQSWNEKFAAYAKAYPELAAEFKRRMAGDLPADWAEKSAAYIQHLQDNPQSIATRKASQNSLNAFGPLLPELLGGSADLAGSNLTIWSGSKGVTAEDASGNYLYYGVREFGMSAMMNGIALHGGFIPYGATFLMFMEYARNAVRMAALMKQRVIFVYTHDSIGLGEDGPTHQPVEQLASLRVTPNLMNWRPCDAVESAVAWQAAIERTEGPSTLIFTRQNLVQQPRTAQQLADVRKGGYVLLDSAGTPELILIATGSEVELAVQAYHQLTAAGRKVRVVSVPSH

SEQ ID NO: 110218 - protein, 652 aa, Unknown
  Bacterial polypetide isolated from the Sargasso Sea
MSKLHNDLANCIRFLSIDAVQKANSGHPGMPMGMADVATVLFKNFLRFNPKNPDWLNRDRFVLSAGHGSMLLYSLLYLTGYKSISINNIKKFRQLNSICAGHPEYHPKTGIETTTGPLGQGISNAVGFAIAEEILKNKLGKDLINHKTYVLTGDGCLMEGISHEAMSLAGHLKLKNLVMLFDNNSISIDGPTNLAVSDNFKKRFEGYGWDYISINGHNEKEIFKAIKKVQKAKKPTVISCKTKIGYGSPNKSGKASSHGSPLGVDEIKLVRKALNWKTKPFDIPNKILNEWRKIGQRGEILQKKWNKALKRKKIKFNQTLKNNFTTVLKKEKENAIKEPKSLATRKCSEMTLNALTKQKHNLIGGSADLAGSNNTKTKNHKIIKPGDFSGDYIHYGVREHAMSGVMNGIALHSNLIPYGGTFLIFSDYCKPSIRLSALMKKRVIYVMTHDSVGLGEDGPTHQPIEQLSSLRAIPNLNVLRPADRIETIECWEHALKSSKTPSVLCLTRQNLNPVRKIYSNKNLCSLGAYEVLRTNKKINLTILASGSEVNLALEVSHKLAKDKIYSKVISMPCMELFELQSKSYKNKILEETKFKISIEAGSSDCWKKYVGGNGIAFGIDEFGKSAPYKDIYKYFGLESTNIKNITKKLLNK

SEQ ID NO: 110219 - protein, 325 aa, Unknown
  Bacterial polypetide isolated from the Sargasso Sea
MNNLNNINNLRQLSNCIRFLSMDAVEKAKSGHPGMPMGMADIATILYKNHLKFNPNDPEWIDRDRLIISNGHGSMLLYSCLYLTGYKDIDINQIKNFRQLHNKTAGHPEYGSAEGIETTTGPLSQGLANAVGMALAEKKLSNNYGKELFDHYTYVFAGDGCLMEGLSHEACSLAGHLKLNKLIMFFDNNSISIDGSTDLSVSDNVKKRFEAYNWNIIEIDGHKYKEIDQAIIQAKKNDAPTIISCKTKIGFGSPNKEGSASSHGSPLGEDEISLTRKKLEWNYSPFEIPDDLLREWRSFYKRNEESRNSWLSKNKELIESKNFKR

SEQ ID NO: 110220 - protein, 663 aa, Unknown
  Bacterial polypetide isolated from the Sargasso Sea
MPSRRELANAIRALSMDAVQQAKSGHPGAPMGMADIAQVLWGDFLSHNPANPSWANRDRFVLSNGHGSMLLYSLLHLSGYELPIEELKNFRQLHSKTPGHPEYGYAPGVETTTGPLGQGISNAVGMALAEKVLAAQFNKDGHTIVDHHTYAFLGDGCLMEGISHETCSLAGTLGLGKLIAFWDDNGISIDGEVEGWFTDDTPARFKSYGWEVIDGVDGHDAEQVKAAIEKAQANTAQPTLICCKTTIGFGSPNKEGTESCHGAPLGEDEIVATREKLGWSHGAFEIPDDIYAGWDGKEKGSKAESAWNDAFAAYEAAYPELAAEFKRRVNGELPADFSDKADAIIAELQANPQNIASRKASQNALNAFGPLLPELLGGSADLAGSNLTIWEGSKGVEANDASGNYIYYGVREFGMSAMMNGIALHGGFKAYGATFLMFMEYARNAVRMAALMKQPAIFVYTHDSIGLGEDGPTHQPVEQVVALRATPNLDNWRPCDQVESAVSWKSAIERTDGPTTLIFTRQGLAQQERTADQVANIAKGGYVLKDCEGTPELILIGTGSEVQLAVEAAAKLTEQGKAVRVVSMPSTDVFDRQSADYRESVLPSSVVKRVAVEALSKDSWYKYVGFNGAIVGMDTFGESAPAGDLFNHFNITTDAVVEAALSL

SEQ ID NO: 110221 - protein, 448 aa, Unknown
  Bacterial polypetide isolated from the Sargasso Sea
MVAASVSLESLCVNSIRMLAVDAVNKSNSGHPGLPMGCAPMGYALWQNILNHNPNNPKWFNRDRFVLSAGHGCMLLYSLLHLTGYKSVSIEDIKEFRQWGSKTPGHPETFETEGVEVTAGPLGAGISNAVGLAIAETHLAAKFNKPDCNIVDHYTYVIMGDGCNQEGIASEACSLAGHLKLGKLIALYDDNQITIDGRTDVSFTEDVLKRYEAYGWHVQHVEDGNHDVKGITEAIEKAKLITDKPSIIKISTTIGYGSPNKSDTAGIHGAAVGEEEATLTREFLNWEYPPFEIPDEVYTHFRKSINKGENLEKEWDSKFEEYQKKYPSEGTEFKRMLEGQLPENWDSDLPSYSPNDKGLATRKHSQICLGALGPNLPELIGGSADLTHSNYTDIKGETGSFQPHSPEKRYLHFGVREHAMAAVLNGIAYHNSGLIPYGGTFLVFADYM

SEQ ID NO: 110222 - protein, 417 aa, Unknown
  Bacterial polypetide isolated from the Sargasso Sea
MLSDIECFGQLGSKTAGHPEYGHIEGIETTTGPLGQGLSNAVGFALAEESVRARWGSEICCHKTYVIVGDGCLMEGISQESISFAGKQKLKNLIVLWDDNGITIDGEVSKSCITDQIARFTASGWSVFECDGHNPKSIDEVLNLAKASDLPAFIKCKTNIGFGSPNKEGKASSHGAPLGEDEIVKVREAYNWHYPAFVIPDQISSVWKKIGTQSKEIFDKWEYRFENLSKTKRHRFSTELKGDPPKKLVREIRALKKMISAERPNIATRKSSEHALTLINKVMRNTIGGSADLTGSNNTLTTDLGVFEPKNRLGRYIYYGIREHAMSAIMNGMALHGGMVPYGGTFMAFADYARGGMRLSSLMGLGVIYVMTHDSIGLGEDGPTHQPVEHLSMLRATPNMLVFRPADTVETIEAWEI

SEQ ID NO: 110223 - protein, 550 aa, Unknown
  Bacterial polypetide isolated from the Sargasso Sea
MRIQNKDLSNAIRVLSMDAVEKANSGHPGMPMGMADVATVLFKNFLKFNPSNPSWINRDRFVLSAGHGSMLLYSLLYLTGYKSISISDIKNFRQLNSICAGHPEYEKNSGIETTTGPLGQGIANAVGFAIAEEVLKKKFGSKIINHKTYVLAGDGCLMEGISHEAMSLAGHLKLKNLIMLFDNNSISIDGPTTLAVSDNYKKRFESYGWNYIDIDGHNERQILRAINKAQKAIKPTVISCRTKIGFGSPNKSGKASSHGSPLGPKEIELVREKLNWPFKPFEIPKNILKEWRKIGVKGSKTEAKWNKDFSRTKNSLKELFNKNFSNSIIKQKKEVIANLKPLATRKSSEAVLNSLFKLKNNLIGGSADLAGSNNTKSKFNKVINAKNFDGDYIHYGVREHAMCGIMNGLALHSNLIPYGGTFLIFSDYCKPSIRLSALMKQRVIYVMTHDSIGLGEDGPTHQPIEQLSGLRSIPNLNIFRPADQTETIECWDMALKNSKTPSVLSLTRQNLDPIRKRFTSTNKSSFGAYEVMRTNKKIKITILATGSEVI

SEQ ID NO: 110224 - protein, 661 aa, Unknown
  Bacterial polypetide isolated from the Sargasso Sea
MENHKLANAIRFLSIDAVQAAKSGHPGMPMGMADIAVSLWKNNLKHNPSNPKWINRDRFVLSNGHGSMLLYSLLHLTGYDLNINDLKDFRKLKSKTPGHPEYDIDIGVETTTGPLGQGIGNAVGMALAEKNLAATFNKEDIKLIDHYTYAFLGDGCLMEGISHEVCSFAGTHKLGKLICFYDQNGISIDGEIDLWFTDNTKQRFESYGWQVIEIDGHNIDEVNKATEKAQQETEKPSMICCKTTIGFGSPNKSGTAGVHGSPLGDDEIGITRKELNWEHGPFEIPEDIYDAWNAKDEGAKKEKAWEDLLKTYRQKYPEESNELERRFNSETPHEFNERFDGFLRDCLLQEDPVATRKASQICLDHFCADLPELIGGSADLTGSNNTFSKHNTELTPDNPDGSHIYYGVREFGMVTIMNGMSLHGGIRPYGGTFLVFMDYARNAVRLSAMMSLPNIYVFTHDSIGLGEDGPTHQPIEHLVTLRATPNLYNWRPADLKETAVAWKESILSKSPSCLILSRQGLPQIKISEDKISNISKGGYLVQKDEDAELNIISSGSELQLAIQAAKDLDQAGIKTNVVSMPCLDRFLEADLEYQNKVIQKDLPSIVVEAAHPNSWYKILGRDDLVIGMTTFGESAPAKMLFEEFGFTAGNIVSKAKKLLNK

SEQ ID NO: 110225 - protein, 455 aa, Unknown
  Bacterial polypetide isolated from the Sargasso Sea
TTGPLGQGFANGVGLAVAERYLSSVLGEDIIDHYIYGIISDGDLMEGISTEAAELAGLWKLGKIIYFFDDNNISIDGNVTKVSITNQKNKFLSMGWDVLEIDGHQESEIIDAIKHAQKITDKPSLIIAKSTIGKYSPNKANSSGVHGSPLGEEEFELFLENIGHSGDPFTHSSDIYDYFNNERERDNKTFQEWKSNLDKKISDDENFKILWEEFNNIDFQSISLEWSDDQASRVVGGKILNEIGKSNKFITGGSADLAASTKQIVSDEVFGSQNYSGKTLEFGIREHAMGGIVNGIALHSNLMPYGSTFLVFSDYMRPSIRLASLMKINSVFIFTHDSIFLGEDGPTHQPIEHLMSLRLIPGLEVIRPANNNEILYAYRYAFQNKNNPTAIVLSRQDMQYLENNLQYEEFIKGAYEFSPGKDITIFATGSELEIAKEVSNLLDDLSIQIISVPIL

SEQ ID NO: 110226 - protein, 267 aa, Unknown
  Bacterial polypetide isolated from the Sargasso Sea
MSNAIRFLSIDAVERANSGHPGMPMGMADVVTVLFKNFLKFNPKNPNWLNRDRFVLSAGHGSMLLYSLLYLTGYKSISLNDIKNFRQLNSICAGHPEYHAGTGIETTTGPLGQGIANAVGFALAEEILKEKFGKKIFDHKTYVLAGDGCLMEGISHEALSIAGHLNLKNLVMLFDNNSISIDGPTNLAVSDNYKKRLNSYGWDYIKIDGHNERQIYKALKKVQKAKRPTVISCITKIGYGSPNKSGSESAHGSPLGKNEIKLVRKKL

SEQ ID NO: 110227 - protein, 666 aa, Unknown
  Bacterial polypetide isolated from the Sargasso Sea
MNKKDKKNPNNEVSLNDMANAIRFLAADAVEKANCGHPGMPMGAADFTTVLYSKFLKIDPQKPDWPDRDRVILSAGHGSMLLYAVNHLVGFSDMTIEEIKNFRQLGSKTPGHPEYGHTLGVETTTGPLGQGISTAVGMAIAEKIQNAKYGDAIVDHKTYVIASDGDLMEGISQEAISLAGHLKLSKLIVLFDDNNISIDGAIDLSDSTDQLMRFEASGWNVNRVDGHNHDDIEKAIQEAIESNKPSLIACKTKIGFGSPSKEGKSSSHGAPLGAEDIAQMKKNLNWDYEEFEIPSDIKDAWRLVGLKNSSKRQEWEERLLDNKDKEIEFLKDIDGQISEELDKEINEIKKVFSEEKPGWATRKSSQEVLETINKVIPNTIGGSADLTGSNNTKTKNINIIDSNNFAGRFIHYGIREHGMAAAMNGIALHKGLIPYSGTFLVFSDYCRPSIRLAALMDIKVIHVMTHDSIGLGEDGPTHQPVEHLPSLRAIPNLNVFRPADTTETAECWSLAIKSKGPSIIALSRQGCPHLRNTFEEKNKSSLGAYEIKSSDGEAQVNLIATGSEVSLAVEVHEELKNDGINSRVVSAPSFELLNKQDNDYIDKTLGQSGLRVGIEASTGLGWCNYLGDQGLFIGMNSFGASAPADQLYKNFGIDKENIINKIKEKL

SEQ ID NO: 110228 - protein, 692 aa, Unknown
  Bacterial polypetide isolated from the Sargasso Sea
MDNNTCFGKQENQQQIREYFQSNPTITIEKKKLADCIRVLSADAVQAANSGHPGMPMGMADIAEVLWNDHLKHNPSNPKWADRDRFVLSNGHGSMLLYSLLHLTGYPLSIEDIKKFRQFGSHTAGHPELDPDLGIETTTGPLGQGITNAVGMALAESILASRFNRDGHSIVDHYTYVFLGDGCLMEGISHEACSLAGTLNLSKLICVYDDNGISIDGEVDGWFDEDVCARFKSYGWHVIENVDGHDAEAISKAISEAKASNQPSLIDCKTVIGYGSPNKAGTADTHGAPLGDDEISNLRESLGWEHGPFIVPDEIKNAWDCKEKGQLQENDWNQRFEEYKSQNPELADEFLNCINGNITNNEMVNLDALINQLRENADVVATRKSSLIALNALKEDCSNMIGGSADLTGSVCTYHESSKPITKNDHDGNYIYYGVREFGMSAIMNGIDLHGGLIPYSGTFLTFSDYSRNAIRMAAMMELGVIHVLTHDSIGLGEDGPTHQPVEHVPSLRLIPGLDVWRPCDTLETAIAWKVAVQKRNSPSALILTRQSLPQYDRSEEVTNDILKGGYVLRGDRDSNPDAIIIATGSEVQYAMNASNELESEGLSIRVVSMPCVEIFEQQSDEYKNSVIPLGFEKIMVIEASMASAWRGYAGPKGVVIGMEGFGASAPAPELFKHYGFSDENVTEKLKAMINR

SEQ ID NO: 110229 - protein, 286 aa, Unknown
  Bacterial polypetide isolated from the Sargasso Sea
MSKLHKDLSNAIRFLSIDAVEKANSGHPGMPMGMADVATVLFKNFLNFNPKNPNWMNRDRFVLSAGHGSMLLYSLLYLTGYSSVNLKDIKNFRQLNSICAGHPEFHPGTGIETTTGPLGQGIANGVGFAIGEEILRERFGRKIFDHKTYVLAGDGCLMEGISHEALSLAGHLCLKNLVMLFDNNSISIDGPTNLTVSDNYKKRFNSYGWDYIEIDGHNEKKIFNALKKVQKAKKPTVISCKTKIGFGSPNKSGSEKAHGSPLGESEVKLVRKKLKWTHEPFVIPKK

SEQ ID NO: 110230 - protein, 616 aa, Unknown
  Bacterial polypetide isolated from the Sargasso Sea
MYLQYFSDISKINPKNPSWINRDRFVLSAGHGSMLLYSLLYLTGYKSIKLDDIKNFRQINSICAGHPEYIQNSGIETTTGPLGQGISNAVGFALAEEILKKKIGNDIINHKTYVIAGDGCLMEGISHEAMSLAGHLKLKNLIMLFDNNSISIDGPTTLAVSDNFRKRFESYGWDYIEINGHKENEIFKALKKVQNAKKPTVISCKTKIGYGSPNKSGKASSHGSPLGTGEIALVRKKLGWNYKPFEIPENILAAWRGIGKKGEKTEYKWNKIYKMKKSKINKFFKNDFINPIINEKKIAVKNNNSIASRKSSESIIGSIVKNSCTLIGGSADLAGSNNTKTNYHEIIKPGNFNGNYIHYGVREHAMCGIMNGLALHSKFIPYGGTFLIFSDYCKPSIRLAAMMKQQIIYVMTHDSIGLGEDGPTHQPIEQLSGLRSIPNLNVFRPADRLETIECWEHALNSSKTPSILSLTRQNLNPIRNKYSTTNKCSLGAYEVLRTSKKIKLTILASGSEVNLAVDTSHKLAKDKIYSKVISVPCMELFDLQSKRYRDKILNETKLKISIEAGSSACWKKYVGDSGMTFGIDVFGKSAPYKDIYKYFGLTSLNIANKLKKFSNN

SEQ ID NO: 110231 - protein, 214 aa, Unknown
  Bacterial polypetide isolated from the Sargasso Sea
MQQSDHINVLRFLSADAVQKANSGHPGMPMGMAEIATALWSKHLRHNPNNPTWFNRDRFVLSNGHGSMLLYSLLHLTGYDLSINDIKDFRKLKSKTPGHPEYDIDNGIETTTGPLGQGIANAVGIAVAEKILAAEFNKDDIKPIDHFTYVFLGDGCLMEGISHEACSFAGTHNLGKLICFYDQNGISIDGEIEHWFTDDSVTRFEKYGWQTICV

SEQ ID NO: 110232 - protein, 235 aa, Unknown
  Bacterial polypetide isolated from the Sargasso Sea
MSKLHNDLANCIRFLSIDAVQKANSGHPGMPMGMADVATVLFKNFLRFNPKNPDWLNRDRFVLSAGHGSMLLYSLLYLTGYKSISINNIKKFRQLNSICAGHPEYHPKTGIETTTGPLGQGISNAVGFAIAEEILKNKLGKDLINHKTYVLAGDGCLMEGISHEAMSLAGHLKLKNLVMLFDNNSISIDGPTNLAVSDNFKKRFEGYGWDYISINGHNEKEIFKALKKVQKAKKP

SEQ ID NO: 110233 - protein, 636 aa, Unknown
  Bacterial polypetide isolated from the Sargasso Sea
MQWEKAKSGHPGMPMGMADIATVLYKNHLKFDPNHPGWIDRDRLIISNGHGSMLLYSCLYLTGYKDIDINQIKNFRQLHNKTAGHPEYGSAEGIETTTGPLSQGLANAVGMALAEKKLSNNYGKELFDHYTYVFAGDGCLMEGLSHEVCSLAGHLKLNKLIMFFDNNSISIDGSTDLSVSDNVKKRFEAYNWNIIEIDGHKYEEIDQAIIQAKKNDAPTIISCKTKIGFGSPNKEGSASSHGSPLGEDEISLTRKKLEWNYSPFEIPDDLLREWRSFYKRNEESRNSWLSKNKELIESKNFKDSFYQKIDHQIPEKLSELKSEHFNDKTNCASRKSSELTLNLISNYQKNLIGGSADLTGSNNTKAKDMNVITSNNFNGNYIHYGIREHGMAGVMNGIALHKGLIPYGGTFLVFTDYCRPSIRLSAIMNIPVIYVMTHDSIGLGEDGPTHQPVEHLASLRSIPNLTVIRPCDIIETIEAWECAINNTGPTILVLTRQNLPMLQKDNRKENLVNKGAYKIRDFKEYDATILSSGSEVEIACSASNKLFENNNLKIRVVSMSSFELFEKNDDGYKNEILGNKPIFAIEAGVINGWEKYIKNENFVGMSTFGESGPYKDLYKHFKITDDYLIEKIIKTL

SEQ ID NO: 110234 - protein, 600 aa, Unknown
  Bacterial polypetide isolated from the Sargasso Sea
MIKNETVNALRFLSADSVERAQSGHPGMPLGMADIAEVLWRDHFNHSPTNSNWFNRDRFVLSNGHGSMLLYSLLHLTGYKLSLDDLKDFRQLHSKTPGHPEYGITDGVETTTGPLGQGLANAIGMAIAEKILASKINTEKIKPVDHRTYCFVGDGCLMEGISHEVMSLAGVLELNKLICFYDSNGISIDGEIKDWYKDDIKLRCESYGWNVIGEIDGHNRDEINQAIVAAKESNKPTMIVCKTSIGYGAGSKQDSESSHGAPLGEEVLAELRKNLDWEYKPFEIPESVYADWDFKEKGKNLEENWRAICADHEKNDPEKATLLKRLVSGDLPENFMEAFDNHIEVLKENNDSIATRKCSQMILEFLKEHLPELIGGSADLSGSNNTITKASLSVNSNSSGNYIYYGVREFGMNAIMNGMSLHGGIIPYGGTFLVFMDYGRNAVRMSALMGIRTIYVFSHDSVALGEDGPTHQPIEHLTTLRSTPNMHTWRPASLIETAVAWKKALTNKDGPTSIILSRQNLNNFSIENISDVERGGYFIKHSPDSTINLIATGSEVDTVLEAAKILEESGTKTNIVSVPCLEEIEKDQSIYQKIFSQNTS

SEQ ID NO: 110235 - protein, 448 aa, Unknown
  Bacterial polypetide isolated from the Sargasso Sea
MQQNNSINALRFLSADAVQKANSGHPGMPMGMAEIATALWSKHLKHNPSNPRWFNRDRFVLSNGHGSMLLYSLLHLTGYDLSIDDLKDFRQLKSKTPGHPEYDIDIGVETTTGPLGQGIANAVGMAISEKILAAEFNEEDIKPIDHYTYVFLGDGCLMEGVSHEACSFAGTHNLGKLICFYDQNGISIDGEIEHWFTDDSIKRFNSYGWHTISVDGHNVEEIEKAIEEAKRESDKPSMIFCKTTIGFGSPNKSGTADVHGAPLGEEEINKTREALGWTYEPFELPEDVYKFWNATEHGSSLNLDWDNLMSSYEEKYPEKSKELNRRINADLPQSFENDFDKFLAECDKNNSAMATRKASKACLDFFVKEMPELIGGSADLTPSNNTFSASSSTFSNENPSGNHINYGVREFGMSAIMNGMVLHGGIKPYGATFLVFTDYARNAVRLSA

SEQ ID NO: 110236 - protein, 506 aa, Unknown
  Bacterial polypetide isolated from the Sargasso Sea
MANAIRFLSIDAVQKANSGHPGLPMGMADVSTVLFCKYLKFNPKDPDWDDRDRFVLSAGHGSMLLYSLLYLTGYKGSSLKDIINFRQLNSRCAGHPEYGHLKGIETTTGPLGQGFANAVGMAIAERKLSKDFGSKICDHFTYVIASDGDLMEGISHEAASLAGHLKLKKLIVFFDDNGISIDGPVSLSNSENTVNRFKAYQWNTISINGHDQNQISKAISEAQKSNKPTLIACKTKIGFGSPNKQGKSSAHGAPLGLDEIELTKAKLNWEYKPFEIPDNIKSEWLIAGTRSIVKYKKWKSNANKMKSNSKKEYARRINGKLPSNINKILNDFKKDCSNKKIAKATRQSSEMVINQISSHMPELIGGSADLTGSNNTKASDMKILDANNYSGNYIYYGIREHGMAAIMNGIALHKGVIPFSGTFLIFSDYCKPSIRLSALMKQRVIYVFTHDSIGLGEDGPTHQPIEQLAGLRSIPNLNVFRPADSVETAEAWQISLQSNDTPSAIA

SEQ ID NO: 110237 - protein, 668 aa, Unknown
  Bacterial polypetide isolated from the Sargasso Sea
MVAASVSLESLCVNSIRMLAVDAVNKSNSGHPGLPMGCAPMGYALWQNILNHNPNNPKWFNRDRFVLSAGHGCMLLYSLLHLTGYKSVSIEDIKEFRQWGSKTPGHPETFETEGVEVTAGPLGAGISNAVGLAIAETHLAAKFNKPDCDIVDHYTYVIMGDGCNQEGIASEACSLAGHLKLGKLIALYDDNQITIDGRTDVSFTEDVLKRYEAYGWHVQHVEDGNHDIKGITEAIEKAKLVADKPSIIKISTTIGYGSPNKSDTAGIHGAAVGEEEAALTREFLNWEYPPFEIPDEVYAHFRNSINKGENLEKEWDTKFEEYQKKYPSEGAELKRMLEGQLPEDWDSDLPSYSPDDKGLATRKHSQICLGALGPNLPELIGGSADLTHSNYTDIKGETGSFQPHSPEKRYLHFGVREHAMAAVLNGIAYHNSGLIPYGGTFLVFADYMRGSMRLSALSELGVIYVLTHDSIGVGEDGPTHQPIETIPSLRAMPNMLVFRPGDGNETSGAYKLAIQNRKRPSALCLSRQGMPNQENTSIDKVALGGYVVSDCEGTPDLIFIGTGSELNLCIEASKEISSLGKKIRVVSMPCVELFEEQEESYKESVLPSSVKKRVVVEAAHSFGWHKYTGFDGICITMDRFGASAPGGECMKNFGFTVENVVNKTKEIL

SEQ ID NO: 110238 - protein, 302 aa, Unknown
  Bacterial polypetide isolated from the Sargasso Sea
MQQKDPINALRFLSIDAVQKANSGHPGMPMGMAEIATALWSNHLKHNPLNPHWFNRDRFVLSNGHGSMLLYSLLHLTGYNLSIDDLKDFRKLKSKTPGHPEYDLDIGVETTTGPLGQGIANAVGMAISEKILAAEFNEEDIKPIDHYTYAFLGDGCLMEGISHEACSFAGTHNLGKLICFYDENGISIDGEIKNWFTDDSVQRFDSYGWQTICVDGHNSDEINKAISKAKNEVSKPSMIFCKTTIGFGSPNKSGTADVHGAPLGAEEVIKTREALNWHYGEFEIPQEIYDFWNFTEKGATLN

SEQ ID NO: 110239 - protein, 598 aa, Unknown
  Bacterial polypetide isolated from the Sargasso Sea
MHTVNAIKGLVMDGVSKANSGHPGGPMSLADFTYILYSEFLSFDPENPDWENRDRVVLSVGHTCMLLYSIFFLCGYLKKEDLRKFRQLGSLTPGHPEIHTPGIDANTGPLGQGVGMGIGMALAEKASTNSDKKRFTYILAGDGDLQEPIAIGASTLAGHWKLSNLIMFYDKNDIQIAGKTSRVDSTNYAKLFEAMDWHVQEIDGHDHQEIREALNNAQLNEKPSIIIGQTTIAKGSHSLENNPKAHGAPFSDDEIFKTKDKLGLPQESFYCSEEIINHFQRNFKSLKENVIETNKSFKTELLDYHQMLKSLKVPDFGDDLMATRQAFGITLDEFANKFPNIIGGSADLDGSNCTTNFANTYDDFSATNPKGRNIAFGVREFPMGAIMNGIALYGKHLPFGGTFLVFSDYVRSAVRLSAIQKLQVLYEFTHDSIFVGEDGPTHQPVEHAMSLRNIPNLLVFRPSDSFETYCCFKEVIKNTESPSAMLLTRQKLPKLNLDQDYIEQGVSKGAYILKKQDNPEAILFTTGSEAHLALDICNSLDKKIQIITIPCWELFNKQDKNYISSIMLKDCKKRISLEAGITLGWEKFTGINGLSIGI

SEQ ID NO: 110240 - protein, 661 aa, Unknown
  Bacterial polypetide isolated from the Sargasso Sea
MATKNTDIANILRVLAMDAVEEAKCGHPGMPMGMADIAEVLWRKHLIHNPKNPNWPNRDRFVLSNGHGSMLMYALLHLSGYDLSLDEIKNFRQLGSKTPGHPEYGITPGVETTTGPLGQGISNAVGMAIAEKILSDKFNTSTHNIVNHMTYVFTGDGCLMEGISHEACSLAGTLGLGKLIVIYDDNGISIDGNVEGWFTEDIPERFKSYGWQVISAVDGHNADEIDKAINIAKADTEKPSIICCKTIIGKGSPEKEGSASSHGSALGEEEIKNTRANLGWNHEAFDIPKDIYSEWDASDQGQAIEDEWNEIFTDYKSKNPALAEEFSRRMTSDLPNGIEEAIYKYIEDVQKEEPNIATRTSSQRVINVLGPLIPELVGGSADLTGSNNTNWEGTHEIKYGDFSGNYINYGVREFAMTGIMNGLVLHGGIKPYSGTFLTFLDYARNAVRMAALMEIPTVLVYSHDSIGVGEDGPTHQPVEHLTSLRTTPNLETWRPCDTSETAISWLSAITNTSKPTALILSRQKLPTFSRNESQINSISKGAYVLYEPESKAELVLIATGSEVKLAMEVAEELKGKKNIRVVSMPCSERFDEQSDEYKTSVLGNGIKRVAIEASHEDWWRKYVGLEGEVIGMTSFGESAPGDDLFEHFGFTKEKIIKTLGL

SEQ ID NO: 110241 - protein, 419 aa, Unknown
  Bacterial polypetide isolated from the Sargasso Sea
MIKNETVNALRFLSADSVERAQSGHPGMPLGMADIAEVLWRDHFNHSPTNSNWFNRDRFVLSNGHGSMLLYSLLHLTGYKLSLDDLKDFRQLHSKTPGHPEYGITDGVETTTGPLGQGLANAIGMAIAEKILASKINTEKIKPVDHRTYCFVGDGCLMEGISHEVMSLAGVLELNKLICFYDSNGISIDGEIKDWYKDDIKLRCESYGWNVIGEIDGHNRDEINQAIVAAKESNKPTMIVCKTSIGYGAGSKQDSESSHGAPLGEEVLAELRKNLDWEYKPFEIPESVYSDWDFKEKGKNLEENWKAICVDHAKNNPEKATLLKRLVSGDLPENFMEAFDNHIEVLKENNDSIATRKCSQMTLEFLKEHLPELIGGSADLSGSNNTITKASLSVNSNSSGNYIYYGVREFGMNAIMNGM

SEQ ID NO: 110242 - protein, 559 aa, Unknown
  Bacterial polypetide isolated from the Sargasso Sea
MNKHNKILANAIRVLSMDAVQKANSGHPGMPMGMADVATILFKYFLKFNPRNPSWLNRDRFVLSAGHGSMLLYSLLYLTGYKSISLKSIKNFRQLNSICAGHPEYKPNSGIETTTGPLGQGISNAVGFAIGEEILKKKIGKNFINHKTYVLAGDGCLMEGISHEAMSLAGHLKLKNLIMLFDNNSISIDGPTTLAVSDNYKKRFESYGWNYILVNGHNENEIFKALKKAQSSIKPTVISCKTEIGYGSPNKSGKASAHGSPLGDKEIELVRKKLDWKYSPFEIPKYILNEWRKIGLKGSKSEKTWNKNYKKIKMRFEKKLKNKFLNSIKKEIINATKEIKSVATRKSSELLLAAIVNNCNTLIGGSADLAGSNNTKTKYHKIIKPNDFSGNYIHYGVREHAMCGIMNGLSLHSNFIPYGGTFLIFSDYCKPSIRLAAMMKQRVIYVMTHDSIGLGEDGPTHQPVEQLTGLRAIPNLNVLRPADRVETIECWELALKNPNTPSVLSLTRQNLNPVRTKYSKYNKCALGAYEILRTNKKIDLTIIASGSEVNLAIETGHKL

SEQ ID NO: 110243 - protein, 466 aa, Unknown
  Bacterial polypetide isolated from the Sargasso Sea
MENHKLANAIRFLSIDAVQAAKCGHPGMPMGMADIAVSLWKNNLKHNPSNPKWINRDRFVLSNGHGSMLLYSLLHLTGYDLNINDLKDFRKLKSKTPGHPEYDIDIGVETTTGPLGQGIGNAVGMALAEKNLAATFNKEDIKIIDHFTYAFLGDGCLMEGISHEVCSFAGTHKLGKLICFYDQNGISIDGEIDLWFTDNTKQRFESYGWHVVEIDGHDIDEINKATEEAKKETERPSMICCKTTIGFGSPNKSGTAGVHGSPLGDDEIEITRKELNWEHAPFEIPEDIYDAWNAKDEGAKKEKAWEDLLETYKQKYPEESNELERRFNSEMTHEFNERFDDFLRDCSLQEDPIATRKASQICLDHFCADLPELIGGSADLTGSNNTFSKHNTELTPDNPSGSHIYYGVREFGMVTIMNGMSLHGGIRPYGGTFLVFMDYARNAVRLSAMMSLPNIYVFTHDSNRLR

SEQ ID NO: 110244 - protein, 369 aa, Unknown
  Bacterial polypetide isolated from the Sargasso Sea
MVAASVSLESLCVNSIRMLAVDAVNKSNSGHPGLPMGCAPMGYALWQNILNHNPNNPKWFNRDRFVLSAGHGCMLLYSLLHLTGYKSVSIEDIKEFRQWGSKTPGHPETFETEGVEVTAGPLGAGISNAVGLAIAETHLAAKFNKPDSNIVDHYTYVIMGDGCNQEGIASEACSLAGHLKLGKLIALYDDNQITIDGRTDVSFTEDVLKRYEAYGWHVQHVEDGNHDVKGITEAIEKAKLITDKPSIIKISTTIGYGSPNKSDTAGIHGAAVGEEEASLTREFLNWEYPPFEIPDEVYKHFRKSINKGENLEKEWDSKFEEYQKKYPSEGAELKRMLKGQLPENWDSDLPSYTPEDKGLATRKHSQICL

SEQ ID NO: 110245 - protein, 155 aa, Unknown
  Bacterial polypetide isolated from the Sargasso Sea
MHTDHQTRANAIRALTMDAVQKANSGHPGAPMGMADIAEVLWLQFLKHNPANPSFSNRDRFVLSNGHGSMLLYSLLHLTGYELSIEDLKSFRQLHSKTPGHPELGYTPGVETTTGPLGAGIANAVGMAIAEKTLAAQFNRPDYPVVDHFTYCFLG

SEQ ID NO: 110246 - protein, 663 aa, Unknown
  Bacterial polypetide isolated from the Sargasso Sea
MHKELANAIRFLSIDAVEAAKSGHPGMPMGMADIAVALWKYNLKHNPQNPTWFNRDRFVLSNGHGSMLLYSLLHLTGYELSIEDLKNFRQLGSKTPGHPEFDIDIGVETTTGPLGQGIGNAVGMALAEKMLASRFNQDDGLKPIDHFTYTFLGDGCLMEGVSHEACSFAGTHGLGKLICFYDQNGISIDGEITNWFTDNTLQRFESYGWQVLEVDGHNVEETLEAIRTAQQDVERPTLICCKTIIGFGSPNKSGTSGVHGAALGEDEVKKTRDELGWEHEPFHIPDDIKSEWDCKDEGTKLNASWDQLMMEYSKKHPKSFDELTRVINNELPINFENSYRDFINELSAGDQKDLATRKASELCLNYFCEKFPELIGGSADLTGSNNTFSSVSTEMLPDNPKGNHIFYGVREFGMTAMTNGMVLHGGIKPYSGTFLVFMDYARNAVRLAALMKIPNIFVYTHDSIGLGEDGPTHQPIEHLVTLRATPNLNNWRPADIIETAVSWKEAICSKDTPHSLILSRQNLPFIERSKEQIEMIEKGGYLLSSDDKAHITLISSGSEVKLIIEAAKTISKEGLKANVVSMPCLDKFVSQDKVYRDSIINPEIPKLVVEALHPNSWHCLINLNDTVIGMETFGESAPGDELMNEFGFTVNNIVTQAKKLIAK

SEQ ID NO: 110247 - protein, 491 aa, Unknown
  Bacterial polypetide isolated from the Sargasso Sea
ANLCWIYDDNKITIEGETDLAFSEDVGRRFEGFGWRIEYVDDANDASSLSRALEAFKAETHKPTLIVVKSIIGFGAPTKAGSHSSHGAPLGPDEIAGAKEAYDWPTREAFHVPNGVGKHFQDTMGERGQKANALWQTAHQTLASAEPQVAKKLECLLAGELPEGWADAIPDFPADAKGLASRVSSGKVLQSLSATIPWFLGGSADLAPSTMTLIPDAGDFGPENLSGRNFHFGIREHAMAAACNGMALCGLRPYAATFFVFFDYLKPALRLSALGELGVIYVLTHDSIGLGEDGPTHQPIEHLASARAVPGLNVFRPADANEVAEAYRSALLNPKQPAVMVLSRQNLPTLDRTNLGPANGVAKGGYILKEARGGEAECILIGTGSEIPLCLDAADILDSDGIRTRVVSLPCWELFAEQDDEYREHVLPSNIPSRVACEAASGFGWERWLGQKGTFIGMNGFGASGPAKKLFEHFGITAEAVVAAARTLVGK

SEQ ID NO: 110248 - protein, 526 aa, Unknown
  Bacterial polypetide isolated from the Sargasso Sea
MLIYALNYLLGYEDMPIESIKNFRQLNFNTPGHPEFGHTKGVETTTGPLGQGFATSVGMALAEKLLNARFKNELVDHFTYTIVGDGCLQEGISHEAIEFAGHLKLSKLIVLWDNNKISIDGETNLSTSSNQLARFKASGWDAQIIDGHNFEEITNAIDKAKKSNKPSLIACKTIIGYGSPNLAGTEKTHGAPLGKDEVEEVKKHLNWNYEPFEVPNELIEEWKKVGLRGNTKRKDWLLKLESSSKKQKFANFHNTDINKKFEKKFRSYLKKLKTDKPKIATRQASLNFLEVINSSIENTIGGSADLTGSNLTKTKNMKPIMPRKFKGNYIHYGIREHMMGAVMNGIALHKGFLPYGGTFLVFSDYMRASMRLSSIMKAKVVYVLTHDSIGLGEDGPTHQPIEHLAMLRATPNLNVFRPADAVETAEAWRLALSHNGPSVLALSRQGLPAIRDEKKFENLTEKGGYIIKDVKGNRDVTIIASGSEVNIALQVSDLLSKHKVNAAVISMPCWELFENQNNDYKSNVIG

SEQ ID NO: 110249 - protein, 198 aa, Unknown
  Bacterial polypetide isolated from the Sargasso Sea
MSKLHKDLSNAIRFLSIDAVEKANSGHPGMPMGMADVATVLFKNFLNFNPNNPNWLNRDRFVLSAGHGSMLLYSLLYLTGYRSISLKDIKNFRQLNSICAGHPEFHPGSGIETTTGPLGQGVANAVGFAVAEEVLRERFGPKIFNHKTYVLAGDGCLMEGISHEALSLAGHLGLKNLVMLFDNNSISIDGPTNLAVSD

SEQ ID NO: 110250 - protein, 563 aa, Unknown
  Bacterial polypetide isolated from the Sargasso Sea
ICAGHPEYEKDSGIETTTGPLGQGLANSVGMAIASEVLKKRFGSDLINNKTYVIASDGDLMEGISHEAMSLAGHLNLKNLIVFFDNNKISIDGATSLSVSDNYKKRFESYGWSFQEINGHNNKQIFNAIKKATKSKKPSIISCKTIIGFGSPNKSGKATSHGSPLGDDEIKLVRKKLGWKHAPFEIPEKIIEAWREIGKKGQKIEESWNSILSSKNSKVKEEYERLTKGELPISIDKILGDEKLKFFQTKPKMATRQCSSSVIKCMSEVLPELIGGSADLSGSNNTKTEISKVINSKNFSGNYIHFGVREHAMAGVMNGLALYGCLIPFGGTFLIFSDYLKPSMRLSALMKLRVIYIFSHDSIGLGEDGPTHQPIEQLEHLRAIPNLNVFRPADINETIECWEIALKSKNNPSAIALSRQKLSYVSEHNAGENKCSKGGYVLKKTSDNPEVSIIASGSEVEIALEAQEKLKNQNIFSKVISVPCYDLFQNQTEIYKNEVLGKDTFKISIEASSQSCWKSIVGKKGITLGLSTFGKSAPYKDIYKLFNLTSDEIVKNVKEQVKK

SEQ ID NO: 110251 - protein, 327 aa, Unknown
  Bacterial polypetide isolated from the Sargasso Sea
MVAAPASLDTLCINSIRMLAVDAINKSKSGHPGLPMGCAPMGYALWDKFLKHNPKNPKWFNRDRFVLSAGHGCMLLYALLHLTGYDSVSIEDIKQFRQWGSKTPGHPETFETPGVEVTTGPLGAGISNAVGLAIAESHLAAKFNKPGATLVDHYTYVVMGDGCNQEGIASEACSLAGHLKLGKLIALYDDNHITIDGRTDVSFTEDVLKRYEAYGWHVQHVADGNTDVDAIAKAIEAAKAVTDKPSIIKVTTTIGYGSPNKGDTAGVHGAPLGEDETALTRQQLGWEYGPFEVPQEAYDQFRQAIDRGASLEAEWNQTLASYRTQFP

SEQ ID NO: 110252 - protein, 240 aa, Unknown
  Bacterial polypetide isolated from the Sargasso Sea
MDNKDLANAIRFLSIDAVQAANSGHPGMPMGMADIAVSLWKNNLKHNPNNPRWINRDRFVLSNGHGSMLLYSLLHLTGYDLSIDDLKDFRKLKSKTPGHPEYDIDVGVETTTGPLGQGIGNAVGLALAEKNLAATFNKDDIKIIDHFTYAFLGDGCLMEGVSHEVCSFAGTHKLGKLICFYDQNGISIDGEIDLWFTDNTKQRFKSYGWHVVEIDGHDIDEINKATEEAKKETERPSMIC

SEQ ID NO: 110253 - protein, 225 aa, Unknown
  Bacterial polypetide isolated from the Sargasso Sea
MNKNNRDLSNAIRFLSIDAVQKANSGHPGMPMGMADVATVLFKNFLKFNPKDPDWLNRDRFVLSAGHGSMLLYSLLYLTGYKSIKLDDIKNFRQINSICAGHPEYHPNSGIETTTGPLGQGISNSVGFAIAEEIQKKKNGKNIINHKTYVLAGDGCLMEGISHEALSLAGHLKLKNLILLFDNNSISIDGPTSLAVSDDHKKRFNSYGWNFLEIDGHDEKQILKH

SEQ ID NO: 110254 - protein, 162 aa, Unknown
  Bacterial polypetide isolated from the Sargasso Sea
MAVSRKKLADAIRVLSMDSVQRANSGHPGGPMGLADVMEVLWRDFVKQNPTDPNWLDRDRFVLSNGHCSMLLYSALHLSGFDVSISDLKDFRQLGSKTAGHPEFGECPGIETTTGPLGQGLANAVGMALAEQKLAAEFNEPNYEIVDHRTWVVVGDGCLMEG

SEQ ID NO: 110255 - protein, 513 aa, Unknown
  Bacterial polypetide isolated from the Sargasso Sea
MSKNSSSQSANALRILAADAVQQANSGHPGMPMGMAEIAEVLWRRHLLHNPSNPNWFNRDRFVLSNGHGSMLIYSLLHLSGYDLTIQDLKDFRQLHSKTAGHPEYGITPGVETTTGPLGQGISNAVGMAIAEKVLATKFNTKIHKVIDHMTYVFTGDGCLMEGISHEACSLAGTLGLGKLVVLYDDNNISIDGEVDGWFTEDIPARFRSYGWEVISDINGHDPEEIDTAINKAKTSQNKPTLICCKTLIGKGSPNKEGTASTHGNPHGEEEIADMRKDLKWDNEPFDIPASVYEAWDAKEQGSSKEEEWNQLFDQYQKDNKELASELRRIMNGDLPEGVEEAIYGFVDDAQKDLPNIATRVSSQRVLNVLGPLIPELVGGSADLTGSNNTNWDGTIEIRSDNFAGNYINYGVREFGMTGIINGMVLHGGIRPYGGTFLTFLDYARNAVRMAALMKIQTMLVYSHDSIGVGEDGPTHQPVEHLTSLRTTPNLETWRPCDTSETAISWLAALENS

SEQ ID NO: 110256 - protein, 548 aa, Unknown
  Bacterial polypetide isolated from the Sargasso Sea
MKKENKILANAVRFLSIDAVQKANSGHPGMPMGMADVVTVLFKYFLKFNPKNPSWLNRDRFVLSAGHGSMLLYSLLYLTGYKSISLKSIKNFRKLNSICAGHPEFEANTGIETTTGPLGQGISNAVGFAIAEKILKNKLGKDIINHKVYVLAGDGCLMEGISHEAMSLAGHLKLNNLVMLFDNNSISIDGPTSLAVSDNYKKRFESYGWNYLLIDGHNEKEIFKALKKVNLSKKPTVISCKTKIGYGSPNKSGKASSHGSPLGENEVSLVRKKLNWKYKKFEIPNNILNQWRTIGNKGSKIESSWNKIYKRKKNRINKILKNNFSKSIRSEKINAIKEFKSEASRKSSELVLNALTKNKNTLVGGSADLAGSNNTKTKYQKIIKPNNFLGNYIHYGVREHAMCGIMNGLALHSKLIPYGGTFLIFSDYCKPSIRLSAMMKLRVIYVMTHDSIGLGEDGPTHQPIEQLSGLRAIPNLNVLRPADRTETIECWEIALRSSATPSILSLTRQNLNPIRSEYSKINKCYFGAYEILRTSNKIKLTILASGSE

SEQ ID NO: 110257 - protein, 234 aa, Unknown
  Bacterial polypetide isolated from the Sargasso Sea
MQYSEPINALRFLSADAVQKANSGHPGMPMGMAEIATALWSKHLKHNPLNPTWFDRDRFVLSNGHGSMLLYSLLHLTGYKLSIEDIKDFRQLKSKTPGHPEYDINIGVETTTGPLGQGIANAVGMAISEKMLAAQFNKDDIKPIDHYTYVFLGDGCLMEGISHEACSFAGTHELGKLICFYDQNGISIDGEIDNWFTDDSVKRFESYGWQTICVDGHNVEEISEAISKAKEEPK

SEQ ID NO: 110258 - protein, 412 aa, Unknown
  Bacterial polypetide isolated from the Sargasso Sea
PKWVDRDRFVLSAGHGSMLIYALLYLTGYSDISLDEIKNFRQFGSKTAGHPEYGEIDGVETTTGPLGQGFANAVGMAMAERQLSAKFGKEIVDHNTYCIVGDGCLMEGISHEAASLAGHQRLGKLIVLFDDNGISIDGSTDLTVSDDHIERFKAYGWHTASADGHDFNAVRSVISQAKDSSKPSFLAFKTQIGFGSPNKGGTAACHGAPLGADEIELVRSTLNWSEEPFVIPESIIVAWRKLGEKGGKEEKAWQERLKQLENGQKQSFKNTFKAELNSNVLNALQNYKIELVNDKPNIATRVASQKTLEVLTPVMPCLIGGSADLSGSNNTKTGDHQTSSKDNPTGNYVHYGVREHAMAAAMNGMSLHGGVIPYGGTFLVFTDYCRPSIRLSALMKLRVIYVMTHDSIGLGE

SEQ ID NO: 110259 - protein, 662 aa, Unknown
  Bacterial polypetide isolated from the Sargasso Sea
MQQSDHINVLRFLSADAVQKANSGHPGMPMGMAEIATALWSKHLRHNPKNPTWFNRDRFVLSNGHGSMLLYSLLHLTGYDLSINDIKDFRKLKSKTPGHPEYDIDIGIETTTGPLGQGIANAVGMAVAEKILAAEFNKDDIKPIDHFTYVFLGDGCLMEGISHEACSFAGTHNLGKLICFYDQNGISIDGEIEHWFTDDSVKRFESYGWQTICVDGHDIEDIDGAIHKAKEEVNKPTMIFCKTTIGYGSPNKSGTADVHGAPLGDEELKETREVLGWNYKPFEVPQEVYDFWNFKEEGASFNDSWNKILKDYEKKYPNDSLELHRRIDGHLPNNFQESYESFLNECNSNNLSMATRKASKACLDFFVKEMPELIGGSADLTPSNNTFSSSSSTFSNENASGNHINYGVREFGMSAIMNGMVLHGAIKPYGATFLVFTDYARNAVRLSALMKLPNIFVYTHDSVALGEDGPTHQPIEHMVTLRSTPNLNNWRPADLVETAVSWKSAVSSQKTPTCLIYTRQGTSAIKRSPDQISMIDMGGYLLEESDDFDLTIVASGSEVQLALDAAKELKNDSINANVVSMPCLDIFLDQDKEYQNKIINPEKPVLVVECAHPNSWYRILNRNDKVIGIETFGESAPGSELLNHFGFNTDNVIKTAKSLIND

SEQ ID NO: 110260 - protein, 312 aa, Unknown
  Bacterial polypetide isolated from the Sargasso Sea
MLEGQLPENWDSDLPSYSPDDKGLATRKHSQICLGALGPNLPELIGGSADLTHSNYTDIKGETGSFQPHSPEKRYLHFGVREHAMAAVLNGIAYHNSGLIPYGGTFLVFADYMRGSMRLSALSELGVIYVLTHDSIGVGEDGPTHQPIETIPSLRAMPNMLVFRPGDGNETSGAYKLAIQNRKRPSALCLSRQGMPNQENTSIDKVALGGYVVSDCEGTPDLIFIGTGSELNLCIEASKEISSLGKKIRVVSMPCVELFEEQEESYKESVLPSSVKKRVVVEAAHSFGWHKYTGFDGICITMDRFGASAPGG

SEQ ID NO: 110261 - protein, 492 aa, Unknown
  Bacterial polypetide isolated from the Sargasso Sea
LSHEASSLAGHLGLSKLIVFFDDNSISIDGSTELSNSDNTIKRYESYGWNTISIDGHNHEEISRAIIKAKKNEKPTIIACKTKIGFGSPNKESKSSSHGSPLGEDEIKLTRKNLDWNYDSFEIPDDMLSKWRSFSIKNKTIRQNWMDKNANIISSKKYKDFFSKNLSDEIIDKLKIFKNKHFKEKTNCASRKASEAAIEFFSSELENLVGGSADLTGSNNTKTKNMAHISKNDFKGSYIYYGIREHGMAAIMNGLALHGGLRPYGGTFLVFTDYCRPSIRLAALMNLPIIYIMTHDSIGLGEDGPTHQPVEHLASLRAIPNLTVIRPSDIIETIEAWQYALESQSPCVIVLTRQNLPMLRTNNNINIVESGAHPIIDFENYQGTILATGSEVEIACESSKILSSENINIRVISFPSWEIFDKKSKKEKMEILGNKLLFAIEAGAVNGWEKYVSNENFIGMKSFGASGPYKELFEHFEITSKALTKLIKERIK

SEQ ID NO: 110262 - protein, 644 aa, Unknown
  Bacterial polypetide isolated from the Sargasso Sea
MKIKHKDLANAVRFLSLDAVEAANSGHPGMPMGMADVATVLFKNFLRFNPKDPSWFNRDRFVLSAGHGSMLLYSLLYLTGYKSVSIDDIKNFRKLDCICAGHPEYHSNSGIETTTGPLGQGISNAVGFALAEEILKKRLGKKKIDHKTYVLAGDGCLMEGISHEALSFAGHIKLKNLILLFDNNSISIDGPTNLAVSDNTKKRFESYGWSYLEIDGHNDKQIFTALKKAQNSKKPFAISCKTTIGYGSPNKSGKASSHGSPLGTDEVKLVRKKLKWNYEPFKIPEKILSEWRKIGESASSKAEKNKSYEPEFNIFNDEITSEIEQVKNDYLKSLEPIATRKSSEKFLDIVSKLPNLIGGSADLAGSNNTKTKNHKIIKPGNFGGNYIHYGVREHAMCGIMNGISLHSNLIPYGGTFLIFSDYCKPSIRLAAMMGQRVIYVLTHDSIGLGEDGPTHQPVEQLAMLRSIPNLNVFRPSDTIETFECWQLALESKNKPSVIALTRQKIEPVRKEVITNNLCSKGAYEILRNGDNLKVTLLATGSETDLAIKVSHKLATENIYSKVISMPCHEIFDSQNHDYKKDILQEDTLKVSIEASETSYWKKYTGTSGLNLGIDNFGKSAPYKDIYKHFELDVENIVQKIKKSL

SEQ ID NO: 110263 - protein, 568 aa, Unknown
  Bacterial polypetide isolated from the Sargasso Sea
KTPGHPEYDIESGIETTTGPLGQGIANAVGMAISEKILAAEFNQDDLKPIDHHTYVFLGDGCLMEGVSHEACSFAGTHNLGKLICFYDQNGISIDGKIENWFTDDSVKRFESYGWHTVCVDGHDIEEVNKAIIQAKEISNKPSMIFCKTTIGFGSPNKAGTADVHGAALGDDEVTKTREALDWKYSEFELTDEIYNFWDAKDVGANLNSEWNNLMKTYEEKYPEKSKELSRRIEGNVPENFEKEFKKFLKDCDSKNSPMATRKASKACLDFFVKEMPELIGGSSDLTPSNNTFSESSSTFSNKNPSGNHINYGVREFGMSAIMNGMVLHGGIKPYGATFLVFTDYARNAVRLSALMGLPNIFVYTHDSVALGEDGPTHQPIEHMVTLRSTPNLISWRPADLVETAVAWKDALISKSVPTCLIFSRQGTSAIKRNLEQIAHIENGGYLLKSSEDPDITIIASGSEVQLALDAAKELENDSIKSNIVSMPSLDKFLEMPKEYQKTILNSDKPMLVVECSHPNSWYKILNRNDKVLGIESFGESAPGSQLMEHFGFTVSNVIKMAKSLLDD

SEQ ID NO: 110264 - protein, 429 aa, Unknown
  Bacterial polypetide isolated from the Sargasso Sea
QPPITQKWFNRDRFVLSAGHGCMLLYSLLHLTGYKSVSIEDIQEFRQWGSKTPGHPETFETEGVEVTAGPLGAGISNAVGLAIAETHLAAKFNKPDCNIVDHFTYVIMGDGCNQEGIASEACSLAGHLKLGKLIALYDDNQITIDGRTDVSFTEDVLKRYEAYGWHVQHVEDGNHDVRGITEAIEKAKLITDKPSIIKITTTIGYGSPNKSDTAGIHGAAVGEEEAVLTREFLNWEYPPFEIPDEVYAHFRKAINKGENLEKEWDSKFEEYQKKYPTEGAELNRMLKGQLPENWDSDLPSYSPNDKGLATRKHSQICLGALGPNLPELIGGSADLTHSNYTDIKGETGSFQAHSPEKRYLHFGVREHAMAAVLNGIAYHNSGLIPYGGTFLVFADYMRGSMRLSALSELGVIYVLTHDSIGVGEDGPTH

SEQ ID NO: 110265 - protein, 402 aa, Unknown
  Bacterial polypetide isolated from the Sargasso Sea
LCRFGTEVVDHHTYCVVGDGCLMEGISHEAASLAGHQRLEKLIILFDDNGISIDGSTNLTVSDDHIARFEAYGWHTATADGHDFNSIRMAISDAKNSQQPSFLAFKTQIGFGSPNKGGTAACHGAPLGAEEVELVRSTLNWSEEPFIIPDPIIKSWRNLGKRGSGEQKAWQERLNRLEKKQRQAFEEALEGTSSSEAHNALERYKAELITVKPNIATRVASQKTLEVLTPMTPWLIGGSADLTGSNNTKTNDHEILSEDTPAGNYLHYGVREHAMAAAMNGMALHGGVVPYGGTFLVFTDYCRPSIRLSALMKLRVVFVMTHDSIGLGEDGPTHQPVEHLSALRSIPNLNVYRPADAVETLECWELALQTNQTPSIIALSRQNLPQIRLEHKPENLCSKEVT

SEQ ID NO: 110266 - protein, 370 aa, Unknown
  Bacterial polypetide isolated from the Sargasso Sea
MQHTVPTNALRFLSIDAVQKANSGHPGMPMGMAEIATSLWGKHLNHNPLNPHWFDRDRFVLSNGHGSMLLYSLLHLTGYDISIDDLRDFRKLHSKTPGHPEYDIDIGIETTTGPLGQGIANAIGMAVSEKIMAAEFNEDDIKPINHYTYAFLGDGCLMEGISHEACSFAGTHKLGKLICFYDQNGISIDGEIENWFTDDSVKRFDSYGWQTICVDGHNIEEIDKAIVDAKNETNKPTMIFCKTIIGFGSPNKSGTADVHGAALGEEEVLKTREALNWDHGAFKVPQEAYDFWDSTKKGSELNLDWDNLIKTYDKKYPDKSAELKRRIKGDLPDDFENSFKTFLSECDSNNTPMATRKCSKACLDFCVKIT

SEQ ID NO: 110267 - protein, 512 aa, Unknown
  Bacterial polypetide isolated from the Sargasso Sea
LRFNPKNPNWINRDRFILSAGHGSMLLYSLLYLTGYKNISLKDIKNFRQLDSICAGHPEYHPNTGIETTTGPLGQGISNAVGFALAEEILKNKVGKKIINHKTYVLAGDGCLMEGISHEALSLAGHLKLKNLILLFDNNSISIDGPTNLAVSDDHKKRFDSYGWDFLEINGHNEKEIFKALKKAQKSKKPIAISCKTIIGYGSPNKSGKASSHGSPLGEEEIKLVKKKLKWKHEPFEIPKHILEGWRSIGDKASKKTGKDKNNFTNNFSLKNNLIKKQIHSAIEKGKMDYLKSLEPIATRKCSEKFLEIASKLPNLIGGSADLTGSNNTKTKNHKIIKPGNFSGNYIHYGVREHAMCGVMNGISLHSNLIPYGGTFLIFSDYCKPSIRLAAMMKQRVIYVFTHDSIGLGEDGPTHQPIEQLTSLRSIPNLNVFRPADMIETFECWQIALENKNSPSVIALTRQKINPVRRKKSSKNLSSLGAYEILRSNNKIKLTILSSGSETSLACEISHK

SEQ ID NO: 110268 - protein, 390 aa, Unknown
  Bacterial polypetide isolated from the Sargasso Sea
CAGHPEYHPNSGIETTTGPLGQGIANSVGFAIAEEILKKKLGSNLINHKTYVLAGDGCLMEGISHEAMSLAGHLKLNNLIMLFDNNSISIDGPTSLAVSDDYKNRFKSYGWNYILINGHNYREIYNALKKAQTSKKPTVISCKTKIGFGSPNKGGKASSHGSPLGIDEIKLVRKKLDWDYKPFKIPQKILTDWRKIGEKGVKKEKIWNKTFSKHKLKFKSIIKNKFSSSIIKQKKDAIKNFKTIATRKSSEEFLSAIIKERNTLIGGSADLAGSNNTKTKLHKIINSSNFDGNYIHYGVREHAMSGIMNGLALHSNFIPYGGTFLIFSDYCKPSIRLSAIMKQKVIYIMTHDSIGLGEDGPTHQPIEQLAALRSIPNLNVLRPADSNRNN
